United States Patent Application Publication US 2007/0192889 A1 - sequence listing, part 9

SEQ ID NO: 18136 - protein, 511 aa, Oryza sativa
  Clone ID: TF_OSC400103j.C1.p2.fg
MALSTLLLPSSSSSSSKTATATDTSDRRRHHHHHNHTKRKKKPPPPPLSPTPRTPPPAGSGSHRAMAASSKKSTKQVVVAAKTTTGHRPKKAAAAPTTPSRGAPSASAAPVSSSWEQLKSLLSCRSATAAARVHDPAAPSSALSRLRSHGAGACGASLCAIRDVVDAASSASAASTAAASLDRDTTPLTRSSRRAHRAATSSSGGGGGHHASLRGLSGCYECRAINVEPMSRRYPRPRELCACSQCGEVFNKADSLEHHQAIRHAVKIGWQKYIKRYLCLAIFCMLAVASASPFVEVSELGPEDSGRNIVEIIFKSSWQKRDRPICQIDRILKVHNAARTVARFEAYRDAVRTRCRATAARAAADGNELLRFHPAALACPLGLNGATSLCDDDDACGVCAAIRHGFAPWAGAHPLGVRTTASSGRAHDCGAAAAAAQQAGGCRAMLVCRVIAGRVRRNDDDGGAEEEEGAFDSVAGDEAASSVYGNLEELFVANPRAILPCFVVIYRVVPE

SEQ ID NO: 18137 - protein, 404 aa, Oryza sativa
  Clone ID: TF_OSC409369j.C1.p1.fg
AAPVSSSWEQLKSLLSCRSATAAARVHDPAAPSSALSRLRSHGAGACGASLCAIRDVVDAASSASAASTAAASLDRDTTPLTRSSRRAHRAATSSSGGGGGHHASLRGLSGCYECRAINVEPMSRRYPRPRELCACSQCGEVFNKADSLEHHQAIRHAVKIGWQKYIKRYLCLAIFCMLAVASASPFVEVSELGPEDSGRNIVEIIFKSSWQKRDRPICQIDRILKVHNAARTVARFEAYRDAVRTRCRATAARAAADGNELLRFHPAALACPLGLNGATSLCDDDDACGVCAAIRHGFAPWAGAHPLGVRTTASSGRAHDCGAAAAAAQQAGGCRAMLVCRVIAGRVRRNDDDGGAEEEEGAFDSVAGDEAASSVYGNLEELFVANPRAILPCFVVIYRVVPE

SEQ ID NO: 18138 - protein, 261 aa, Oryza sativa
  Clone ID: TF_OSC400700j.C1.p5.fg
MAAPHGMHGVAAAAPDATIRLFGRDVVSNDDAVVVVVDGQLPKEEAEEEAGGGAAAAAGETRRFECHYCRRNFPTSQALGGHQNAHKRERQHARRAHLEASLAAAHYLGQSAHLVYGGAALFGYGGHAAAVSPQYGPVWASSAVAPPGLYATSMGMARPAAYGAGVDVSALWRASSSSSSSPPMMGSGGGGAFGTVAGGGRHGEAAAAALVGCRAGKDENVVMSVVTSLPSLPSWQLPAPEKMGRSELGQEAGVVSLELRL

SEQ ID NO: 18139 - protein, 225 aa, Oryza sativa
  Clone ID: TF_OSC400939j.C1.p50.hg
MAPTSSTEEVKHLTLHHLLKRQHRLKPAAVVWRWPTSVVPGGGAGRPPVPDEQLAADDVDGLGGTWPPRSYTCAFCRREFRSAQALGGHMNVHRRDRAKMRGHGLHGAAGQQLGAAEAPAAAAAARTEYAVALYPILNSGAGGAAVRIPHGDVLLSAPVALAAARRGHDHRCIDVGDDENDKKIDLELRLGILMTIKMRDDRQAVKQTSEAVAGTSRKRSSRRGV

SEQ ID NO: 18140 - protein, 195 aa, Oryza sativa
  Clone ID: TF_OSC101556j.C1.p17.fg
MSQKTSKDEVIGGRSPSGDGDKAEEELREARSGDDDDDDEAGTRQPYNCTFCRRGFPTAQALGGHMNVHRKDRVGRATPSSSSSTTAAAARRSVSYDTLVRLFRPPASGGSEDAAASTAAGGGASLRSRTAEPAPQELRLFGRGAGRREEGGGRDRRDRYGCCSKDGDGNGGHDHGEEEELDLELRLGGSGSAGS

SEQ ID NO: 18141 - protein, 339 aa, Oryza sativa
  Clone ID: TF_OSC400464j.C1.p1.fg
MEASAAKEKDKDGKKMSRVGSWGSMAFYSSSSSSRSQPVSAAEGKNGGKKEKRRSSISRSITCAGSICSTKESSVSSRGRGRRRRSGGGGGGDGGGGGSTSSRSLMGPGYHGDSAAAVSASSSFNAVMTAATSATATTTTTTTSSSATSPPSALSSPLSSIGGSFRAMQIRKLSGCYLHCHSVLDPRTLAAVVFSCPDCDEVFVKPDSLELHRSTRHAVSELGADDTSRNIVEIIFQSSWLKKNAPVCRIERILKVQSSDKTIKRFEQHKEAVKEKARSAGDEAGRNPRCVADGNELLRFHCTTFACSLGLAGGTALCCASSSPPPLHCKLCSIIKDGF

SEQ ID NO: 18142 - protein, 412 aa, Oryza sativa
  Clone ID: TF_OSC900002j.C1.p28.hg
MAFYSSSSSSRSQPVSAAEGKNGGKKEKRRSSISRSITCAGSICSTKESSVSSRGRGRRRRSGGGGGGDGGGGGSTSSRSLMGPGYHGDSAAAVSASSSFNSVMTAATSATATTTTTTTSSSATSPPSALSSPLSSIGGSFRAMQIRKLSGCYLHCHSVLDPRTLAAVVFSCPDCDEVFVKPDSLELHRSTRHAVSELGADDTSRNIVEIIFQSSWLKKNAPVCRIERILKVQSSDKTIKRFEQHKEAVKEKARSAGDEAGRNPRCVADGNELLRFHCTTFACSLGLAGGTALCCASSSPPPLHCKLCSIIKDGFRVDGNGRITTMATSGRAHDTAEVSPDGEKRAMLVCRVVAGRVKKLHSSNSSEDHDCDSATLDTSGIKTEGQKDRNTKMSATLNDDEASKILLSPEPD

SEQ ID NO: 18143 - protein, 198 aa, Oryza sativa
  Clone ID: TF_OSC400555j.C1.p31.fg
MAPVMSSPGQQEAVASPTAAPTAARPYYGCVFCKRGFTTAQALGGHMNIHRRHRHRAMPSRRPTATGTTSMVSRDDVDCYNQHRYLEYSPPPPTPAPPPVTSPPMSSSFAATSYAGGTATVAGVDGEAMRAAGSSDSHIRELSLLGGADSSTDRDHDLHLRLGRHGRGGDGSPRTPEGSPERKPDLDLELRLGRRPRH

SEQ ID NO: 18144 - protein, 267 aa, Oryza sativa
  Clone ID: TF_OSC400851j.C1.p59.fg
MSMTSPRLKLFGFDVSEEETAEHEEQYSAEPESAPVCGGNGGGGGGGSDSSSSSTTTTTTATAGGDGRRYECQYCCREFANSQALGGHQNAHKKERQQLKRAQLQAAAAAAGRVAGGAAALYPRANPMVSAFAPTPHLLGGGEAGPTSWVYFSPRAAAVAGGAQGQQFHVSHGCVFPARGAGPAAVAAASPAVFSYTPATSAAAVAAASAPYVTTDEHHGRRIHASSAASLARYPGPAMVVAEPVATVPEDTCLGLDLQLSLAPAGL

SEQ ID NO: 18145 - protein, 167 aa, Oryza sativa
  Clone ID: TF_OSC900255j.C1.p9.fg
MDPSSASWPAPASPPVELSLSLPAAAARNRDEAAPTAIVDGKQVRLFPCLFCAKTFRKSQALGGHQNAHRKERVAGGSWNPNVYGDGGGSASMPIASHGVTAAGSSTAADGRWCGGAASDDDTTAAPMPSLGSGSAALGAGAGFASTERGSSGGGVAGEELVLELGL

SEQ ID NO: 18146 - protein, 240 aa, Oryza sativa
  Clone ID: TF_OSC401400j.C1.p15.fg
MKSSSQEAGEEVSEISSQAASNNNETCNSSSGKVSLDLSLTVAAAAAAAASATESSTTDSGGTRPAATATATAREPARVFTCNYCQRKFFSSQALGGHQNAHRRERTLARRAVRLDAFPYGYADVASLPLYGAGLYPIGIQAHASVHHHHPGVAAPAGRAELRSARALLGPMPFFVQAAGDEDASFGWPGSFRPPPTAATTIPAAAAAPVAVNSGSSNSNHGGSVVVQAAADEPDLTLRL

SEQ ID NO: 18147 - protein, 242 aa, Oryza sativa
  Clone ID: TF_OSC400758j.C1.p29.fg
MAGVVQTVQCDQPSKQQLTEAAEAAAAAAAAASLRIFGYEVGGGGGGGGVAAAAGARREAADVVVGAGRRFECQYCCREFANSQALGGHQNAHKKERQQLKRARLQLAVAAAGTPAGMGFAAAQAPAPPPGHVIAVGHHAGSVASYALPRWVYLAAHHLQPPAVGLPFHATVQAAAGACHGGGDVETRLLSVAAAGRGSSTAGSSAHSYEVCAPAAPADDSDEEASAMGLDLHLSLAPASSA

SEQ ID NO: 18148 - protein, 125 aa, Oryza sativa
  Clone ID: TF_OSC401716j.C1.p200.gp
LITWLIKLAIAMSKRSRSMWDMQEFVGSVDTARVLMLLAQQSQHGLLGGGGFAAGAQPVVVRGGAHDRVFECKTCNRQFPTFQALGGHRASHKRPRQQQQHALGGGAGADDAGLCLGRQPTPPRP

SEQ ID NO: 18149 - protein, 188 aa, Oryza sativa
  Clone ID: TF_OSC409799j.C1.p26.gm
MGEGRWPAATEAVGAKEVAAGVGDLVAAPNMARRCPSADEDDDAGEVKTPNDGLPEKVVVDMSSPASGGGGRRLFPCLFCEKKFVKSQALGGHQNAHRKERGAAAAAGCLNPYVFYGAGAGAAPAPATLSLLLQVDNSYTTTSYIDEHGRAAAPPPPNSDHFFWTTAGAASRGGAGAGGEVDLELRLF

SEQ ID NO: 18150 - protein, 454 aa, Oryza sativa
  Clone ID: TF_OSC100047j.C1.p3.fg
MAGGGRCSSLLRGFVSLFFLLFIHIGHAGCCFSTGSSTQTLEEDDTGHGADGRGGGGGGSKRRKISPLAFSPSVSSSTVADERSRARRRQVSSLATSVRFYLHRIFSYSSGAKNGAGAPAAEEEDEAVTTTVSSPLAQSSSCLPQRQASSSVVLSTPSSPCASPFLSPLSPQSLSITPAVPSSPHNRQIPQATTRQSSFRSFAARGDVFPCKVCGEVLSKPQQLELHQAMKHSLSELSSLDSSMNIIRMIFLAGWKPAVMPGAGEPPSVRRILRIHHNPRVLTRFEEYRDLVRARAARRCAGAGAAAVEERCVADGNERLRFYCSTMLCTLGAGVCGSPYCCTCSILRHGFAGKQADVDGIATYSSGRAAHASLPDDVEREFAFLQVRRAMLVCRVVAGRVGRGAADDKVAYDSMVPLLPTSSFAAATRGDDDVELLVFNPRAVLPCFVIIYSC

SEQ ID NO: 18151 - protein, 316 aa, Oryza sativa
  Clone ID: TF_OSC25771j.C1.p3.fg
MASEWDSPCQFCGKNFKRRGDLLNHELTCKYISDVHPQTESSGDAQARKDILGFHIPRQKRTVPAFPASDYAQGGINGATNDEPAASNNPDQVLKMCSDKGSSPVECYGGDERRVGACAIAGVEEDDLSPNVGCRGVTDCVDESNVIQKQKRQPDLSVADLRDLVEMKQQNMKADTNIHDQGHPSVMQMQKNELSLDLLPHKNSSDHEVPTLSVSSMDDPDGLVSTDTNSDKETETVNVGIDINIPEQRESSVTRMQNEKLGLNLLPRNDSSGHEVPILSVSSTDDLNSLIPTDTSSDKDTNSNVADRLGHCPAQE

SEQ ID NO: 18152 - protein, 360 aa, Oryza sativa
  Clone ID: TF_OSC900043j.C1.p16.fg
MASEWDSPCQFCGKNFKRRGDLLNHELTCKYISDVHPQTESSGDAQARKDILGFHIPRQKRTVPAFPASDYAQGGINGATSEVKVDWDPEEETDVLEALLLLREQPAYPGEETFSDDEPGAGNVDDEPAASNNPDQVLKMCSDKGSSPVECYGGDERRVGACAIAGVEEDDLSPNVGCRGVTDCVDESDVIQKQKRKPDLSVADLRDLVEMKQQNMKADTNIHDQGHPSVMQMQKNELSLDLLPHKNSSDHEVPTLSVSSMDDPDGLVSTDTNSDKETETVNVGIDINIPEQRESSVTRMQNEKLGLNLLPRNDSSGHEVPILSVSSTDDLNSLIPTDTSSDKDTNSNVADRLGHCPAQE

SEQ ID NO: 18153 - protein, 175 aa, Oryza sativa
  Clone ID: TF_OSC413151j.C1.p3.fg
MEFGMVEDAAAAAGEEGLTLSLSLQPSPPRFQALFSCCYCPRKFRSSQALGGHQNAHKLQRNLARRGREAAASLAAAAAAAAAAAASSGDQQQQGRTTAAAAAVLAGGESAPPAAARAAADLDGAGVWGGAGMRGRPAHHHRLMQGGYSSGGSSAAGGRGNGELADEMIDLSLKL

SEQ ID NO: 18154 - protein, 134 aa, Oryza sativa
  Clone ID: TF_OSC101188j.C1.p1.gm
MASRHVYPRLPSPANREASSLWDPPRRASEMDSPSPMAAQAADLSLTLAPSGGGGGGGGGGGGGGSSSACIDGKDVRLFPCLFCNKKFLKSQALGGHQNAHKKERSIGWNPYFYMPPTPHPAGNAAAAAAAATP

SEQ ID NO: 18155 - protein, 210 aa, Oryza sativa
  Clone ID: TF_OSC22205j.C1.p1.fg
MEAPPSLSIVDEDGFVIDLSLTLGLTSPPPSPGGASPSIPPGRGGGGGTSGGDNNRGSRGGGNGGGGGGVRLFPCLFCNKKFLKSQALGGHQNAHKKERSVGWNTHLYLPAGVAAATTTTTTTTAMAVPDMVGMPTHQMSSMALHSCRPHQGSHVTAADIATLAAPPHYTVDHGVAGIASGGGDSSVGWRQRQREAGGEKQRQVDLNLKL

SEQ ID NO: 18156 - protein, 300 aa, Oryza sativa
  Clone ID: TF_OSC409246j.C1.p4.fg
MSVERDGRDQPNIDSFSQLPFIRQAAREKPPSSSSGGSVVVPPAPIRLFGFDVPPDASTTADVLGENKESAAAVVAAEGSKQTASGLDAIGGGGGSRKFECHYCCRNFPTSQALGGHQNAHKRERQRAKHAQFQTAMAMHHGHGQYYPLPDPYAAAFAAYPGHHHHHRFAATAAAAMPPPPHYPSWAAGSRYYSGPGSISQPINGSPVAPAGMWRLPAAASCVGLATTTTTAAPLPARRQERPAATIPSLLGGGEEPVVLGGAGSTSFSPSTSSSSSSASPHERRAQPARKENVSLDLSL

SEQ ID NO: 18157 - protein, 279 aa, Oryza sativa
  Clone ID: TF_OSC900375j.C1.p18.fg
MAKPQDMRSVDSFSQLPFIRPAPPPQQQARDTIRLFGCEFSNDLQLRPTEAGAGSPDAANGSTVTSEGSNGGDGGTKNGGAATAAAERKFECHYCCRNFPTSQALGGHQNAHKRERQHAKRAHLQASLAMHRYMPGHMYGLFNYHHHIGGRFDHHPPPPPPPPPPAHYPMWTSAAPGAFAGPGSMAQPINGSPVQAGLWSVPPPTENFGSTAGRQGADKLATTVAGTPAAGEVACKDEMVPMSLLSSSPSLSSCSSTSPEMLGRCELGQKEGVSLDLHL

SEQ ID NO: 18158 - protein, 135 aa, Oryza sativa
  Clone ID: TF_OSC900062j.C1.p13.fg
MEVNRGEEEDVNLELTLCYTSASSPEPIGFFLCMYCDRKFYSSQALGGHQNAHKYERSLAKRRREIAAALRAHGAPPPPPAPGGAGAAAAQKAVGVEAQQKHQHAPVVGGFARGGGKSSPPAAEYGDGLDLSLRL

SEQ ID NO: 18159 - protein, 665 aa, Oryza sativa
  Clone ID: TF_OSC400992j.C1.p60.gm
MEEFELQQQPYYSKLLLGSPLEIANVDDSDLQLVAGVPSDPPPAPPTAVKKKKKRSLPGTPDPSAEVVALSPRTLLATNRFVCEICGKGFQRDQNLQLHRRGHNLPWKLRQRGGAGGGGGGEPPRKRVYVCPEASCVHHSPSRALGDLTGIKKHFCRKHGEKKWKCDRCGKRYAVHSDWKAHSKVCGTREYKCDCGTVFSRRDSFVTHRAFCDALAQENNKLAQPMNMAAVTSALQGQQQAHHPVADDDDAAGVKSPHLKMFPDVDNIVAAATAGNPLLPPPLSMAGCMLSSLAAPLSSPFLPGCKLGVDAARDAAMVFPPPPPPAGSAAAIMSATALLQKAAELGATTSTGCYGGVAFPAMGIAGGLDRLPAIGHHLAPYDDVVVPAALQGQTATQLVGFDLGGLLPGQLYGGGGGAMTRAIGSLMHGGDQHAALDHRACSKIPRFRMEDGGKHFVFVHGLGHGAWCWYRVVAALRAAGHRATALDMAAAGAHPARADEVGSLEEYSRPLLDAVAAAAPGERLVLVGHSLGGLSLALAMERFPDKVAAAVFLAACMPAAGKHMGITLEEDLTLATMLVRPGTNYIDDPIMKDETLLTEGNYGSVKRVFLVAMDDASSDEEMQRWTIDLSPGVEVEELAGADHMAMCSKPRELCDLLLRIAAKYD

SEQ ID NO: 18160 - protein, 459 aa, Oryza sativa
  Clone ID: TF_OSC401656j.C1.p8.fg
MSVGADPEAEVIALSPRTLMATNRFVCEICGKGFQRDQNLQLHRRGHNLPWKLRQRSGKEPRKRVYVCPEKSCVHHNPSRALGDLTGIKKHFCRKHGEKKWKCDKCSKRYAVQSDWKAHSKTCGTREYRCDCGTLFSRRDSFITHRAFCDALAEETARLNAASGAAAAAAAATATSLCGQSYLFAGSGGPGMAGMRPNMMMPPAAAAAGGQLRAGQMLGPAAGGVGGDLCDGGVARHGGLSLWGGEALPSMGHIGVLASGGAATVPPQLYVDLFAPSSGAPPPQFDAAQLSWLYGNGKLSSSNASELTSATAAAKEAESVPSVFSNQQHAKPAAPTDMSATALLQKAAQIGAVTSTAAMPLVSPFEPTKPGGATASPADECGKFDGAALFAAASHHNANLGGAMSELTGAAGNVPYDVLSAVRHHAGLKDAGGVGREETRDFLGVGVQALCSSSIHGWI

SEQ ID NO: 18161 - protein, 206 aa, Oryza sativa
  Clone ID: TF_OSC420432j.C1.p6.fg
MSKRQFGEMDGGIDTARVLMLLSRRRRQHGDVGHARAARVFECRTCGRRFPTFQALGGHRASHKRPRHGAERAPRPAGDDDVGAGAGAALRLVGAASSLSTDEARAGGGGRRTRGAGAAHGCPVCGLEFAVGQALGGHMRRHRAAAGDVAAPRVKTDDVVVGDECTGGICLDLNLTPSENCDKCRHAQLGVAVNSVQRTILLDRPL

SEQ ID NO: 18162 - protein, 586 aa, Oryza sativa
  Clone ID: TF_OSC414116j.C1.p1.fg
MTYIPVRDGLSVTGVSSVTELERLARLEEEGEFLVVREEVGVVTGGARAEADIMLSSCAPTAVPPQDASGAATEPFRSLQIATAGAAAKKKRRPAGTPDPDAEVVSLSPRTLLESDRYVCEICNQGFQRDQNLQMHRRRHKVPWKLLKREAGEAARKRVFVCPEPTCLHHDPSHALGDLVGIKKHFRRKHSGHRQWACSRCSKAYAVHSDYKAHLKTCGTRGHTCDCGRVFSRVESFIEHQDACNAGRPRAAEASSSPGRGGGVVVGAPAAASSSQQQQLFAVPASLSRTASSASPSSDLVVSPVAWPATGGGGPAMVSPRAAAPAPAGGSIAAFHHRFTDPALSPPTPCGGRRGGCHTTHSLELQLMPPRTTTTCAGGSLGGTPVATAVGYYASSSPHSPAAALPSRQPVADAMRLQLSIGFGGARDDGNNNSSSSSGEVSASATRLKEAAHEQLRLAMAEKAAADEARAQAKRQAELADQELATARRMRYQAQVELSRAHVLRDHAIRQVDATQLQITCYSCSHKFRARAAAMISSDVASYVSSVVTEGGDAEVDNDGNLHRRRLNADDGMPRGHSRTMAMDLN

SEQ ID NO: 18163 - protein, 304 aa, Oryza sativa
  Clone ID: TF_OSC101118j.C1.p4.fg
MAQQHSPPPPPAPPSPPPALPCDPMPPPPRHDDTTLTLSLAPPAAARPLQAMVARAKCSSPTGDAPPCTECGRQFLSWKALFGHMRCHPERHWRGITPPGGGGAGAASSTAASQFTLREREVAASLLMLSGAHPARSGAGKGKGKKRLLAPAAAAAPHHSPATCADHKCAVCHRGFATGQALGGHKRCHWPDRSCADQAISMLAVSTAGSSSTTTTSASPPPAPATAATALDLNLNLPPPLALWCILLLLDLCLLNSIRGISGSLEWKSLQVLSFGYVCLVQIRAFLIVLNTEIGVLIDQKSAF

SEQ ID NO: 18164 - protein, 531 aa, Oryza sativa
  Clone ID: TF_OSC401442j.C1.p12.fg
MAAASSAHYFGLGEPQMQQQQQQPPLQNNAAAPVAATPPPKKKRNQPGNPSKFVCEVCNKGFQREQNLQLHRRGHNLPWKLKQKNPKETRRRVYLCPEPSCVHHDPSRALGDLTGIKKHYSRKHGEKKWKCDKCNKRYAVQSDWKAHSKTCGTREYRCDCGTLFSRRDSFITHRAFCDALAQESGRIMPPMGAALYAAAGAGMAIGGLTGMAASHQLQPFQDHSSAITTAANAAAQFDHLMATSSAAAGSPAFRAAQPTSSSSSPFYLGGGGDDGQAHTSLLHGKPAFHGLMQLPEQQGSNGGGLLNLSYFSGGNGGHHHHHQEGRLVFPDQFNGVAAGNGARAGSGEHGNSGNNADSGSIFSGNMMGGGGGFSSLYSSSDQTVPPPQMSATALLQKAAQMGATTSSGGAGSVNSLLRGLGSGGGGGALNGKPAGAAGFIMSGESSSRSTASQTAENESQLRELMMNTLSATGGGTGAGTVFVGGGFPGVDDGKLSTRDFLGVSGGAPGLQLRHGGAAGMGMAGSLDQEMK

SEQ ID NO: 18165 - protein, 1349 aa, Oryza sativa
  Clone ID: TF_OSC422884j.C1.p2.fg
MSLQPPAVEPPEWLRTLPVAPEYHPTLAEFADPIAYILRIEPEASRYGICKIVPPLPRPPEDDTFRRLQAAFAAAASSNGDPSPTFPTRLQQVGLSARNRRAASRRVWESGERYTLEAFRAKAAEFEPPRHAAPPRNPTHLQLEALFWAACASRPFSVEYGNDMPGSGFASPDELPDAANATDVGETEWNMRVAPRARGSLLRAMARDVAGVTTPMLYVAMLYSWFAWHVEDHELHSLNFLHFGKAKTWYGVPRDAMLAFEETVRVHGYADDLNAIRVAFQTLNEKTTVLSPEVLLSAGVPCCRLVQKAGEFVITFPGAYHSGFSHGFNCGEASNIATPHWLQVAKEAAIRRASTNCGPMVSHYQLLYELALSLRPREPKNFYSVPRSSRLRDKNKNEGDIMVKENFVGSVTENNNLLSALLDKNSCIIVPNADFFVPSFPVALESEVTVKQRFTAGPCSISQQGAENMAADHVAVDKVTEIQDMSGSLYPCETSLVGCSNRKLYETKYGQRDAAALCLSTSEIQSRGIDTARSHPAGGILDQGRLPCVQCGILSFACVAIIQPREAAVQFIMSKECISSSAKQGGIGASDDTSNWIDQSHEISPPPGPASGTDDNVKHAVSLAHVSDRCRELYASNTDGCTSALGLLASAYDSSDSDDETTEDVSKHSKKNDSVNQSTDPQILETSASCSSTVQCQKTNSHLHEEECEARATSLMKPVSHNSRPISQSNRDTDIDHFIELGKSGTQCSGYLDLVDDLTTSVLKSSSDTCVSAAKASMDPDVLTMLREKKTCVYNYMSNYTKGINCKYPRAESAAKVIAEELGIKHDWKDITFKEATEEDVKKIQLALQDEDAEPTGSDWAVKMGINIYYSAKQSKSPLYSKQIPYNSIIYKAFGQENPDSLTDYGCQKSGSTKKKVAGWWCGKVWMSNQVHPLLAREREEQNSSVVYGKAMFTTISHGKVQDEASTRCNTSNRTPSRRTSRRKKGVSAEKSKPKNKRSTASDEASMLCSGLGMNSGVIHDQTENSDDYDKHGNGDEIEEGTNPQKYQQRKLQNVTRKSSSKKRKDEKRTDSFHELYDEDNGVDYWLNMGSGDDATLGNSRQQSPDPVKVKSGGKLQGKRKSSKYKSNDDLLNEENKLQKMNKKSSSKKQKNDKINRQLQEDQTEDDHMDHLVDVAVADEVTLDNEDKITEDKIDDVKVKSRGKSQNGKRKGSKHQATDGLRAGNKVAKFPCDIEGCDMSFSTQQDLLLHKRDICPVKGCKKKFFCHKYLLQHRKVHIDERPLKCTWKGCKKAFKWPWARTEHMRVHTGVRPYECQEPGCGQTFRFVSDFSRHKRKTGHSSDKRRKNST

SEQ ID NO: 18166 - protein, 471 aa, Oryza sativa
  Clone ID: TF_OSC900043j.C1.p14.fg
MRFLVLWCSRLCSWLVGLVLFVANFSVLLPVSVEFCFLSSEDLSVLQAEETIAEFMFALSYNVHRISSLATVETIESSSFPEQPGVPHLFCFLFSTRIVETRSKKHPDMAPRGKPWKHCCNKCDKSFRSGNALGGHMSCHRSVGNQPKSTSSPPTVVDLHMPLLSSCDDNLLLLPPETQCQMCSKVFSTSGSLREHMMMHGGEKVVVKAEEEAAGLIEALGIADSMQDVMVFSSVKRKRSFRSKRQTPALSLEEIEAADALLLLSGCFDKTSAYEDCYLGDIEDSSLRSIVLTEVNMNAVDRCSVRSVGSKEPINDNNSGYKDCYGQSDKENCLIVPKEEMDPNDFDHELVRDAALRKPRTDNSDEEMKFGDLPAAAMKDNSHRCNTCGKSFGSGQALGGHMRRHYVRKCNRQRGVADHAGSVLMKVQKLKLRLDPILFDVTLPALTDGDCCISVGVKPEPQLWCVTSNLQ

SEQ ID NO: 18167 - protein, 232 aa, Oryza sativa
  Clone ID: TF_OSC100181j.C1.p3.fg
MKCSGIFQGGHHLSNTTATAKNYALDHMMVSSVSDATSEEDVALSLMMLSRDTWPATPPPPPPYRLRGAGYDDGSDGGDAPPAPAAAAAQKRTRFQCPACKKVFRSYQALGGHRASHMRGGRGGCCAPPPNPPPSPATPLQPLPECDGGEEEGAKPHPHECPYCFRVFASGQALGGHKRSQLCSAAAAAASGDDIPAMIKSNGFIDLNLPAPFDDVELSAVSDPFLSSKPGS

SEQ ID NO: 18168 - protein, 246 aa, Oryza sativa
  Clone ID: TF_OSC400958j.C1.p2.np
EATSQTLTLEESEPQASPRPVPPCNCPKSLGGGARSAAARRGRRRGRRRRQIRRHRLSAAELAPERGGEQPVSSPPPDPPAAPEELRFRCTVCGKAFASYQALGGHKSSHRKPPSPGDHYGAAAAAQQLASAGDSKEDSASSAAGSTGHRCTICRRSFATGQALGGHKRCHYWDGTSVSVSVSASASAASSAVTASASGSGSSSVRNFDLNLKPVPETVAAGVRRWGEEEEVQSPLPFKKRRLSSP

SEQ ID NO: 18169 - protein, 558 aa, Oryza sativa
  Clone ID: TF_OSC101382j.C1.p4.fg
MQPSPSSPRAPPPTAAQASGYKHFCRVCNKGFTCGSALGGHMRAHGVGDGDGLGADDDDDDDDDSLGDEAVRRARGGADDPWNAGGPSSSGAATHVYELRTNPNRVTRSRQVCKNCGKEFTSWEHFLEHGKCSSGEDDDDEDDVDHSLQPWSPSPEADGEEDSAPAAGWLKGKRSRRCKGTGVDLSPTPSACAAGEEEDLANCLVMLSSSKVDQAGVTEAEQRSSSSASKEHKRLITFMEPTTYVLDTVMALPPPAPAPQYVSTVPRGMFECKACKKVFSSHQALGGHRASHKKVKGCFAAKLESNAAEVAEPSHHAEVADRSEDNPAKATSDARRNVHASIDGDGNAGTSDAAAELSMAIVPIEPPVAALAAAPLKKKGKMHECSVCHRLFTSGQALGGHKRCHWLTSSSADHTASVPPLADDLVPLSFRPMLDAPEPALDLSIAANPPLLASAATVRPKVGGSSFHLDAPPPVYIPSSPAIPSQRNKATATTGSQNANDAVGLSTAAAEDEADSTTVKRARLSDLKDVSMAGETTPWLQVGIGSSSRGGADDNDKE

SEQ ID NO: 18170 - protein, 726 aa, Oryza sativa
  Clone ID: TF_OSC400149j.C1.p10.gm
MAMVVAGSHRPPPPPQSLRLVPPPPPQPPPPPLTYRHHCKVCKKGFMCGRALGGHMRAHGIGDDNDTMDDDDGRDDDHSLSPCDGGGEPSEAAGSPTTTTTKRMYALRTNPGRPRNCRTCENCGKEFTSWKTLLDHGRCGLDEEDGRLDVSLRSPPLHDGGDENDGEEEEEGDDLTLAAGGWSKGKRSRRAKVMAVGTGSVSELQLPAPSTEEEDLANFLVMLSSSSSSSSRVAQPAIVVDDADQESCASGSKDEERNRFLVPQPISMAAPMMAQMTVIAPQVVPQHISTVPRGMFECKACKKVFTSHQALGGHRASHKKVKGCFAAKLESSRNETSQTQTQQQHVSAAPHDNTRATTSHVITSDISMDANTIGASADADGKAAASGVGAGEIVLAGASSTDMAMMMSVEDFAPTPLAPSAVSPFKKKGKVHECSICHRVFTSGQALGGHKRCHWLTSGATDPLTKLQPVAQDHAMMAAMCHQLTLGRPIFDPTDQRILDLNVPTNPLAEAVAARQQQQQQVAALNDGALCLNAAASVYLQSWTGHSNGSHVNKTTATSSRINDAAGGVTTEDDEADSTSAKRAKIGDLKDMKVAGESLPWLQDQTDWHARISSIFVPAQELSRSPRPEQTDWHARISSIFGPAQELSRSPRPRYWMTDLLQKRGIDSHPVCSFCAQELEMTNHILLDCVFAWQVWLRVLSSSGWAALSPPCGVLESSSQKAIYGR

SEQ ID NO: 18171 - protein, 600 aa, Oryza sativa
  Clone ID: TF_OSC4083j.C1.p1.fg
MAMVVAGSHRPPPPPQSLRLVPPPPPQPPPPPLTYRHHCKVCKKGFMCGRALGGHMRAHGIGDDNDTMDDDDGRDDDHSLSPCDGGGEPSEAAGSPTTTTTKRMYALRTNPGRPRNCRTCENCGKEFTSWKTLLDHGRCGLDEEDGRLDVSLRSPPLHDGGDENDGEEEEEGDDLTLAAGGWSKGKRSRRAKVMAVGTGSVSELQLPAPSTEEEDLANFLVMLSSSSSSSSRVAQPAIVVDDADQESCASAPMMAQMTVIAPQVVPQHISTVPRGMFECKACKKVFTSHQALGGHRASHKKVKGCFAAKLESSRNETSQTQTQQQHVSAAPHDNTRATTSHVITSDISMDANTIGASADADGKAAASGVGAGEIVLAGASSTDMAMMMSVEDFAPTPLAPSAVSPFKKKGKVHECSICHRVFTSGQALGGHKRCHWLTSGATDPLTKLQPVAQDHAMMAAMCHQLTLGRPIFDPTDQRILDLNVPTNPLAEAVAARQQQQQQVAALNDGALCLNAAASVYLQSWTGHSNGSHVNKTTATSSRINDAAGGVTTEDDEADSTSAKRAKIGDLKDMKVAGESLPWLQVGIGISSESKEKNTQE

SEQ ID NO: 18172 - protein, 341 aa, Oryza sativa
  Clone ID: TF_OSC408704j.C1.p4.gm
MTKHPRDGEVISLSLSLTLGAAADSGERKKPRRGSSPAASGSGDFVCKTCSRAFPSFQALGGHRTSHLRGRHGLALGLAAATAKETTKKVQEKPAAAATHECHICGQGFEMGQALGGHMRRHREEAAAAAAAIEILPLSGGGHRAGPNLEVFELGHVRSGIGATTLAVTKESDTRGLGINGASSCQALEGGRANATSGVAVSEECKARFQELRAGRAHRFVVFKIDDAMRQVVVDRVGPRDAGFDELTASLPADGCRYAVYDHDFTVSDATATAAAGEGGEAPRSKIFFVSWSPAAADVRSKMVYASSNEGFKKELDGVQIDLQATDPSELTLDVLKDHTS

SEQ ID NO: 18173 - protein, 135 aa, Oryza sativa
  Clone ID: TF_OSC408704j.C1.p4.gp
MTKHPRDGEVISLSLSLTLGAAADSGERKKPRRGSSPAASGSGDFVCKTCSRAFPSFQALGGHRTSHLRGRHGLALGLAAATAKETTKKVQEKPAAAATHECHICGQGFEMGQALGGHMRRHREEAAAAAAAVHA

SEQ ID NO: 18174 - protein, 423 aa, Oryza sativa
  Clone ID: TF_OSC400255j.C1.p23.fg
MDAGGVELSGVMHRCRVCGKGFSCGRSLGGHMRSHISFGEAAAELGANGGVVGYGLRENPKKTRRLSEFDGDGDGEEVEVEEGGDGGELRACRECGKLFSSWRSLFGHMRRHASGGGGRNHDDDDDDDVDVEDEFGGGEEEEIVAPAPAAVTVIAAPPRRRRRSMRVAAPAPAPAPPRPVLLGGFEKEQEDVALGLLMLSRDTGVWRSPVKAETFEKPEQKKKKATAKQPPPLPLPRNGYGYGYNSDEDSALLQYGGDVAKSRKRRASYHSPNSISSKKKQQPRAAAPAKRTRYECPGCGKVFASYQALGGHRASHKRINTSCSAPKVSPATAAAAAPAPEPSSETYASLSTLSPSASPGSAAAGIGDRKANNKSSAEEEKFGGACSSDELYAELELEQRSPAAAAGFLDLNFPPASSEVGVN

SEQ ID NO: 18175 - protein, 838 aa, Oryza sativa
  Clone ID: TF_OSC401731j.C1.p37.gm
MNRSVCHHLLTQCKTIRELQRIHAQALTHGLHPNQQSISCKIFRSYAEFGRPADAGRLFDEIPHPDIISFTSLMSLHLKLDHHWKAISVFSHAIASGHRPDGFAAVGALSASGGLGDQRIGSVVHGLIFRCGLDSELVVCNALVDMYCRCGKFEPARTVFDRMLVKDEVTWGSMLYGYMKCVGVDSALSFFYQMPMKSTVSWTALITGHVQDKQPIQALELFGKMLLEGHRPNHITIVGVLSACADIGALDLGRAIHGYGSKSNATTNIIVTNALMDMYAKSGSIASAFSVFEEVQMKDAFTWTTMISSFTVQGNGRKAVELFWDMLRSGILPNSVTFVSVLSACSHAGLIQEGRELFDKMREVYHIDPRLEHYGCMVDLLGRGGLLEEAEALIDHMDVEPDIVIWRSLLSACLAHGNDRLAEIAGMEIIKREPGDDGVYVLLWNMKFSIKANMQRHVKEIHEDETATKSNRQFVCKEEGCNKVFKYASKMKKHEESHVKLDYVEVVCCEPGCMKTFTNVECLRAHNQACHQYVQCDICGEKHLKKNIKRHLRAHEEVPSTERIKCSFEGCECSFSNASHDQVKPFACRFTGCEKVFPYKHVRDNHEKSSAHVYTQANFTEMDEQLLSCPRGGRKRKAVTVETLTRKRVTMHGDASSLDNGTEYLRWLLSGESGSRIGRRRAHPNSITPTLAWMRRLEESYTTSPAVAHAGLWADVSTGESGADMRGPPVSGSGEGGRGAGTRGPPVSDSRGRAVHRGPGPRGWSTAGPRNRRPRSPSGPIGRAAMEAAAGLGSASKPTGRPGLAVTARGRRRRRPAAWEAVAAAEGDGARLEAAARH

SEQ ID NO: 18176 - protein, 186 aa, Oryza sativa
  Clone ID: TF_OSC408704j.C1.p7.fg
MKRLTFGAEPEMVDSASIAQEVMLLLARSGGGGAGYVVGHGGEAPRVFECKTCRRRFPSFQALGGHRASHKRPRGGGGGGAAAAVAAAAGEGEAGVALSLAAGTPAVKASRAHGCAVCGVEFALGQALGGHMRRHRIAGAEADEAVSARGGEPAPERNPREARGVVGLDLNAAPADDTGLLLVDCL

SEQ ID NO: 18177 - protein, 217 aa, Oryza sativa
  Clone ID: TF_OSC5483j.C1.p4.fg
MSKRSRSMWDMQEFVGSVDTARVLMLLAQQSQHGLLGGGGFAAGAQPVVVRGGAHDRVFECKTCNRQFPTFQALGGHRASHKRPRQQQQHALGGGAGADDAGLCLGRQPTPPRPQPAKPRVHECPVCGLEFPIGQALGGHMRRHRAEAEAAATTTTTTTKNGDVGKAAAVKACDGGGVCLDLNLTPSENRAKCRNVVGLGAGGQGVHKALAMLDCFL

SEQ ID NO: 18178 - protein, 439 aa, Oryza sativa
  Clone ID: TF_OSC900369j.C1.p21.fg
MASAERRIRMWWRTAGRPKHLWGRRSMLYMGHSRIYMDRYYDPIELHGQPPPLLMIPGGGGGGGGGGISPYLVQSQHGHGGGVDGMEMEEGGGFMGEQPQCHPLLYNLSVLKDRVQQLHPLVGLAVAHNAHAHGPLDVSAADAIIQEIVAAASSMMYAFQLLCDLGTAPTTAPSQETAAASAVVVKNNDHAADAGQMEDDHLMQQQWQQNGSRQHDYSSHAHAPPVFHSETAAPAGATSATDTIIELDAAELLAKYTHYCQVCGKGFKRDANLRMHMRAHGDEYKSKAALSNPTKLLAKGGDETMAAAARKYSCPQEGCRWNRRHAKFQPLKSVICAKNHYKRSHCPKMYVCNRCGRKHFSVLSDLRTHEKHCGDHRWLCSCGTSFSRKDKLIGHVSLFAGHQPVMPLDAPRAGKRQRSSSASVAGNIDDTTGIGMGAA

SEQ ID NO: 18179 - protein, 537 aa, Oryza sativa
  Clone ID: TF_OSC29140j.C1.p1.fg
MAAASSAPFFGLGDTQMPPPQNPTNPALHHHPNPFPAPVDAAAPAPKKKRNQPGNPSKYPDAKVIALSPRTLMATNRFVCEVCNKGFQREQNLQLHRGGHNLPWKLKQKNPKEARRRVYLCPKPSCVHHDPSRALGDLTGIKKHYCRKHGEKKWRCDKCSKRYAVQSDWKAHSKTCGTREYRCDCGTLFSRRDSFITHRAFCDALAQENARMPPIGAGVYGGAGNMTLGLTGMAAPQLPAGFPDQAGQPSASAGDVLRLGGGSNGASQFDHLMASSSGSSMFRSQGSSSSSFYLANGAAHHAPAQDFGPEDGQSQAGQGSLLHGKPAAFHDLMQLPVQHQQSGNGNLLNLGFFSGSNGGVDQFNGGAGNGGQGSIVTSSGLAGNHGGGGGGFPSLYNSSEPAGTLPQMSATALLQKAAQMGATTSSYNAGGAGGASSLLRGASSHGISVGEGPANERSSYQNLIMGSMASGGGGAGFAGSFSGASGFGGAVDDGKLSTRDFLGVGVVQGISGSAAMGPPRHGAAGLHVGSLDPANMN

SEQ ID NO: 18180 - protein, 310 aa, Oryza sativa
  Clone ID: TF_OSC402101j.C1.p5.fg
MSVEDKHAGVVKRKRTKRPRHHAAPASSSESTTTEEEDMAHCLILLAQGAAVPPVLAAPAPAPPPPQPPVVVVKSERYTSRKYTEAATTADGVRAGFYVYECKTCNKCFPTFQALGGHRASHKKPRLPGADDDNVNNVTNTNAIVVKSKPPLTTTTTPSAPSPPPPQADAVVVPDVTTVLSLNNVAAAGSIINKLRVHECSICGAEFGSGQALGGHMRRHRPLHAPPERAATTAATTAATATAPDTKKEGSTSINLELDLNLPAPSDEESVSPPPPPPPPVLLALGGQFNDGKKPILQLTASAALVGCHY

SEQ ID NO: 18181 - protein, 1471 aa, Oryza sativa
  Clone ID: TF_OSC19412j.C1.p20.fg
MPPQPPPAASASASAPDPAVPAWLRGLPRAPEYRPTESEFADPIAFLSRVEREAAAYGICKVIPPHPRPSRRFVFAHLNRSLVSSCDAPAPSPAAASDSSIPPSSSSPPPVSAAVFTTRHQELGNPRRGRPTPQVLKQVWQSGERYTLDQFESKSRAFSKTHLAGLHEPTALAVESLFWKASADRPIYIEYANDVPGSGFAAPVQLQRKKKQKRETAPMDEWEKSSGWRLSNSPWNLQAIARAPGSLTRFMPDDVPGVTSPMVYIGMLFSWFAWHVEDHDLHSLNFLHTGAPKTWYAVPGDRAVELEEVIRVHGYGGNTDRIASLAVLGEKTTLMSPEVLIDNGVPCCRLVQYPGEFVVTFPRAYHVGFSHGFNCGEAANFATPQWLKFAKEAAVRRAVMNYLPMLSHQQLLYLLAVSFISRNPRELLSGIRTSRLRDRKKEDRELLVKQEFLQDMISENELICSFLGKKSVDNVVLWEPDLLPSLTALHPCSSCSKAPEKKGEDGPRIGSTQSSSKDDSSSDGTACMTGTQSKGLSMDSKQAPEGEKLDTDDGDDLPFDLSIDSGSLTCVACGILGYPFMAILQPSRKALEEISLVDKERYKLSCEKEICSNVLPCSPNDGSSGCPLIANRSSSPVENANLSHQDVKPIRSDISLMGKEFNGTLGKHIGTSCSCSSENTIHPYGDTETPEKKIPSDCPGSELSKQSGRGDVNVPDVEGSEETISWNTGCAFARPRIFCLQHALEIEELLASKGGVHALIICHADYVKLKALAISIAEEIEFQFDYKDVALANASKSNLHLINISIDDEGYEEEGTDWTSRMGLNLKHSSKIRKETPESQEQPPLSFWGLFSKPSPISVVSNLKWLCRKARTPYKVIGYASSPDVVATPDKVKPAVTKTQIDTSGNAHENIGSEQTLQQDCVLQESNDVADMCKRPKVNDQDGHSLINIPIAVAEYPMMHQVCERPDSPTTVAVSAGKPTREQCGAESTELSTVKQFLDNGLIAEGGSMNFISNHEHLESDNATSVCKDEQLQVQQDQLAMVLCNNPNTELVAGELHGGAASSTLENEDSCGNTSYCSDTVLKNSEPDTDDQPETCDRSVVLVTPKSSCDQMISSSDRSCSLTLDCPVSTDAAFSSEKLSMAHDLMGSELQAVHNSKAEVVASLTDVKGAKLNSIHTTQLPHESPSSDFIISEGAQSASTTAIPRKNGTSMHTESNSIDILLGVLADESKVSSGKDEVGKASLTLMTLAGNDQSADDVTQDEVAEITDPSHGFCSSDIVSRSIGSSNRTNIICYARRKHKRKSGSEFNINSPQSLGSFVRSPCESLRPRTRPAIVEDMTNETKTAEASTANKRKKAKVEAFQCDIEFCDMTFETKAELRAHQRNICTDESCGKRFSSHKYLKRHQCVHRDERPFKCPWDGCPMTFKWLWAQTEHIRVHTGERPYKCSAPDCGQSFRYVSDYSRHRKKFNHY

SEQ ID NO: 18182 - protein, 538 aa, Oryza sativa
  Clone ID: TF_OSC400277j.C1.p23.fg
MANARVMRDGEMIDGDGDRSSVRSRGGADPDAEVIALSPKTLLATNRFVCEICNKGFQRDQNLQLHRRGHNLPWKLRQRSGKEVRKRVYVCPEPTCVHHDPSRALGDLTGIKKHFCRKHGEKKWKCDKCSKKYAVQSDWKAHTKTCGSREYRCDCGTLFSRRDSFITHRAFCDALAEESAKARAAPPPPADEDGTSASAGAPPPQAPLPPPAPVPAPAPPPPPAAAPAPAAQPEQRDRDAALDQFATPAPAPAPPPVTAPPPPPVAAPNDCVSSSSSGVAPTSQSLLSSMFAPPSVAQAPQYADPIGVGAGGHQERAVPAKPPALCLAPNASSSLFTAPVPADRQQFAPPPPPSPSPHMSATALLQKAAQMGATSSSSSFLRCLGLDMSSSSSAPPSSSGQQQQHHHHHHQETMQVPLPASSLPEWPPRLQPEPSPMLSSGLGLGLPYDATGGPVSLPELMMGQSTLFSAKPATLDFLGLGVSPTGASTSRGFPTFIQPIGGAVSLAGSATVAAETFGAAHGGQANPWERNPSSSPIL

SEQ ID NO: 18183 - protein, 1205 aa, Oryza sativa
  Clone ID: TF_OSC400964j.C1.p10.fg
MRPSPPPAAPAAEPVPPWLRSLPVAPEFRPTAAEFADPVSYILKIEPAAAPYGICKVVPPLPPPPKKATFSNLSRSFAALHPDDRSPSFPTRHQQVGLCPRRTRPGLKPVWRSSHRYTLPQFESKAGATRKSLLAGLNFPASRQLTPLDHEVLFWRASADRPIVVEYGSDMSGSGFSPCAAQPQPPPQQQPTARAAAHLGETAWNMRGVARSPGSLLRFMPEDVPGVTTPMLYVGMMFSWFAWHVEDHDLHSLNYMHLGAAKTWYGVPRDAALAFEDVVREHGYGGEIGAECRGICGHFSRILSLRFQSWEPSNGEMETRSSRIKEKKKCEGEQLVKKMFIQNVIEDNELLSHLLNDGSSCIILPANAHDGPGLSTLRSTDQSNMNSRISHNLCSREEAPEASGCLSPNRNGDTRNCISSDTHNMEGDKGDIMSATGLLDQGLLSCVTCGILSFSCVAVLKPRDSTARYLMSADSNSINNQLSISGGSILADAPTNERNGVISRPYSEHCCNEIMADDAEIDKNSALDLLAFAHGGQPDPEEDPLEKILKIAHGINKSQPNSSNNVGCVGTKLSSSSTERQERPSSQNAHCNGSSVISNGPKGVRTRNKYQLKMVLSEGFQAKDIYSAKEKKVQSEPSSSKGDVKETIDVSGTENDVGCKSTTISVSEHRGSTKNMYSVKEKKVQSKPSSLKGTVKETVDVSGTENDARCKSITISVSEHRGSTPMTNSLAASIVKPDKDSSRMHVFCLEHAIEVEKQLHAIGGSNIMLICRPEYPKIEAEARLLGEEMGLVYDWKGIHFKEANMEDRQKIQEVLRDEEAIPTSSDWAVKLGINLYYSANLAKSPLYNKQMPYNRVIYRAFGCDSPNDSPVMFNTCERKQSHQKKIVVAGRWCGKVWMSKQVHPYLAHRVESQEAEEADRICSYHFDEKHKAEPVGNSSRVEASKRKSSSLTDVTESSNRRGEIPGEETNTKRPKHSQENNLRALETAAEVVVPSPAGTGLRVSSRIANRANKLKSKMEKEDVPSSRPKSNIKEKSSHASGQKSNVQEANANSASHLRAMPPKQKAEAEAKKQIRTPKPPKQAVEYSCDIEGCSMSFRTKRDLSLHKSDICPVKGCGKKFFSHKYLLQHRKVHTDDRPLTCPWKGCNMAFKWPWARTEHLRVHTGDRPYVCHEPGCAQTFRFVSDFSRHKRKTGHSVKKKKKAKS

SEQ ID NO: 18184 - protein, 504 aa, Oryza sativa
  Clone ID: TF_OSC400258j.C1.p6.fg
MASNATRNTDPDQQGVRFSSMDQPPCFARPGQSFPAFPPLFGVQSSSLYLPDDIEAKIGNQFESNPSPNNPTMDWDPQAMLSNLSFLEQKIKQVKDIVQSMSNRESQVAGGSSEAQAKQQLVTADLTCIIIQLISTAGSLLPSMKNPISSNPALRHLSNTLCAPMILGTNCNLRPSANDEATIPDISKTHDYEELMNSLNTTQAESDEMMNCQNPCGGEGSEPIPMEDHDVKESDDGGERENLPPGSYVVLQLEKEEILAPHTHFCLICGKGFKRDANLRMHMRGHGDEYKTAAALAKPSKDSSLESAPVTRYSCPYVGCKRNKEHKKFQPLKTILCVKNHYKRSHCDKSYTCSRCNTKKFSVIADLKTHEKHCGRDKWLCSCGTTFSRKDKLFGHVALFQGHTPALPMDDIKVTGASEQPQGSEAMNTMVGSAGYNFPGSSSDDIPNLDMKMADDPRYFSPLSFDPCFGGLDDFTRPGFDISENPFSFLPSGSCSFGQQNGDS

SEQ ID NO: 18185 - protein, 184 aa, Oryza sativa
  Clone ID: TF_OSC400311j.C1.p6.fg
MAGQVFVHHLGGGSGGDDPTHPWLSLKSSHEMDDAVASWREKLADMAAADERAGRYPCPLCDRHFPTEKAVHGHMRSHPGRGWRGMEPPREPSPGDLALAADGKRYRYVCDRCKAPFETRQALGGHRASHSTKKGCSWHAKQLAMAKPPKNDFDLNHLSLEAIQAAAQEEQAAQEGNKDEEPKN

SEQ ID NO: 18186 - protein, 220 aa, Oryza sativa
  Clone ID: TF_OSC12817j.C1.p4.fg
MALDGKPPVPPPSTPPMDSWACGGRRSKRRGGGGGSSGSSGSSGGGGGGESKKEYLAACLLMLAHGVRDEAEVVGVAAATAKPQHGYECSVCGKVYGSYQALGGHKTSHRKPPSPAAEPAAGEEPSSGGVAGEAKVHRCSICLRTFPSGQALGGHKRLHYEGGAVGDAVKEKNSLKTKAAVATAVLKDFDLNLPAAATTAGDEAESSPPEAKRARLLLLV

SEQ ID NO: 18187 - protein, 378 aa, Oryza sativa
  Clone ID: TF_OSC400553j.C1.p13.fg
MALDGKPPVPPPSTPPMDSWACGGRRSKRRGGGGGSSGSSGSSGGGGGGESEEEYLAACLLMLAHGVRDEAEVVGVAAATAKPQHGYECSVCGKVYGSYQALGGHKTSHRKPPSPAAEPAAGEEPSSGGVAGEAKVHRCSICLRTFPSGQALGGHKRLHYEGGAVGDAVKEKNSLKTKAAVATAVLKDFDLNLPAAATTAGDEAESSPPEAKRALHFWLGDGDGWHDKHAVFRWLASSSGGNNIMGPHDSPARCVEYSYSPTCRYGTFATGGCDSFMAFGMALAKVPQPSNTHVTSLLVFQQGWPSASLSHPGARSISLTFLLRYQSYETHWVSTGYTIPNGYGHGYEFLPANSIGYQSGGQKRVRHKPDAIFICNVN

SEQ ID NO: 18188 - protein, 226 aa, Oryza sativa
  Clone ID: TF_OSC400553j.C1.p12.fg
MGLNEKPLVPPLSPTPVDFRAHQVFPSKHHDFDTSKSRNISGSVAIGSDSEEEYLATSLLMLAHGIRDETKDIRGMGDVKGVGVDTLELVKPSQRAYECSVCGKVYWCYQALGGHMTCHRNLFAQVVAGDELSSDRTMVVKGHKCSICRLEFPSGQALGGHMRVHYVGGVEGGSVKEKNVVKTKVTGALKLVLKDFDLNVPVVATMVGDEAESSHSEAKARMMTLP

SEQ ID NO: 18189 - protein, 487 aa, Oryza sativa
  Clone ID: TF_OSC400431j.C1.p50.fg
MMLKDLAEIQQQQLLAAAEENMSNLTSASGDQASVSSHPAPPPAKKKRSLPGNPDPEAEVIALSPRTLMATNRYVCEICGKGFQRDQNLQLHRRGHNLPWKLKQRNPKEVVRKKVYVCPEAGCVHHDPARALGDLTGIKKHFSRKHGEKKWKCDKCSKRYAVHSDWKAHSKVCGTREYRCDCGTLFSRRDSFITHRAFCDALAEESARAVTAAAAVAGQQQHGGGMLFSQVADVLDHQAAMAMGGHGLMQELCLKREQQQQQQQFAPSWLTAQQQQQQLEAMAGAGNPAAMYGSARLDQEFIGSSTPESGGAQQAGLSFGFSSTSSAPPHPAASSAHMSATALLQKAAQMGATLSRPSSHAHMAAAAAASTHNSSSSAATTNAPPPPPTSNVSSTCVGAGGYGLAFEASHFIAADESSRGARSDRDTGNGVAGAGNDGLTRDFLGLRAFSHGNIMSMAGFDPCMSTTSASSAAPYDHHHHSNKPWHS

SEQ ID NO: 18190 - protein, 214 aa, Oryza sativa
  Clone ID: TF_OSC403427j.C1.p1.fg
MWNLTSASGDQASVSSHPAPPPAKKKRSLPGNPDPEAEVIALSPRTLMATNRYVCEICGKGFQRDQNLQLHRRGHNLPWKLKQRNPKEVVRKKVYVCPEAGCVHHDPARALGDLTGIKKHFSRQHGEKKWKCDKCSKRYAVHSDWKAHSKVCGTREYRCDCGTLFSRRDSFITHRAFCDALAEESARAVTAAAAVAGPPAAGRRDALLAGGGCA

SEQ ID NO: 18191 - protein, 247 aa, Oryza sativa
  Clone ID: TF_OSC423167j.C1.p3.fg
MAVEAVLEASRSSSEEEAEVIVTHGGGGGGGGGGGQVEGWGKRKRSRRRRPQLPPSEEEYLALCLLMLARGRRDGDDVAASASAAAAAVEHRCSVCGKAFASYQALGGHKASHRKPPPPAMVDDDEVVVETKPAAIATPSSSASGVSGGGGGRAHECNVCGKAFPTGQALGGHKRCHYDGTIGSAAGAGASKPAAKTTVAVAASRGFDLNLPALPDVAAAADQRCAAEDDEVLSPLAFKKPRLMIPA

SEQ ID NO: 18192 - protein, 170 aa, Oryza sativa
  Clone ID: TF_OSC408704j.C1.p5.fg
MKHPRQEEEVSLALALSTDCSSTASDSSAAAAGGAARRKRARRRSVVATSGEGEFVCKTCSRAFPTFQALGGHRTSHLRGRSNGLDLGAIGDKAIRLHRAADKEHRDKHECHICGLGFEMGQALGGHMRRHREEMAAAGGGSSADDWVWRCDARPEGIAAEPPVLLELFA

SEQ ID NO: 18193 - protein, 534 aa, Oryza sativa
  Clone ID: TF_OSC401275j.C1.p27.gm
MPTSSPVVATVTCASSPRSSLASLRLPLHDHAVTLVCRVHPSVSLKATLRIHGVGRGGAGLGRSYIPRRERGEVERWGKRREGRRKKVELVSSLASLLFSSSTIDHRSLLIVDLSLPLPLSPLEFQFFQGVEQEMLLLSHGGGGAAAAASDDVLAYHVGVLRDKVQQLEPLVGIVVVSPAAPHGQLRRDAAAMAASSACSVLQEITAAGSAVAHRLEQANAASSASFRRGVAFADDAHAAGGVQMFAAGAHGGGQGGDDEAGASLFHHHGPPAVGAPTVFRAGATTTAAASSSGGGDDDGDGDGEVDVVELEASYLLARYTHYCQVCGKGFKRDANLRMHMRAHGDEYKTAAALTSTGAGMRAAARRCSYSCPAEGCRWNRRHPRFQALKSVVCAKNHYRRSHCPKMYVCGRCGGKQFAVLSDLRTHEKHCGELRWLCSCGTFFSRKDKLMGHVALFAAGHAPVPVAPEASPSTTTTGTTTDRSPVAGFAGSTTSCGAAADEKAERAGTRRGGSLSSSTAFLPSRSGRRSTPHA

SEQ ID NO: 18194 - protein, 339 aa, Oryza sativa
  Clone ID: TF_OSC20545j.C1.p8.gm
MGERPLAIAAGRDPMFVTAYAVHPDGHDSDFLDFLLELMAVGKMKERVNVLISLPTMEVATNTATRSPVKLMLVLTLSPASKVIAKGGGGVKRVHLDGGAFQCRTCGRRFSTFQALGGHRTSHKRPRVRADGLDLLLGARPGKLGAGGASTPVVHRCDMCGKVFATGQALGGHMRRHRPLVSRNGTMSTTWTAAAAAAATMSGSSSEERDDDDDDDVHNYNFIHFFDVFVVVTAMDQQEDYTSDLQLELEEEEDDNQLSQLAELDVQLSLSLACGSTTAMSSSGDEEDAEPRRRRRDEEAAAAAFECRTCGRRFPSHQALGGHRTNGPGPRWPHEEASA

SEQ ID NO: 18195 - protein, 181 aa, Oryza sativa
  Clone ID: TF_OSC100641j.C1.p1.fg
MALAAAARGESTALALALAPPPPELHFRCSLCGKAFASYQALGGHKASHRKPSAAAAAPPAHRDVVVAAAPASSGRVAADADAASEADGRRRRHVCSLCRRGFATGQALGGHKRFHYLHGPSVSATVSSAATAASVGAAFDLNVAPIKEIAGEQRRCGEEADDDDEAESPSPAKKPRRRPG

SEQ ID NO: 18196 - protein, 327 aa, Oryza sativa
  Clone ID: TF_OSC400255j.C1.p6.fg
MEGKSSSRHADPLEEVEMNSASATEDDDGCRYVFQSRRDSDNDNDDEEGVLPATACKRRRRLDDILALLPSPPTPSTSSGSEGTISDRDHGGDVIGAGDDDAAPVAARREASFPCHLCNKEFGSRKAVHGHMRVHHAENEKEPMSLPPQVAAPVHPQARLPTRGASRSGGPYKCKYEGCIMEYESHQGLGGHVAGHINRDKMATASGSGGAGKPKGKHPCNVCGKEYPTGVALGGHKRKHYRKDLDLTLSLAPPGQLAAPPTPTPAPAPAAIAAVEAEAEVAEDGDGGELVPTTPPTGARRNVVVRIWGVDLEKPVDDVEEQDSGSN

SEQ ID NO: 18197 - protein, 198 aa, Oryza sativa
  Clone ID: TF_OSC416144j.C1.p5.fg
MKRFAFEDSDMARVLMLMSSHGQQEQALALPVPVQLPLAAARGDRAPERAFVCKTCNRVFPSFQALGGHRASHKKPRLDGDGDLSLSKPKLHGCSICGLEFAIGQALGGHMRRHRAMTGGMPRAIVVDKKPDVVDVHVHGHDDDGGIKRGGLWLDLNHPPCDDAGDDDAECGHNAAGAGITFHQFLDTGAMAVDCVGY

SEQ ID NO: 18198 - protein, 181 aa, Oryza sativa
  Clone ID: TF_OSC420432j.C1.p4.fg
MASGQRAVGEGSGGLRPTTHVAGGGGSARGEYFRCKTCSKTFTSFQALGGHRTGHTRMAARQRQEHGAAGAAVVGATNNQRRVVSAHQWHLCAVCGVEFRMGQALGGHMRRHRGEAAAATPPPAAAAASAGAVSSMEPPEMIDLNSPPAVEEAGEGDQRLSVRNRSPICLICSCRVVFSVW

SEQ ID NO: 18199 - protein, 311 aa, Oryza sativa
  Clone ID: TF_OSC101382j.C1.p3.fg
MAKNTCKLCYRRFGNPRALAGHMRSHSVAASRSQISSTSSASTSVAVGDDDGGGDAKRPIQGYVLREKPKRRVRLAESDFSDRESETEYYSSPPHGKRANTGSGDVEQVSSVSDATSEEDVALSLMMLSRDTWPATPPPPPPYRLRGAGYDDGSDGGDAPPAPAAAAAQKRTRFQCPACKKVFRSYQALGGHRASHMRGGRGGCCAPPPNPPPSPATPLQPLPECDGGEEEGAKPHPHECPYCFRVFASGQALGGHKRSQLCSAAAAAASGDDIPAMIKSNGFIDLNLPAPFDDVELSAVSDPFLSSKPGS

SEQ ID NO: 18200 - protein, 473 aa, Oryza sativa
  Clone ID: TF_OSC14402j.C1.p1.gm
NSRAAQPESTCREMAVNSGDRARARGHHGDDDEEGVAVVGEDYPYCSDSDSDDDDDVDRYVFLARQPAPPVDRDDAEADAGAEGTGCCKRKRRVVDDDDHDDGFSPRQPALLDGSGGQAAEEEEDAEGSSDDDDAMAPRGEAGGGGRGRGVGKVSRKKARLVDLIRSPLLPAELDGSDKAAPPPPRGVCPKKIAVVVQAKNRKRRRFVDGGEEQEPQPQPPVRGKRSRGPDLEASEGLQTASAAAAAAAAEAAERASKRFVCSICGRCFGSHQALGGHVLGHKKKAKNAAIAAAARDATTTAVTEAVAPASQRQSFFAADINGQDERGCDGAEGSRYDDDEEKSPVVVDDVAACHDADVDESRGHGKAESASAIDAGGDAGNNKVAHGDGEENDKIAGVVVASSHDGDSDVGKMKIVQHKCDECGKVCLTGQALGGHMIKHRRTRPAANGGEGPATATVADGGAQTVRLIGDD

SEQ ID NO: 18201 - protein, 246 aa, Oryza sativa
  Clone ID: TF_OSC407916j.C1.p1.fg
AFSLDFNLRSHLKTHALENYHVCPFPACGKRFTSDSKLKSHVKGHEKTGTPITAQYVPSSDKPQSSSKPATPATTKPTTPAATKTTTPASTKPTTPAPTSFAERPYVCPYDGCGKAYIHSYKLNLHLKTQHPEHGQEENGRIAAHASEHAVNDRANQYNYAEIVDLAPNPKRSKTNSGHKTPSSNKAYNVKISSVLPADISGVKNQWPGKYEDDSEETEEDQGNNIEDGWRYGNQNADDEETEYED

SEQ ID NO: 18202 - protein, 744 aa, Oryza sativa
  Clone ID: TF_OSC410041j.C1.p2.fg
MAQAEKQRWCKLCNKSFPSYCSLGGHMNLHSTRRRKKKPPPSPRKAPPITGASGSRYDFRERCRQRPVAPQSQPDHASSDDEPWTLAPKAECQLCFKAFHSCDALSMHMKAHGHHGRKMVMVEQRASRKTSSANFCGVDDGDHGFAAVSYAHCKRARSKRIRMDVFPAPVVVVTHGTQVEDAACILVMLSKDAYKGSDSLDEDPQMDGSLECGPQKTEMEPSSYRLGVTGDTELIKPENSSSYEEIKFGSLSNVLKATAIHECRLCGKVLASGSALGGHMKSHSVPAHKKVATFPKTSVTPSRKQLLEVQNELHELNLPALSNRDCSSTRTESELNPWWVASSIQILLLQYLNVMRSIKMKHDKLWDLTNFPVKLPKDHRETPPSSMPHGSDGARWRPVPHEAPPLPLPRLRREDGQEKRRRWPFRSIARGVKLIVPAPAPALALARGNVLADGGEPGGGRARDVARVAAWQLAVWQPLPPPCRRVGHAVVDQHEAVAVVGDVDRGHVAVGQGGPAPRVVDVAGDGAAAAAGWRGGGAGEELRGVEEVVEVEEDAGEGEREEVLAEAVVDGRAPRRADAAACGEAAQWDRGSRRRTSAIMSSVGMQETRDIHSRDEITFAEDPISWKPKLVIAAVARRRQVETREGGLRVGTAGRGGAGEGLKLPGSGCSAMKMLFAEWSRRHHRWRGLRDRRQWQSHTRGRLCGCCAVSRLRARLSGMRRGRRELQASRQWQHRRGEAGHETG

SEQ ID NO: 18203 - protein, 633 aa, Oryza sativa
  Clone ID: TF_OSC400615j.C1.p24.fg
MPPNPTGTEGEPGPAVEPAPAGAGAAPVVKKKRNLPGTPDPDAEVIALSPGTLLATNRFVCEVCGKGFQRDQNLQLHRRGHNLPWRLRQRGPGAAPPRRRVYVCPEPGCVHHNPTRALGDLTGIKKHFCRKHGEKRWTCQRCGKRYAVQADLKAHTKTCGTREYRCDCGTLFTRRDSFVTHRAFCGALVEETGRVLAVPAPPSPRPPDLEAEENVDKDKDKEEEVKEKEKEKELEENEDSPVAEVDEPQPSQAVAEVPQQCAPSPPPPPPILQEHPQPVVAVVPNVDEQEVVAKPAVIAKIEVEDERDEEVCFQEVDRYKDAELEDSNLLDNDTPMLPCFLPSPSEAIGTDGSSTSCGTGSSVTNAIAPATTTSTFAGLFASVTTSSTPQSRSLRDLIGVDPTFLCLAIGAPSSLFPQTNASDPCSFAPPPAPHMSATALLQKAAEVGASQSSSSFLKEFGLAASTSSSPPSKLSQGRFTTGNTPTTSHPHPHPHPHPHPPQGRFMDNVPQPPPPAKLPHRMFTDNSVQQWHHRSNQQMEMEPGPMLPGGLGLGLTYDTGNSGLPDLMMGPSALYGPKPATLDFLGLGIGGTMGGSTANGGLPALMVGGELDMGSAQAPWEEAKRKTNGRTIL

SEQ ID NO: 18204 - protein, 713 aa, Oryza sativa
  Clone ID: TF_OSC401140j.C1.p27.fg
MAASGQVQCLLPLRVALSPPLPPWPPATMVMPPLLAAAAAMAASGQVRRLLSLRAALPSPWPLATMAPSSSRHRHHGCRCPGFQYAFVREKAAGDHLSLGYMQHGDNNNKKKKGDLSNNLDLSSSPLLMDSRGQAYYHRAAAAAAAVAAGDATDGEEPAAAELAPKAVRSKKKLAVEAQGGAAVRDDLTCPECGKVFMSDKAMYGHLRSHPLRKHKGAARLAAVAAAAADDASVAAGVKPRPWKVPRTKEEAELGDDRHPGRSPVTGKRGRPASSASSSGSAPAPAPPASSRLQLVITEEEEAAMTLLDIASGCSLDHQPTQPAHVADAALLAPASDQMPSVDVEQGVLAVAEHRTWEAEKPALVEHVFGIVKEHVAAVAADAEPQSPEAKTPVKLGPVTDQAVPVLGDKNDDGHADMPVSPGGGTTKKPLKRRLQDVETKHPTAPPPPPVKRIPSPASKRKYECSECHKTFSTHQALGGHVAAHKRQKKSCAEQQQEAVAAAAQVARHNFLAHQRPAGVVVAVDATVVAAAGGGIAIGPLGEEGLVGPPPPPPPPPPPPAPAPALAPAPQQHQCLRCPMVFPTGQALGGHMRKHFLEAKEQEQLLAIDIANANANANANAAPGPPPMMANAAPVPPPSMANGAGPVPPPIAVAPPPAPPIAGAAPPPPMANGAAAAAPPGGNPAPPAGPQPGVNMFDLNELPNEDAGENQQP

SEQ ID NO: 18205 - protein, 322 aa, Oryza sativa
  Clone ID: TF_OSC101916j.C1.p4.fg
MEDYAQTNLISRGHGHHHQPELMKEFPFLSLISSTSSCISSSGQQQQQQQDDDGHGGHDRHQLLRYGCCSCNKQQEEEEEEVTVALRIGLPAVSSASASPSPAMANHGASASSTGVAGDDGGGGAMAGVGVEVESVRRSGGGGGGGQYWIPTAAQILAGATQFSCPVCRKTFNRYNNLQMHMWGHGSQYRRGGTAALRGAQPTAMLRLPCYCCAAGCRNHIDHPRARPLKDFRTLQTHYRRRHGARDFACRRCAKRFAVRGDWRTHEKNCGRLWRCACGAHFRHKRSLNDHARAFGAAHAHAGAGAGAEDDGRAAAAAAVWV

SEQ ID NO: 18206 - protein, 323 aa, Oryza sativa
  Clone ID: TF_OSC101916j.C1.p6.gm
MEDYAQTNLISRGHGHHHQPELMKEFPFLSLISSTSSCISSSGQQQQQQQDDDGHGGHDRHQLLRYGCCSCNKQQEEEEEEVTVALRIGLPAVSSASASPSPAMANHGASASSTGVAGDDGGGGAMAGVGVEVESVRRSGGGGGGGQYWIPTAAQILAGATQFSCPVCRKTFNRYNNLQMHMWGHGSQYRRGGTAALRGAQPTAMLRLPCYCCAAGCRNHIDHPRARPLKDFRTLQTHYRRRHGARDFACRRCAKRFAVRGDWRTHEKNCGRLWRCACGAHFRHKRSLNDHARAFGAAHAHAGAGAGAEDDGRAAAAAADIGS

SEQ ID NO: 18207 - protein, 342 aa, Oryza sativa
  Clone ID: TF_OSC401275j.C1.p2.fg
MGVQEEAALAAAVVKGKRSKRQRAHAAVVPIAASATAEEEESMESSLSLSGGAAAEGSSTTSPLLTTTAARGDEAVSGCVTEEEEDMALCLMLLASGGHGERAPDAEAVAAKEAKFRSRRPADGAGAGEFVYECKTCSKCFPSFQALGGHRTSHKKPRLVAPPAAMEPAADDKIKPTIPETAAAAAEEKPPKPSPPRPPASRPIATDPTVLAIPVIPKQEVLDATNSAAIASVSKQPRVHECSICGAEFASGQALGGHMRRHRPLIPASASSAVVSVLDAVDAPRQKEKSLLELDLNMPAPCDDATAETTTTSSAATSPAFAFAVSDRSPLLVPAALVGCHY

SEQ ID NO: 18208 - protein, 306 aa, Oryza sativa
  Clone ID: TF_OSC401513j.C1.p15.fg
MANPSKDHIFPNQRSLISQSSSPHNSLPKKEEIPLLSLLPSIHDHNKIHGCYKQEKEEEVMEDVDISLQIGLPSPDPNSSVIDFAKSNPLGATATTSQELDGDDDDDHKVEVEREEEEEAASDDLCLDYFSMGKLTKGKYWIPTPTQILIGPTHFACPVCCKTFSRYNNLQMHMWGHGSQYRRGPESLRGTQPAAMLRLPCFCCAAGCRNNVDHPRARPLKDFRTLQTHYKRKHCAKPFACRKCGKPLAVRGDWRTHEKNCGRRWHCACGSDFKHKRSLKDHIRAFGRDHRERPPPPPPHPLLPLP

SEQ ID NO: 18209 - protein, 269 aa, Oryza sativa
  Clone ID: TF_OSC400284j.C1.p4.fg
MSSASSMEALHAAVLKEEQQQHEVEEATVVTSSSATSGEEGGHLPQGWAKRKRSRRQRSEEENLALCLLMLARGGHHRVQAPPPLSASAPPPAGAEFKCSVCGKSFSSYQALGGHKTSHRVKLPTPPAAPVLAPAPVAALLPSAEDREPATSSTAASSDGMTNRVHRCSICQKEFPTGQALGGHKRKHYDGGVGAGAGASSTELLATVAAESEVGSSGNGQSATRAFDLNLPAVPEFVWRPCSKGKKMWDEEEEVQSPLAFKKPRLLTA

SEQ ID NO: 18210 - protein, 270 aa, Oryza sativa
  unsure (1)..(270): unsure at all Xaa locations
  Clone ID: TF_OSC400284j.C1.p5.gp
MSSASSMEALHAAVLKEEQQQHEVEEATVVTSSSATSGEEGGHLPQGWAKRKRSRRQRSEEENLALCLLMLARGGHHRVQAPPPLSASAPPPAGAEFKCSVCGKSFSSYQALGGHKTSHRVKLPTPPAAPVLAPAPVAALLPSAEDREPATSSTAASSDGMTNRVHRCSICQKEFPTGQALGGHKRKHYDGGVGAGAGASSTELLATVAAESEVGSSGNGQSATRAFDLNLPAVPEFVWRPCSKGKKMWDEEEEVQSPLAFKKPRLLTAX

SEQ ID NO: 18211 - protein, 494 aa, Oryza sativa
  Clone ID: TF_OSC400090j.C1.p31.fg
MPMPIGPGIRGYPDPWVKLPSPGTREGTVVGENEGTHAGLRWYPNPAPAFSNPNPLRLAYSTTASTAWFESRVSPSPKMGSVELGAEEREVAGGEGGSKGAAPPARDIRRYKCDFCSVVRSKKGLIRAHVLEHHKDEVDDLDDYLGRGGGETCKEMDHDCKHWIPENSKMREGLEWTSTRMGRPFWEAPSRMPLSRSSSGWGDSPEKLHQECLVHTLFQRPFSCHVDGCPFSYSRKDHLNRHLLTHQGKLFACPMEGCNRKFTIKGNIQRHVQEMHKDGSPCESKKEFICPEENCGKTFKYASKLQKHEESHVKLDYSEVICCEPGCMKAFTNLECLKAHNKSCHRHVVCDVCGTKQLKKNFKRHQRMHEGSCVTERVRCHLKDCKLSFSKKSNLDKHVKAVHEQKRPFVCGFSGCGKSFSYKHVRDNHEKSSAHVYVQANFEEIDGERPRQAGGRKRKAIPVESLMRKRVAAPDDDAPACDDGTEYLRWLLSG

SEQ ID NO: 18212 - protein, 420 aa, Oryza sativa
  Clone ID: TF_OSC900033j.C1.p12.fg
MVFDHGARVYVDPDAEVVALSPRTLLESDRYVCEICGQGFQREQNLQMHRRRHKVPWRLVKRPAAATAAEDGGAAGGGGGAGGGAGGGGARKRVFVCPEPSCLHHDPAHALGDLVGIKKHFRRKHGGRRQWVCARCAKGYAVQSDYKAHLKTCGTRGHSCDCGRVFSRKITRSLNLYSDIANYLRMKYIISLSNIAIKVESFIEHQDACNSGRVRGEVVPVATTLPVIRPAALRHHHHHPPPPPPELQLLPASTTAPLAAAFSSNSTTTGSSSHEQHATTMTTTKLQLSIGPAAVVAAASGGGGACAAAAGGEEEQQREEVRRALEEKTAADAARERAREEAAAAERALEDARRARHRARGELEKALALRDHAARLIAQVTCHACRQRSLAVMSMAAIDGHGASAVAREHLRGGGVGAGI

SEQ ID NO: 18213 - protein, 355 aa, Oryza sativa
  Clone ID: TF_OSC900135j.C1.p12.fg
MEVGDPSGALVGGAGGAGAGGGDGDARDALLRLVALGDRMAAVRRRIAASISGESGPLSSSDIHSVSSEISSAAHLVVLNAASLLSSTVASLPAPPPPPATTVQELPPVVVSVPQEPPQEAAKGDGDYDVVELDASELLAEHVHFCDICGKGFRRDANLRMHMRAHGDRFKTLDALSRPGQPKPPAGREVRFSCPYAGCNRNRAHRRFRPLKSAVCARNHFRRSHCPKLYACERCGGKKRFAVLADLRSHLRHCGEEAQWRCSCGTTFSRKDKLFGHLALFEGHTPAIAEPNKGVATAAAEASISMMEEGGVEANCDREEDEEGGFDPKFFQEWMEELRGGAVAPNWSAPSEAGH

SEQ ID NO: 18214 - protein, 757 aa, Oryza sativa
  Clone ID: TF_OSC401824j.C1.p22.np
MVAPRKALQVVALERPNLEQSKPIDEELMKRLKVNLITWKNTQCLFDRHMTLFVYFLWRKKKPFHITRAVPLDAIPGFLYDDEDDDFLYDDEDDDDDDDDEGDNNVELEEIRPSSTECESSIHPAEELNLLLPKSLPLPRISAAVERNGKARDKEVKEGSNLKELPQGYLGKMVVYKSGKIKMKLGDVMFDVNPGEECRMAQHVAAINTKEKHCCLLGEIESRHVVVTPDVDSLLLNDNRAYNALHQGIRFLGMKMVGIDSIFETITVDLKMVKIDSIYRWNDYRAARIIAHAAIPARENAYGRAERIRIGDRAQIEQNPSSIPLASPARSIMVEDQEKSSSSPPVPPPPEEEEMEEGEIHPGGGGGGGYYDSGSETEDDDDRYVFQSRRDDEEEEEGVNPASKRRRLEDILAETRGALPLPSPTPSSSGSEGTISDDHGDGIAGAAAAADAPVARVAFPCHVCSKEFGSRKAVHGHMRVHQADKDKEKEPSLHLALGWTSTGKRGANGNARAVTVAFAPMEQAVGDDDGDARAIVLAPAAQPQPQPMVVAEAANPPNQVADDNHRLPVPAAVPYVGAAAAPARRRARPKRNAGQGGPYRCSYPGCKGEYRTHQGLGGHVAGHINREKQAAAAAQGGSGARPEGNHPCKTCGKEFSTGVALGGHMRKHYDPKKKKKHAGLVLTLSVAPPTPAPAPSIAGAALPPAEVKADVDEHEAEQVPMAPVSPPAEARGNIVRIFGVDIEKPADEEEQEGGSDV

SEQ ID NO: 18215 - protein, 170 aa, Oryza sativa
  Clone ID: TF_OSC900016j.C1.p19.fg
MEVATNTATRSPVKLMLVLTLSPASKVIAKGGGGVKRVHLDGGAFQCRTCGRRFSTFQALGGHRTSHKRPRVRADGLDLLLGARPGKLGAGGASTPVVHRCDMCGKVFATGQALGGHMRRHRPLVSRNGTMSTTWTAAAAAAATMSGSSSEERDDDDDDDVHNYNFIHFL

SEQ ID NO: 18216 - protein, 442 aa, Oryza sativa
  Clone ID: TF_OSC400923j.C1.p5.fg
MENPYYASFLKNHHRRYCFSTPPSPSPSPAGAYSSSSFPFFPTAGVTSTTAATPPTTTAPPSPPLREALPLLSLTPASRGGTTAAQERARQRGEEDCTDDDDGAEEEGADEEDVPGSTPGGGGGGGGDRHHQLRRRRAGRLFADLNTKAAAGDPMDVEGSGSGCCAAEAAAAGDDDADVTVALHIGLPSPTAAADLISGLSSAAGRRSSTARRDEEEDEAEEAGGASRDDGDGGDAADAAAPLGFASTPIGRLNKGQYWIPTPSQILIGPTQFSCPVCFKTFNRYNNMQMHMWGHGSQYRKGPESLRGIQPTAMLRLPCYCCAAGCRNNIDHPRAKPLKDFRTLQTHYKRKHGLKPFLCRKCGKAFAVKGDWRTHEKNCGKLWYCLCGSEFKHKRSLKDHARAFGHGHGALGGAAALDDDDDGAVSDLDHDSSSTAPAARSL

SEQ ID NO: 18217 - protein, 438 aa, Oryza sativa
  Clone ID: TF_OSC401886j.C1.p3.fg
MEDPYTSFFKNPYYYYCTSASSFPTAPAAAAAAAHLPPPLPPPYAALYPTAGGVGVGVGAHHHHQYPPAAFFHPPPVHQQHQAPPSPPLREALPLLSLSPTPARRGGVVDAAADSDSDDDDDGDCCYHHLQDQEGAAAGSTATPAAAAARAPLFADLNCIPTCCGDDNDGGDPMDVEVAGTTADIDAAVALRIGLPAGGTEADLLSGLTGAGVEHEEEEEDCKVDGGGSGGDDEVVPLGFSSTPIGKLNKGQYWIPTPSQILIGPTQFSCPVCFKTFNRYNNMQMHMWGHGSQYRKGPESLRGVQPTAMLRLPCYCCAAGCRNNIDHPRARPLKDFRTLQTHYKRKHGLKPFLCRKCGKAFAVKGDWRTHEKNCGKLWYCLCGSEFKHKRSLKDHARAFGHAHTALDADDDDGAVSDADAVVRPSSSMAASSLQPPPR

SEQ ID NO: 18218 - protein, 366 aa, Oryza sativa
  Clone ID: TF_OSC400259j.C1.p45.fg
MEGEVVAASPFFEWLKPPPRPASSSSWSSSFSSSSSMASRDQETVVPGEDGGGEIQEDHKSGMTCLPLLSMLEEGNSKRHEHPVKEEIMSSAHAAGVVEPGVELNIGLPVTGSSAQEVTMEEDDEEEDDDDVGEEEMDEWKPMHGGCKVEGDEEQYGEAVASVEGSSSITAVGDMFGGVGAESGVAMSSRYWIPTPAQILVGPVQFICHVCNKTFNRYNNMQMHMWGHGREYRKGPESLKGTQTLAMLKLPCYCCAAGCKNNVAHPRARPLKDFRTLQTHYKRKHGAKPFRCRRCAKPFAVKGDWRTHEKNCGKRWFCACGSDFKHKRSLNDHVRSFGAHHLPVAESAAAAATTPADKDRIISFQR

SEQ ID NO: 18219 - protein, 476 aa, Oryza sativa
  Clone ID: TF_OSC401482j.C1.p12.fg
MAVNSGDRARARGHHGDDDEEGVAVVGEDYPYCSDSDSDDDDDVDRYVFLARQPAPPVDRDDAEADAGAEGTGCCKRKRRVVDDDDDDDGFSPRQPALLDGSGGQAAEEEEDDEGSSDDDDAMAPRGEAGGGGRGRGVGKVSRKKARLVDLIRSPLLPAELDGSDKAAPPPPRGVCPKKIAVVVQAKNRKRRRFVDGGEEQEPQPQPPVRGKRSRGPDLEASEGLQTASAAAAAAAAEAAERASKRFVCSICGRCFGSHQALGGHVLGHKKKAKNAAIAAAARDATTTAVTEAVAPASQRQSFFAADINGQDERGCDGAEGSRYDDDEEKSPVVVDDVAACHDADVDESRGHGKAESASAIDAGGDAGNNKVAHGDGEENDKIAGVVVASSHDGDSDVGKMKIVQHKCDECGKVCLTGQALGGHMSKHRRTRPAANGGEGPATATVADGGAQTVRLIGDDVCLQRAVAIAGFHSAQ

SEQ ID NO: 18220 - protein, 324 aa, Oryza sativa
  Clone ID: TF_OSC101063j.C1.p11.fg
MGSLAVAGCLNSMGEDRLSALKSRDKEQEAELAKPEPTTEVLFLCSYEGCGKTFVDAGALRKHAHVHGERQYVCHYAGCDKKFLDSSKLKRHFLIHTGEKNFVCPHEGCGKVLAFSLDFNLKAHMKTHSVDNYHVCKYPECARRFTQESKLRAHIKQQHEKGGLQNPGGSATNRSGLADHSHNSHTPKPSAAPPTPSADRPYVCPYDGCAKAYIHEYKLNLHLKKEHPNHYQDAGAQAASSKMSKRRSKPSLTAKMPLPKVPKRRGYTEPYQPPVSVVEEHQWPRNVLYEDDSEETEEEGDNVGDGARYRAASSDDDEETEDEE

SEQ ID NO: 18221 - protein, 163 aa, Oryza sativa
  Clone ID: TF_OSC900016j.C1.p20.fg
MDQQEDYTSDLQLELEEEEDDNQLSQLAELDVQLSLSLACGSTTAMSSSGDEEDAEPRRRRRDEEAAAAAFECRTCGRRFPSHQALGGHRTSHLRPTTNKRRPGPSKPLIHACEVCGLGFQMGQALGGHMRRHRPRNIDLGHKQIVMPEIRPSSSLQLLDLFV

SEQ ID NO: 18222 - protein, 151 aa, Oryza sativa
  unsure (1)..(151): unsure at all Xaa locations
  Clone ID: TF_OSC407916j.C1.p1.gp
APTSFAERPYVCPYDGCGKAYIHSYKLNLHLKTQHPEHGQEENGRIAAHASEHAVNDRANQYNYAEIVDLAPNPKRSKTNSGHKTPSSNKAYNVKISSVLPADISGVKNQWPGKYEDDSEETEEDQGNNIEDGWRYGNQNADDEETEYEDX

SEQ ID NO: 18223 - protein, 639 aa, Oryza sativa
  Clone ID: TF_OSC100626j.C1.p10.gm
MASNSSAAAVAALFGIRDGDHEDQIKPLFAQQQQHHHHQPPMAPSNAAAAASAAGSAAGQAAVAAPPAKKKRTLPDPDAEVIALSPKTLLATNRFVCEVCNKGFQREQNLQLHRRGHNLPWKLKQKNPLQAQRRRVYLCPEPTCVHHDPSRALGDLTGIKKHFCRKHGEKKWKCDKCSKRYAVQSDWKAHSKICGTREYRCDCGTLFSRFIYDIQLMQLKFGCRWCQEGLPMKRDSFITHRAFCDALAQESARLPPAAAGHLYGSAGAANMALSLSQVGSHLASTLQDHGHHHHHHGASPDLLRFGGSGGGAMAARLEHLLSSSSASAFRPLPPPQQQPPAPFLLGAAPQGFGDGGDGSGPHGFLQGKPFHGLMQLPDLQGNGTGGPSPSGPGLYNLGYIANSANSSGTSSHGHASQGQMTNTDQFSEGGGGGGGGGGSETSAAALFGAGGNFSGGDHHQVSPAGMYANDQAMMLPQMSATALLQKAAQMGSSTSSANGAGASVFGGGFAGSSAPSSIPHGRGTTMVDQGQMHLQSLMNSLAGGGNADHQGMFGSGSMIDPRLYDMDQHEVKFSLQRGGGGGGDGDVTRDFLGVGGGGFMRGMSMARGEHHGGGGSDMHGTLEAEMKSASSSFNGGRMQ

SEQ ID NO: 18224 - protein, 134 aa, Oryza sativa
  Clone ID: TF_OSC100626j.C1.p20.gp
ADPDAEVIALSPKTLLATNRFVCEVCNKGFQREQNLQLHRRGHNLPWKLKQKNPLQAQRRRVYLCPEPTCVHHDPSRALGDLTGIKKHFCRKHGEKKWKCDKCSKRYAVQSDWKAHSKICGTREYRCDCGTLFS

SEQ ID NO: 18225 - protein, 651 aa, Oryza sativa
  Clone ID: TF_OSC400555j.C1.p30.fg
MRIRRYAARLLASSTATAPSSLPPPPAASAAWCHAAADDCAICDLTRSASPQVVAPDAIKQKGHIAGRALEPELRSDPRVGLAERTPVPEDQGRDIDDGPPAKRSLTFTDAAARLEGSGNVGAGVATEPAARLGAPVANGAVSGQEDRAATCLADESAAELIATGVTSLVTGATAEPEVLKGASFANTNVTEPRVSERVPLVREAATEPEAEVSMREVTEGALPDGEGAAKLEITGGLSRESADKMEVTKGISLVTEASADSELAQRVPTEPGVELSLPEVTERVPVVTEDFTELGDTFSGLHITGFASLDNEGSVEQEVTGSGSLVNEATEMEVKEGTCIFTRVATELGDTGRVSACSGDGDIALDEPRPPDCVSEVANVNVGNAGEAVASKVQPFRDNAESVGGSINSTGNGHVSSKSPTADEAAPPGGCTDTPSVSCLSDIVARSIGKSGRTDIICYVRRRGKRKLEMVEVKEENVEMDDSAICDQYDDKVASERTGPCESVTSTAVSVEIKIADIKRELEDNSTASKGKKKRAKRFQCEIDYCRMTFKNRAELSVHKKNTCTVKSCGRHFRSHKYLRRHQSIHNDDMPYKCPWEGCSMAFKWSWDRGEHFQVHAGKRPYKCTTPGCSKIYKFVSDFTRHKRRCKPQR

SEQ ID NO: 18226 - protein, 651 aa, Oryza sativa
  Clone ID: TF_OSC100181j.C1.p2.fg
MVGGDLTGAFPLRPCLQGHHGSCGRGALPHYDPQVRRLEVDSAGFLLHLLSLCYFQRPNKTWVGKRRGERGKFGSPRFRQVGYSEGEWMYWRADLVGARGWVGRIKLPHKRHVNVTWDKDLVKGATFRRTRGIAAIMQPSPSSPRAPPPTAAQASGYKHFCRVCNKGFTCGSALGGHMRAHGVGDGDGLGADDDDDDDDDSLGDEAVRRARGGADDPWNAGGPSSSGAATHVYELRTNPNRVTRSRQVCKNCGKEFTSWEHFLEHGKCSSGEDDDDEDDVDHSLQPWSPSPEADGEEDSAPAAGWLKGKRSRRCKGTGVDLSPTPSACAAGEEEDLANCLVMLSSSKVDQAGVTEAEQRSSSSASKEHKRLITFMEPTTYVLDTVMALPPPAPAPQYVSTVPRGMFECKACKKPQEGEGLLRCQAGEQPPEVAEPSHHAEVADRSEDNPAKATSDARRNVHASIDGDGNAGTSDAAAELSMAIVPIEPPVAALAAAPLKKKGKMHECSVCHRLFTSGQALGGHKRCHWLTSSSADHTASVPPLADDLVPLSFRPMLDAPEPALDLSIAANPPLLASAATVRPKVGGSSFHLDAPPPVYIPSSPAIPSQRNKATATTGSQNANDAVGLSTAAAEDEADSTTVKRARLAISRT

SEQ ID NO: 18227 - protein, 504 aa, Oryza sativa
  Clone ID: TF_OSC419155j.C1.p1.fg
MLGSCAPTTAGPPPDEATTPEPFRSLQIATASAGSAKKKRRPAGTPDPDAEVVSLSPRTLLESDRYVCEICNQGFQRDQNLQMHRRRHKVPWKLLKREAGEAARKRVFVCPEPTCLHHDPSHALGDLVGIKKHFRRKHSGHRQWACARCSKAYAVHSDYKAHLKTCGTRGHSCDCGRVFSRVESFIEHQDTCNASRGQAAAVAEGGNVSTAACGGVAVLEQEKQLDLQAPAAASLSRTASSTSPSSDVVASPVAWPGAGAPSMPSPKAAAFRGRFDMAPSPPPPSYDHYRGGAGAHNLELQLMPPFNAGGAAAAPGGMGACFYAAAHQHHPTGVSQCNDASTQLQLSIGRDEVMGAAGTSDEASAAATAKEQAREQLRQAMAEKEAAGEARAQARRQVELAEQELATARRMRHQAQVELSRAHALRDHAVRQVNATLLQITCFSCRHKFRAAAAGAPLPAAMSSDVACSYVSSVVTEGGDADDPLDVVDATRRRLQHANSMGIM

SEQ ID NO: 18228 - protein, 385 aa, Oryza sativa
  Clone ID: TF_OSC404176j.C1.p2.fg
MMMSSSADHFSNNNNNQAMYLEQDEDFSQMIMELCDFDASSTTQARHGGEAAAAAAGNARAVLTYLTFLEQKIGHLRGIISSTPNPPPQIVAAELSCIVVQLVSISKNLAAARRGGDDADADAKHDGSSDADEGADGDGERAPPRGSYEVVQIEKEEILAPHVHFCGVCGKGFKRDANLRMHMRGHGEEYKSAAALAKPGGSPSRSPAAADAAARRRFYSCPYVGCKRNREHKSFQPLKTPTCVKNHYRRSHCDKSFTCRRCNVKRFSVVADLRTHEKHCGRDRWVCSCGTSFSRKDKLFAHVAIFDGHSPALPPEDYDDDAASGQLPHAAGEAVGRTVDTNRFFSDGLMIKGSMEDERGSLSPMGLDYCEFDGIDLFAAAAFDF

SEQ ID NO: 18229 - protein, 341 aa, Oryza sativa
  Clone ID: TF_OSC400149j.C1.p5.fg
MAKNACKLCYRRFASPRALAGHMRSHSVAAANAAAAAAAAAAAKLQISSASSASTSFTAADEEEEEEEEEEDVGFKKPLSIYALRENPKRSLRVSEYAFSDRESEAESTPTPAAKGLRAGGGGGGGDGEPMSSLSYAGTPEEEVALALMMLSRDTWPSVERGGGGGEYSDDGSDDGYALPPPSPAPAPAPVPEKRTRFQCPACKKVFRSYQALGGHRASHVRGGRGGCCAPPVAPPPQPHPQPPLPEHDAGEEDMDGKAPPHECPYCYRVFASGQALGGHKKSHVCSAAAAAAHAQTPGGGAPPPQPKILGMIDLNFAPPVDEVELSAVSDPHFPSNPPGP

SEQ ID NO: 18230 - protein, 449 aa, Oryza sativa
  Clone ID: TF_OSC400591j.C1.p18.fg
MATNRFVCEICGKGFQRDQNLQLHRRGHNLPWKLKQRGSKEAVRKKVYICPEASCVHHDPSRALGDLTGIKKHFFRKHGEKKWKCDKCSKKYAVHSDWKAHSKICGTREYKCDCGTIFSRRDSFITHRAFCDALTEESAKAIGGIPAAMAAPGHHHHHHHHHHQLLFSPPPVMAHHQELAALQEQQQQQHHQDVMQSPHQHQQQQQQRQQLVQQNCGYAVKPEMAPWPTTMPYDHHHPLLQPLCNANAAATAQSSATSAPPTTPQLPAAAAAAHLSATALLQKAAQMGATIGGAGTGAAGAHYAHMASPAGAGAPAGGSATFGLGLSCLNTHQDGGGGGGNGLIPAGMMGHLARTASHGRSGEDVAGAGGGGGDGMTRDFLGLRAFSHRDILLAGFDSSCMGHVNAAAGMAGYEPPPPHHGQPQHQHQQQQQQQQGGSNEPWHGMGSHS

SEQ ID NO: 18231 - protein, 395 aa, Oryza sativa
  Clone ID: TF_OSC33902j.C1.p3.fg
MGDPYTNFLRGYHHHHRSHHPLHFPPPPPPPPPPYAASFSGLYSSYLHPPPPPSSPPIREALPLLSLTPSTTHDDDHHHRRHDQDHHHHHKQGQEKNSHGGGGAASCSNNDDKRESPSAAAAADDQAAEVTVALHIGLPSPSPSDAAAAAGNQAAAAAAAEASAAGGGSSRMQVEEEGGEEEDEDEAAAAAATATLPLGCASIGIGKLTKGQYWIPTPSQILIGPTQFSCPVCYKTFNRYNNMQMHMWGHGSQYRKGPESLRGTQPTAMLRLPCYCCAAGCRNNIDHPRARPLKDFRTLQTHYKRKHGIKPFMCRKCGKAFAVRGDWRTHEKNCGKLWYCACGSDFKHKRSLKDHIRAFGRGHAACGIDSFDDLDADDDPSSDLDHASASASRVG

SEQ ID NO: 18232 - protein, 845 aa, Oryza sativa
  Clone ID: TF_OSC31520j.C1.p2.fg
MVCSTNILYQRNNPRKWNGGQMEPENKHGCELIDTSFAISEGLIHSETRVPSSNRPIVSRITIHWPSFYNVVTGKTLALPNLIALQHIPLSPAGVIAKRRRGEAHFSQEDDANLNTLSEDPNKSNLPSISIIHEAVGPLESRDQNKTAAFPSTSGVQDTGEPNSALHNVRHELDSFKSSRQCSAYIEAKGRQCGRWANDGDIYCCVHQSMHFADHSSREDKSLTVETPLCGGMTNLGRKCKHRAQHGFIFCKKHRFQTNPDAMSSDSLLSSSEGRKWEESQKSVEKMSSSNATCSVGSEQANNFQVAVHMKVTPTMAVETTSDKVNVSENADLCYPMSTSMENSNLDASICIGIRSHDNIAECQDYAVRHTLYCERHIPKFLKRARNGKSRLISKDVFINLLKCCTSRKEKLCLHQACEFLYWFLRNNLSHQRPGLGSDHMPQILAEVSKNPDVGEFLLKLISSEREKLSHVWGFGTDSSNQMHSENQDGSVMVLREDGTHPSPGLKCKICSQEFSDDQGLGLHWTEVHKKEVRWLFRGYSCAVCMDSFTNRRVLERHVQEKHGAQYLQYSTLLRCISCNSNFLNTDLLWQHIVSDHSRDFSLLDHVPRRPRGQSIKRTERASDELLYDNHNLGKDDGLQKFTCRLCGMMFDLLPDLGHHHQVAHTNSGTVSDIPSGREKYQFNRGRHYYSAFKKSLRPSGSLKKRTSSGVEKHFKAQSLDLSMDTSHIVESETTTLGRLLDFQCSDVALTLFSKIQKTRPHPSNLDILSIARSVCCKTSLRAALKAKYGILPDNIFVKAAKLCSDVGIQIDWHQEEFFCPKGCKSRSSSNSLLPLQPLIIIFDF

SEQ ID NO: 18233 - protein, 355 aa, Oryza sativa
  Clone ID: TF_OSC900182j.C1.p1.fg
MGGSSSTSRRRRDEYYAARPPPPPHHYYTYPPPPPPPPHHHHHPPPPPPPPHHHHQHPYRPPPPPHHATSSSSYYYHHPPPPHAYHGPWHPAPRPPHPEQPALTGPPPEFVDHQQARKVKNDVNLHKDTIRLVPDVTDPDRRLVAFTFDAVTDGSITIYYFGKEGKNCTFSSVYPELQTPTKIPFQKGLAQKFVQTSGSGVDLGFFSLDELSNPSGEVFPLVVYAEACPPPEESHQPNSTRAQITLAVIEKHHNDLRVKVVKQMLWSDGEKYELQEIYGIVNSTEADVPDADDSDMGKECVICLTEPRDTAVFPCRHLCMCSECAKTLRFQTDKCPICRQPVEKLMEIKVRSPEP

SEQ ID NO: 18234 - protein, 73 aa, Oryza sativa
  unsure (1)..(73): unsure at all Xaa locations
  Clone ID: TF_OSC415309j.C1.p6.gp
AKPAESDANASNSGNTPPGTCVICLDAPVEGACIPCGHMAGCMSCLKDIESKKWGCPICRAKINQIIRLYAVX

SEQ ID NO: 18235 - protein, 557 aa, Oryza sativa
  Clone ID: TF_OSC400302j.C1.p7.fg
MASRPRGRRLPPPHPPLIQEILDDDLFDVEVNYSDEEEEEEEEESDEEESESEDNEPEEVVPGQESIGEGCGPAIQARVSGAAAEKNACPVCMEAWASQGAHRICCIPCGHIYGRSCLERWLRHKGNTSATCPQCGKRFRPKDITNLYAPEVAVPNNDLEKEVLYLRGKAESLGETVMKHEKLIEEMNERLVELTSAQKRQILSEQRLMNVGSSKRQKEFFMDGLRVMAIDAFNQTILASGKAPGIGQEHVLYKFSMVSHHEARNIQLPLDTKTVRDICILPSGSAIFTSLGRKLSSFSMTADRVVLQCDLPCPGWSCSADESSRQICAGLQNGNLIIFDIRQTSRPLHSMVGLSTHPVHTLHTVIDNNGSRKFLSASSIGPCMWDTDGIQGRPKLLLGTDNQRVCISLACAPSSSDLLVASFRPKVETSEDATASQVYLSQTPTPSGGGKLGYHSFIRRAGNSSSFTEDRTCSTLVSEIRMSKSAIIPYGNNQHLFAYGDESLRGVRTWRLPSFEMHSDLSSLQQPVLDLRYAESSSGGRYLGYLSTEKLQVFRIR

SEQ ID NO: 18236 - protein, 231 aa, Oryza sativa
  Clone ID: TF_OSC8663j.C1.p1.fg
MAGEEPWSSEASDDVPDTSHMSDEQFQQFIDQYWAEQGFNIWSWIRASRTSSSSTPGPTRRTAASWQAVTFDGDGVARFSGNSDRSGGLDDQATSGFSIVDLLDGILQADDDGNGGGATPASSMAIVNLPEITVGDEKGEAKDCPVCLQGFEEGDKLRKMPCADSHCFHEQCIFSWLLINRHCPLCRFPLPAETEEDEEVVQAENDDDDDDEETILCLHRLFADAADEYTS

SEQ ID NO: 18237 - protein, 874 aa, Oryza sativa
  Clone ID: TF_OSC20843j.C1.p1.fg
MTREHTCFTLVKATSLCSCSTYFREAQLDRVYYARLSIIQKARIITECLHRFCRDCIEKSMRLGNDECPACRTPASSHSLKVDPNFDALILTLYPDLHKDEEEELAFTEEKTCHKKIQASTDEAPHRRKEALGKKSSAAKAIGSSRSQGNMLARKRGHIDFPDIVPTKVRDFHNFEEGRSCKKFECGQIWALYSEVDKFPKLYGWIRKVKLQPFTVLLTWLEPCPQQEQEKRWLEQDIPISCGEIWSIYMNWTFDWTPSSKATCEFTIEERGGELCGFLELDPGSVPDIFLNREENNNDGCKGLSSVGDHSEGPKTKKARKFHVSQSSPAGHKVTSKVDSHEERMANRVAIRLKNIMKIFLCKKRADRQYNPPPMTRKVDIQGKGKTSDTDDKDNANAEATNTVRQNEHSCSLELPSPYPDFYDFEKLRDINMFSLGQIWALYDDLDGMPRFYARIEHFDASSFKAHLTWLEYNAASEEEKKWADEEQPVACGFSVNDGITVIPLVRIKGFVSLFAAAKDKSAVVIASSELLRFSHNIPCYRTTGNEKVIFRATHWLWFWAQLQSDVDKFPKFYGWISKVERQPFIVHLIWLEASPEYEQEKRWLEQDLPVSCGKFKIRDWKARAVFMPDKRNTVVEIPTRDRLRFSHRIPSFLLTEERGGRLRGFYELDPASVPDVFLYRNTVMGWSGMRGTDALNFIFFTYWNATEKRLAIGHSQCLPLNEPSFHSWLYDSHKKMVKEHRRGFDTIATLVAWTIWKERNNWVFNQKSRTWAEIARVMTGEAELWRLAKAAIPVVSGLNNPVIAYHYPDLCDFGKFRDVNWIEVDQIWALYDDHDFMPRVYARIDHIDTSSLKVQFTWLAGAQSYECARGEMD

SEQ ID NO: 18238 - protein, 334 aa, Oryza sativa
  Clone ID: TF_OSC408838j.C1.p17.gm
MPPYTTSVPLHAQQSQPSCSPSTTPSSSALHVRRAAPRSPALPFRQWPPCRRGSAFAACVGRAVHGATPLISLNAFGHARPRLPVTLHHRRSSSNGDSRLLPTVIAAIVHASTAVFRRGYNMGICVSVCAFSCAFEMSDIRGFHRAVPSDAADGTAGGAPISAGAIAGTVCAVVVVVGLLAPLVYWLYRRKLKAAASPPLRPPAAAATPLVRAQEAGAAVGGQGDYTRRRAQVAVPARDGGDLCCGMCGSAYDIVRGGGELPETLECGHHFHRRCVRRWLRVNLACPTCNATHIQLCGDDDDGQATTPRHRLTASDYSGWDELSTGVGSSSCRF

SEQ ID NO: 18239 - protein, 826 aa, Oryza sativa
  Clone ID: TF_OSC401368j.C1.p14.fg
MATSSVAAMPHDSTPWRDPSRASSRQPARGFFNILVPPPQSPRPRCPDHQHHHHHHHHHDAAGGAAAAAAAAAAEPTPRRRKQILDRWAAAAAAASATASAEAPAPQEQRRRARDAELSALASATRPVTARAAVFREPSPAPSDASSGAGAGCGGGARCGAELPPAAPRASSLIQRWREIEAVGPATPRPCDLASDSDGGSPRGRVGCIVKKLSGTSSIPDDELDAANKEVAMSQSAPPSPAPMRAGVEPPTNIAGINGSRPTQLVVRTVRGRRAMEELVAMMAHCRRCELAAVADRHVVSRFSHKGRIQSPKDGAIWLFGRSCSQLALLIIVMCKSHYHVSFCRLYLCEHKYFLSLFVPYVASANIVMLFDTLQSMLRLRLLRQGFKVKDEVWTLPKPVRPRLPKHEHEAYTTSQCLTQAFLSKCIAGNQHKGGQVLAEKSTGSVERLVSSDGLGNEQNDGQNSNSENQCQEGCKNMVKLCTQNQEYSEPSSFVRYDEHSTVDDVSPSTISTLHELCTPSSRGDNLREEDNQSLNGSWEERALWISSLGWPAPVEAMSPDSWNQDEIGDIENHTQNEFNDRPWIDSPNSWRSLCVATQADSGALSGNADICNLLESKNVSKSLESDFSNKMNNMLLTILRKQRQQHMIDDFEGYYDERLYWRQNDEQQNADQRVSAQCSLAPVSHLHQQEGWQHSSFEHQHHENQNFLEMEVRVRSEMAQVHHEIYELRKLVESCIASQVKIQHSIKEEMCSALREAGLMPSQPDTPAKRGSCCICHQTQVDSLLYRCGHMCTCFNCADQLKSSNRSCPICQSPIEDVVRAHMNF

SEQ ID NO: 18240 - protein, 1193 aa, Oryza sativa
  Clone ID: TF_OSC401616j.C1.p63.fg
MSSPGRSGFSPGLAQLLSSRDEAKVSSQKSHLVSYHDEIGHQDIERTLEHIFDLPHKSVVRPPGPIDVGFVRSVLRNQARKFDLGGKDSRKYDDGVLIVDKGAGQTKVVLDDSSICGKFKSIWGPLLVESSASFSSARANTCVWNGKWMYEVTLETSGVQQLGWATLSCPFTDQKGVGDSDDSYAFDGRRVTKWNNDPEQYGQMWAVGDVIGCCINLDAGEISFYRNGNFLGVAFDGIRKVGPRKGYYPAISLSEGERCHLNFGSHPFRYPVDGFNPIEAPPHFCMFAAYLLRCLFRLLEVQNLEKSESAYFEKLRRVKKFAPLRELFRPISEGICAEFFGAAEGSQGCSEYITWGSFITLLTDVFRVREPHDFLCLDQVLELFLQFPGCSSLLQELIVALSCMCKAAPLVLTECPFSGPYPFLALACHILRHKDVMHLWWKSEDFAFSFEGFLTMKIPNKQDLQYLVPSVWWPGSSEDEVSMTLSMTTLSDAIKKIEDKHRELCSLVICFVPPTSPPLLPGSVFRSFVQSSILKVRGGDHRMASSGTFNDTVLVSLYTVILHLLSEGFSMDSSGPASSSRINYGTGVGFLHKGGKRRFPTQLLLRNDAYYNVIPRLGGSLNHLLMFHQIDANEDEVQWDEGCMNDEETRITHTTAQKPCCCSITDVTVGLRFKENAKYIPSTSKGPCKSMHEKSAHIASECSAFYFVSQQSQSISLLEETDRQIREKSCMEQVRRLKEARNSYHEELVDCVRHCVWYRATVFSSWKQRGMYATCMWVVELLLVLSDSSSIFHYIPEFYVESLVDCFHALRRSDPPFVSPAVFLKHGLASFVTLVVKHFDDPRIYKEFMFVFENNREAINRMPRSLLSAFDNRSWIPVTNILFQLCKGFGFASSKNVEPSSSAIFQVLLRETCIHEEELFLSFLNRLFNTLSWTMTESSMSIREMQEKRQVADLQQRKCSVIFDISCSLARILEFFTREIPHAFLMGPDMNLRRLAELVVFILNHIILAADAEFFDMTLRRPGQHQEKTNCTMILAPLVGIILNLMESSSTSGHRELNDVITVFTSMDCPATIHFGLQYLLSYNWSNVLRGDASLAKLAQLEEFSHYFMHITMSADGNEEQGFSTASNEEDNCCICYNSDSDTTFEPCHHRSCYGCITRHLLNSQRCFFCNAVVTSVTRIADSRIESRSPLAP

SEQ ID NO: 18241 - protein, 494 aa, Oryza sativa
  Clone ID: TF_OSC405796j.C1.p6.fg
MEPPAGGSSDHRRGAGTGAGAGGAASPSGLRRYGFRFSASSLLQAPLAALLEYSGVVPSGPGAPQAGPPSALSSSPSSSSSSSEADGLLSAAAAGDGEVSIRIQGGPGEADAAGVAGAASSGEDSIEATAAGDVDPASAAAGRGGGADAEASGGGADGASGNGGGDRAYQRYDVHHVARWIEQILPFSLLLLVVFIRQHLQGLILILLCSCHCVIISGFFVTIWIAAVMFKSNDILRKQTALKGERKIAVLVGITVIFMIHVFGVYWWYRNDDLLRPLFMLPPKEIPPFWHAIFIIMLAFLTKCHLQIQWFARQQWPLSACYLCTIRIAEVVTTGQMLTLVEYLLLLYRALLPTPVWYRFFLNKEYGSLFSSLTTGLYLTFKLTSVVEKVQSFLAAVKALSRKDVHYGSYATAEQDTPLNSHSILFKELVFCWNLVQEKMHVPVLLRCKHIFCEDCVSEWFERERTCPLCRALVKPADIRSFGDGSTSLFFQLF

SEQ ID NO: 18242 - protein, 129 aa, Oryza sativa
  Clone ID: TF_OSC402932j.C1.p2.gm
MDPTTTTTDSECDFIKKIPSWMIRNSPMHCMEAGHFGKDAAAAAAAATADAMEHALPCSDLHHLRVGKTAEQSCSVCLKNFEEGDYIWSMPCSHTFHQLCILGDRSCRVCHPAAPPSTEEKPEAPRTVN

SEQ ID NO: 18243 - protein, 66 aa, Oryza sativa
  unsure (1)..(66): unsure at all Xaa locations
  Clone ID: TF_OSC400545j.C1.p59.gp
GHAFHPPCITRWLFKGTTCPICRDDLTGLAAAPWESGVMSCPGCIMPSTPCVEDCPSLKALSLNSX

SEQ ID NO: 18244 - protein, 68 aa, Oryza sativa
  unsure (1)..(68): unsure at all Xaa locations
  Clone ID: TF_OSC900230j.C1.p3.gp
YVDNDDLRELPCAHFFHKDCVDKWLKINALCPLCKAEIDGVSTSAPAIGFGRRHSDNRVGNDIESQLX

SEQ ID NO: 18245 - protein, 365 aa, Oryza sativa
  Clone ID: TF_OSC401380j.C1.p24.fg
MSSLCPFAKLASAGATCPVKSDNKTTSCPVTANNHTDDDDNEKTGNANTDPRVVPAKCPFGYDSNNTFKLGPLSCVVCHALLHQSSKCTPCSHKFCKACILRFKDCPLCGADIQGIEPDDELQGLVDRFIDGHARIKRSHAAGDGEAASDKTKVIYEHVSMERGAFLVQQAMRAFRAQNIESAKSRLSMCAEDIREELKSKEDNQELCSQLGAVLGMLGDCCRTLGDAPSAITYYEESAEFLSKLPKKDLELVHTLSVSLNKIGDLCYYDGDLHSARSYYARSLDVRRSAVKEHSAVASQVIDVATSLAKVADVDRNLGNESMAVEGFEEAIKCLENLKLESGEASLEQRRLSVLDFLQKQLDDK

SEQ ID NO: 18246 - protein, 683 aa, Oryza sativa
  Clone ID: TF_OSC401045j.C1.p15.hg
MGSDVIQAKLVLLGDLGAGKTSIVESTIGAAFFSQVLIMDEATVKLDIWDTAGQERYHSLAPMYYRGAAAAVVVYDISSTDSYIRARKWVDELQRQGNPHLVMALVGNKVDLEEKRQVGTQEAMEYAERNGLFFIETSAKTSQNVTELFYELGKHYRNNSAGQSATSPPFRDGSPRRPAPPRRRRRLAMAALLLRLMRLYRLPKYAILNRKRLLLNPPWTLNVPASRCGPPGRHSESDTTHHIAFASPSSSRTRTPTDRPSPSPTNLAPPPLLCFLLPTYFPFPPLLSPRTLRAAAAAAAAAHVEQPAMENACEAGLPLSVAVSVPPVMVDGETVPKEVEECEDEEEEEEYAGDAPPPWKVMGSDDEGETEAGEEEEIAEADGEEEAADVEEVEYEFYDSDGSEDEGDGEEVDPAVASAAQFVPEGQFLGSAQFAAYGCAAGFMRVAAVEADPADGQEILVLYRYTLLKRAWSDPAGVELSMWAKVSKIHRLRFIVPASGDPASSLPFAGLSLSPLIYHNDYVEELETLWSKLAAQVRVPPVATRVQVIVDVGILRAGDNTPERREYMRAELEAKKEMPWPGKLLGMELHVPEPVVAAAASCKRDSSEEVFDDAPAPPAKRRKVFDAGEECPVCLDELEDGVVAWPGCSVAHVFHGQCLETTLKGSQMCPICRRDLGLKTLQE

SEQ ID NO: 18247 - protein, 124 aa, Oryza sativa
  Clone ID: TF_OSC402929j.C1.p3.gm
MDPTAGTGSSTKKIPSWMVTELPMLSTEANRLPQIPSWMIRKPLMLCMEAGRSGKAAAAATADAMEQSCSVCLKNFEKDDCIWSMPCSHTFHQLCILGDRSCRVCHPAAPPSTDEKPEAPRTMH

SEQ ID NO: 18248 - protein, 339 aa, Oryza sativa
  Clone ID: TF_OSC900356j.C1.p18.fg
MADSRGAAAPPATSPAPTRAPPRIRPRQLPPWPSPLRPRTPEGTTTWPRPREARRPVHGAQPGRRRPRPGPRAPGAGICGGDLAERAYMMLRMGGGVGEGSDYGSSDAGSYEYDDEAEEDYEEELEHHLRVHHHEHAVGEGRGEGERDGEGAEGSEFEEEGFDEEYDEEEVEPELDPAEYEDDEAYARALQDAEEREVAARLMALAGISDWRPVEPVEEHANDPQELVALGEAVGTGHRGLSAATLASLPSVTYKAEGVQDGNTEQCVICRVEFEDGESLIALPCKHSYHPECINQWLQINKRALFDCQAAYVAKFCVKVWQPKIVSKFIRHISGKSFL

SEQ ID NO: 18249 - protein, 368 aa, Oryza sativa
  Clone ID: TF_OSC100622j.C1.p1.fg
MAAAAEAEEEVRQEVEAVASVYGDDCRVVRGFPPHLVVHVRPRTADDSSQQFVELFLGIKASSQYPKAPPHVYAVESKGLDENRQVYLISSIQNKARELSCYPMLVTLCEEAVEMLSNMNHPAGDCPLCLYPLVKENDGSALPFMKLMSCYHCFHSDCIMRWWEWLQNDDTDSKKSSTAATTEGLDLSSSAKHHNVSQHKGLCPVCRKVFDEKDIEHVRDLLGANTSQLASLSIDLDEDEKEVLHSESEKIRQEKFASLFNLQQERNGLIEPKKDLSIQPGMYIPRPPSAPTASEGDTVDDSCEDTTTSTSGTEPLNQTNSTGGTTKHNSSSGHRRRHRSHASRRQPHGQGQPARQQWQRKGGDTSHQ

SEQ ID NO: 18250 - protein, 119 aa, Oryza sativa
  Clone ID: TF_OSC401783j.C1.p18.gm
MAPTCVGCGLCCATATARQHDNGTKWWRRRRAVAGRKLQHQLAAQEERRAVWGVVCGGGIKKRALRSIPVEVRVLPRCNHGFHVRCVDAWLVSHGSCPTCRSATGVVGGNGAEVAPEER

SEQ ID NO: 18251 - protein, 281 aa, Oryza sativa
  Clone ID: TF_OSC411039j.C1.p2.fg
VSRKHLPHVYSRAKVRALMRIDQEAVEMLSNMNHPAGDCPLCLYPLVKENDGSALPFMKLMSCYHCFHSDCIMRWWEWLQNDDTDSKKSSTAATTEGLDLSSSAKHHNVSQHKGLCPVCRKVFDEKDIEHVRDLLGANTSQLASLSIDLDEDEKEVLHSESEKIRQEKFASLFNLQQERNGLIEPKKDLSIQPGMYIPRPPSAPTASEGDTVDDSCEDTTTSTSGTEPLNQTNSTGGTTKHNSSSGHRRRHRSHASRRQPHGQGQPARQQWQRKGGDTSHQ

SEQ ID NO: 18252 - protein, 642 aa, Oryza sativa
  Clone ID: TF_OSC419789j.C1.p16.fg
MASYVPCSSSSTHRSRNFCDLVLVYAIIGSMHSSMTLFSVCKILSLYVDMCFVDYSKEVHSYLKYCKDVVFTGMTFSLEEEHLIDIFWDMYKGKEDENAKLCQEKLRTTNGVNKRCRDGSSNYSLQNKGILIFHIIPDYHPENPWNVLHPSNKRFEERKSCTDAGMLPGPLLPLPPPPPPELVVYPSVPSLPPSATPPSSSSSIGSSIAIVVLVVITTAIVTVAIVVIRRSYRRGRRLSCSSFSPRRSLSPRALSSSPSAMSQMWRAAVAAVGSSPRASAASARSWPEMAAPSSAPGDPGRGPPVALSSSAQGAVQGTAGLMASSATSAAAMAPPPSAPSLPEVERVILELLSLPPSPLQPAMSGSTATCFICNKLLLPTDLHLVLPVCSHMFHQRCLVAWLRSRVTPLLCCPECHAPITTRCRTDKRSLVPTFCSGEYDIESQILAVPAPPAEKVAEAVGGSRGWLRSSLDRLSGSWRACSGSRAVAAVAAPGCSSSRRTTGSWSPGTGSTSGRHLHLGADSRGVQTEVQLQLQLPVLPLADEEVAAADDDAGGSRGWLRSSLATLSGSWAVFPTTSRSTAMELPVSSSRRTAAGSTDSWSGSWDPEALRVSEPQPRERPSVLDYARWVFRNSGKYTKHRH

SEQ ID NO: 18253 - protein, 127 aa, Oryza sativa
  Clone ID: TF_OSC35114j.C1.p1.np
MNELVEPSSTICGHIFCKQCIKASIQAQKKCPTCRRKLTMNNFHRVYLPSADPKQGASTTRAAAATTQCIIHPTAPFNTHVSIPLTPTTITRGQAGEQEARKKKKTWWCRGGHTDVDAVPSVALSTN

SEQ ID NO: 18254 - protein, 531 aa, Oryza sativa
  Clone ID: TF_OSC400964j.C1.p128.np
MNELVEPSSTICGHIFCKQCIKASIQAQKKCPTCRRKLTMNNFHRVYLPSADPKQGASTTRAAAATTQCIIHPTAPFNTHVSIPLTPTTITRGQAGEQEARKKKKTWWCRGGHTDVDAQGPAAPNDSPRKRFSGVAPPAALIFFVLVFAGGAIVTLDHKELRPREMVVSETETRAPTSEVQETETRAPTSEVQEAGTGAAAGGVQRAELAGSSICENQCRPSGSEPLPKGIVQDKSNFEMEPLGGNPERRAAVARPAKSLLAIPVGIKQKAVVDKLVSKFPGDRFTVMLFHYDGEMDGWRELGWSDRAIHVAAKDQTKWWFGKRFLHPDMVAEYEYIFLWDEDIEVDGFDPIRYLRVVRRERLEISQPALDHRSQIHHRLTLRARKGQVHRRFYKTRGGGRCDDNSTGPPCTGWVEMMVPVFSRAAWRCAWHMIQNDLIYAWGLDFKLGYCAGGDRRLAVGIVDSEYVLHRGIPTLGDGGGKPAAKRSSTATKAATDRLAVRQRSYTELQIFNRRWKAAAEGDVCWTDPYP

SEQ ID NO: 18255 - protein, 430 aa, Oryza sativa
  Clone ID: TF_OSC401327j.C1.p18.fg
MGANCCIAAKERPQPCVTPIEVSAFRNVRHSPSWSFRWDNRTHIEDIMEMPALFSNHSSGSIRPETKSGSIAPTDGFSNGGSPSDMFNKLKCHKSDRKRESSKIARSDLRGRSTTSNSSPEAKLSRKSLDTVSVASDSKMSISVPSTPPAISRADPSSSSRGHSLPTDADSMRKARRSPGYQLYRQVSDSKIPSLRSLNEGASPEGRPSSSMLSVCSNDLSAVGSHGESSDGWSMRTFSEMVASSQRERWSVDSELLGSVSSKMTRSNASNNPTTHSPDQEVCKLCLKLLKERSTWNAQELAVVAVLLCGHVYHADCLDSLTAEADKYDPPCPVCTHGEKCTVKLFGKLESKTKNKIPKNVIVDVNLDGSSKHQKESRREPRLGTSSSLKGSFSRPFLRRHFSIGSRPSQSISESESARKKGFWARHWRE

SEQ ID NO: 18256 - protein, 995 aa, Oryza sativa
  Clone ID: TF_OSC900236j.C1.p5.fg
MADTGSLEKMGRELKNLVLGSLSLLSSAVSISCNHVFCNDCLTESMKSTSSCPVCKVPFRRREMRPAPHMDNLVSIFKSMEAAAGTNVVSTQEAPVVKLADGSDCVNSGKNSKRSQKSLTRKRKVTSEMEKNTAKDATASASQPTTKPSFSTNKRIQVKPFPESETPIRAEKIMKPEEPKNNLNNDVEGKNKAVASGQPGSPSLSPFFWLREQEEQEGCTAETLSETQSLDTPLRHNAPSFSDIKDSDDEIPLNTTPNSKAAATELFDSEIFEWTQRPCSPELYSTPLKKQSKAKSKLDQIEEKGDEEDVHIGGSFDKLGNASNAAQLVNTKATKQKRKKTSPSNKNSAKLSNRAEPCIKKSDANQQGSNRRKSAALKSCQKSSSAVGRNTSGRRNKASSNSKPIHGSSDNSPESYLPKEGLDVEAPDKPLSERIQNLEKTSRRKGSARKLEMAGKTISDTTEKNSEPRSKRVRRMSDHAIAKPVEVPSGSGNETEIPQLHTLTKGSIQRKSSNARRHSKVCGEQEGKNKLENTTMTPIILHGKCQNKEAVCTAPSVRTASVKYKQAKFSEQPDCFGTENFGNLQACPARNVLLKKCEVSTLKVSCAFCQTDVITEESGEMVHYQNGKQVPAEFNGGANVVHSHKNCLEWAPDVYFEDDSAFNLTTELARSRRIKCACCGIKGAALGCFEMSCRRSFHFTCAKLIPECRWDNENFVMLCPLHRSTKLPNENSEQQKQPKRKTTLKGITGFSRSSQIGSNQDCGNNWKWPSGSPQKWVLCCSSLSSSEKELVSEFAKLAGVPISATWSPNVTHVIASTDLSGACKRTLKFLMAILNGRWIVSIDWVKTCMECMEPIDEHKFEVATDVHGITDGPRLGRCRVIDRQPKLFDSMRFYLHGDYTKSYRGYLQDLVVAAGGIVLQRKPVSRDQQKLLDDSSDLLIVYSFENQDRAKSKAETKAADRRQADAQALACASGGRVVSSAWVIDSIAACNLQPL

SEQ ID NO: 18257 - protein, 121 aa, Oryza sativa
  Clone ID: TF_OSC401518j.C1.p5.gp
RIGDAEGAPHPPPPDLGFRGPGGVALRPRSSASPPPPRVRVRFLRITSSVLNLLVRSKMKCNACWRELEGQAVSTTCGHLLCTEDAKKILSNDAACPICDQVLSKSHMRPVDTNPNDDWTN

SEQ ID NO: 18258 - protein, 260 aa, Oryza sativa
  Clone ID: TF_OSC416339j.C1.p6.gm
MAASVFSVGRKSPARERHGPGNVAETSGWAEWKIVTGIKQKMSNRATHWCYVCRRPVRIRGGSQDVTCPSCDDGFVQEMSEMGRRTASSTLGFVGPDAGDEFLLRRSPVMEAMSTLMRHAATVGGDEREVDVHDEHGGGDGVPAHARLGVLFRGGPRVGVERRGGYYRAGLEALFEQLQNQLGSSRQGPPPAPPSAIDAMPVVTISRRHLRAEPRCPVCQDEFQLGAEAREMPCAHLYHADCIVPWLARLALVPLAVWAD

SEQ ID NO: 18259 - protein, 704 aa, Oryza sativa
  Clone ID: TF_OSC401282j.C1.p8.fg
MASAGGRCDGCHGDFGLWEPPLTAECSHRFHLHCVVSGADVCPACNARWTNAPSNPPPQPAGGSTTPFGQTTGFPMRVRPWSSCDKCRGVIDHSQPTVTSECSHTFHLRCFSGSVICPACNARWRDTVAVPNPSPAPPSTFFPAGVPAPPPTFSPFWVSQEYDDDEPVEPPVAAHGGGVAPASNGALVVRTHCEHTAVARSVIRDNFVVLVHAKAPSIAVAEATAAARAPVDLVTVLDVSGSMEGYKLTLLKRAMGFVIDKLGPGDRLAVVSFSYNAQRVIRLTRMSDDGKASAKSAMESLAAGGGTNILKGLVEAAKVFDGRRYRNAVASVILLSDGQDTYNVNGGWGASNSKNYSVLVPPSFKRSGDRRLSVHTFGFGTDHDAVAMNAIAEETGGTFSFIENQAVVQDAFAQCIGGLLSVTVQEARIAITCPHPGVRVRSVKSGRYESLVNGDGRAASVDVGELYADEERRFLVFVDVPAAGAGEDVTELIKVSCTYRDTASRQQMVVAGEHAVVQRPVEVATNTEPSIEVERERFRVEATEDIAAAQEAAERGAHAAAKAILDRRQEALARSAPGLAGDARCAALLSELRELSARVASRREYEQTGRACMLAGMSSHAQQRATSVQLFGAAAPTWSMPMCGSAAPPSLSFGGFGGFATPAMRSMVESSRKRRKGGDGSLSFLDLVRTEEEAGSSDDEKENL

SEQ ID NO: 18260 - protein, 60 aa, Oryza sativa
  Clone ID: TF_OSC400621j.C1.p35.gp
ILCRICFERDICIVLLPCRHYVLCEACSDKCRSCPICRVSIENKLPVCDAMSSADSISDT

SEQ ID NO: 18261 - protein, 957 aa, Oryza sativa
  Clone ID: TF_OSC400302j.C1.p1.fg
MEHPVSNTMEPDLRAKDHRACSASATDTSSRIIAQWAARRRQLACDDQVIDRRDRDSELLALARLHAVSMLDASFLRAHDDAGGGGGRRARSPERALVRRIAREWTASSRTSPRGGGAGGEELLGETERQRVRAVRERVRMASQGQGHGGAHTPRLMRGRGRHGQDVVTRMAMERQRELQGLSDHRAVSAFAHRARIQSFLRGRSFHSGSPMHDERPLSMAARELGQLRQSHPVSRFREEVRSRTEVTTNGPATNHTGPMDTIVDLHLHENDHRQENATHNEIQTHQSMENESVDIQRSITTSNDDVVQSDFGQEQLHRYEDYPDSGSSEEASEQSDSSSPSDNSNQQEEETYEQQTNLLWSRETSSSEDGDHEWNVMNSQEAEAQWRSGPSFSSNRNINRFSPPDDDVYGVELRELLSRRSVSNLLRSGFRESLDQLIQSYVRRQEEHDDPLDWDYQRQGTATGLHSDDQGEDRIDEATNQTVSDTRDHQPSILPQQRHWQMELPHHHHNWSQQAMRHSELDWDAIHVLRDDLTGLQRGMTSMQQMLEACMEMQMELQRSIKQEVSAALNRSLAVPAGEEGMLEDGSEWKLARKGTCCICCDRQIDSLLYRCGHMCTCSKCASELLHGVGKCPLCRAPIVEGLLTWASPSRFRLLDAPGLLAAVEEMELQGSLFCLCGLGVYSFGCNSVQRYSATKTDKNKSSDLIIQPQINDVTEESNQRPTDSSEINPTVGVFGEHYLFWTQHICQLSSHRDGTIYNNQLYWKNNYDIDVTNREETRDHVDSMLNYVFNRSRDDPIAVNQGSLIEMTGPKRGIALIPECLFEFDMRIKTGEKEEDDLQLIDGMIELDEMRMPETPYTTRINGDSGSVDLCLANVSNGVEATVEVVISELMVNGFDLSISCVVSSSRYEYDESKEFQIFGGSIGEACGLRRFVLAVYLDTDAAEVEVLVACSLYP

SEQ ID NO: 18262 - protein, 643 aa, Oryza sativa
  Clone ID: TF_OSC400054j.C1.p20.fg
MPHQTKATVQQQRPPAAASVVRAGAQEEDASAAGSLRAILAQIPLQIRPPQGLHPAQQVTMRVRSRMEPMKLTVKSRCGVCSHGVKTGAAAVFTAECSHSFHFPCIAAHAHALAAATALSCPVCAAPWRQAPFINKRTTTTDDHKRKSYDDDEPLLAPKAAAGAFNPIPEDDEDDATEFRGFFPARPRSGLAVTLAPDAALVSAGRRHGKYVVAVRVKAPALRSSPSTRAPIDLVTVLDVSQGMMGDKLHMLKRGMRLVIASLGPADRLAIVAFSGAAKRLLPLRRMTRQGQRSARQIVDRLVVCAAAQGQEQPQAVCVGDALRKATKVLEDRRDRNPVATVMLLSDTQQQQQQQQDAIRRPPAAPPATRFTHVEIPIGPGEEPARSALVAEEDDDQFSEHAFAKCLGGLVSVVMQEVQLELAFPTGEITAVYSCGHGQQAVALGGGGGGAAVSVSLGEMYAEEERELLVELRAPLSQSHPHSLSVRCSYREPASQETVRGAEQQLVVPALHGGSSSRRLHDLFVATRAVAESRRLAELNDYATAIHLLSSARAVVVQSAEQGLVGSLDTELSDMRWRRGQSAGRRRGGESEETPVGTPRARGGEPLTPTSAWRAAEQLAKVAIMRKSMNRVSDLHGFENARF

SEQ ID NO: 18263 - protein, 258 aa, Oryza sativa
  Clone ID: TF_OSC8178j.C1.p6.fg
MPHQTKATVQQQRPPAAASVVRAGAQEEDASAAGSLRAILAQIPLQIRPPQGLHPAQQVTMRVRSRMEPMKLTVKSRCGVCSHGVKTGAAAVFTAECSHSFHFPCIAAHAHALAAATALSCPVCAAPWRQAPFINKRTTTTDDHKRKSYDDDEPLLAPKAAAGAFNPIPEDDEDDATEFRGFFPARPRSGLAVTLAPDAALVSAGRRHGKYVVAVRVKAPALRSSPSTRAPIDLVTVLDVSQGMMGDKLHMLKRGMRL

SEQ ID NO: 18264 - protein, 429 aa, Oryza sativa
  Clone ID: TF_OSC410095j.C1.p20.fg
MSARDRETAVALARLAAALDGAVLGLGTAALAVASWVKYLAASGQLRRIASAPAAAIPDLRSLLAEYGGGGGDGDQPILAVVRGHVRAAPRGKYLVPPGSGEHCVVAKHTQLWHRRLGLMFWIASGFLWKQYPEAKFQLLILFCRGCGCTAANRNIPCLFNEWRGIFGWTFDLHALFFKSIKEQIITSFRWVYHLYFVPFVLVDPENMTGMVHVKLDRAMQPLPLTTVYHKLTPVDSTPYTLFQTIIGNGYPIALLDEEKILPVGKEITAIGYIRPHKASVEISSCSEIPFFLSDLTKDEMEAELSSRAKTLFWASVVLGTMSVCLLGFATYRSWKKIKERREARQAQEVFRQTTDEVTDDQSSDEEAGEMGDGQLCVICLRKRRKAAFIPCGHLVCCCKCALIVERQFDPLCPMCRQDIRYMIRIYDN

SEQ ID NO: 18265 - protein, 62 aa, Oryza sativa
  Clone ID: TF_OSC400139j.C1.p1.gm
ALVAGEKVKALPPCGHCFHPDCVDAWLRSQPSCPLCRSLLLAAAATAAKPDVNGGDDDDSAV

SEQ ID NO: 18266 - protein, 260 aa, Oryza sativa
  Clone ID: TF_OSC400645j.C1.p14.fg
MWSFASNAIAGSIRKKAQPSKCSQSNPDCSDDDVSSCASREEGLECPICWESFNLVENVPYVLWCGHTMCKNCILGLQWAVVKFPTLPIQLPLFISCPWCNLLSFRLVYKGNLKFPRKNYFLLWMVESMNGERAKFHSPSHEERHSLCPSGGGPSSSQHHRRPAPRTESASGRERSVAGNVFNTYSISASLQKIMLSFVQMTAKFPLVIIFLLIVLYAVPASVAVLVLYVLVTVLFALPSFLILYFAYPSLDWLVREIFN

SEQ ID NO: 18267 - protein, 163 aa, Oryza sativa
  unsure (1)..(163): unsure at all Xaa locations
  Clone ID: TF_OSC417199j.C1.p2.gp
MKLRSPAFLRTDKDFFSQSIMQVRGLPCAHNFHVECIDQWLRLNVKCPRCRCSVFPNLDLSALNNLRPSSEPDRPSASEVTAATMARYVRSSQPAGQSYLLRLQGLLLRQVVVRHGGGDDMASAENGASHVAAAVTAPATTGGVESELPSIVVDGGHQLPDRX

SEQ ID NO: 18268 - protein, 263 aa, Oryza sativa
  Clone ID: TF_OSC18350j.C1.p5.fg
MEPVTAASAAAAASEEQVTRRVASRIIRALQHQLRLLHRAGPEFFVLGATGNVYTVTLAAAPACTCPDPSVPCKHILFVLLRVLGLSLDEACVWRQSLRPCQVARLVAAPTCAEADVVAGPRARERFHQLWSARAAAKAEESRRRRRRDDQAAAAGASGRLDGAACPVCLEEMSPPGAAAAAAMLLTCAMCRNSVHGECFARWKRSRGRRAATCVVCRARWRQPSREQEKEPYINLSAYMNDAGGGDVNMVAADGDDGGLCAG

SEQ ID NO: 18269 - protein, 358 aa, Oryza sativa
  Clone ID: TF_OSC413657j.C1.p14.fg
MGAFCSKQNPSGQQPHCCNHSSSSNAAPKGNNRFAKFGDDYHTLEQVTDALAHAGLESSNLIVGIDFTKSNEWTGRVSFNNQSLHSLGHISNPYEQAISIIGQTLSRFDEDNLIPCYGFGDGPTSFAPMIETAIGIVDSSGGQYHVLLIIADGQVTRSVDTGNGQLSPQERETIDAIVKASDYPLSIVLVGVGDGPWDMMRQFDDNIPSRAFDNFQFVNFTEIMSRPVPASKKEAEFALSALMEIPEQFKAAINLQLLGKRRGFPHRTVLPPPVRDFQQYYGCSTVKETQSTSYGSLQKKTSAPKQDSDIGDQTCPICWLEAKNLAFGCGHQTCSDCGKDLKVCPICQREISTRIRLY

SEQ ID NO: 18270 - protein, 48 aa, Oryza sativa
  Clone ID: TF_OSC9137j.C1.p1.gp
LQEAQVSEARESDCAVCFEGFDQGEKLTRMPCSHCFHATCILDWLSLS

SEQ ID NO: 18271 - protein, 681 aa, Oryza sativa
  Clone ID: TF_OSC101892j.C1.p22.fg
MVDINPDHIFEVPDTPDRIQQSTCPVSSPAARRGIAKAAGTPLPSRRIKFKITNNSIQGQSSRGNASSVSPAPLDAGDIFKQAELARLLPVAEDPEARSSLLKSGRTIETSVENEKVPKKSGLDQSMNISNNINCRGSGERDRSCQIRKGDISARDANSCNADFLCLGSGLPTTTVGKPRNRMGTITFKKPKEVVGANVCSVSSPREGKGEEITDKGTTGISSSTPSIVPQRHVGQRKLVRNGCISPSNIAKRSLKVDEKREICSTSGLLHYPDTQVDASGKGNVIDLTDSSPIIRRQGNTATDMEKRSGRKSAIGRAGETVIPLAANQVNSIFSEGNKNKGKEISHDVVGAKQSGEAYMRRVCPRSMGDSSSVANNDHTGIGSEQGKMTNSCGRESGSSEQSNLDRASAAGDSNNSIEGGDNNNSIGGAKTLQTASFVNRTIRISSRKRKRIASSYHPGESSSSVDVDQPRVASSDSTAARNHTTHRHHIPVVDIDDICSPEVRPSLSGIGSSNRTSVDPNIREQLESDELLARQLQEQLYNETPHVVPTEEIDAIIAMSLQHEDNAQPTSRTARRFQSTTRGPRVLRSTVPQHANRVRYDSNNRRIIYQRALSRYPAAHIQPNIDLNDYDALLALDENNHQHAGASESQINNLPQSVIQCIDEWLRRKKLCPVCKSGIT

SEQ ID NO: 18272 - protein, 218 aa, Oryza sativa
  Clone ID: TF_OSC411348j.C1.p1.fg
MAMSPHDQHEHEPDHAHRSPSNGTAATSTIATNRWGPYSGAGDFASNMAVILAALLAALALALALNAAVRYLLRRHRRARQQPAAAAAAAEDPEKPPVQEADPPPPPPALVYSAAGTKLAGAAECAICLAEFVDGDTVRVMPCWCQEIPLESGLRFAQIKVYQTGPFNVEAANLLPTPGICTTCRFVYRGVVKHLHFLYGDWRDILACFVKGKKNTNS

SEQ ID NO: 18273 - protein, 115 aa, Oryza sativa
  Clone ID: TF_OSC401961j.C1.p21.fg
MQVGGTAAAAAEVSMSYRETRREEEKRRGTKMKVKILQWHGVASWTWNAQDETCGICRMAFDGCCPDCKFPGDDCPLIWGSCNHAFHLHCILKWVNSQTSTPLCPMCRREWQFKG

SEQ ID NO: 18274 - protein, 61 aa, Oryza sativa
  Clone ID: TF_OSC402359j.C1.p1.gm
PLARYGPLGNCAHAFHKACIDKWVDKGQATCPLCRAALLPSADDADAAAIAATTRHHLPSF

SEQ ID NO: 18275 - protein, 373 aa, Oryza sativa
  Clone ID: TF_OSC404332j.C1.p15.fg
MASGTDEKAKMEGLTSAAAFVEGGIQDACDDACSICLEAFCESDPSTLTGCKHEFHLQCILECQELLEAVERERNVRTNQTRNTTIFHHPALGDFEVQHLPVVGNDAELEERILQHLAAAAAMGRSHHLGRREGHRGRSGSHGRPQFLVFSSHPNMPSAGSVSSSSVQGEVDNESSPVHTTGELSLHANTHEEAGNQSPGMLTYDADQDAVVSSGNSTPVSSPRFFNRRHSTGQSTPVNNDRAGPSDLQSFSDSLKSRLNAVSMKYKESITKSTRGWKERLFSRHSSVADLGSEVRREVNAGIASVSRMMERLETRGSNGRTSDGPAISTSEVIPSTESSNERVTENNPTTAATSSGNTSASSAPCVTTTGSN

SEQ ID NO: 18276 - protein, 711 aa, Oryza sativa
  Clone ID: TF_OSC10241j.C1.p6.gm
MDEKVKMESKLSSAAAFVEGGVQDACDDACSICLEAFCDNDPSTVTSCKHEYHLQCILECQELLEAVEQERNIRANRLNTAAVFHHPVLGDFEVPVGADDAELEERIIQHLAAAAAMRRNEAIPGGSLHASSGQDEDHEQSSDLGSAHPFAALAAVDQGHMSGGSQLYVGHSDQGASNPSLHDERAMSRKPNNASSSSCGKLGAPKGSLADEGAVAAAQAIRAGEKWPQAAAMGAPVCGALVCFFVLLVARAAAETAPVERPTLPSADVAIDGNGNGARAGAGKAAGAGAVGGGIVSNSVLVALLDSRYTEMAELVEKALLLQALEDAVAEHNVTILAPRNEALERDIDPEFKRFLLEPRNLNSLQSLLLFHVLPARLPSGSWPAAATHPTLAGEDVELAAADGGGGMRVAHAAVSRPDAVVRTDGVIHGIDRLLVPRSVQDEFNRRRSLADISAMPPTAAPEVDPRTDRLKKPAPPGDSPVLPISDATVPDPSVALASEPSDHYDGDSQVKDFIQTLLKYGGYNELADIFVNLTSLATELAQLVSEGYALTVLAPNDEAMARLTADQLSEPGSPENILYYHMIPEYQTEESMYNAVRRFGKVRYDTLRLPHKVVAREADGSVKFGHGEGSAYLFDPDIFADGRISVQGIDAVLFPPAETKTKTKPATARIRTAPAITGVSKIKHRRGKLLEAACQMVGILGQRSQFTRCQ

SEQ ID NO: 18277 - protein, 164 aa, Oryza sativa
  Clone ID: TF_OSC34110j.C1.p1.fg
LVTCVRSNIYHVKQPPNTMSTKAVCHVVVDIELQDVARGGTAATTTNCCAVCVEPLEWVAIGPCGHRCVCARCIVQVRFVSEDRRCHVCRAPCPLVVVIKGHCINGADILAELPSSPSMITRQGRVDNFWFNVDTAAYFADEQQFKVARIACVKKSFYKPKEKP

SEQ ID NO: 18278 - protein, 292 aa, Oryza sativa
  Clone ID: TF_OSC408853j.C1.p1.fg
MAEVANVGTKSSINNNEDTSRRRRRRSTVKAKMPTNGGIIGQPCKRKHQSTAAKVSQRLSFPLTDLDQVREEELEEVVDGKEVKTPKAKAKSATHEIDSIALVDRKLDATPTWRANCRNMNSAIIKGDLVTCVRSNIYHVKQPPNTMSTKAVCHVVVDIELQDVARGGTAATTTNCCAVCVEPLEWVAIGPCGHRCVCARCIVQVRFVSEDRRCHVCRAPCPLVVVIKGHCINGADILAELPSSPSMITRQGRVDNFWFNVDTAAYFADEQQFKVARIACVKKSFYKPKEKP

SEQ ID NO: 18279 - protein, 665 aa, Oryza sativa
  Clone ID: TF_OSC420483j.C1.p21.gm
MDEKVKMESKLSSAAAFVEGGVQDACDDACSICLEAFCDNDPSTVTSCKHEYHLQCILECQELLEAVEQERNIRANRLNTAAVFHHPVLGDFEVPVGADDAELEERIIQHLAAAAAMRQDEDHEQSSDLGSAHPFAALAAVDQGHMSGGSQLYVGHSDQEGSLADEGAVAAAQAIRAGEKWPQAAAMGAPVCGALVCFFVLLVARAAAETAPVERPTLPSADVAIDGNGNGARAGAGKAAGAGAVGGGIVSNSVLVALLDSRYTEMAELVEKALLLQALEDAVAEHNVTILAPRNEALERDIDPEFKRFLLEPRNLNSLQSLLLFHVLPARLPSGSWPAAATHPTLAGEDVELAAADGGGGMRVAHAAVSRPDAVVRTDGVIHGIDRLLVPRSVQDEFNRRRSLADISAMPPTAAPEVDPRTDRLKKPAPPGDSPVLPISDATVPDPSVALASEPSDHYDGDSQVKDFIQTLLKYGGYNELADIFVNLTSLATELAQLVSEGYALTVLAPNDEAMARLTADQLSEPGSPENILYYHMIPEYQTEESMYNAVRRFGKVRYDTLRLPHKVVAREADGSVKFGHGEGSAYLFDPDIFADGRISVQGIDAVLFPPAETKTKTKPATARIRTAPAITGVSKIKHRRGKLLEAACQMVGILGQRSQFTRCQ

SEQ ID NO: 18280 - protein, 103 aa, Oryza sativa
  Clone ID: TF_OSC8672j.C1.p3.gm
MDPTAGTGSSTKKIPSWMVTELPMLSTEANRLPQIPSWMIRKPLMLCMEAGRSGKAAAAATADAMEQSCSVCLKNFEKDDCIWSMPCSHTFHQLCILGDRSCR

SEQ ID NO: 18281 - protein, 85 aa, Oryza sativa
  unsure (1)..(85): unsure at all Xaa locations
  Clone ID: TF_OSC18110j.C1.p1.gp
GEKTTTEAWVETPCAHRFHSRCLESWARVKLGTCPMCRRELTAAAAAATTTAGEDVHVLVADPMVADPLQARWNLFVQRSTDGFX

SEQ ID NO: 18282 - protein, 247 aa, Oryza sativa
  Clone ID: TF_OSC400014j.C1.p1.fg
MASWPTSCTKVYEIIQFSRCKEEASATSSIIDHRTAKVGRRDDGPNMSKVLRATIPENSVSGSSVRGKLREMEMDLAVEQYGSIGASSILSTLSVPEYSNLAWDETYPKTMLSALSATKNRMYNRIAPIVGHAWVNISAQNATFMMTMQVVLNMHSCDGVMKYEPFLINLTITFYRTGGAENFFHCDKCGCCYSYVLKDSHHCVERAMHHNCPVCFEYLFDSTKDISALHCGHTIHLECLYEMRSHQ

SEQ ID NO: 18283 - protein, 139 aa, Oryza sativa
  Clone ID: TF_OSC900071j.C1.p7.gm
MDPTAGTGSSTKKIPSWMVTELPMLSTEANRLPQIPSWMIRKPLMLCMEAGRSGKDAAAATATADAMEQSCSVCLKSFEKDDCIWSMPCSHTFHQLCILGDRSCRDMNANEECKELSLVEDEASTAREASELGRTRGSF

SEQ ID NO: 18284 - protein, 319 aa, Oryza sativa
  Clone ID: TF_OSC900389j.C1.p9.fg
MAVDAHHLHRLPPPIQPAESMFSPRQPCFGAAAGEVVVGGAGGAVMAGLCQEEQLVQGYRQVFVGGGGVRQPAAAEVMRQYSQVCAAAADAAESGVTFGGGQEAAAPRKRKRAEVPVVLGAAGDVAVAAQARQQLVDVDRLVLHHAAKMWAELAEQRGRHARQMVATVEAAAARRLRAKDEEIERIGRLNWALEERLKGMYVEAQVWRDLAQSNEATANALRGELEHVLDAHARRGADHGDGDDAESCCYGENDVLARAAGDGEAASAERRCKGCGEAAAVVLLLPCRHLCACAPCAAAAAACPACGCAKNGSVSVNFS

SEQ ID NO: 18285 - protein, 187 aa, Oryza sativa
  unsure (1)..(187): unsure at all Xaa locations
  Clone ID: TF_OSC404797j.C1.p7.np
GRRSCAVCMETLEWAAIGPCGHGEVCAGCALHIRVFQNNRLCCICRSPCRVVVVTNPDAIAAAGGGGWPAVSSRLPSEGRVGEYWYHTGMGAFFDDERQYAAAKAAARLGPPPCGDANENPPPPPPPHCVRSRHSVHLKSYLKVSQMCTMCFTCLSXRNIFVFQKRLYFRRLLSCPVSRVVSEPEDL

SEQ ID NO: 18286 - protein, 326 aa, Oryza sativa
  Clone ID: TF_OSC414535j.C1.p8.fg
MRRRFQDSVKALEADIEHANELASEFLRDYDGAVIQMRMAYSAVAHFLVQWIDCKLAGALGLLKIMIYKVYADGTTALPEWEREASIRQFYGVIFPSLLQLPSGITELDDRKQRRLCLQKFRKVEERVSEVDLERELECGICLEVNAKIVLPDCAHSLCMRCFEDWRQNFVYLNVVFKKERKRLPLPYIGWLCSSGCKVSCKSPALLIEYHNALSTESLTIFMHQDVVHPIKPASRMTLFITAANILLNYVLLLSRNTKSKSCPFCRACLKKVNPSSLWLYTDDRDVVDMDTLTRENIRRLFMFISKLPLVVLHVVDLDIYEYRIK

SEQ ID NO: 18287 - protein, 70 aa, Oryza sativa
  unsure (1)..(70): unsure at all Xaa locations
  Clone ID: TF_OSC401965j.C1.p30.gp
EVRRLPCGHAFHRDCVDRWLALYCRRRTCPLCRLHVGGAVVAAAVAGLDELQLGDDLVIWFSSLFVAGFX

SEQ ID NO: 18288 - protein, 154 aa, Oryza sativa
  unsure (1)..(154): unsure at all Xaa locations
  Clone ID: TF_OSC826j.C1.p13.gp
AKQLPCMHLYHSSCILPWLSSRNTCPVCRYELPTDDAEYERSKQATTNVRDIQVVEEISDEQEVQVTRQMAAGVIEETNTSEHNVRVDEQPNSARRRSGWLFIAAAPVVSLIGFALVLCFTNPARSGRRQLYCRSPSATEVHVDTKKSWWSMFX

SEQ ID NO: 18289 - protein, 384 aa, Oryza sativa
  Clone ID: TF_OSC401130j.C1.p66.fg
MACGIGRWSRAAAVGVNRQAAAGELDLRPGVLLSLSRFRPKRQRVKQRGGGHGRCGAASSRALTGTENGKGEWRGTKTTSSSGSRLASSLVSSAGSRSFTILLLLFFPDQTAICQQTRSTKESKPVRRCSAPPAPPTTAASSPTASTTRLLDDDSSSSAGAGNSHVVIDIDDDDGGVGDSDDSACSSSSAEGPCCAVCMEPLEWVAVGPCGHAGVCSVCAARIRSSRSWQPDLRCCICRAHCPFVVVTRAAAAAAPAAMPAVNSYQEWRARGYYWYCTTMLAYFDDVEQYRATRAIARGEVKGGAAVDVDGNDGGGGGRRTLSSCVDVFRFLLIVAIFALFGVLFGSVFSSLTAGGRATPGDNLAFISACAAVSMLGSILFYFA

SEQ ID NO: 18290 - protein, 535 aa, Oryza sativa
  Clone ID: TF_OSC8604j.C1.p3.fg
MAVVLTHGVVDEGGGERRWIWLVAEEAGKEAARRGRGECGKRKTRRWSSSPRPSRPPYPPMPPPPRHRRNLPTPHVPWKSHAADLARAEHDRRDAQACRAYHARAAASVRVAAHDALFARDLAAIPEDRWAHDGDYFERPLPLEGGGALFRVLFKGMASREVVGPRDRDPGVGVLAVAICGPRGEVVLRIHKPVQAQAQQGRMMLEAMALVEGLNAALALGIRTLNVLTDNKPLHNHMSGIWRPRQKRLVDLINEAFSTKQKFEQCEILCVARTQVNYVTKLATDSLHTQIAKAAAVSAGKEKKENCTICLEDTDVSKIHAVEGCAHRFCFSCMKERVKVKLLHGMLPACPQDGCTTKLNCGGFKDVPISTVISDHGAAYQGSTNSSNSQDLLPISQVFSLDVHERTDTSNASIILKMTCYDYKRRYPHARLEDAYLQNLARQRCGYEFCYTCGKEWKEKKATCSCPLWDERNIIRDDPQGNAAIHDDPEDEYDDYYDEDENNYYVGEGLQYNVDYHRQYDGGDRHHGHFYQYNR

SEQ ID NO: 18291 - protein, 326 aa, Oryza sativa
  Clone ID: TF_OSC401130j.C1.p102.gm
MAQLHGGSVGHSQAIDDIPQFYASSCSATAYHSHAMEMSRLDASGRGSSRTAADDKGGHVVIDIDAADDIPIPFCVVCMEPLEWVAVGPCGHRVVCSACAARVRSAPYSDHRCCTCRTPCPTVFVTKAAAAAADGELNYLLQLQGDAGSLQDGRVGEYWYLAPMSAYFDDERQYEAAAASSLMMKHQRPPPDADGEFQPRHGGDRGDGALPGDEFGAPELSFLALFFAACGAVVGLGFTGFGTGWGQKVAIVLGSAVANGVRGASKLLRFCWRHDMRAFDQPCRNHLFDEGSNQRRRLRPRRRYMAKAMWRSVWAKTKDSVPSLAV

SEQ ID NO: 18292 - protein, 1066 aa, Oryza sativa
  Clone ID: TF_OSC400049j.C1.p37.fg
MTKTQPQLVESEPVKKLQRLPPVFSRVLELPFPRDTNVRKLFTTNADLFFVPHGVGGEPDVVKVHIVRLERWDMTRVVVHIGPGEPDLRNDLVYDKWRFPLAETSILSMVMAGMDASGDGGNEGIPMWPNIDKRGGGGGGGGGFGLLAGASYIPTKFSRPRNSQKVEKCVLDKVKASKFKSARDYDSIPIEGQFISVANLKERIFESKHLGRGTDFDLMISNAQTDEEYADEATMIPKNTSVLIRRIPGRPRKPIVTEPEETKAMEGRVEETMPSGSAFLADASMKYPEESEWDDEFGNDLYVSDSVPSQLGSQAVDASENKVDEDSKIKALIDTSALDYSQIPDGYGGGRGYGRGMGGRMMGGRGFGHFIQHCPTNGDARFDMKRMKPPTGIPKSMLMATPDGSYALPSGAGAVLKPNEAAFEKEIEGLPTTRSLGDLPPELRCPLCKEVMKDAVLTSKCCFRSFCDKCIRDYIINKSMCVCGATSILADDLLPNKTLRETISRILEAPPTSSTENVGSMVQVQDMESAIPVQPKVRSPAVSAASKEEPKRTPAPVEESPDVESHSEVKTTNVDMSSSDKKVPALPDVVEGTMESKILKEKTPEATPVVKESQEKMPVVGEQVVKKKKKKKVRAPGNAEDWKPYQDFGAENFAGMPMGPAGGFNPYWGGGMPLPMDYMGAPFPGPMPYMGYPPGPFDPFGGGVLPQDPFMPPGYMMPAVPRDLSELAVNSMGMNMGPPVVSRDEFELRKPDNRRRREMERFNERERERGHSRERERERERERERERERERERERERDRDQNRDRDRDQERDRDRERDRERESRREARESSGANNDSTTSMRPKARSRSSQPADRSAPPPPASPDRHSRRSPHRSSGSGKKRSSSDRYDDLPLPPPPPPASRHEAAEHAHAKNTAAAADARSKAKGSVFSRISFPGGDGNPSDAKRSRRSSSDKPPASSSSSSKKARAAVAEDNDGRHHRRHHREAAAAAEERRRPAAGDYYGEEEEDDESEEEQHFKRRPSSSSRREREHQEAQEEPRRSRERRGGGSDGNHHHNHGGGGGHKRR

SEQ ID NO: 18293 - protein, 306 aa, Oryza sativa
  Clone ID: TF_OSC401130j.C1.p74.fg
MAHLDPNSGSGATVAAASHSHVVVDMPQLDASSHSTASYDDKSGHVVIDIESEGRSGTTGSDIILSCVVCTEPLEWVAVGPCGHRAVCSMCVARVRAGPDADKRSCICRTRCYTVAVTKAATAADTLHAFPKTVPVTSRDWRIGKFWYYAAMSAYFDDRNHYKETKRAVRDFLEKQRAAPSPPPPCPDDDVTDENLEAQPPAPHHPRVSWCGILFVLVAFAFVCGPPALRAGVHRVETCATAATRTHQDEVLRISKAPKSQPSATHQDGSLPIAMEKLDGEDREEEEEEEEEEKKQAASISVMLTH

SEQ ID NO: 18294 - protein, 868 aa, Oryza sativa
  Clone ID: TF_OSC22501j.C1.p1.fg
MSTLAAHPPLGPAAAAQEKAASRNKRKYRAEPPSAELGSFGLEYPLTADCVGFEFMSPEKAAIAAAAAAAAVAAEGVNLDLIPGSCDCKDIHPTAEELLECQRYVNWNDPNEALLEEILLKGLDATFDNAVGVIIAMGYSEPTARAAVLRAATQYNWRESLAGFGEAAVEVLKTEGDMLSEGASEEDMRKIEQAVLGGMIALVNQAQPFYTTGDVMFCLLMSDMNVANACAMDYNPASLPAVDTQVIAQPVVGNYEPNNPSSDLSVSITNPQTGVTFRGKLTPVPPNSYNTAKADSSATPANLNVPSSKPSVSGKAQSEIPNLKPKENSNPVPDHSEEQPFVAAATQPVKDDKPIPSKRGSSKRDSLHRQKLMSFDKSSRALGSKGSLRSSKHSSLGSAVLDRKCRSFSDSTTSSLKASSKVGKGFSASMKGPEVPPDLSFTGAALPSNPSFDAKLSSNLNPLPAASTDLSLSLPLPSSNDSPAPSSNHDANTEGMDSSSKINLSYDEDQKVWIPQDKKDEMVLILVQRQKELQAHMRDWTDWAQQKVMQVTRRLAKEKEELHSLRKEKEEADRLQEERHNLEESTRKKLLEMESAISRANTQLEKAESSARRREAENEQLRIQMEAAKRHALVSATNILELSKKDENSHKRSQHWESERALLQEDLAAQRNKLSQVHQQLHHAKEQKDQIQARWRQEEAGKIEAIARVSLEKKERDQIETSLRSEENFLHLKAENDTQRYKSQIRALEQQISQLKVSLDSLRVGAPPKWGADNRTNALRLSEGRKNGSAQILANIAAVPQDFDFDDIQRDRECVMCLSEEMSVVFLPCAHQVVCAKCNDLHDKQGMKECPSCRTPIQRRVCARLAGC

SEQ ID NO: 18295 - protein, 65 aa, Oryza sativa
  unsure (1)..(65): unsure at all Xaa locations
  Clone ID: TF_OSC22501j.C1.p2.gp
FDDIQRDRECVMCLSEEMSVVFLPCAHQVVCAKCNDLHDKQGMKECPSCRTPIQRRVCARLAGCX

SEQ ID NO: 18296 - protein, 539 aa, Oryza sativa
  Clone ID: TF_OSC900169j.C1.p23.gm
MGTSGRQWALCGGEGNKKVGMWCKEWQLQRTFVELFLGIKASSQYPKAPPHVYAVESKGLDENRQVYLISSIQNKARELSCYPMLVTLCEEAVEMLSNMNHPAGDCPLCLYPLVKENDGSALPFMKLMSCYHCFHSDCIMRWWEWLQNDDTDSKKSSTAATTEVCRKVFDEKDIEHVRDLLGANTSQLTPQLQPQERSHSTRQTALVVPPSTTAVQVIEGDIDLMLQEDNHMGKGNLLGNNGRGKAETLHTNSRKGKKLLSSLLVVVSTTLTLKHTAASTSSLAFAALPGCPDKCGNVSMPYPFGTIDGCFRGPPFRVYCEDDHAVYLQEHKKLKVLRFELAQGEVLIQKRIATSCGVNLTGKAVGIPWVVHDGGLADDYPYLTISTKNQFAVVGCGITAIIVGQGENQPDYTVGCRSFCDDVDSNIVEDNSTQCNGNTGCCQASIPGNLKAFQPSFLKISGVNYSGVPCVYAFVVEQNWFKFKTSYAKSMELYSKYRNKGTGVPLVLDLVVDLAAQGTFATALKVMKEIPTYMEAAKV

SEQ ID NO: 18297 - protein, 498 aa, Oryza sativa
  Clone ID: TF_OSC400138j.C1.p14.fg
MATLPIFSHRNPRREGEATGCFPTSSLLAIVDKEDEQQSGGERGVVVGRCLEVFVLAREFCEQAYGSSITYGYERPHGASTASREWSSIGRSDPLWRTNAGFSPPLSRRWEYRINSEGLSYGSQGDSGAAAHYGSSLSSNSKEPSRSWERSDVPPDHHRYSTSEGAISYFNSPDVTFQNHHIMLPMLQDSGIDEYMRVSVAEPIGALLLSEGISGQQNSGGSTSSRSDGSEYDIVPKSYSSTPRNFPSRRSFLSKPIHPLSFPEHALEGQETDSPVANASTSSPMPSEFKAIGEIRPSGLMDYAYASGSHGESANWSAASSMDLTDLSERHDAERSGPLRSNNIMDRTRCDLCERLLSKRSPWGSRRIVRTGDLPVAGVLPCCHVYHAECLERTTPKGQKHDPPCPACDRLSGKDTEQWSICRLRNGFPRLRSLGEGPSRVWSCAQAGDCVAGAVQIPRASSISLLSRSGHKRHHAASKGESGKDWAETSSSSRTACM

SEQ ID NO: 18298 - protein, 223 aa, Oryza sativa
  Clone ID: TF_OSC401130j.C1.p67.fg
MVQLDADDANSGSAASATHSHAIGDMPQPDASSRTSADEDDHGHNVGIDDIDDAGDNGSIGSDSDVPSCAVCTEPLEWAAVGPCGHRAVCSACAARVRSAPNPDNRCCICRTICPFVVVTKAAAGVVSFSTLPAVASHDDGRVGEYWYCAAVSAYFDDEQQYEAAKAVASRRHGDQPAMVHRAVHGVGSPKAPTMQIALRVYKTHSHIEIGPDFTEPGFPVME

SEQ ID NO: 18299 - protein, 574 aa, Oryza sativa
  Clone ID: TF_OSC408625j.C1.p6.fg
MLRRPLAGAPPALAVGTSLSDEGQVSSGSLVAAVEITMMTPGSSSTSVPGDEADAGNWDAGVETAARLEAMVHAEDELSEEQIQANNQTQEDELLALQAIYGDDLVIFDNKDGLRFFQISLHYQLAGDIRVYLNVCPNGRTETGAENDDDDDSDRLLYACSLQHLPPVVLACLLPRLYPSHRAPYFVVAAKWLDEPEVSSFCSVLDEIWAEQPAGQEVVYKWVDWLSTSSWFCIASDDQIVFGPDADSAGGDDRAIGRSCSLDSMIPLIQRYSKERSHEIFARRIHECGVCLSENTGRNFIQLPCSHSFCVKCMETQCRIHVKEGSVARLTCPDTSCRRPLPPALLRGLLGDGEYARCSAACVAAGDDAQCSRCFFTFCAVCRERRHVGDTCVSPNQMLDIMLERQKEKRPLAAPSPDSQAVSSKRKMEELLSLREVMRTSRQCPSCKMAVSKTAGCNKMVCSNCGRPFCYRCSRAITGYEHFAGECKLFESVGKGWFPGQAMWMNLEYDYDEIAEIGTPSWIRAIRYPCPTCGAKRTKSGNNDLLTCRGCRTHYCALCSKKVWSIAEHYGPAE

SEQ ID NO: 18300 - protein, 343 aa, Oryza sativa
  Clone ID: TF_OSC401405j.C1.p1.fg
MDGEMFGSGHWGGSFPYASIPKESQFVFDAKASPLQLQLFGSAAVPAVGSTGYYNYIANNHLSAMNQERNTNNDVGHEKQLNLQMSLNYFPVENLDRLARIGNPSAVSTGLRLSYENNEHTSITSGSGNMSSLPIMASFVDEVMAELDKENKEFNCYFGLQVEQLVKCMKDVKQRQMVEFLASLERGVGKKLKEKELEVEAMNRKSKELNEQIRQVALEVQSWQSVALHNQSVANSMKSKLMQMVAHSSNLTREGSGDSEVDNTASSQNVNAVPGVFFQSGLLGINSMADGGLGACRLCRMKEAAVLVMPCRHLCLCADCEKNADVCPVCRFPKSCSVEINMS

SEQ ID NO: 18301 - protein, 1362 aa, Oryza sativa
  Clone ID: TF_OSC400522j.C1.p7.fg
MKSNASPEPDGMNVAFFKAAWGWIKDDVMKLVEDFYNTGNLPKELNKTNIVLIPKKNRPANPADFKSISLCNVMYKIIAKSIANIIKGFLLKIDLSKAFDRLEWDFIASAMKKKGFHSNFINLVQGCISSSSFYVTFNGQSYDAFNANRGVRQGCPLSPYLFVLALNELSDQLNEDLLNNQMKGIKLSPQGPAIHSLLYADDLIITGEATEIEARKIKEIIEDFCNKSGQTPNWSKSAILFSKSTPLYIQNSIKTIFHVASVDSNTKHLGHPLFVTNRTKIFVYQFIVDKFKAKLTNLKANKLSHAGRLTLIKTVFASLPVYYMATTLLPKKIIAKLTSIIRIFWWTGVREGQDKKPLCLKSWSDICKPVQDGGLGIRDIQMANRSLILNAAWRLVSKLDEPVSQILKAGMYQWRKFEFFEEKAAGRGVPGEIASRVSCCSGGRGRVAVGCDDGTVGLLDRGFRLSYGFQAYASSVLFLQQLKQRNVLITVGDDDQPSSLSSAICLKVFDLDKVQEEGSSTTSPFCVQILRIFTKQFPQAKITSFVVLEEAPPILLIAIGLDNGSIYCIKGDIARERITRFMLQVEDGTSLPITGLGFRVEGQAHQLFAVTPSSITLFSLHDHPPRRQTLDQIGCETNAVAMSDRMDLIIGRPEAVYFYEIDGRGPCWAFDGEKKFVGWFRGYLLCIIEDQRSRKNTLNVYDLKNRLIAHSMPVGDVSHLVSEWGYIILIMSDKKILCIGEKDMESKLDMLFKKNLYTVAINLVQSQQADPASTAEVLRKYGDHLYGKQEYDEAMSQYIHTIGHLEPSYVIQKFLDAKRIYNLTNYLEKLHDRGLASKDHTTLLLNCYTKLKDVEKLNHFIKDEDGVGEIKFDVETAIRVCRAAGYHEHAMFVAKKAGRHELYLKILLEDLGRYDEALQYISSLEANQAGLTVKEYGKILVEHRPAETVEILLRLCTDGGDPMTRRGSNSMHLLMIPSPMDFVNIFVHSPKHLMEFLENYTKAVKDSPAQTEIHNTLLELYISKDLSFPSMSQENGFEEQNSKERKGKEVANGYKSGPREKGNLGKEDMNVAKDIVDRQRKGLALLKSAWTSEMDDPLYDVDLALIICNANAFKDGLLFLYEKLKLFKEVISCYKQAHDHEGLIACCKKLGDSSQGGDPSLWGDLLKYFSELGEDCSKEVKEVLTYIEKEDVLPPIVVLETLSKNPCLTLSVVKDYIARKLEQESKLIEEDRKSIDKYQDETELMKREIEDLKTNAKVFQLSKCTTCTFTLDLPAVHFMCMHSFHLRCLGDNEKECPECAPEYRSVMEAKQKLEHNARDHDLFFRQLRGSKDGFSVVADYFSKGIVTMVMVFLLAVLAIIRN

SEQ ID NO: 18302 - protein, 816 aa, Oryza sativa
  Clone ID: TF_OSC406019j.C1.p5.gm
MPGTVFVVSRESCFSAAIQMVTEITGAAGWKGTDLSLCVEKNPASLQGQDLAALGSSSGLDVVDVPFSAPTGGSFDMESSEVVATAFSLPVNDGPVETGTVESDYWRRDNSLKGIPNFNVNKCGHFFHAGCIDRWLRKYRRCPLCRGGLSSLPLLPKPDFVASYLLFIETYYVFLQSGGGGAFQAVVYKSAGQQDRCYLAMVRAPSKIRYGSGHVIRSQNPAGKNGTPGGGGDMESREWMYHWPRFLSPYRNEVAKFIGIAKVRAEKNNMRKIICPCADCKNEIAWDFDDAFKVKEHLVTRGFMDKYEIWTRHGEEQVDEPENVVPTQVEDMVHDDGSVEDKIDLEEMLRHAEPEVLMGSARGLNNFEALQKAAKEVLYDKSKGCDSDFTTLRKCYRGLTHYHPAHIKQRNSYAPFHLGPRQPGIDIDVFLEPLLEDMADLWKEGLKVWDEYLGEYFTVKAIIFVTINDYPAMFSVSGQIKGKTGCVICLNGTYYRYLPGSNKLMYMRHRQFLRTNHKYHKMKAEFDGTEETDPAPKPTSGENVCAMTEKIVCEFGKMTKKPSKGTKYKKPEKNTKGGESKKQDDSSKPDDKLPPPFKKHSIFFKYLPYWKDLEVRHAIDVMHLEKNVFDNIVGTLLDMPKKTKDGLQSRMDLVEMGIREELHPQEGEKNGKMVALGPLYLHQMWSYERYMVVLKGYVRNRAHPEGSMVEGYSTEEVVDGVCVEAIDEAEEKQSYFGFIEEIWEIDYEHTMQFPICKCQWVKYPNGVNVDKFGLTVVDLARVGHKDDPWKIKNVETSTQKTVKPYMRTDGVGKNVK

SEQ ID NO: 18303 - protein, 777 aa, Oryza sativa
  Clone ID: TF_OSC900035j.C1.p3.gm
MAPDVLGQCTDLSLCVEKNPASLQGQDLAALGSSSGLDVVDVPFSAPTGGSFDMESSEVVATAFSLPVNDGPVETGTVESDYWRRDNSLKGIPNFNVNKCGHFFHAGCIDRWLRKYRRCPLCRGGLSSLPLLPKPDFVASYLLFIETYYVFLQSGGGGAFQAVVYKSAGQQDRCYLAMVRAPSKIRYGSNICEQVTSCACKDQSSQATLIWPACEDMESREWMYHWPRFLSPYRNEVAKFIGIAKVRAEKNNMRKIICPCADCKNEIAWDFDDAFKVKEHLVTRGFMDKYEIWTRHGEEQVDEPENVVPTQVEDMVHDDGSVEDKIDLEEMLRHAEPEVLMGSARGLNNFEALQKAAKEVLYDKSKGCDSDFTTLRKCYRGLTHYHPAHIKQRNSYAPFHLGPRQPGIDIDVFLEPLLEDMADLWKEGLKVWDEYLGEYFTVKAIIFVTINDYPAMFSVSGQIKGKTGCVICLNGTYYRYLPGSNKLMYMRHRQFLRTNHKYHKMKAEFDGTEETDPAPKPTSGENVCAMTEKIVCEFGKMTKKPSKGTKYKKPEKNTKGGESKKQDDSSKPDDKLPPPFKKHSIFFKYLPYWKDLEVRHAIDVMHLEKNVFDNIVGTLLDMPKKTKDGLQSRMDLVEMGIREELHPQEGEKNGKMVALGPLYLHQMWSYERYMVVLKGYVRNRAHPEGSMVEGYSTEEVVDGVCVEAIDEAEEKQSYFGFIEEIWEIDYEHTMQFPICKCQWVKYPNGKIKNVETSTQKTVKPYMRTDGVGKNVKG

SEQ ID NO: 18304 - protein, 50 aa, Oryza sativa
  unsure (1)..(50): unsure at all Xaa locations
  Clone ID: TF_OSC900254j.C1.p3.gp
NRLPCGHIFHRACLETWLDYDHATCPLCRSRLLADSSSPPAAAAALARTX

SEQ ID NO: 18305 - protein, 604 aa, Oryza sativa
  Clone ID: TF_OSC401130j.C1.p106.gm
MAKSGRRAWWGRAWQERGVAAEGVALDAEGVLAGAEGGAKKAATAVRAKKAAASAVVRAAVCDEDAAVEALGAGAADPGEVEPNYEDKVAALVEVNTGGAVVGVPVVQVPLGQSLPPPPDSQATEASSASAASHAGDLRLRNRTSGRAPPPPPVDTNWSAAEHDHIAIDIGDSTAGSDSDDVPSCVVCTEPIEWVAVGPCGHRVVCSPCAARLRSGPNPDHRCCVCRTLCSTVVITKAATAAHSVFTFSDQSSMPVAAAQDDGRPVGAYWCSAAMSAYFDDKKHYDQVTKQVVVAAADRCFLRTPPRRPDVDASPLRRLCVRMSWRGHVLALLVVVLVTALVGGWVGYLTSGDEMMSDRIGIVAGIAALWGALAAVVYVYTVTPISTGPVTIGNENGTVTTSRNDIPPTIPPTQVENGCHFLISNNHEFNLSVLPRNETEQQPQIGSGQNAHPATTSARHNIERKPFRAAAGTRACGSGAGPWRRHDWGSGTRWRGVALTDRVMSRARPCGGGTRVADAVVADEGWPCGGGMALRGLGGRVRLQRRTAAYKRSQLNNEYGRRGVAADGSAAGQPRQVRRGATGIDVVQPGHSDCRGAAVRRRRH

SEQ ID NO: 18306 - protein, 308 aa, Oryza sativa
  Clone ID: TF_OSC411383j.C1.p3.fg
MAPGSSIVTDIPESDCVSDGLSEALTGIRLDGDSTCKPWSTSLVTVELSSLTGLNDLLECPVCTNSMRPPILQCPNGHTICSNCKHRVENHCPTCRQELGNIRCLALEKVAESLQLPCKYQSLGCAEIHPYQNKLKHEELCRFRPYSCPYAGSECLIAGDVPMLVSHLINDHKVDLHEGCTFNHRYVKSNPYEVENATWMLTVFKCFGQHFCLHFEAFLLGMAPVYMAFLRFMGEDSEARNFCYSLEVGGNGRKLTWQGIPRSIRDSHKKVRDSFDGLIIHRNMALFFSGGNRQELKLRVTGRIWKEQ

SEQ ID NO: 18307 - protein, 401 aa, Oryza sativa
  Clone ID: TF_OSC400186j.C1.p9.fg
MAVQAQYVAHASRSSSSAAYAIRPALENAAPSSGASALFLDEAVSAALLQQQLVVAAAAVGGGGNNNNTAVFSDLRSELTCSQRRFDDFGGGFVPRKRARVGGEGEAAAGLLMSSSVMEGGGHRALLPPPPPQVTPQAFGDVHKSSSRVVGSGAASTSGRPVCGGGLLLSHLYRQSVEVDALVRFEVRATDRAFIYRHGRWSSVSFCLLSSLEWAFDSICTYLQNERLRAGLEEARRRHLRAVVSAVDRAAARRLHAAEAELERALGRNAELDERLRQMGAEGQAWLGIAKSHEAAAAGLRATLDQLLQSPCAAAAAAAEGEGDAEDAQSCCFVQAPDGGAAEVSGGGNGRRACRACGEADACVLLLPCRHLCLCRGCEAAADACPVCAATKNASLHVLLP

SEQ ID NO: 18308 - protein, 272 aa, Oryza sativa
  Clone ID: TF_OSC900178j.C1.p15.fg
MTSASELFTARRARAARLSDPDPDPDPPADALHDPHGLADRRGRRRGCRPRRQLDAAGDVRQHLHTGAPPSRRRASYTDRVLSYIDNSNIGDSATRRNRLDRLMFRTNERLPGAVLQAQARVLERLRGISIGSSVSRPSITLDEFSATDVFRIIDFGNRDAPYEANRSSSSLAHPSSESDEERSPIDTSSLKRSRGLSKAAFLRLQIEIFEASKDDNREASPECSICLDGFYDGDELIKLRCGHRFHSNCLEPWVRKCADCPYCRTNIQSRS

SEQ ID NO: 18309 - protein, 154 aa, Oryza sativa
  Clone ID: TF_OSC423123j.C1.p8.fg
MESQELWALYVGVASLAIGMLGVLGVWLCYLFQAVARGPPPDPPPPPTPPCTPETEEDDKNGLSEEELRMLGGICVAVAGDGEEEEEEQLCPICLDGMEAGRAVRVLPGCSRAFHQDCVDRWLTISPRCPVCNAWVTTQSPGTSPPRTKPALNS

SEQ ID NO: 18310 - protein, 147 aa, Oryza sativa
  Clone ID: TF_OSC491j.C1.p4.fg
MPFSLLLFTGAVAGVAMLVLPWWCAVGEDDDTYIDGVVDDSYDSDSWYTDYSDEDDDDVGGDNKDGLTPDQLRRLPWFAYCGGGGRSCSICLEEMRDGERCRRPGRCRHAFHAACVDEWLTTRRTCPCCRELVLVPPAARLAAPTYR

SEQ ID NO: 18311 - protein, 612 aa, Oryza sativa
  Clone ID: TF_OSC16830j.C1.p4.fg
MTSPGASSFAAALVVEDFPWVKREEEMGMDPDKYREVFDLAQRGARAFRDGHFDEAVSFYSKAQTLRPGDPIILSNRSSAFCMISQVLRERSAADSEYQPLNGLDPTTHAEVALKDAEKVLAIGSNSPRPYLLKAYALILLMLTVGCLLLPPLGAMHDLYMIFSPLIRKLILKQHFRKPENCPISSAILFSIRVTIEVLTEAITQRRRRCIELSMDWMRRLGMGTNDEDEVMGASLLGFTFTSLNGLLSIGDLTSHVSLASSCTYANVLQVLEQYHEAREAILSGLQVDPLSHVLQSWLSDLHRNTSIAARARRPTLDRPDDFECTLCFKLLFEPVTTPCGHSFCRSCLHQSMDHGNKCPMCRTVLFIGPKTYPISVTLSNIIQKNFPEEYAERKSEHETMTYAGVDLMPLFVMDVVLPCQKMALNIFEPRYRLMVRRIMEGNHRMGMVGIDSATGTVADCGCEVEILECEPLPDGRFYLEVEGSRRFRILRSWDQDGYRVAEIEWLQDISLPDGSQERKDLMERANAASELARTYIRRAREISRPARRARQTDLESMPGPQDPEKFSFWLVNLINLRPSDRLDLLRLSDTRERISRSLRLLGDAEQICRVQ

SEQ ID NO: 18312 - protein, 993 aa, Oryza sativa
  Clone ID: TF_OSC401429j.C1.p3.fg
MADTGSLEKMGRELKCPICLSLLSSAVSISCNHVFCNDCLTESMKSTSSCPVCKVPFRRREMRPAPHMDNLVSIFKSMEAAAGTNVVSTQEAPVVKLADGSDCVNSGKNSKRSQKSLTRKRKVTSEMEKNTAKDATASASQPTTKPSFSTNKRIQVKPFPESETPIRAEKIMKPEEPKNNLNNDVEGKNKAVASGQPGSPSLSPFFWLREQEEQEGCTAETLSETQSLDTPLRHNAPSFSDIKDSDDEIPLNTTPNSKAAATELFDSEIFEWTQRPCSPELYSTPLKKQSKAKSKLDQIEEKGDEEDVHIGGSFDKLGNASNAAQLVNTKATKQKRKKTSPSNKNSAKLSNRAEPCIKKSDANQQGSNRRKSAALKSCQKSSSAVGRNTSGRRNKASSNSKPIHGSSDNSPESYLPKEGLDVEAPDKPLSERIQNLEKTSRRKGSARKLEMAGKTISDTTEKNSEPRSKRVRRMSDHAIAKPVEVPSGSGNETEIPQLHTLTKGSIQRKSSNARRHSKVCGEQEGKNKLENTTMTPIILHGKCQNKEAVCTAPSVRTASVKYKQAKFSEQPDCFGTENFGNLQACPARNVLLKKCEVSTLKVSCAFCQTDVITEESGEMVHYQNGKQVPAEFNGGANVVHSHKNCLEWAPDVYFEDDSAFNLTTELARSRRIKCACCGIKGAALGCFEMSCRRSFHFTCAKLIPECRWDNENFVMLCPLHRSTKLPNENSEQQKQPKRKTTLKGITGFSRSSQIGSNQDCGNNWKWPSGSPQKWVLCCSSLSSSEKELVSEFAKLAGVPISATWSPNVTHVIASTDLSGACKRTLKFLMAILNGRWIVSIDWVKTCMECMEPIDEHKFEVATDVHGITDGPRLGRCRVIDRQPKLFDSMRFYLHGDYTKSYRGYLQDLVVAAGGIVLQRKPVSRDQQKLLDDSSDLLIVYSFENQDRAKSKAETKAADRRQADAQALACASGGRVVSSAWVIDSIAACNLQPL

SEQ ID NO: 18313 - protein, 955 aa, Oryza sativa
  Clone ID: TF_OSC900234j.C1.p22.fg
MADTGSLEKMGRELKCPICLSLLSSAVSISCNHVFCNDCLTESMKSTSSCPVCKVPFRRRDGSDCVNSGKNSKRSQKSLTRKRKVTSEMEKNTAKDATASASQPTTKPSFSTNKRIQVKPFPESETPIRAEKIMKPEEPKNNLNNDVEGKNKAVASGQPGSPSLSPFFWLREQEEQEGCTAETLSETQSLDTPLRHNAPSFSDIKDSDDEIPLNTTPNSKAAATELFDSEIFEWTQRPCSPELYSTPLKKQSKAKSKLDQIEEKGDEEDVHIGGSFDKLGNASNAAQLVNTKATKQKRKKTSPSNKNSAKLSNRAEPCIKKSDANQQGSNRRKSAALKSCQKSSSAVGRNTSGRRNKASSNSKPIHGSSDNSPESYLPKEGLDVEAPDKPLSERIQNLEKTSRRKGSARKLEMAGKTISDTTEKNSEPRSKRVRRMSDHAIAKPVEVPSGSGNETEIPQLHTLTKGSIQRKSSNARRHSKVCGEQEGKNKLENTTMTPIILHGKCQNKEAVCTAPSVRTASVKYKQAKFSEQPDCFGTENFGNLQACPARNVLLKKCEVSTLKVSCAFCQTDVITEESGEMVHYQNGKQVPAEFNGGANVVHSHKNCLEWAPDVYFEDDSAFNLTTELARSRRIKCACCGIKGAALGCFEMSCRRSFHFTCAKLIPECRWDNENFVMLCPLHRSTKLPNENSEQQKQPKRKTTLKGITGFSRSSQIGSNQDCGNNWKWPSGSPQKWVLCCSSLSSSEKELVSEFAKLAGVPISATWSPNVTHVIASTDLSGACKRTLKFLMAILNGRWIVSIDWVKTCMECMEPIDEHKFEVATDVHGITDGPRLGRCRVIDRQPKLFDSMRFYLHGDYTKSYRGYLQDLVVAAGGIVLQRKPVSRDQQKLLDDSSDLLIVYSFENQDRAKSKAETKAADRRQADAQALACASGGRVVSSAWVIDSIAACNLQPL

SEQ ID NO: 18314 - protein, 235 aa, Oryza sativa
  Clone ID: TF_OSC29125j.C1.p6.gm
MARRVRGRARWGHEVVRVLGRGEHVLAPVSPSPTMRHLLQSSEHLTAATATAAASGGRGVHTDTFLILAAVLCFLLCVVGLALVARCSRLCNPSSFAVEAEEAMPPAPCKGLKRKALLSLPTVSFAEAAAAEEEEERPECAICLAEFARGDEVRVLPPCGHGFHAACVDVWLVSTSTCPSCRRAIVVLAAPSPAVTAAATDPPPPCCAADAAQASSQPPQPTGASDRGGCRTSVP

SEQ ID NO: 18315 - protein, 232 aa, Oryza sativa
  Clone ID: TF_OSC407333j.C1.p3.fg
MDPSGAFFHAAPRSGSNVSLASLARTAGGRRMMHRVFRGVITFIFAIAGLFLGAVTGGLIGLATESGLFRGTGIGAITGALVSIEVVDSSIRVWRSRRSGISSICYVLNVIYSLLTGRLVREKVDPAVQRVVRSQMNAVDSSPFRESPDLFEIEGTNGMPRASIDKLPEVRITEEYRRNAIGDLSGCSVCLQDFQTGEKVRSLPDCWHVFHVPCIDGWLIKHGSCPLCRRKL

SEQ ID NO: 18316 - protein, 266 aa, Oryza sativa
  Clone ID: TF_OSC422826j.C1.p4.fg
CLVHVGLVCSDSRRRPAHARSSDVESADGDAAGAGTDSSDSDDDDDEGREQRSSFAKRCESINTMVSFLWWIIGFYWVVSGGDVLEQDAPRLYWYCGPKPVPITDYFMIVQSNVHMLSVVFLAFDVFFAVFCVAMACFIGIALCCCLPCVIAILYALAGQEGASDADIGFLPRYRYSDPSEDGQKGTDEGVMIPVLNNSGTSTSERILLHEDAECCICLSSYEDGAELSALPCNHHFHWTCITKWLRMHATCPLCKYNILKGSESA

SEQ ID NO: 18317 - protein, 189 aa, Oryza sativa
  Clone ID: TF_OSC102233j.C1.p1.fg
MARMLLEAAASGSVEDSLNSDLVVILAGLLCALICVLGLGLVARCACTRRWARAAGGGTAAGGGGGGAAAANKGVKKEVLRSLPTVTYVSDGGGGEAEECAICLVEFEDGQAVRVLPQCDHRFHAACIDTWLRAHSSCPSCRRVLVAAEMPPGERCGRCGARSGGRGIGALLLNYWKAPACDAEGPELA

SEQ ID NO: 18318 - protein, 217 aa, Oryza sativa
  Clone ID: TF_OSC400945j.C1.p17.gm
MDRRRLQARAGIDDHRLESLHRPRLGETREEACAVCLQDFGEKDEELRMMPCSHSFHQRCIFGWLAIRDNCPVCRSAMSSYNDVLEELHAELEQWIQGTYGERLRRVLLPQIDGGGCLRGSRTLLTQEEAHEIIRERLRSDIRRGRIELDADFLQQLVDQVRDHILQRQRRGTATAIAMDGVLEEDAYRNGGFGAVPASSKAMVELQEAMASDARER

SEQ ID NO: 18319 - protein, 117 aa, Oryza sativa
  Clone ID: TF_OSC8676j.C1.p2.gm
MDRRRLQARAGIDDHRLESLHRPRLGETREEACAVCLQDFGEKDEELRMMPCSHSFHQRCIFGWLAIRDNCPVCRSAMSSYNDVLEELHAELEQWIQERRTVSTKLVGAQAAGQKLG

SEQ ID NO: 18320 - protein, 134 aa, Oryza sativa
  Clone ID: TF_OSC964j.C1.p2.fg
MDAEDFMDSWLMWGNIFFFFLALAITVEVDLIRLRRNDDGNNKSAHQYDMLIERLLLLRPKDDQDNEQCVICLSENEDDVDGGGGERGRGRMLPGCAHAFHKDCVVKWLRNRTTCPLCRSDVAVAAAAAADNMV

SEQ ID NO: 18321 - protein, 283 aa, Oryza sativa
  Clone ID: TF_OSC23981j.C1.p3.fg
MSGGRQSYWCYQCRQRVRPRGQDMECPYCDSGFVSEMDDVDALMRHFVGMDPDFHRDPRFGIMEAISAVMRHGMAGTNREVDVRGRPNIFSDLEMEFGSGPWLLFRGQLPGHLSEDNGFDVFINGRRGVGMRRANIADYFVGPGLDDLIEQLTQNDRRGPPPATQSSIDAMPTVKITQRHLSGDSHCPVCKDKFELGSEAREMPCKHLYHSDCIVPWLEQHNSCPVCRYELPPQSSTGASCSRTRSTNQSQSSSSNGRTNGRQRRRNPFSFLWPFRSSSSSSR

SEQ ID NO: 18322 - protein, 516 aa, Oryza sativa
  Clone ID: TF_OSC423203j.C1.p5.fg
MPIASKLVYFQRRRPSPAPPEPEPEPPDPRRSLPSRSRSLRRTPPQAAISRSFSFDGSFAVELGYQVRRCQHVRILGGRLFGLEVSSRRSRSLAMAFVQRPWLTGGATDRGGCLAGRLSRWRRRRHRRSAAERVRGGDNGVGTGLVIRGWAPQVAIPRHRAVGWSLMHCGTNTMLEATSAGVAMLTWPMVADHFVNKILLVEAGVAMHLAEGADAVPDSGQMAKAIAAVVGDKGKPFRERAVALARMAAAAVAEGGTSYRDLERGRKWGIREKRRRANESNDIFLHFDLTPLPHNVTEVLRVEGKTGQEHVPGSKRDTSKGVASAGNITGQAGSTGSSSRLNRSVSDHGRLPDSVQQARERLLQRLNSVDLSGRRQNTSLSSETIHGGVAPGVSTTADSIFSSLTSCFHTDVSIAPCKLQESTAETFNTADKHTFIAHCSEPAPTQEVASCRVTDDDELAGPSTECSICLERCGDADGLLELRCKHIFHSACLERWLRSRSDCPYCRASVLLTAEG

SEQ ID NO: 18323 - protein, 193 aa, Oryza sativa
  Clone ID: TF_OSC900293j.C1.p3.fg
MGSVKKKATAMAQRSAHHGNRTSSLKTVQSTSASAMANAAAGAGGEDAGRPQAQVQVAAVEVRSYFPFPYAAGPFRPSAGGGGGGVSLGTHQADQPPAPEVVAAQQQLPHFPYAPRGGGSASASLSVECAICLERLRRGELCSELPECRHVFHRDCVALWIKSKSTCPLCRARISPWFSGSIGAPPPPLADMV

SEQ ID NO: 18324 - protein, 357 aa, Oryza sativa
  Clone ID: TF_OSC400184j.C1.p5.fg
MGSRSGSSTTTSTPPVAPDENRPPVVKGPAIFSYTCAGLVTGVALVAVVVFYCNRHVRRRAHVVVAGGGGREDDDVRSVAGVAAKIPEFAYTGSASGGEGAAQCSVCLGAVRGGEMVRRLPACKHLYHVECIDMWLASHATCPLCRTEVEPPPGDDGGRPAPAADETPGNGDLEARIGGGVEAGTQAEIGGGEGAEEIGEEGVDSDAGGRDRRGLVDDLARDESGRCCHGMDVAKSHIATLYIVWQRRFARAAARERLERRPAAVAADEAMRLRGEEATQGGGRRCRINPMRGGGAEEIGEGGGDRGSGEEADGRGGGDAAAGRGGDAAAGRGGDAAAWGGDQSERGDERSRDGGGD

SEQ ID NO: 18325 - protein, 262 aa, Oryza sativa
  Clone ID: TF_OSC900112j.C1.p5.fg
MPGDSASSTLQYTGIGAFVAIVGIVVLAVIFYTRSSARHAAPGAAPDAVTALQGQQQQRGLGLGPDDVSVLPTFTYHAAATASPGRCGLIGRGDAKAAADCCAVCLDELGEGAVVRMLPSCKHYFHATCVDVWLLSRATCPVCRGSPGQEKVRLGLASLSPPLPQLRRCAPSPPKEAAAAAAADTSRANDDDSSAAASRSPSPIRSSTRFDLAAAAIDAAARSPAMSPSPTRPWTPERVARVSRSPSPVTTTATTDLHVVEV

SEQ ID NO: 18326 - protein, 208 aa, Oryza sativa
  Clone ID: TF_OSC34548j.C1.p2.fg
MSSSPAPVESPWLTMRAMRRVGGADGGGGQRSALMVASYPVLLLLVVLAAFVKYVWIALALYSALLLLFSCASRRLALAERLPSPLGGGGGGGGVAAVTAAEELQGAAARGGVSGETLASIPAFAYDASAHGGGGEAAAQCAVCLEALRGGETARRLPSCAHTFHVACIDMWLGSHATCPVCRRRVERKHKGGVLPPMPPEPETEPPV

SEQ ID NO: 18327 - protein, 234 aa, Oryza sativa
  Clone ID: TF_OSC401411j.C1.p7.fg
MAANVGESTSGSSSGGADSGGSFECNICFELPQEPIVTLCGHLFCWPCLYKWLHIHSHSPECPVCKAVVEEDKLVPLYGRGKDRVDPRSKNVPGADIPNRPAGQRPATAPQANPNTHFPNANPNPWFMGGGIPLANARWGNYTFSAAFGGLFPLLSFQVHGFPDATAYGQPAGFPYGYGHGHGHGHGHAFHGGHAHAAAAPRHGPPGQQQQADVYLKALLILVGFLVIASLITF

SEQ ID NO: 18328 - protein, 195 aa, Oryza sativa
  unsure (1)..(195): unsure at all Xaa locations
  Clone ID: TF_OSC404615j.C1.p8.np
MSCTSPDPPDYCSAASPELKLYQAFIFSVPVFFTFVLLLFFYLFYLRRRRANWQSLRMRTNNLIRGDNPRLECGIKKEMREMLPVVVFKESFLIRETQCSVCLADYQPDERLQRIPPCGHTFHIDCIDHWLSTNTTCPLCRVSLLPSKTASIDPVDLEAQTVEENSSLDEKRXVNYRMKGTQKRNFPSCHGGNQK

SEQ ID NO: 18329 - protein, 208 aa, Oryza sativa
  Clone ID: TF_OSC900112j.C1.p22.fg
MSSSPAPVESPWLTMRAMRRVGGADGGGGQRSALMVASYPVLLLLVVLAAFVKYVWIALALYSALLLLFSCASRRLALAERLPSPLGGGGGGGGVPAVTAAEELQGAAARGGVSGETLASIPAFAYDASAHGGGGEAAAQCAVCLEALRGGETARRLPSCAHTFHVACIDMWLGSHATCPVCRRRVERKHKGGVLPPMPPEPETEPPV

SEQ ID NO: 18330 - protein, 384 aa, Oryza sativa
  Clone ID: TF_OSC419415j.C1.p1.fg
MAGRFLLGGREIVRTGDDGPLDDGPAVAPAAGSSAPATSAAAARVTPAVLFITVVLAVVLLASGLLHVLRRLFLKSHRANASAEAVERQLQQLFSLHEDGAGGAGPGLDQAAIDALPAFTYAELLAGAAAPNGGGGNGKRQFDCAVCLCEFDGGDRLRLLPLCGHAFHAACIDTWLRSSSTCPLCRAALSARALAALAAAAADTPAAAQHRQPDVEDQKLDHHHPPPPSDEPATSFVLSVRLGRFKNTQRSDGDADASGGGSRCIDARRCYSMGSYQYVLADDNLLISVHWRPGDGISAATAAAAAGANVATARTGIKQGGGGGGGKKVFGRGDSFSMSKIWQWRGGDRRLPVLHSDASPPADDGLPWATAAAASTRTRQESDT

SEQ ID NO: 18331 - protein, 335 aa, Oryza sativa
  Clone ID: TF_OSC401520j.C1.p14.fg
MSSTMPAQGGVRHHRTCRMYWCYQCGRAIRIISYPSTDVFCPRCFGRFLHEIDPPPRPAPPPPHFFPQPYHPHYDGHPRRWLIYGGEAPPVAAPGRAFRQPAPAVPGRAFRQPGPAPAPSPAPAPPRRRMPSPPPVARRPSTPPAIDPGNYFNGPNLNNLIEELTQNDRPGPAPAPSSAIDSLPTVQITGAHLSDGSQCPVCKEDFELGEAARQMPCKHVYHSDCIVPWLRLHNSCPVCRYQLLSSAAAGSNANSRARRGSANNGGGGGGGDGRDREQTIVRWGPFSWMWPPRGLEDPDDGWEYGRRGRPEAGDAGGRMCNDHGNFRKLVTMMDG

SEQ ID NO: 18332 - protein, 124 aa, Oryza sativa
  unsure (1)..(124): unsure at all Xaa locations
  Clone ID: TF_OSC401716j.C1.p23.gp
GVEGAGAGGGLKKRALRSIPIEVYGGGGGGSPAAAAEVCAICLGEFADGEKVRVLPRCGHGFHVRCVDTWLVSHDSCPTCRGSVLHGATTKHKPTAAAAAAGSRRPGSEVDAPAAAAVTVVIAX

SEQ ID NO: 18333 - protein, 208 aa, Oryza sativa
  Clone ID: TF_OSC401716j.C1.p25.fg
MGVHTKSMSWYMGTPASPSPGSAGEAQHALSSGGGGGSDASFDTNMVIILAALLFALLFALGLNSLARLIIRWARRAATGEGAGGGVEGAGAGGGLKKRALRSIPIEVYGGGGGGSPAAAAEVCAICLGEFADGEKVRVLPRCGHGFHVRCVDTWLVSHDSCPTCRGSVLHGATTKHKPTAAAAAAGSRRPGSEVDAPAAAAVTVVIA

SEQ ID NO: 18334 - protein, 174 aa, Oryza sativa
  Clone ID: TF_OSC422293j.C1.p7.fg
MVAVPVVADDGGGGHGAKGEESVSGSVAGISPSILIIAVIVVVMLLASVSIHYFIRHLCRRSSASAAASSSAPVLPVVVRPASSAAVGEQVVGKASAERAAEMERLISRLPLFTLASSLAALPKSSRDCAVCQSAFRDDDELRLLPACRHAFHSRCVDPWLRANPSCRPKKKAT

SEQ ID NO: 18335 - protein, 243 aa, Oryza sativa
  Clone ID: TF_OSC403264j.C1.p6.fg
MAAAEEQLATTPEMEMEMEYIPLDGYNSHYVRDDDPYRRYRELRMLAPPANEISGRLLEAADEDAAMSSSLWDDEFELTGGADADRFTPPGPRLPRPPTHHLNIFSSRLQRLASTRAPPPMPPPIDDGDFGVVFLTGGARRHVAVAAARVAPADTSCLGKSKYEEPRGGGETAMGGADSTGCVICIAEFEVGDELSTIPCAHRHRFHDKCLAEWLKRSRSCPLCRHLLPAVVPANTRPNIHFL

SEQ ID NO: 18336 - protein, 289 aa, Oryza sativa
  Clone ID: TF_OSC400555j.C1.p38.fg
MDAPPAFRSSSPSSSNASVPMVVITVVGILAAFALLASYYAFVTKCQALRGLWSRGAMPWRGHGGGGARRRAAREASVIRTVATEERGLGMPFIRMLPVVRFTAAACGGAGGEGGGGGVGARISVSECAVCLSEFVERERVRLLPNCSHAFHIDCIDTWLQGNARCPFWGRGEKMGGRKGRGDSHHHHHNHNHRPDDELINSIVIEVRGEHESWVSHRGGAAAAPPATKRTPQRRRKPESVGDEAIDTRKKYDEEFAVQPMRRSLSMDDSCHKQLYVSVQEFLTQQRQV

SEQ ID NO: 18337 - protein, 179 aa, Oryza sativa
  Clone ID: TF_OSC402160j.C1.p16.fg
MAEVGGGGLPPSRAVLASRFRSNSDHLMRLHSTWINSAATPAAAPYSRESLAMLAARLLSVSDDHLQRQQQQHVSMIISTSLPGCTTGGVAPAFKEAIEALRDVVVDQLAPAAECAICLHGQDAATAAAGRWKEMPCGHRFHGVCLVKWLRVHGTCPMCRHQMPAKEAAAAAAAEGRRS

SEQ ID NO: 18338 - protein, 441 aa, Oryza sativa
  Clone ID: TF_OSC900249j.C1.p21.fg
MGGAHFPGEGEVVAGEGDAVVPLRDVGKMEHGCEHYRRRCKIVAPCCGEVFACRHCHNDATASGDRHTICRQDVEKVVCLLCDTEQPVSQVCINCGVNMGEYFCDVCKFYDDDTEKGQFHCYDCGICRVGGKENYFHCAKCGSCYAVALRDNHQCVENSMRQNCPICYEYLFDSLKGTRVLDCGHTMHMECFSEMVEHNKYTCPICSKTALDMTHHWALLDQEIEATIMPPVYRYKICLRFTQPREPAHWEGIQGVRRFAQEGIGCRDFIPFHMIFGLAMGEYCSSSSNQSKVPIILLFSASTIVQSSIVNWFSVHSSSGTILMIMTCMHPFVSAMRLKIEKCLLSFEQIVVLKYHGSFSENITRLGRTKVRSCVAHVKESWVQCWNAITSTVLKCILTQPQARNTMEDNENTKVRAVNADIKDKDIILLSCWMFASCTKI

SEQ ID NO: 18339 - protein, 150 aa, Oryza sativa
  Clone ID: TF_OSC400945j.C1.p1.gm
MGNFSSEEEPPPSPSPPPADEDVLPFEEYPPPSSDEEEEEEINHPTPQTSNEAADRRPGLLPASRKAIQGLREVTAAGAGEDECAVCLQDFEAGDKLRMMPCCHTFHQRCIFDWLRLSCICPLCRHTLPTQNVEDDRLGRAAHTVAGSTG

SEQ ID NO: 18340 - protein, 814 aa, Oryza sativa
  Clone ID: TF_OSC418226j.C1.p1.fg
LPIRLTINLLFSDGTCAPIERDTLRSLVESGATESSGCLPGCHLGSDAPPLHLSTANALGDIFFPSSDLLQANEECALAALTKLPENDRSKQLQSTSSNLLSSLNNVVQALSNLQLKHKQLAEDYQNQRDSSARKRAEHRRLKEELASAASELEETNYKLAALKAQRDNTQGARIPYPTLGNKNMPEDKELISKRLVEIKRLHEERIEILNKIATFQNILMDFKSIRSSKAFQLVNDRLQKSQAELDHYQTLLEKLQVDKDKFVWQERQFNLKVDLAEIPERVSTYCESSIADLKKDIQKLCDEKNMLILKLEEASREPGAVVTIHFTKSNFQTCLAKAALVSSIPREMGAMQSEMTKHKEASLELNSLRAEVHSLSRILSRKERDNEEASCRSARAGSDITQLQSVISDLKQTNKELKLFADMYKRESTDSREIMESRDREFLEWAHVHALKSSLDESKLEQRVKAANEAEAITQQRLATAEAEIAESGQKLGTSRKYRIMLLNIVSLRTVEVGVTSLLGDLVSLSHMLKSKQEECEAYRVEVECIGQAYEDIQAQNQQLLQQIIERDDDNTKDVRFGYIVNLIVPETQYFIEKLFTCVKLIFMEGVKAKQTQDALHLETYSLRRNLQQESSLMDLYNQKIVSLEDQLKMWSDRVGKLQEDGWQQSVSLSNYQRKLVDVHRDAQKLMQSLDGIQANVGSSRLEVADLLIELEKERFSKKRIEDDLEVMSRKASSLRAKARESAVLEKLRHEVKEYRGILKCGICHDRQKEVVITKCYHLFCNQCIQKSLGNRQRRCPSCSLSFGANDVKPIYI

SEQ ID NO: 18341 - protein, 253 aa, Oryza sativa
  Clone ID: TF_OSC400220j.C1.p16.fg
MDQIYMAAVNNKTSLPDDEPMKKISGDMPVTAGNACFDCNICLDFAAEPVVTLCGHLYCWPCIYEWLCPGVGSTASNNSSLARRQCPVCKATLSPDMLVPLYGRGGSLKKSLNGVPIPRRPTVQREAVEHQNTHNNIDDRHHENMEPSPPPQPLRHSSHHSSATEFDFIYPPSPIGRGLIHSTAGGVLGGMAVAVLPWAFRGQVPPSMFMSPHYVTAHNMSSRARRHQMEVERSLHQIWFFLFVFVVLCLLLF

SEQ ID NO: 18342 - protein, 165 aa, Oryza sativa
  Clone ID: TF_OSC405087j.C1.p5.gm
EEKERFRNIKKPPVPPPRPRSPSFVWRAPLLPPRFRSHRVPATTVKPSARPVVADDVALLAYAYEKKKKKRRGSDGDSGGGDDGDGGGEECSVCLGEMRQGEAAKRLPVCLHVFHEECIDMWLGSHATCPICRSPVDAGAVAARVQRFSRCVFICIYFELDPFVD

SEQ ID NO: 18343 - protein, 320 aa, Oryza sativa
  Clone ID: TF_OSC900068j.C1.p18.fg
MAAAGVSRSMVLTLLGFCVSVLFIVFVCSRLACALLRRRRGRARLRRASPLAVSGVLSIYVDRHGHHQPSSAAGAASGTGGLDPAAVAAFPTRAFSPAASSSASASTQCVVCLAEYEEKDVLRVLPYCGHGFHVACIDIWLMHHSTCPVCRISLCDYPDSKHTMSPVPSAVIIPLPPCSPEASRSDQCNCLFVGTGHSPRTSQVLRNEPDQVKLPVILETSTQGDPWIAVIGSDGDMISLLKPGASSGRRTAYMFVHAWMSAGPIMAHTIDLNFVCSKHQQQQWFFFPAATGKSRVEPRDADAGLHSCLLPDLRELALKI

SEQ ID NO: 18344 - protein, 292 aa, Oryza sativa
  Clone ID: TF_OSC900298j.C1.p20.fg
MRGALAAGGGIPSYAHRDGDGDVECAVCLRRGGAGGGGAAAAGVPARVFHAACIDRWLRACARAPPARFAGGGKERKVFCRVPIVLKLLLAVVPLAVIAGVLVYVAGVPWAISIVVLVVVFVVVHRARRGRSPAAGGGGGMVRDDQEPTVARPAAPSAVVVVVAPPLPPPFPIHRVPATTVQPSAPPVVAEDVALLAYAYEKKKKKRRGSDGDSGGGDDGDGGGEECSVCLGEMRQGEAAKRLPVCLHVFHEECIDMWLGSHATCPICRSPVDAGAVAARVQVQVQVQVLSC

SEQ ID NO: 18345 - protein, 213 aa, Oryza sativa
  Clone ID: TF_OSC400259j.C1.p108.fg
MDVEQLQQHARRLLSNGRVVSAAAAAGASPGPAGRVLEGGAAAAARRPAPFSSLDATVITVLSLLLCVLVVGLVLHAIARCAFRVTRRMCYGQEPPGDHGDEAAAERCARVARKKPGRAIAEKIPAIVCPAGGLDRLAGCGSTECAICLSEFAQGHRVRVLPRCGHGFHARCIDRWLAARQTCPTCRREPFAAAAAVQLQVYPDAAGGQHETP

SEQ ID NO: 18346 - protein, 181 aa, Oryza sativa
  Clone ID: TF_OSC407812j.C1.p3.fg
MEVSHMANCSNVSSPEQQPMPPSSAAASSPSPPQLDYDVVVILAAMLCALVCALGLNSMLQCVVRCTRRAVADPVGWVEHRRAGAGLKREDVVALPVATYVASPAPSVAGCAICLSDFADGERVRLLPACGHRFHVVCIDRWLLAHCSCPTCRRRPSPEADGHGAVVGEDHHHRLQVLTAA

SEQ ID NO: 18347 - protein, 386 aa, Oryza sativa
  Clone ID: TF_OSC408022j.C1.p9.fg
MASSPPTTPNLGSQPTWVPYEPTRDCSQGLCSMYCPQWCYFIFPPPPPAFDITGSSSDDSSGPTFSPLVIAIIGVLASAFLLVSYYTIISKYCGTFSSLRNRLLGSSAHRGSGGGADGGDNSRSQEPWSVALSDGMDETLINKITVCKYRRGDGFVDSTDCSVCLGEFREGESLRLLPKCSHAFHVPCIDTWLKSHSNCPLCRCNIAFVTVGMVSPEPEARVPREDRRDNHELVLTIDNPEHVREEPQNVVTGVAVGNGGRNHEAKDGPGRSEDANGTAEIREDGALMPPTRAPSSLSDTHREGRMSIADVLQASLEDELMVARESGLLAGSSGSSRRCHGEHSKDGGGRSGRALPDGANMKRLAPAGRSCFSSRSGRGKDSVLPM

SEQ ID NO: 18348 - protein, 1155 aa, Oryza sativa
  Clone ID: TF_OSC401134j.C1.p46.fg
MATPTPMAGEGTLAAVMPRSPSPTASAAAGSAAEAPMLIFLYFHKAIRAELEGLHAAAVRLATERAGDVGALAERCRFFVNIYKHHCDAEDAVIFPALDIRVKNVAGTYSLEHKGENDLFSQLFALLQLDIQNDDSLRRELASCTGAIQTCLSQHMSKEEEQVFPLLTKKFSYEEQADLVWQFLCNIPVNMMAEFLPWLSSSVSSDEHEDIRSCLCKIVPEEKLLQQVVFAWIEGKTTRKVTENSTKSNSEATCDCKDASSIDHADNHISSHEDSKAGNKKYAESIDGQVERHPIDEILYWHNAIRKELIDIAEETRRMQQSGNFSDISSFNARLQFIADVCIFHSIAEDQVVFPAVDSELSFVHEHAEEERRFNNFRCLIQQIQIAGAKSTALDFYSELCSHADQIMETIEKHFCDEETKVLPQARMLFSPEKQRQLLYKSLCVMPLKLLERVLPWLVSKLSDEEASSFLENMRLAAPSSETALVTLFSGWACKARSEDKSNSGEYLCLTSGEMRCLLDEVDGLEKCRPFCPCASRSNTDASLHPQTENGSRPGKRGNDAESVPGTNGSDLSQTDDTEARPCSKKPCCIPGLRVETGNLAISSSLASAKSFRSLSYNSSAPSLYSSLFSWETDASLSCSDGISRPIDTIFKFHKAIRKDLEYLDVESGKLIDGDESCLRQFIGRFRLLWGLYRAHSNAEDEIVFPALESRETLHNVSHSYTLDHKQEEQLFGDISDALAELSQLHERLTHPHIEVSEAEKNDFNSSDEIDWTRKYNELATKLQGMCKSIRAALTNHVHREELELWPLFDEHFSVEEQDKLVGRIIGSTGAEVLQSMLPWVTSALTQEEQNMMLDTWKQATKNTMFGEWLNEWWKGAPTSSDSSEEASSAPEDSHLQDKIDQNDQMFKPGWKDIFRMNQSELEAEVRKVSRDPTLDPRRKAYLIQNLMTSRWIAAQQKLPEPKSEECSEGAGIPGCAPSYRDQEKQIFGCEHYKRNCKLVAACCNKLFTCRFCHDKISDHTMERILMLPDHTRESDTGDDVHGLGVDFFHCMKCNCCLGMKLTEHKCREKGLETNCPICCDFLFTSSAAVRALPCGHFMHSACFQAYTCSHYTCPICCKSLGDMAVYFGMLDALLAAEELPEEYRDRCQGCSLAS

SEQ ID NO: 18349 - protein, 150 aa, Oryza sativa
  Clone ID: TF_OSC8662j.C1.p1.fg
MADEQIRDLNLSETHTLLLINLYLSHVQGPSYVPHGVESAYIHINRDIEEDDDTYSDDGFCAVPASSDAIAALPVPETTVSETETREEEACAVCLEGFKEGDRVKKMPCSHDFHANCISEWLRVSRLCPHCRFALPAERDSEQKNPEGEA

SEQ ID NO: 18350 - protein, 111 aa, Oryza sativa
  Clone ID: TF_OSC8664j.C1.p2.gm
MATTGRLLLPHDINGRFGSVPACSEAIAALEETSAGEAKEKDCSVCLEAFEEESDKLMRKMPCCHAFHESCIFEWLQVSHLCPLCRFALPTQAEAEAGLWPLLTPGSGSGT

SEQ ID NO: 18351 - protein, 263 aa, Oryza sativa
  Clone ID: TF_OSC23746j.C1.p8.fg
MEGRVLRRSVTLADQLAAVGPAGTAAATAAAGSCNLRDLLKLRDEDDLAAGRRAAVTLASAMAAERLTVAPASSAAAAAAAARTLLDIIRDDQLPSSSGGGGEGGDPLVRRAVSLPAPVTATPPPPPPPPETPPRQLPSVSPPTVGEEEEEEQGERVSLMALLEQTERQWSAGSGATVQQHLASPSAAASASVSAAAEDEAEAEAGKGAAGGGCCCVCMARAKGAAFIPCGHTFCRTCARELLAGRGRCPLCNAAILDVLDIF

SEQ ID NO: 18352 - protein, 334 aa, Oryza sativa
  Clone ID: TF_OSC401719j.C1.p43.fg
MDDDASSYTYCCHSCDSFVHPHPHLDAAVLCPHCNAAGFLHDHEMPPAADHSPFNPPVIVLRRSASPDDATTFDLLYDDGASSALRPLFDRLLLRIPSASDNPNPPASKAAVDSMPTILIGACHLAADSHCAVCKEPFHLAAEAREMPCAHIYHHNCILPWLALHNSCPVCRHRMPTDDHDSTNAAAAQAAAGSSDEDATTVGTLTIWRLPGGGYAVGRFAAAGGTRAGERELPVLYTQMDDGGFNGGGGSGSPTMIGWSSRGSRSSQRQRSIIPRLFRNMFACFRHHDATADSGDYSSRAGRRSSSSVFTRSLRSQITSWRSEDGHPDAIATR

SEQ ID NO: 18353 - protein, 300 aa, Oryza sativa
  Clone ID: TF_OSC405090j.C1.p1.fg
MAALVLSVVGCFAPKSVWKASVLAGMVLLAFGVADYLAPASWCRRRGGTNTRAAEREAQPGASSSSTFGLEKAAVDALPTFAYASGGAGAAQGGGDLEAGNGEPCSVCLEELHAGEIVREMPACKHLFHVECIDMWLHSHRTCPMCRCDLSPPREVAAKEATAAETAAPPGDDALPPDRIAQRGIFPLDDGWINPADLPGYSRPSARASGASDEVGHVTPLTMREQRRREGGSGMQARLPASGCECGGGSGKKGGSEPEGWRRRQRKEGVAASPKARDGGNGKKGRWRARRRMNHRRRLG

SEQ ID NO: 18354 - protein, 335 aa, Oryza sativa
  Clone ID: TF_OSC900298j.C1.p27.fg
MSNVFARISAATLRGGGEEERGGGRGRRACYGIAASFAAVLLFCVLAVVGSVWKASVLAGMVLLAFGVADYLAPASWCRRRGGTNTRAAEREAQPGASSSSTFGLEKAAVDALPTFAYASGGAGAAQGGGDLEAGNGEPCSVCLEELHAGEIVREMPACKHLFHVECIDMWLHSHRTCPMCRCDLSPPREVAAKEATAAETAAPPGDDALPPDRIAQRGIFPLDDGWINPADLPGYSRPSARASGASDEVGHVTPLTMREQRRREGGSGMQARLPASGCECGGGSGKKGGSEPEGWRRRQRKEGVAASPKARDGGNGKKGRWRARRRMNHRRRLG

SEQ ID NO: 18355 - protein, 428 aa, Oryza sativa
  Clone ID: TF_OSC100279j.C1.p12.fg
MSNSTWQPSPPQTPAAAASSASGIDGVENKISPSIVFIVAVLAIVFFVCGLLHLLVRHLLRLHRQRRAREDAESATAFEGQLQQLFHLHDAGVDQAFIDALPVFLYRNVVGVGGEDGKDPFDCAVCLCEFAADDQLRLLPKCSHAFHLECIDTWLLSHSTCPLCRRSLLAELSPTCTPVVMVLESESSRDMVHAADDEPADVGGEDAPGAEEVVEVKLGKFMCVEGNVFFNVNAIAGEGDRAGTSSNGNGDANAKAGGLGQRRCHSMGSYEYVMDAHASLRVSIKPPRKKPAAAASKSRRRGAMSECEFGASKRGESSLRLPPFRATPRKNPDDDAAAAAGAKLAKDSFSVSKIWMVPSKKEPGAAAERRAVSFRWPAAKDWDVEAGSCGGNSAVSSVAAEERPSFARRTLLWVVGGSRQLSRVGSCS

SEQ ID NO: 18356 - protein, 207 aa, Oryza sativa
  Clone ID: TF_OSC411506j.C1.p3.fg
MASFLDSFSSLGVGYAVAIALGFLVLLASLLLAFYFCSRRGGAGVVRRGGGQGVHSARHAVSSASSSGHISITVPRVIFVADDSDSPGSSSRGGAGGGAASSPVGLDPAVIASYPKVPFSRAATGADAEAACSICLCEYKEGEMQRMMPECRHRFHLMCLDAWLRRSASCPVCRSSPIPTPVSTPLATPLSELVPLSQYAADRRRHR

SEQ ID NO: 18357 - protein, 823 aa, Oryza sativa
  Clone ID: TF_OSC900235j.C1.p2.fg
MPAQKRPAPEAASAPAGGDGHVEGGGAGGGGGADEDAHRGGERSPKVMNGGGPEKEKERRDADSDAEEEEEEAGGGGGGGGADEDRDSPSSESDGDMDEFILVKLMDIRKEVQCPICLGIIRKTRTVMECLHRFCRDCIDKSMRLGNNECPACRTHCASRRSLRDDPNYDALILALYPDIDKYEEEIQASIAETFRRQSEALVKKRSVAKATGSTITRRTRGNMRAKRRGRTSSPDIVATDNEDEDRDENGNEGSKESSSVDDRSPDVRQKRVRRWPVPRSSPAKSIGGIDSSFEDIDDLGSGRDIMSTSPLRGEMLAWGKNGTRSQTRHGNSGGSSGRMAKGGRVTKLVEYLRNTDEFDNKFNLYLVLLPLNGQSMPKLEKPYLSCQPTFSVRHLCQFVALQLSRHAKEVEIFIRKNPNNGCFASIDTSADEIKLNHDALERLEEEKSLSELYPSLASGHGDLAPWTRYGALNNEQMVGCRKNREVIKLLLTGAGLTVCHAMLPLKLADWPSTLTQSRCQSNWPMSLEVLSESLLCFGATSVTVDDIAAAGNLDEITITSIFAHGEDVGSCVSSAASSAGLEYNPVYESSVGKQCDWVTVVQETYESTKVIDGLWVIPKWRTPPDPQAINIIINPGLAFGTGEHPTTKLCLLLLRETVKGGERFLDYGTGTGVLGIAALKMGAALSNGIDIDPQAVTSACENMMLNGIDSNKMLVYLVPTNAQSACFPSNIDKSEENRPTGNLELKSSKGSYDIVAANILLNPLLELVEDIVGYAKSGGIVAVSGILSEQVPKVEEAYSRYLENISVSEIDGWACLRGNRRA

SEQ ID NO: 18358 - protein, 436 aa, Oryza sativa
  Clone ID: TF_OSC400351j.C1.p25.fg
MEALSRTERVGGGGGAMVEVAFASSAGSSAAAPRRLRGELVVRDAIPYAGVAPPPPALPLPQPQLQPQVQATTSGGGGGGKISPAVLFIIVILAVVFFISGLLHLLVRLLMKKQHRRGGGGGAAAGVSRSAAGDDAGGGGDAALQRQLQQLFHLHDSGLDQAFIDALPVFAYREIVVGGGGDGDKEPFDCAVCLCEFDAEDRLRLLPLCGHAFHLHCIDTWLLSNSTCPLCRGVLFVPGLTENNPMFDFDEGLEEGRLSEDCDNGFGYPGHKATEGMQTPGTEKRVFPVRLGKFKNVGTQGAVEGGGIGNANGAVLRREEGESSSSSLDARRCFSMGTYQYVLGTSELRVSLQPDRIRNGGGGVTRARPTGLSSVNAEIMEGKKICARNKGESFSVSKIWQWSNLKGKLPTGSDECSEAGSLPWMKRGGIGDTSNM

SEQ ID NO: 18359 - protein, 426 aa, Oryza sativa
  Clone ID: TF_OSC401057j.C1.p12.fg
MGNMGSSGGHRRRNNGHGRHHHHGQPTAPPPPPQQQQQEVAPNRYVFAAASPYPPQYPNPNLPQYYPQYGNFYPPPPPSMPGPLPAPYDHHHRGGGPAQPPPPPPPPQPIHAAGEFPPAMLQQHPHYHGWGGNFSYGPPTQPPAPAPPYVEHQKAVTIRNDVNLKKETLRVEPDDECPGRFLITFTFDATVAGRSMTVYFFAKEELNCNLTATKEDLLKPVTVTFKEGLGQKFRQPSGTGIDFSLFEDAELFKEGEMDVYPLAVKAETTFSIGQFSEGEEQKSQTPNSQITQAVFERKENGDYHVRVVKQILWVNGTRYELQEIYGIGNSVEGDTEGNDPGKECVICLSEPRDTTVLPCRHMCMCSECAKVLRYQTNRCPICRQPVERLLEIKVNNKGEEQQQQQIPQPPPPPSTAPPHQQQESQA

SEQ ID NO: 18360 - protein, 133 aa, Oryza sativa
  Clone ID: TF_OSC401965j.C1.p31.fg
MVVVVSHVMALLSSALSGKKAAAEGDGDDDGGQCRCWRDGDGVGGGQAAAAGCCVCISGFRDGEEVRRLPCGHAFHRDCVDRWLALYCRRRTCPLCRLHVGGAVVAAAVAGLDELQLGDDLVIWFSSLFVAGF

SEQ ID NO: 18361 - protein, 170 aa, Oryza sativa
  Clone ID: TF_OSC20545j.C1.p13.fg
MSLPGVSASTFKSPVFIGLLAVMCVAVVLLLHHCVLVTFCDTRRRRRRRRRRGTSTQQQHVQQGEDDDDDDDEDDMMSSSSQAKLVVCPYKKAEEWGEAMCPVCLSEFGDGEAVRVLPECMHYFHVDCIGTWLRANTSCPLCRADTTPSSGDLHHHLSISVSLEEILVRT

SEQ ID NO: 18362 - protein, 163 aa, Oryza sativa
  Clone ID: TF_OSC900108j.C1.p13.fg
MDDDGDWITARYLLSSILGRNPLVVDYVDEESFPVEDPPPVAGGARGGRQAVVSQPPVVRATAGVAGTVCSVCTEEIAVADAVVRLPCAHWYHAGCISPWLGIRSTCPMCRAELPASDDAAEEGGGAGREKPPRAGRAGTSAGGGVRRDASYELLAGGGVLSG

SEQ ID NO: 18363 - protein, 413 aa, Oryza sativa
  Clone ID: TF_OSC412800j.C1.p2.fg
MGSPRGRRRGDNGRLLLLAAAAVVIASLVGGGAAQPTTSGPGPNYFNPKSFNPSMAVVIVVLVTAFFFLGFFSIYIRRCAGGPLGGPGGYGVGGGGGGRVGGGFTFAAARSRRVRGLDPAVLGAFPTMAYADVKAHKAGKGALECAVCLSEFDDDETLRLLPRCSHAFHADCIDAWLASHVTCPVCRANLAFDAGVPPPPLAPPHALTTGQDVAAAPPQPAAPEQVTVDVVVADAEETEERIRREEAAELMRIGSVKRALRSKSGRRPPQFPRSHTTGHSLAAAAAVPATADDAAERYTLRLPDHVLREIVTSARLRRTTSLQSFRTTAAAGGGARAGRSVRLGQSGRWSNVSSLMRTFSARLPAWGSARRGAEADSPGKDGAKVAGDCTASVEQHCDGGGGGACPRPLGDHV

SEQ ID NO: 18364 - protein, 182 aa, Oryza sativa
  Clone ID: TF_OSC423581j.C1.p8.fg
MSAGSPSPGGGDGGGGGGSIFGSGGIGGFGYGVGASVGVLLVVSTVALAIYFCSRTSMPVAAAAAGRPPSPPRPRDDGDVETGTGIDDATLEAFPEVVYGEARKARGGAAATQTCCPVCLENYGDGDVLRALPDCGHLFHRECVDPWLRQRPTCPVCRTSPLPSPMPTPLAEVTPLALVRPS

SEQ ID NO: 18365 - protein, 576 aa, Oryza sativa
  Clone ID: TF_OSC401769j.C1.p7.fg
MEWGDTAGWLAEEDNAIEPSLSGGGGRVQGTRIALGQAASGAVCLGAGKDRVPEAYVVVVHGRRRGRRLRVRAMLKLNNGRTAVSPLRGSGAVGAEAYLEGIDSSRWATAVAAAASMGTVSRLSLKHLLRCFDFYSIDRKFCNGTNLNTLYQYHWSMRLSTGSWHSWYPVKHTEIKVVSIENSEVLADGSKGVVKVRGPQVMKGYYKDHFFQFTDAKMMGCSFQISPILIVNESFTVDNGLLTSTLKIRRDKFRSANETVDHLFVSCPLARFACNVIASAFGLEKINSIQHLLEAWLNEFDKKKKQLVAVGIAATLGRWKAKEVYNVGSTLRLAKAGCKRDYIIPSMAGTLIEDGWSLWAYILPFMPGALHVSRTCNLIGCVISILHPGKGNADEVDGIRSEDVACLICQELLFDPSVLNCGHVYCMPCLTSVGGEELECQFCGAPHPAEPTVCSNLKNFLKHRFEELYNSRQEKSSGVPSRKEGTRKGKPSEILHTHVGVGCDGCGVFPIQGRRYSCKECEAPGLDLCEKCFMTGSTAEGRFDQKHTADHDMELDDSFLFPNLVDYMDDLYIDMT

SEQ ID NO: 18366 - protein, 313 aa, Oryza sativa
  Clone ID: TF_OSC400772j.C1.p73.fg
MGNIASSGGASPRPPPPHLEAYRHGVPPPYYHSYPRPPPGAAAPPPVPVPAHVERHRAVAVSVGVNVKGDTLRLVPDDDDDDGRSLLLAFSFDADGPGSITVCFFAQEDKCALKTAKENLLQPVTVPFKEGRGQEFKQPSGSGIDVSRFEESELTNVGEGGVFPVAFKVQMDVSGNQESEGAHETEQSKYLVKYAIFVKKDNAEYGVHVVQQILWVNGIRYVLQEIYGIGNTADKNAHEDDSGKECVVCLSEPRDTAVLPCRHMCLCRECAQVLKYQTNKCPICRQPVEGLREIEVDNKPIPQQGSQQLTAPQ

SEQ ID NO: 18367 - protein, 303 aa, Oryza sativa
  Clone ID: TF_OSC400964j.C1.p102.fg
MTLSEQLSAPDQAIRDFLKIPHDGLGGGDGEGGRIPAAAGASGGGGGVGGMINWKPLRDRLRLRRAASAWMSASPKPAASNSGGGGGGGATLSSSNSGSNHSNKYNYSPGEAAAAFSRTFSRTRSLRPTPTFSRATSTRLGATAFSSGSRRAAVDGGGHANEDDDEDHTDDDDDDDEEEQGKDDAPAAQMSLMALLEQSDSQWDSEDEDDQGHGGGGGGGGNGGGGGGGGARKNGDGDDDEDDGEGREEEMVHVCCVCMVRHKGAAFIPCGHTFCRLCSRELWVSRGNCPLCNGFIQEILDIF

SEQ ID NO: 18368 - protein, 348 aa, Oryza sativa
  Clone ID: TF_OSC416024j.C1.p2.fg
MGVAAANVAAFVLLAIAPVAAAPSSPPRSGGDSLSFSDVISISFFMAVFFPVFIVLLAFACLRLFRPLDDDDGEPALADTSSSEWSRRGGGGGNRAGLDAAEIAALPLVSYRDARRHRIGDARGDPLECAVCLLEFEDDDALRLLPACPHAFHPECIGLWLEKHVTCPLCRANVLDAPPPPPPPPPSLEQDTASPPPAHETVVVIGDAGASEEAEAEERIRIQCLAGVRRAAGRQALPRSNSTGHERGGGGMERFALRLPEHVRLEILMSHRLRHVTSAVASVRVREGSAHDAGAVRNAVARLLSLFVPGAGWKGDDEGKSSKAAEGSSRRRRDESARGGVGEEKRSE

SEQ ID NO: 18369 - protein, 243 aa, Oryza sativa
  Clone ID: TF_OSC900160j.C1.p18.fg
MSEEQGLIHCAALLLLLLLEHVGDAAGRANAIQRNYGGACVQMRLSCSSLAPFFLYLIQWLDCGCCYALPSYLGLFHILICKVYADGDSSVSTYERRASLREFYALNNLCLPAIIYPILQQLEGSLIERDLKGKGRCKDIVSRKRLEDWRKLCNKDVEREDECGICMETCTKMVLPNCSHAMCIKCYRDWYRRSESCPFCRGSLKRIRSRDLWVLTNYNDVVDPVTLERENVKFIVLLMVSLL

SEQ ID NO: 18370 - protein, 167 aa, Oryza sativa
  Clone ID: TF_OSC400184j.C1.p4.fg
MSMPPPVPQENQSVGKGTAIFSYTCVGLTGVALVAVVVFYCNRHVRRRAPVVAAEGAGGAGGREDDVLRGVADVAAKIPEFAYAGSARHGGGGECSVCLGAVQGGEAVRRLPACKHLYHVECIDMWLASHATCPLCRTEVEPPPGDGGGRPAPAADESSPTEALPPV

SEQ ID NO: 18371 - protein, 400 aa, Oryza sativa
  Clone ID: TF_OSC900298j.C1.p28.gm
MTRASRASLLLFCFGGGDDDYECRACYGVSVACVSLLLFCVLAASVSVTKACAVAGLAVLLFGVIGWFVPLCGAGGPPARAGAAAGGGGRGAGAAGVTRCACRLVGAALIATLPAFVFEGPAEGGAGGGGGSKHGGSVLCAVCLEDVARGETPRIPRARNLKTGRAAGPTPTPRARTRRATTGLQMFNGERRPAASQRGGDGGYLACYSVVMVCASLLLLSVLAATVSIAKACVFAAAAAVLFCAVGCVSRWCGDAGGAPAALPTTAAAAEEARARAPAAAACATCGLVGAAIDALPAFAYARPAADDGGGGGSKSGRCALCSVCLEDVQAGEMVRQLPACRHLFHVGCIDMWLHSHSTCPLCRCNVSPPATIVVKATATSTATAAAAAQQLPADTLPPV

SEQ ID NO: 18372 - protein, 141 aa, Oryza sativa
  Clone ID: TF_OSC932j.C1.p2.fg
MDAEDIVDCLMWGIIFFFLLACIGVALCFLALTIATVVGLIRRRNDDANNKYDMLIERLLLRPKDDQDNEQCVICLSESEDDVDDGGGERGRWRMLPGCAHAFHKDCVVKWLRNRTTCPLCRSDVAVAAADDIISTADNMV

SEQ ID NO: 18373 - protein, 719 aa, Oryza sativa
  Clone ID: TF_OSC20084j.C1.p3.fg
MAVAKWERAKRALATRLCVRAPRVRAAAAEAEGEGEEGEGRGRSVAASPPAHVASSRRLSRCGSRSSTKICAICLGGMCSGNGQALFTAECSHKFHFHCISSSVRHGNTVCPICRAVWKELPFQGPLPAAAAADASLLGTARVNPHPLDDRHQHQRMAVVRRLSRGDSVTRQWQLPIFRTLDGGIFDDDEQLDLHPAEDVVGTQDVDSIVADEMAPASVGITTYAAFPAMEESVMVEEFAVLIHLKAPSSPATVTSRAPIDLVTVLDVSWSMAGTKLALLKRAMSFVIQALGPGDRLSVVTFSSSARRLFPLRKMTESGRQRALQRVSSLVADGGTNIADALRKAARVMEDRRERNPVCSIVLLSDGRDTYTVPVPRGGGGGGDQPDYAVLVPSSLLPGGGSARHVQVHAFGFGADHDSPAMHSIAEMSGGTFSFIDAAGSIQDAFAQCIGGLLSVVAQELRLSVECGDDGVLLTSVRSGGYASHVDGDGRGGFVDVGDLYADEERDFLVTVRVPAARGVSALITPSCTYRSTATMETVRVGGDTVTVPRTVDAPVGYDGMSPEVERELHRVQATEDMAAARAAAERGDFELAAAILDERRGVLESRADDDPQSVALAAELREMQDRVETRQRYEESGRAYMLAGLSSHSWQRATARGDSTELTSVIHTYQTPFMVDMLQRSQTLQPEVVVAMSRSAPLPAPSLSLSPPPPPSQLRRRS

SEQ ID NO: 18374 - protein, 499 aa, Oryza sativa
  Clone ID: TF_OSC400622j.C1.p109.fg
MEEAGDEEGEQGLRLGGVGDGADGEEEVARGVVAPQVLELSSSSSGEEGGSWEEEESQGSVEVTRGGGGDREARVSESRDSAEVNGGEAESQSLPGCPICMNAWTADGAHRVSCIPCGHVYGRSCLERWLLQCRKKPATCPQCGRRFKLNNIINLYAPEISVPNNDLEKQVLSLREKNESLEKQNQELVQEINEHKRQIILQQNFINESSLKRKNEFFLDGARVMGIDASSQIILTSGRAPGIGAEHVLTKAPGWSCSGDQNSPNHIYAGLQNGMLLTFDIRQTVAPLHSMMGLSTHPVHTIHSVVDGGGSRKVISASSIGPCIWDVDGSRNRPDLLNGMENHGVCISLACNPPSSDLLVASFRPKVELSDDGTSQAGKSQSPTPSASGKLGCHALIRRTSNTSFARDQICRGNVSGLRMSKSAIIPFTGRSNQQHLFAYGDESLRGVRTWRLPSLQTFADLRPHRQPILDLRFAESSSTGERYLGCLSEDRLQVFRVR

SEQ ID NO: 18375 - protein, 175 aa, Oryza sativa
  Clone ID: TF_OSC400283j.C1.p29.fg
MDLVGAMASLVFLHLLCAGWRMLRMWTAAGWPWPYLAAGTLDQALRPQCKLCKQKMMAGAVVRALSCDHVFHKACVDERLRNRKHGMRCRICNRVARCMLPWKASPANLIDHNAQRFQHIRARGGVRTLDRALNDACPICQHRMVARDDVRTLSGGHDFHEDCDIAKWLRDNKKA

SEQ ID NO: 18376 - protein, 235 aa, Oryza sativa
  Clone ID: TF_OSC401583j.C1.p29.fg
MGGFCCCLCTDDFEEYAHPNNPIYRQGVCLRNFFHNFFGGYTATFQRLESRPSNPAQGAAPLASTNPSTNITDNSLSETYHLVSRPPPYDTDPRYARVQREGLVSRREKSINLTQEESLALRRNGSSSGIEHLAAQKKWSSTEPEGEYKVHRSESTKSLSAKSYNSSFAVVTSEDEDVCPTCLEEYTPDNPKIIAKCSHHYHLSCIYEWMERSDTCPICGKWKAKDLQCDMLESL

SEQ ID NO: 18377 - protein, 222 aa, Oryza sativa
  Clone ID: TF_OSC415227j.C1.p3.fg
MEVAPAAAMTRAEEESRRRAATRLPRLLRGVVSGMLTGIFAVAGGLTGAVTGALAGRASDGGVLRGAGLGTFAGAVLSIEILEASRAYWCQDRSSSPGSLSMGDFVKQLIHARFVQEQNEASGHITYRWQVGIADVVNGAVHEILGDVPSGEGLSKYSLMKLPYHVVIDHNNGSIGESLSCPVCLQDVVAGQTVRRLPKCSHTFHQPCVDKWLVGHGSCPMY

SEQ ID NO: 18378 - protein, 348 aa, Oryza sativa
  Clone ID: TF_OSC401237j.C1.p13.fg
MASEDGCGGGNPPGDAAAAPPVWNAAPAAGAGCGDLEEDLRFQCCVCLELLYKPVVIEDEKRVDTYSPQIIEFLNSKSNNCEIDGENRPEESNSRPPQEVTSDGNTINGHPKKVKLEDVSCALCKELLYQPAVLNCGHVYCMSCLSSLDDGALKCQVCGGLHPGDFPNVCLDLDHFIEDYFPAEYDLRREKIKLLKGECNQGSSSGTSCIKEGRGRPTNKENRAHQDDDLSDVHIGVGCDSCGMYPIRGKRYKCKDCTELIGFDLCEECYNTKSKLPGRFNQHHTPDHRMELDHSALFNRLMRLQGIHEEGPGEIIIEGAFVAPDAVVHIIADDHEEIEDNGEDDHLL

SEQ ID NO: 18379 - protein, 231 aa, Oryza sativa
  Clone ID: TF_OSC18908j.C1.p4.fg
MGANDGHLDATSNNRGGLHEQTTTGCLPVDQSCFALSRLSYRRSSSSNPRACCSTTSYLEVLAISLASLLVIVLVLCAIRCYRMRRAVNRVTVAAASAAAAAAAAGNVTNKKRPAPGLGEDAIAALPKFEYRGTGDECDRWECSICLCAVADGEVARQLPRCMHLFHRGCVDMWLVAHTTCPVCRAEVVVNKPPDEDDGRCAETPEDEAAPPASALEPARLENGERDLEAQ

SEQ ID NO: 18380 - protein, 185 aa, Oryza sativa
  Clone ID: TF_OSC404797j.C1.p3.fg
MATANGVDLATAGLLRLLAMGMGPSVQIPGEGGVPVMMVQHIIIGDDGGDLFSGGLGGGVPPASKAAIASLKEVKAGEDGEGGDSLGDCAICLDAFAAGKEMPCGHRFHSECLERWLGVHGSCPVCRRELPAAEQQPPEEQQSGGADAGERRRPRAVVVSYVVLGDGGRGGERGEPWNIRIEDVD

SEQ ID NO: 18381 - protein, 168 aa, Oryza sativa
  Clone ID: TF_OSC926j.C1.p2.fg
MRRLGDVVEAPALVLTPASMQQAGGRGSSGALDASMVVILAALLCVVICALGLTSLIRCALHCARGLSPTTATPTPSVSTAATAGLKKTELRRIPVEVYGAKQAGVPDGECAICLGDFADGDKVRVLPRCHHGFHVRCIDTWLAAHTSCPTCRDSILSVHGVVAGGQT

SEQ ID NO: 18382 - protein, 299 aa, Oryza sativa
  Clone ID: TF_OSC400397j.C1.p48.fg
MAEEAAAGGLYYCHMCASTVSAVAAAEGEVEIKCPYCHSGFVEEIESARGVATGGGGAISSVWAPIIDGMVGGGGGDAVRRHRRSRRLADAAGADDGYYRDLALLDFSESRRRTAALLLLMQEFRERQLQRLESATATISAAAAEAGAVVGTSRDAEGVALADYFLGPGLDALMQRVGDGDAGRQGTLPAKKEAVESMPTVEVAAGGDCDSACAVCLEDYAAGERATEMPCRHRFHAKCIVPWLKMHSSCPVCRFQLPTDDDDDSSKSARGGAAHSGGGRRLSQPSPASTGEAWAGCRP

SEQ ID NO: 18383 - protein, 111 aa, Oryza sativa
  unsure (1)..(111): unsure at all Xaa locations
  Clone ID: TF_OSC401498j.C1.p12.gp
GTGPVRKKRYGALPCHDVVKGGGGGDCAVCLEELEAGDRCRRLPRCEHSFHAPCVDSWLRKSRWCPVCRADVVGRAPEGERKMAAAAAAVETTVAGRSSSPATGEIVAERX

SEQ ID NO: 18384 - protein, 188 aa, Oryza sativa
  Clone ID: TF_OSC402160j.C1.p21.fg
METEEDDHRLHPRTRTIADLLNQLDQIHSTSATRTTGGGGGVAPASDEAIEALKDVTGDIDQLPAECAICLHGGLDAAAAPAGWKEMPCGHRFHGGCLEKWLRAHGTCPMCRHQMPTTTAPPPPAAEQEDYLDGDEEEDAGDDDEVEAGVGPLPLELRVVVAHSSGGYGGVAASASTTRRLLAWSTTI

SEQ ID NO: 18385 - protein, 174 aa, Oryza sativa
  Clone ID: TF_OSC406125j.C1.p2.fg
MGSRSGSTTTSMPPVPQENQSVGKGTAIFSYTCVGLTGVALVAVVAFYCNRHVRRRAPVVAAEGAGSVGGREDDGRGVADVAAKIPEFAYAGSARHGGGGECSVCLGAVQGGEAVRRLPACKHLYHVECIDMWLASHATCPICRTEVEPPPEDDDGRPAPAADESSPTEALPPV

SEQ ID NO: 18386 - protein, 173 aa, Oryza sativa
  Clone ID: TF_OSC412156j.C1.p1.fg
MASPSSSSVISIFLLVAGVALMLVVHIVVVFWALRRGRGASRGEEEAAPGRAAEGNGGGARGGGGKGLSADEIGALPCHDVVKGGGGGDCAVCLEELEAGDRCRRLPRCEHSFHAPCVDSWLRKSRWCPVCRADVVARAPEGERKMAAAAAAVKTTVAGRSSSPATGEIVAER

SEQ ID NO: 18387 - protein, 153 aa, Oryza sativa
  unsure (1)..(153): unsure at all Xaa locations
  Clone ID: TF_OSC412156j.C1.p1.gp
MLVVHIVVVFWALRRGRGASRGEEEAAPGRAAEGNGGGARGGGGKGLSADEIGALPCHDVVKGGGGGDCAVCLEELEAGDRCRRLPRCEHSFHAPCVDSWLRKSRWCPVCRADVVARAPEGERKMAAAAAAVKTTVAGRSSSPATGEIVAERX

SEQ ID NO: 18388 - protein, 826 aa, Oryza sativa
  Clone ID: TF_OSC400860j.C1.p53.gm
MAGSTLFRWLFLLLAIVSLAAADSGSGEAETTVPGQIRLSCGASASATDGDGRAWDGDAVSTFAPSVTGVAADASYQDPSLPSPVPYMTARVFSSSYTYSFPVKPGRVFLRLYFYPSAYGNLGAAAAAADALFGVTAGGITLLRDFNASQTALAVGYAYIVREFSLNVSSGATSLNVTFAPSPRGAPGHGSHHYAFVNGIEVVPTPDMFTTPVPAFANGGRPNPMPLRADTAFQTMYRLNVGGEAITPRDDAGGFYRTWDNDAPYIFGAAFGVTFAKDSNVSVRYNPPSVPKYAAPEDVYATARSMGPNAQINLNYNLTWILPVDAGFYYLLRFHFCEIQYPITKVNQRSFFIYINNQTAQSQMDVIVWSGGIGRAVYTDYLVVTAGSGQMDLLVALHPDLSSRPEYFDAILNGLEVFKLHKYGTHSLAGPNPPIPLKQVFSTVDGSRSESRKKSVVCAAVGGVAAGCFLAVLVAFAVAWAVRRRQRKAAAEKPADGLLGPTKGSALYDPFGERYSMNTAVQGSSPPPPPPPPLPRTRREVHNVEAADASPVRRNGVCEGKKEVVGDEKQRLIESLPLFTMASSLAALPKSSPDCAVCLSPFTLDAELRLLPACRHAFHAACVDAWLRTTPSCPLCRATVTLPHPSISAILAAEQPPPPEPRSRDRSRSFRVEMGSVSNRSASTATGGNARPTYSLGTFDYHIDEEVEAVVSRAAPMTTRSAAAVKEDKPAAEQSPPPPGEAVAEAAGATRGWLREYVERLATSASSLSSFSGRWSSRWSQSYQSHHSHSQEEPWLWDAEAVRMSPPGTEEEETAFMVLYRWIAGA

SEQ ID NO: 18389 - protein, 359 aa, Oryza sativa
  Clone ID: TF_OSC400939j.C1.p46.fg
MASTLSSPSPPSADPVTGSSDAASSFLPSLLIIAALLAFVLLASVSIHLLLRLLSRSSPPPPPPPPLPRTRREVHNVEAADASPVRRNGVCEGKKEVVGDEKQRLIESLPLFTMASSLAALPKSSPDCAVCLSPFTLDAELRLLPACRHAFHAACVDAWLRTTPSCPLCRATVTLPHPSISAILAAEQPPPPEPRSRDRSRSFRVEMGSVSNRSASTATGGNARPTYSLGTFDYHIDEEVEAVVSRAAPMTTRSAAAVKEDKPAAEQSPPPPGEAVAEAAGATRGWLREYVERLATSASSLSSFSGRWSSRWSQSYQSHHSHSQEEPWLWDAEAVRMSPPGTEEEETAFMVLYRWIAGV

SEQ ID NO: 18390 - protein, 407 aa, Oryza sativa
  Clone ID: TF_OSC417199j.C1.p1.fg
MAVICFEESIHLLLCLIGFRIIVSINWKRYRLCAHPLHIWIVVDYTTVFIFRLLMFVDNGLAAGMGLALDNVYTCLFVKFGHLRHFHLPEEGQKWGFLIWLLFSYCGLACIACVAVGKWLSRRHALQQRAQQGIPVSEYGVLVDMIRVPDWAFEAVGLEMRGMGQDTAYHPGLYLTAAQLDKISMYLFASDLRDAKKSLKTSGFVLRSKVTLKSSVIEQNDFKLVLLLQREAVEALIQELPKFRLKAVPTDCSECPICLEEFHVGNEVRGLPCAHNFHVECIDQWLRLNVKCPRCRCSVFPNLDLSALNNLRPSSEPDRPSASEVTAATMARYVRSSQPAGQSYLLRLQGLLLRQVVVRHGGGDDMASAENGASHVAAAVTAPATTGGVESELPSIVVDGGHQLPDR

SEQ ID NO: 18391 - protein, 387 aa, Oryza sativa
  Clone ID: TF_OSC419721j.C1.p4.fg
MGTRELLVVLAVVVMAAVGAGAQSSSASPAPATSQAPTVRQQTPFGRTMSTVITVSISVFFFLLFFCAYINQCRLAEAGDARAAAAAAAGGGAGGGPSRRGKRGLDPAVVATFPIVPYREVVKHKIGKSVLECAVCLTSFDDGDDLRLLPHCSHAFHPECIDPWLESRVTCPLCRANLEKPPPPPPPLPAAAAASPSPERSPRCQPSPPPPPPPHALVIPVEDEEDDSDEDDRKEEAVELEMLRSERRAARLPRSHSTGHSLVASAAAAAESGDHERFTLRLPQHVRDEVLRSLRLRHAASLVNLSDMSSEGSSRGGRRALGLAFGNGGGSSHGGRRWQAFLARTVSWARGGGDGSVRRGWDGSTRRGKDDAESSRKGATSPAAGRP

SEQ ID NO: 18392 - protein, 294 aa, Oryza sativa
  Clone ID: TF_OSC401716j.C1.p124.gm
MAAAQDASSQALGLRWRYGDVDDGNFAVRGRAVPLLVALLFVLVCFVAVSLYLRWACHCHRYGRDTTPMPATTSSGFSSSHAAATAPGSASSVTGLDDATIASMPVALYRAVASAAGDGDDGGAAQCSICLGEFEEGEKVKALPLCGHGFHPECVDAWLRSRPSCPLCRSSLLPAAATTKPDVAGSDAAAGGGEQLQGAFSRFWDTGLASIFMLLAFSSNSGDLLFFSDAGDTLDSGRGPYSDAGAVVLEEGGGLMLVAGHLVVDGLGRQSAARWGGGGRGSGIAEKCVMVAAK

SEQ ID NO: 18393 - protein, 170 aa, Oryza sativa
  Clone ID: TF_OSC20545j.C1.p14.fg
MSNNNGNPGYYNNRNAGDQSDYKATIAILFSVFFVVILIRLIHFIINQSNNRAPANGGAAATSDRRLGGGGGVSRVPARLPRQRPGGAGAGNGTAMAWQPPPCTSTYRRDDGWKETACPVCLSEFADGELIRLLPECMHYFHAACIDEWLRTRATCPLCRAAPAGDVSTA

SEQ ID NO: 18394 - protein, 137 aa, Oryza sativa
  Clone ID: TF_OSC28130j.C1.p1.fg
MVDLSGLEIFLAVVALIAAICAISWTVRCLIGRRFEVATGDPNGERQGLLNKEEVVIIDVAAATEARGDDVALCAICKGRLAVAVADGGGQPCRRLRPCGHVYHAECIGLWLQRGTTCPVCRADVVASRNEIVGAMA

SEQ ID NO: 18395 - protein, 212 aa, Oryza sativa
  Clone ID: TF_OSC400203j.C1.p24.fg
MGCPVCCYSELLLPKQLLHLLLLLGYIRRFLLWAFHAVGLGDLLDLGDEQQAVLQDHAREHRAPAQALPPQQQHRRAEFRTVPAMVIEEVLPVVRFDELVAAAPAVCGGGDCAVCLSGIGGGDEVRRLSNCRHVFHRGCLDRWMEHDDQRTCPLCRAPLIPDEMASALWGAAGVSDASDFDFSYFGAPLTPMPTPTLLRPHELLLTGLGGYQ

SEQ ID NO: 18396 - protein, 213 aa, Oryza sativa
  unsure (1)..(213): unsure at all Xaa locations
  Clone ID: TF_OSC400203j.C1.p25.gp
MGCPVCCYSELLLPKQLLHLLLLLGYIRRFLLWAFHAVGLGDLLDLGDEQQAVLQDHAREHRAPAQALPPQQQHRRAEFRTVPAMVIEEVLPVVRFDELVAAAPAVCGGGDCAVCLSGIGGGDEVRRLSNCRHVFHRGCLDRWMEHDDQRTCPLCRAPLIPDEMASALWGAAGVSDASDFDFSYFGAPLTPMPTPTLLRPHELLLTGLGGYQX

SEQ ID NO: 18397 - protein, 508 aa, Oryza sativa
  Clone ID: TF_OSC400099j.C1.p27.gm
MLAVVGAALLVVLYARLVSRVFRAARRRWRRRRRRRLLMIPGSPADDSFATFTTYDNYYHTFSPYGLDDAAIKSLPSAQYLKSSAMAARGGGGGGGADTAARDCAVCLLEFADGDELRALPLCAHAFHADCIDVWLRAHASCPLCRAAVALPPPVASPLRAARRVRPSLDDLLFFHPVPQPPHAAADPSAAPAEITPASPDHVGPRDDFLLKRSYSFGFERHLLAVEAPSTASPPWRYRLNIGGGGGGADGPNRGGRSSFWSKRWPSPFGGGGGAAAASRVFSFRSYRSAAAKSSPFSRRRGGTGPGGATAPGGGFFMSLASEPPSILAAARRASAAAAASSRLRCGDPEALLSPDRLSRATLQVTAPPREEGGHGLALLLWLPLRRPALPRRGLQGGLLAATALPGEKAQPTTRRMLPRRAKGRRSGVRLRCWWREQEESIVTRRKGLVGTDEDHSDTLIALQHPPVYTLGTDSTEDYLHFDVKDAPFEVHRIDRGGEVTYHGPGQA

SEQ ID NO: 18398 - protein, 388 aa, Oryza sativa
  Clone ID: TF_OSC900069j.C1.p6.gm
MLAVVGAALLVVLYARLVSRVFRAARRRWRRRRRRRLLMIPGSPADDSFATFTTYDNYYHTFSPYGLDDAAIKSLPSAQYLKSSAMAARGGGGGGGADTAARDCAVCLLEFADGDELRALPLCAHAFHADCIDVWLRAHASCPLCRAAVALPPPVASPLRAARRVRPSLDDLLFFHPVPQPPHAAADPLRRAGGDHPGKPGPQPPSILAAARRASAAAAASSRLRCGDPEALLSPDRLSRATLQVTAPPREEGGHGLALLLWLPLRRPALPRRGLQGGLLAATALPGEKAQPTTRRMLPRRAKGRRSGVRLRCWWREQEESIVTRRKGLVGTDEDHSDTLIALQHPPVYTLGTDSTEDYLHFDVKDAPFEVHRIDRGGEVTYHGPGQA

SEQ ID NO: 18399 - protein, 379 aa, Oryza sativa
  Clone ID: TF_OSC900395j.C1.p11.fg
MATPRSPSPRGDARLDSAPLLGGGGGGGGRRHGGALRRPSLRGAARFLRRSGRRAMREPSLLVREAAADQLEERQADWAYSRPVVALDLLWNLAFILVAAAVLALSREESPSMPLRLWIVGYAVQCVLHMACVAIEYRMRRGQSGESPMAADEETGTDGSSSSSDEDAGERAPRGRNGDYVRIAKHLESANTMFSFIWWIIGFYWVSAGGQVLTHDAPQLYWLCIVFLAFDVFFVVFCVALACIIGIAVCCCLPCIIAILYAVSDQEGASEDDIRQIPRYKFRRMDEPEKQSVNMTGSSGGIMIECGTNQPIEKVLAAEDAECCICLSAYDDGAELRELPCGHHFHCVCIDKWLHINATCPLCKFNVRKNSSSSGSEEV

SEQ ID NO: 18400 - protein, 370 aa, Oryza sativa
  Clone ID: TF_OSC400009j.C1.p30.fg
MSNPAAYYAAVARKQYFCYQCNRTVLLPASAAAAGALSCPECRGDFIEEVNVPAPAIIPFPFAFPPMMPTATSASAAAAAAASPTQSSSSSAATSPSSDLSAFLNSMLGPLNLRTDERMPGTTSAAGTATPEDEPDGFDAVTFFQNYLQNLMDGGANIQVLLDDASVGLAPGIGRVGGASFGDYFVGPGLEQLIEQLTENDPNRYGTPPAAKSALSTLPDVVVTDAMVAAADGAECAVCKEDFSPGEGAKQMPCKHIYHADCIMPWLDLHNSCPICRFELPTDDPDYEGRKKSNPQPTAGVDAGAASGSSTAAEEREESGESARLVERRFNVSLPWPFSGLGSQTPQQDGSNGGAGASGSKDGGASSDKK

SEQ ID NO: 18401 - protein, 714 aa, Oryza sativa
  Clone ID: TF_OSC401901j.C1.p1.fg
MSLGLNLCVYVPRTLDDGDSPSTGSSTAALVSPVASSSSAATSANTTPTAEQRVKGAGALMPTTPTPTSAGLRLSKSGSKSFKKTCAICLTTMKPGQGHALFTAECSHTFHFHCIAANVKHGSNNCPVCRTKWKELPFRGPLPGEFPQGSARINPVNGHQNGGQMTILRPLPRARSSGRLHHMTSLLPDTDRSIFNDDEPLDSLSEANEGSQQGCLRTVEIKTYPEFTEVPESTSERNFTVLVHLKAPLAQTLQTSSKLEDGNSLGTTRAPVDLITVLDVSGSMAGTKLALLKRAMGFVIQNLGSSDRLSVIAFSSSARRLFPLRRMTETGRQQSLQAVYSLTSNGGTNIAEGLRKGSKVIEDRQAKNPVCSIILLSDGQDTYTVSPTAGVHKAAPEYCSLLPYTSNGCQQVPVHVFGFGADHDSVSLHSISQTSGGTFSFIETEAAIQDAFAQCIGGLLSVVAQDLHVKVESLHPDVHFGSIRSGSYSSRLADDKRNGSIDVGDMYAEEERDFLMSVNVPPGYGETALLKVGCVYKDPLMKETINMADVQVKISRPAFVSVQSVSIEVDRQKNRLHAAEVMAEARLSAERGDLTHAVSLLEDCRRMIMGSTSGQSGDRLCQALDAELKEMQERMANRQRYEASGRAYVLSGLSSHSWQRATARGDSTDSESLIQAYQTSSMVDMLLRSQTMSRSSTPPQMRHVKSFPARPQPR

SEQ ID NO: 18402 - protein, 314 aa, Oryza sativa
  Clone ID: TF_OSC19766j.C1.p10.fg
MAAGTSSSSGGGSGPLVVSNGVLLAAVIFLFMVVVFVFLLYLYAKRYLGANPLLAPVSPSSRFLFLDASPFPRRGLPAAALRALPVTVYAKPAAARGEEALECAVCLSEVADGEKVRMLPKCDHGFHVECIDMWFHSHDTCPLCRAPVGPDAGGEGLPRVPRGGTRLAMDFPPCSPPNVLFWGTAHDDVANAGDRHPFHPPPPPPPLMAAPSTSSSASARRKESLVIDIPSRSAAAAAADSVTSSSASTPLPASRMADDMRSPVSARLRSLRRLLSRGKQAVVGPSFSPRGGGDIEQGLAGAPPKTPKTPPPAN

SEQ ID NO: 18403 - protein, 246 aa, Oryza sativa
  Clone ID: TF_OSC19766j.C1.p8.np
TSSSSGGGSGPLVVSNGVLLAAVIFLFMVVVFVFLLYLYAKRYRREPAARPRLALSRFLFLDASFPRRGLPAAALRALPVTVYAKPAAARGEEALECAVCLSEVADGEKVRMLPKCDHGFHVECIDMWFHSHDTCPLCRAPVGPDAGGEGLPRPGEEPGLPWTFPHSPPNVLFWGTAHDDVANAALCRRRRGGLRHVVLRLDAAAGEQDGGRMRSPVSARLRSLRRLLSRGKQAVVGPSFSPRGGG

SEQ ID NO: 18404 - protein, 226 aa, Oryza sativa
  Clone ID: TF_OSC23270j.C1.p1.fg
MFLSGISPAVHHDLQPGGRSPYDGDDGDRTLVVLLTFGIFFSFVILYLVAGLIWAVVITAAAVVLSFLYLRVRRRRAAVGGTAAAAAPNDVVFIVGAHQAARSTGSSGGGGDVAAAAIVSAIPAFEYKRVNGGGGEDGGAAAGSGWAQCVICLGLVQVGEVVRRLPACKHMFHVECIDAWLSSHSTCPICRADVVDELAAAAAGGRLSLSPYGTELIHMKFITEFL

SEQ ID NO: 18405 - protein, 304 aa, Oryza sativa
  Clone ID: TF_OSC400045j.C1.p24.fg
MRPPSSSATPGTGRVSAFTMRAVARMSRARWFIFLRRVYQYQNGPRSDLGSNPFNSPGWLALELGVIMAQMVVTTAVVATSPKERPAWPLRVWVAAYNVGNVLSLPLLYWRHRHSSSGARGGTLSDDPEMHGANDPLRNRSYLMNKARAFLELFFAMWFVMGNVWVFDARLGSFHRAPRLYALCIGLLAWNAVVYSLPFLLFLLLCCFVPAVGYALGYNMNSASVGRGASDEQLAALPQWRFKEPADAPRDRDHDDQECCICLAQYKEKEEVRQLPCTHMFHLKCVDRWLRIISSCPLCKQELS

SEQ ID NO: 18406 - protein, 267 aa, Oryza sativa
  Clone ID: TF_OSC400378j.C1.p8.fg
MLAAAAAIFITFVVCFYLFLCAKRYRGAAPTIGGDSGGGGRGRARFVFGGPGDGGCGGGRGLDEAAIAALPTKVVAAAAEGGDGGDPAADCAVCITELAAGESARVLPRCGHGFHVECVDMWLRSNSTCPLCRCAVIDEALPPPPAVRPPEADAESPNFPTNVLFFGSQDAVRTGGAAAATPPPPPPSSHHQQQPAFPPQPSAGPIAGVAAVVEAARIAALRRLLGCGGATPPPPPAPAQGDRDVEMGLPGGESSASRPATKPQPGS

SEQ ID NO: 18407 - protein, 195 aa, Oryza sativa
  Clone ID: TF_OSC405090j.C1.p3.fg
MLLVNLYSRLTASTGVGVGVDDDDDDGSGGYGVLDGACGGTLAVFCALAVSVVVWKACAFVAMAAALLAIGWRVVAPRRSVGRAGAGAPTPAECGLTAAAIDALPASEYERPRGGGGDPACSVCLEDVRGGETVRWLPACGHLYHAACIDAWLRSRTTCPLCRSDLSSRRGGTASGRPRPRLVTHESLLPPLPSV

SEQ ID NO: 18408 - protein, 160 aa, Oryza sativa
  unsure (1)..(160): unsure at all Xaa locations
  Clone ID: TF_OSC918j.C1.p2.np
SDDQISNLEYGGFERXGGGGGDGGRRELRRLDANMVIVLAALLCVVICSLGLSSLIRCALHCARGLSPSPAMATPAAASGLKKKELRRITVEVYGAKQAGVPDAECAICLGDFADGDKVRVLPRCHHGFHVGCIDTWLAAHTSCPTCRDSILSVHAGVTG

SEQ ID NO: 18409 - protein, 1001 aa, Oryza sativa
  Clone ID: TF_OSC412549j.C1.p5.fg
MSTGGNGGGVGVRRRRWNLYWCYVCRRALRVVVPSATSDVYCPRCFGRFLHEIDLPVPRVSPPAEDQFFQPPFLPYDGPRRWVLYTGGGGGGDYGGADVTARRRRLPSPPPAPGTRRQDGAGDGDPPPPAPAIDPGEYFAGPDLNALIDALTQDDRPGPPPAPESAIESLPTVHISPDHLPADGGSECPVCKEEFELGEAARELPCKHAYHSDCIVPWLRLHNSCPVCRQEVPPPPEPDGESPGIDGGCDDGVGGGGEPAEPPRPAMAGWDPIALLAIALRPDLNGWENSHGRSESEADDDEVAGGGVSPHLLKRTTTLTFWVLHPPIITGVHALTKPALDERCRWNRFGFFLFDEKIGMIARDTVLRFAVRLFVVIVVSSRSSSADDGGGDGGVDFIYQGFQHAANLTMDGSAKVLHGGALQLTNDSNRLVGHAFHAAPVRFLDDGAGGGGGGVVSSFSTAFVLDIVTVGSGGGHGLAFVIYLGVLGPRTNGNASDHVFAVEFDTVMDLEMNDTNGNHVGVDVNSLVSVVSEPVAYYAGDGSTKVPVQLESAQQIQAWIDYDGGSSILNVTVAPATVTERPRRPLISTKLDLLPIFKENMYVGFSSATGKLASSHYILAWSFRTNGVAQSIDLRRLPKVPRQSSPPPKLLIIKFAAVACAGTLTLIAAAMVAVLWLRRRAALADTLEEWELEHPQRIPYKELYKATKGFKESELLGAGGFGQVYRGVLRRRSGEAVAIKRISNGTRQGMREFVAEVASLGRMRHRNLRFAILKGVAHGLLYLHEEWEHVVVHRDVKANNVLLGAGDTGAARLGDFGLARLYEHGATPATTRVAGTLGYMAPELTFTSRATTATDVFSFGALLLEVACGRRPIEPAAAGEADGDVLLVRWVRDRALDGDGGGGDVLRAVDPRLEGCYDEEEARLVLWLGLMCSQARPEARPSMRQVCRYLDGEEMLQEDATPAAIFSGADSSDLFGGSFVVSMTSSSAGGTMSASSLQGGR

SEQ ID NO: 18410 - protein, 995 aa, Oryza sativa
  Clone ID: TF_OSC900289j.C1.p1.fg
MATPLADEGSIAAAVMPRSPSPPAAAAGSAAEAPMLIFVYFHKAIRAELERLHAAAVRLATERSGDVGELERRCRFLFSVYRHHCDAEDAVIFPALDIRVKNVAGTYSLEHKGENDLFAHLFSLLKLDVRNDDGLRRELASCTGAIQTFITQHMSKEEEQVFPLLIKKFSHEEQADLVWQFLCSIPVNMMAEFLPWLATSVSSDEHQDILNCLHKIVPDEKLLQQVVFAWIGGEAVKTISHDFCSPCSKSNVRCKDAIDQTDKYGCSHEHFKTGKRKRAESSYSQLVMHPIDEILCWHNAIRKELSDIVEETRRIQQSGDFSDISDFNVKLQFIADVCIFHSIAEDQVIFPAVNDQVSFEQEHAEEERRFNKFRCLIEQIQITGARSTAVDFYSELCSQADQIMEKIERHFKNEETKVLPQARIHFSSEKQRELLYKSLCVIPLKLLERVLPWFVSKLNDQDAEAFLQNMFLAESFRSLSLNYSAPSLYSSLFSWETDAAFSGPDNISRPIDTIFKFHKAIRKDLEFLDVESRKLIDGDESSLRQFIGRFRLLWGLYRAHSNAEDEIVFPALESKETLHNVSHSYTLDHKQEEELFKDISTILFELSQLHADLKHPLGGADAVGANHIHPYNRIDWSKKNNELLTKLQGMCKSIRVTLSNHVHREELELWPLFDKHFSVEEQDKIVGRIIGSTGAEVLQSMLPWVTSALSLDEQNNMLDTWRQVTKNTMFDEWLNEWWKRSPTSSGPSSDASHPEEDHFQEKFDQSEQMFKPGWKDIFRMNQSELEAEIRKVSRDSTLDPRRKAYLIQNLMTSRWIAAQQKSPQPQSEDRNGCTVLPGCCPSYRDPENQIFGCFVMIKLVTIQWKEHKCREKMLEMNCPICCDFLFTSSAAVKGLPCGHFMHSACFQAYTCSHYTCPICSKSLGDMTVYFGMLDGLLAAEELPEEYRDRCQSFQLPGPNSLENQEKPNQMGTKGVSSQGIGGMWGNKIVGTQIWK

SEQ ID NO: 18411 - protein, 96 aa, Oryza sativa
  Clone ID: TF_OSC410095j.C1.p1.fg
ELLDLGEAVGTQSRGLSQERISLLPVTKYKCGFFSRKKTRRERCVICQMEYRRGNLQMTLPCKHVYHASCVTRWLSINKVCPVCFAEVPGDEPKRQ

SEQ ID NO: 18412 - protein, 590 aa, Oryza sativa
  Clone ID: TF_OSC401506j.C1.p8.fg
MKFAKKYEKYMKGMDEELPGVGLKRLKKLLKKCRSDLQSHENDGSSAGRCPGHCSVCDGSFFPSLLNEMSAVIGCFNEKAKKLLELHLASVTIFVRINVSIIVLVFGFKTVLNGYINNYIHYSKQGQEFKAQAQSLHIEILQSPWLCELMAFYMNLRRSKKNNGAMELFGDCSLVFDDDKPTISCNLFDSMRVDISLTCSICLDTVFDPVALSCGHIYCYLCSCSAASVTIVDGLKSAERKSKCPLCRQAGVFPNAVHLDELNMLLSYSCPEYWEKRIQMERVERVRLAKEHWESQCRAFLGIFLETGPKARMFEEILIPREAAAVRSSPKQPQGDHIELHQKRHGRRLDYEERKRKRAAREVHKRSRDARQLLGAKGKRFAKKRYAEKAQMKKTLKMHDESTSRQKVDDVQEGALPPYLLDRDQTQRAKVLSNTIKQKRMEKAGKWEVPLPKVRPVAEEEMFKVLRTGKRKTKQWKRMVTKATFVGPGFTRKPPKYERFIRPTGLRFTKAHVTHPELKCTFNLDIISVKKNPNGQMYSTLGVLTRGTIIEVNVSELGLVTPAGKVVWGKYAQVTNNPENDGCINAVLLV

SEQ ID NO: 18413 - protein, 150 aa, Oryza sativa
  Clone ID: TF_OSC406125j.C1.p5.fg
MRLEMSPDNLLFFCSVAASAAAGFCLFSLYRRLARRCHHHHAAPAGGSEEEEEERRRLTAVASGLPAFMYDRLVRHSGKGASWTECAVCLGVIHVGAMVKLLPACAHIYHVDCIDLWLSSHPTCPLCRCRVDHPGQGQETARQLAQLSPA

SEQ ID NO: 18414 - protein, 197 aa, Oryza sativa
  Clone ID: TF_OSC401779j.C1.p7.fg
MTRRANHTASPSVNATTAAAAAAMITATPSPPPRLPLPNPGNADAGAGAWGPYASSRAFFSNVATILIILACVSLLAFCLHAAARCLIRCLARRRDSGAPALAPALAQAQPPKPSSDDGANTGSSGAASAASGVAMVGGWAEAECAICLSELADGGGERVRVLPACGHGFHGACVDGWLAARASCPTCRAPSRAGEP

SEQ ID NO: 18415 - protein, 233 aa, Oryza sativa
  Clone ID: TF_OSC900008j.C1.p12.fg
MGSVLCCLADDGRPVCCFRLPWPIFNAAHNHNHNSGSIARPRADTRVAPDQGRISLTAPSQHDSMDTFRCPPRPLPWDDPRFSHHTEHHPLVGGHDKASTTFHKSGSLGESKNADSISNSKAVKDDGPSTAVKDDGSSVKHHSDGLHIGKEQVHDLFDFEDDCPICLEEYDYENPKMTLQCNHNFHLCCIYEWMERSQACPVCSKKKLVACVNPHITFRLDVTDARLSDCICF

SEQ ID NO: 18416 - protein, 385 aa, Oryza sativa
  Clone ID: TF_OSC17452j.C1.p2.gm
MGAVSMSTTTRLPLVAALLSAAACVAAAQPATAEAAPETPGVGIKVSFRPRGGGGGGVFTMIFSLTFLLLMYAKFCHPSSPVAAPAPTVVPAAAADDGVAKPVIESLPFFRFAALRGARQGLECAVCLARFDDADLLRLLPRCRHAFHLDCVDRWLESKASCPLCRARVDAEDAALGLKYASSARFVPAGGASESERFDGDQDLLGIFVERVPSSRMEPAAAAHCPDLDRYKHRIVVSDAVFKSRWSEINSSDLIALDTELLRSMETMEVEMEMELYKETEEEETDHDHQRKTLLAASGGRSSVDAAARARMISSSSSSGSVRSMSEMVSLPRLRAAMRERLAHEDRWVPIARRTARWFAGRESRHDEAAPVVDSPPASHSNSLV

SEQ ID NO: 18417 - protein, 373 aa, Oryza sativa
  Clone ID: TF_OSC416024j.C1.p1.fg
MAKPFPDPPKPPVPEPPKPGSDGACYDCPSPPPPPPPHSRDHRRVVIALATTASLLFAILLAFSVYCFIRRRRQQRARREALLAPPPSDAAGGGGAPGAPVAAGDGAVGGAGEGEGEGEVLHHAWHIRTVGLDEAAIESIALARYRAGAGMLGATDCPVCLGEFRDGELLRLLPKCGHAFHVPCIDAWLRAHVNCPLCRAHVLHPADADADAGDGERVPPPAGANGGGGGGGGAATDQASSPTDQTADQENPGQQQQGEQHELRVQIDRRDQPSSPEPPRRSPDPRSAQSFRRVASMGSRSPPAPSEDAPEDEQTTTQSSKEKQGSGGDSACCGKAPSGSGRLHHMRRSFSGGGGRRSLPSRHGRTSSSMLPL

SEQ ID NO: 18418 - protein, 348 aa, Oryza sativa
  Clone ID: TF_OSC900112j.C1.p8.fg
MSSPPSDPSSGGGDGGSAVPGTASSNFTLLYIIIAVLVGVILYMAIRYGRSVMSEWRQLQAGGGGGEPRAALLGLSSDDIDALPTFTYRARGAAASPLVGGGGRRGGGSGKGKGATTVVVECVVCLQELADGDVVRVLPACRHFFHGGCIDLWLRAHSTCPVCRAHPEPDGVRLSDVVAVSPPLPQLLRCGLFSYWPTAASRALADILARSPLRGNTTSTTTTTTTGGPITSTSSKSPSSPVQAAIINYVQASRSPSPTAYHSLNERWPSSPTPVVVVRSKSPSPSSPPIGGLSLQTTTAAAARGVGVVEGVDAGATTSASASAPTQVVALSREGGGSRSKSPSPVPH

SEQ ID NO: 18419 - protein, 320 aa, Oryza sativa
  Clone ID: TF_OSC900058j.C1.p15.fg
MAAGATLSVLLLVAGVVLMLVLHVVVVFWALRRGVFLRGAFRVEERRDQRAAGLTPDEIAVLPCHERKEDGGGGGGGECAVCLEAFQAGDRCRVLPRCEHGFHARCVDSWLRQSRVCPICRAEVEVSGYAGKPAAAVAEASQATTLEIVTERLGGTERLEVSNVCEVHPLDSVDRMKGDNSNVFLVAGLSLVVVVHVLVLLWALWWGYGRSRLALARARVVGQHDVARGGLSAEQVGELPCHVVKEGAGECAVCLEAFRAGDRRRVLPRCERGFHAQCVDSWLRVSRLCPICRAEVAASRGKEGDAPVAEAASLEIVAER

SEQ ID NO: 18420 - protein, 241 aa, Oryza sativa
  Clone ID: TF_OSC401250j.C1.p3.np
LSPGSHVGPRRGVLGWEMAMRPHTPGRIVAWKRGRGEKLRYGRVPEVRPSAGQALYRFPVETSAGETCMLLSSQVYSFKSVSMADLSPAPLQLDSGRAAGGQQGFSPINTGTEAADDVATGLEYGKVSSTELVQAVHDMLSAAGVRMDATKETLLQTTLSLQDQLKESQVALLVEQEKAEAAVREADVAKSAWSCRVCLNAEVNMTIIPCGHVLCNRCSSSVSRCPFCRTQVSRMMKIFRP

SEQ ID NO: 18421 - protein, 4737 aa, Oryza sativa
  Clone ID: TF_OSC900265j.C1.p8.fg
MDPGGMLLEDFGQRVDLTRRIREVLANYPEGTTALRELIQNADDAGASRVRLCLDRRAHGAGSLLAPALAQWQGPALLAYNDAVFTDEDFASISRIGDSRKVSQVWKTGRFGVGFNSVYHLTDLPSFVSGKYIVLFDPQGAYLPNVSAANPGKRIDFVSSSAITLYNDQLSPYRAFGCDMKAPFQGTLFRFPLRTAEQASLSRLSRQVYTEDDILSLFAQLYEEAVYNLLFLKNVLSLEMYVWESGMSEPKIVYSCSIGSQHDNLRWHRQALVRFSGTAAESSEQKIDSFSMDFVSKSFLGEKFEKKSYTYFIVQGMASALSKIGIFATTAAKDYDLHLLPWASVAACISNVGPEEVILRQGRAFCFLPLPVKTGLSVHVNGYFEVSSNRRDIWYGADMDRGGKLRSDWNMLLLEDVVAPLFRELLLQLRTVLDSKISYYSLWPTGLYEEPWSILVEQICKFIYTSPVFHSEIKGGTWITPAESLLHDEGFSRSDDLSEALVMLGMPVVRLPGAIADMFPKFHSKYMLKIVTPATVRHFLKDFENLGTLEKSQKLILLEYCLADLDSGNIGKCMNGLPLIPLANKQFGIFSGISQENQYYVCDSIEYELLSAVSDRIIDRSIPPVILDKLYQIASSSQVNISLIEGRTFLQFFPWLFPPGWKCRNQVPWDPESGGSSPTAAWFKLFWQYIGDCSYDLDLFSDWPILPSTSGHLYRASTVSKLINTGSLSNLMKELLTKLGCKILDTKYLSTCQHLSNYVYDGDASGVLHSIFGVASLEGVDLQALFQRITPAEKNELYQFVLDAKWYLGPHLSDMSINLCKKLPIFRVFDGGSPSSYGFSDLSTSRKYLPPLGVAEQLLNDDFVFCISPSDEDIIMRYYGIERMPKSNFYQRYVLNRLDELQTEFRDSVLLTILQDLPQLSLENPRFKEALKVLRFVPTTNGVLKSPQSLYDPRVEELYALLQESDCFPHGLFQNPEVLDMLLCLGLRTSVSIDTIIQSARHIDSLVHKDHHKAHSRGKVLLSYLEVHAHKWYVHKPFDGRKKVNMLAKVTTVLRSRDTSWEADLEKFWSDLRMICWCPVLVTAPSPALPWPSVSSMVAPPKQVRMQDDMWIVSASSRILDGECTSSALSYSLGWLSPPSGSVIAAQLLELGKNNEIVTDQVLRQELALVMPKIYSLLSNLIGSDEMDIVKVVLEGCRWIWVGDGFAKTDEVVLTGHLHLAPYIRVIPIDLAVFKDLFLELGIKEQLDPVDYASILTRMATRKASTSLQAEELRTAVLVVQHLAEFRFQDHQTQIYLPDSSARLCLSSELVFNDAPWLLDFDEDITGNAPSIAFNSKKYVHNFVHGNISNDVAERLGVRSLRRLLLAESSDSMNLSLSGVAEAFGQHEDLTTRLKHIVEMYADGPGILFELVQNAEDAKASEVVFLLDKTHYGTSSILSPEMAEWQGPALYCFNDSIFSPQDLYAISRIGQDSKLEKPFAIGRFGLGFNCVYHFTDIPGFVSGENIVMFDPHASYLPGISPSHPGLRIKFVGRRILEQFPDQFTPFLHFGCNLQQPFPGTLFRFPLRNEAAASRSQIKREQYTPQDVEMLFSSFSEVVSEALLFLRNVKNITLYVKESDSQEMKLVHRVSKHNSYEMAKEPHALNTMLAFINGNQPSGMDRNQFFNKLNKTKDSDLPWSSQKVSIFEQSPAACLVHSWILTESIGGGHARKLSTASGSKSHFFVPWASVAAYLHSVTVDNTKELSGEAEVNLDDLVLKQLSLGSSKDRKFFEGRAFCFLPLPINTSMPVHVNAYFELSSNRRDIWIGNDMAGGGRVRSEWNLALLEDVAAPAYGHLLAAIAQELGPSDLFLSFWPTAVGVEPWSSMVRKLYVSIAELGLHVLYTKARGGHWVSTRQAIFPDFSFSKAIELAEVLSEAGLPVVSVSKQIVDSFLNVYPSVHLLNPHLLRNLLIRRKRGFRNREEAILVLEYCLSDMGDPSFPDKLQGLALLPLANGSFTTFTNRGEGERVFFSSQMEFELLKDSIPHLVVDNSLPDAILKKLYDIACSARSNIYLFTCNFLLELLPRILPPEWQHAKQLFWSPGHQGQPSVEWMVSLWNFLRHSCEDLSIFAKWPILPLVDGKLMQLGNASNVIIDDGWSENMYSLLQKLGCFFLRSDLQIEHPQLANFVQEATAVGVLNAVQSVASNFQDIKELFMGISLAETHELRSFIFQSKWFSGNHMNSSHMNTIRNLPIFESYKSRELVSLTSPRKWLKPEGVHEDLLNESFIRTESAKEKSILVSYFAIREPQKAEFYKDHVLPRISEFLSQPAVVSAILRDVKLLAENDTSVRAALHETPFVLAASGAWVHPSRLYDPRVPELHKLLHKETFFPSEKFMTTEVIELLASFGLKSKLGFSTLLDIARSVSLQQDDALEHGKRLLTYLNFLEFKASNMEDKKTFHGDDNQEASKTDGSFEAENDGDGYDPEETILSLFSNFDHDLPEDEFWSELKNISWCPVHVAPLLKGLPWFISEDHVAPPITTRPKSQMWLVSSKMRILSADSCSMYLQRKLGWLDPPNANILSSQLVEISKSYDELKMFSEDSTNDAVPQKEIQLIYSKLQDIIDTADTNILKRNLDGHPWVYIGDRFVPPQALAFDSPVKYHPYLYAVPSELSEYKRLLSVLGVKQTFDAADYLNVLQCLQSDAKGEPLSTEQLSFVHRVLEAFVDCYPDNQAPDMMVNSLLIPDSFGVLTPARNLVYNDAPWMNADPTSKSFVHLSIGNDLANRLGVRSLRGSSLLDNELMTDLPCMEYAKISELLALYGESDFLLFDLIELADHCNAKKVHLIYDKRDHPKQSLLQQSLGDFQGSSLTVVFEGTIMSREEVCSLQLPPPWKLKGNILNYGLGLLSSYFVCDTLSILSGGYFYIFDPLGLTGGTTSTATSSARFFSLIGNDLVERFHDQFTPMRVTQEASLSSANSTVIRMPLSSKCLKELEAGCNRVKHIFDRFTQNPSSTLLFLRSIIQVSLSTWEGGASQPTLNYSVLVDPSVATLRNPFSEKKWRKFQLSRIFASTSAAIKMQAIDVHVIDNGCNYIDKWFVALCLGSGQTRNMALDRRYLAYNLTPVAGVAAHIARNGVSTNIHASSCILSPLPLSGSISMPVTTLGHFIVRHNGGRYIFGSSHDKSLSDLEMHKNKLVEAWNKELMLCVRDSYVEMVLEFQKLRKDPLSSAIESRSAHSVSTILQAYGDRVYSFWPRSKQHPASLTGYGSTVTNVNSPRASKADWQSLVEQVIRPFYVRLADLPVWQLYGGNLVKVDEGMFLSHSGSGDDDNLPSASVCSFIKEHYPVFSVPWELVREIQAVGVNVREIRPKMVRDLLKASSSILLRSIETYMDVLEYCFSDMDPYRFSDLHIHEESRVSNQQSEIMNSSISNSMPSSSSSVSYHRNTQRQGASGGDALEIVTYFGKALYDFGRGVVEDISKTGGSASHRTQAAENNVLSSIITELKGVPFPTSTKCLTRLGSTELWIASEEQQLLMRPFLHHFIHHQCLQKPFLELLLTTQVIHRPLKLRSFSPHLLSGHLKHIFDERWVHLAVEKKSPWIPWDNNANSSTAGPSPEWIRLFWKIFSSMSGDLSLLSDWPLIPAYLDRPVLCRVKECHLIFVPPADDSNPDSGDSAARVVDTSAHPGDETGEAEQNSILDTAFQSMNSAFPWLPALLYKLNIPVFDLSFPECGTICNLFPSRDRTLGQIIASKLVAIKNGGHLPLPLSLSSEDCDKLFALFVSEFRLSSNHLYQREELDVLRELPMYKTVTGTYTSLSGSDHCILSPTAFFHPADSRCLSSTANADLFLQALGVEQLSDQEILVRFALPGFGNKSAQEQEDILAYLYSNWKDLQLNSSVVNTLKETNFLTSANEFCTELFKPRELLDPSDALLTSVFSGERHKFPAERFLSDGWLVILRKAGLRTSTEADMIVQCATKIESMGNDIVSSSEDPSDFEADFSGSKNEIPFELWSLAESVVNVILANFATLYDSSFCEKIGKIAFIPAEKGFPSIGGKRGGRRVLASYSESILSKDWPLAWSSAPILTNQAIIPPEYSWGAFRLRSPPAFTTVLKHLQSVGRGNGEDTLAHWPTSSGIMTVEDAFLRILQYLDKIWGTISSSEKNELQTLAFIPVANGTRLVTVKSLFARLTINMSPFAFELPSLYLPFVTILREIGMQETLTNTYARELLLDIQKACGYQRLNPNELRAVMEILDFMCSGVNQATDGSEDIFDSVIPDDGCRLVSAVSCVYIDPYGSHLLSNIDTSRIRFAHPDLPQNICNTLGIKKLSDVIVEELDGKEELKMVNSICSVTLDKIKEKLLSKSLQDALRIVMIGVSNHFPSFEALNLAQIESVLKDISQNLQFVQRLHTRFLLLPMLQDVTRSSQRPPFPEWSSNGKHRSVCFVNKSTGQILVAEPPNFLTIHDAIAIVVSYRLGAPVILPIASVFACPDGTEKEVLKILRLGTDIGVSKREGRYNGSLGAELLSQDARQVQFLPLRPFYSGEIVAWKTGKEGEKLRYGRVPEDVRPSAGQALYRFPVETSAGETCMLLSSQVYSFKSVSMADLSSAPLQLDSGRAAGGQQGFSPINTGTEAADDVATGLEYGKVSSTELVQAVHDMLSAAGVRMDATKETLLQTTLSLQDQLKESQVALLVEQEKAEAAVREADVAKSAWSCRVCLNAEVNMTIIPCGHVLCNRCSSSVSRCPFCRTQVSRMMKIFRP

SEQ ID NO: 18422 - protein, 72 aa, Oryza sativa
  unsure (1)..(72): unsure at all Xaa locations
  Clone ID: TF_OSC400770j.C1.p13.gp
DLICYLVPFKNKCSFFSRKKNDEXCVICKSTYKSRQKLIRLPCSHCYHADCITRWLKINKACPVCNEEVFGX

SEQ ID NO: 18423 - protein, 481 aa, Oryza sativa
  Clone ID: TF_OSC408415j.C1.p6.fg
MPAVEGMRDVVATVSGYHGDERHRLVRLIAETGASYVGAMSRSITHLVCWRLEGKKYDIARRLRTRVVSHRWFEDCLKEGRRLPEKPYMLESGEEAGPVPELPTFPRSRSKRNASMEDRCLKELPDDFCNTSYATDVLVVADSGSDCNHQRWSDSSLLKENFVGDRDNSKIGATHVKERRKRLKHAQNSTNEDALDAEDNISRLMARQGRYESSYTSSRSASNQKGDLLKLLHNDDASMMRKRNSLMKKETRTKLAGYLIESCENGSLTDSFDEPQMSDTPPTEDRRKIRKTRLRQSTLDSIYDYGEASEHDPEKSEDQENFELGESSRSFQSSDSSRQEPAFCTEKTNQGSIDIAADDDKGDDEKATLEEPTSCQGQAELSCVICWTDFSSTRGILPCGHRFCYSCIQEWADSLSSRGKVSTCPLCKTSFAWISKIDEAGTSDQKIYSQTIPCSTSTDTFIFDDRVYGLPESPVDVMKKD

SEQ ID NO: 18424 - protein, 211 aa, Oryza sativa
  Clone ID: TF_OSC405088j.C1.p1.fg
MDWFVRCYMLAIANGVCIGGAAMIVYGIVQVSRTGGDAGSLVVLSLFLALWVAVGSCVYASFCGAFFPWASLRRPLAPVRDALSRCARALLPRRNGGGGDGLPSHLRDGVQPRETPTVRGGGGARVATADDIPAYEQPPAGEGEGGAAAAPECAVCLGEVEKGEMAKRLPACLHVFHQRCIDAWLRGNSTCPVCRRNAFATAAPPLPAQMV

SEQ ID NO: 18425 - protein, 45 aa, Oryza sativa
  unsure (1)..(45): unsure at all Xaa locations
  Clone ID: TF_OSC900281j.C1.p9.gp
QEEYVDGDDLGTLDCGHDFHVGCVRQWLVVKNTCPICKNTALKSX

SEQ ID NO: 18426 - protein, 60 aa, Oryza sativa
  Clone ID: TF_OSC9137j.C1.p1.gm
EAQVSEARESDCAVCFEGFDQGEKLTRMPCSHCFHATCILDWLSLSHLCPLCRFPMPTGQ

SEQ ID NO: 18427 - protein, 192 aa, Oryza sativa
  Clone ID: TF_OSC423581j.C1.p10.fg
MTKPQLACLRRSAYVTSRQSIPTPRSQLMGAGAGDWPVFVDGGGSSYKTSWSGAAAVIVCLCAVAAVFLIMAGITQLCKRVFPAAPPAPPPQRRRDDDDDDGIVVAVGIDEATLQALPLVLYGEARTAQTSCAVCLESYGGGDVLRALPECGHLFHRDCIFTWLRRRPTCPVCRAPPSPAPPADVLGLQLSV

SEQ ID NO: 18428 - protein, 210 aa, Oryza sativa
  Clone ID: TF_OSC900408j.C1.p20.fg
MLGSGLNLVTTVIGFGMSATFIVFVCARLICGRAARADAEADAAEGRVAAARAMAAGPAPFDFDVEFRATDLDRTIEHTRSGLEPFVVAAIPTMKYSYEAFQSKDDAQCSICLGEYNEKEILRIMPKCRHNFHLSCIDVWLQKQTTCPICRISLKDLPSGKPAESPVRSLPQLFSHPESSKRRAFFQQQGSTYTALAQNCKEFVYDRTGF

SEQ ID NO: 18429 - protein, 411 aa, Oryza sativa
  Clone ID: TF_OSC400887j.C1.p6.fg
MALYSTDSKKVGFLSFLNFFHNSTAFSNLIGCCLFILPSYLVGHYIEHHHLVSPFIPENQYICCISSIIKPGLSSSVAHLLVCLSSCLQQTMDADRDPIFPVQQMPSLLFPPPPPRPLALDSTSSASSSFVPHHPSITSFPILVLTVLGILTTSVLLLTYYIFVIRCCLNWNSSSSSDTRTAGLISRRRRGAASSSLPAVAEPRGLEEAAIQSLPAFRYRKAIKDTTADSSECAVCISEFQEEERVRLLPSCLHVFHVDCIDTWLQGNANCPLCRAAIATNDSQLPLDQFVRPEVVVIQVITGAEEEGAQAPQQEANTAASDPAVDATSTNQQVSSKKTKNQNAWHVSISKGDECIAVRRDRNVLPLRRSFSMDSLGGAGEVHLQIQNILQRSTHFHRDISDSSSSSTGTL

SEQ ID NO: 18430 - protein, 386 aa, Oryza sativa
  Clone ID: TF_OSC415629j.C1.p5.fg
MASSSPSSSSSPPSAAGASSYWCYSCDRFVRAPAPHDDSAVACPDCGGGFLEEMSAPPPRAAYLRRPRAHHANDLRLRRTRRAAAAAAAGDRSPFNPVIVLRRSPAAAGDDDSLAAATSFELFYDDGAGSGLRPLPETMSDFLMGSGFERLLDQLTQIEAGGLARARENPPASKASVESMPTVTIAASHVGADSHCAVCKEPFELGDEAREMPCSHIYHQDCILPWLALRNSCPVCRHEMPTDAARPRPSNAGTEEETVGLTIWRLPGGGFAVGRFAGGRRPEERELPVVYTEMDGGFNNGGAPRRISWGSRQSRSTERSAIRRIFRNVFSCFGRSHSSNSQASSSHSRPELNDASDRSAVFSHGSRSRSTSWRLEDGHADAMVQR

SEQ ID NO: 18431 - protein, 216 aa, Oryza sativa
  Clone ID: TF_OSC24360j.C1.p1.fg
MTVYFFAKEELNCNLTAVKEDLIKPVTVSFKEGLGQKFRQPSGTGINFSVFEDSELLKQGDMDVYPLAVKAETTMPVDQKLEGEDQKMKTPNSQITQALFEKKESGDYQVRVASQILWVNGTRYELQEIYGIGNSVEGDADANDPGKECVICLSEPRDTTVLPCRHMCMCSECAKVLRYQTTRCPICRQPVERLLEIKVNNKAEEQQQPSPDSPIK

SEQ ID NO: 18432 - protein, 240 aa, Oryza sativa
  Clone ID: TF_OSC900028j.C1.p10.fg
MTVYFFAKEELNCNLTAVKEDLIKPVTVSFKEGLGQKFRQPSGTGINFSVFEDSELLKQGDMDVYPLAVKAETTMPVDQKLEGEDQKMKTPNSQITQALFEKKESGDYQVRVASQILWVNGTRYELQEIYGIGNSVEGDADANDPGKECVICLSEPRDTTVLPCRHMCMCSECAKVLRYQTTRCPICRQPVERLLEIKVNNKAEEQQQPSPDSPIKVNSKAEEHQQQPSQSLPIPHREEV

SEQ ID NO: 18433 - protein, 306 aa, Oryza sativa
  Clone ID: TF_OSC422248j.C1.p9.fg
MGRSFRDSLKVLEADIQHANSLDTCHQIYCLSGQSYLLWPCSAAEFRREYDGACLQMRMSYCPAAHFFLFLVQWTDCNLAGALGLLRILIYKVYADGTTTMSAHERKASIREFYAVIFPSLMQLHEGINEVEDKKQKAICIERYRRRDEDQKMVISEIDDNIEEECGICMEINGKVVLPTCSHAMCIKCYRDWRSRSQSCPFCRDSLKRVNSADLWIYTDNRDIVDIATVRKENLRRLFMYIDKLPTVIPETVFDVYDSHCCRNCGALGVHAAPLVEAWVTGLSFRTLQRAPGMVQLQSENACRSA

SEQ ID NO: 18434 - protein, 290 aa, Oryza sativa
  Clone ID: TF_OSC400555j.C1.p39.fg
MASPPPYDNPTAGFPIAIVIAIGFMVTSLILASYYFLVVRCWLRGTGGGGAAGAGLLHRSRRESAAERVAAVFFTDYEAEVGGGLDPDVVAALPVVKYRRAASGKSASPQECAVCLSEFVRDERLKLLPSCSHAFHIDCIDTWLHHNVSCPLCRTVVTGGAIGLLVRDDQYDASSRELAAGERRIDAAARMGHGISSCRFPKTGAEQEPIRRSFSMDCFLGDLGRKPPPPPPKDPAGSEAGPSHPDAAGSSSIVGTAGAGETSGRFRRLLSSFGLGRSSRSTVLPIHLDP

SEQ ID NO: 18435 - protein, 522 aa, Oryza sativa
  Clone ID: TF_OSC413563j.C1.p5.fg
MVWTHQVASPENQVQPESFYHGGAGSNLSNLSVQVAVGVPGNTDFRSHYESINLQHQHVQNPYPHVGVASSSVFPSTMYNPCISTTAVDRYVPPIQSFGLGNPLLLPLYHQLAQGSMDENGSSGNFCDSVREFIKRKNALLVGGHHFVNSFASSSSSAYVPPNPLHRSWNASFEANILPSTGVSNPPEYSSADSLNNSNSMASHPELVHHGNYVFPAGHMSQYNAWIAQASRTGGVPQWEHGNAAANPPGGFVHSGTIDMPNGGLQGYQAGPFANYYGPLPHFHQNPLNSMQHPALFNHIQMQVPHQHCLSNNLLHHPSGNGLPLDPRILAISSNSGHTFGPTAQPSLANQVNAGSSRIQPYEFLFFKLDNTKFKGYQNLVEKYHLILFLNAPFVDLSRLYEAGVIDEHRDMRLDVDSMTYEELVALEERIGNVNSGFTESYIEENLKSSSYVPDADCMPDQSSVEKDACIICQEEYEAKELVGTLGCGHKYHAMCIKGWLMVKNLCPICKTTALPADRRNG

SEQ ID NO: 18436 - protein, 185 aa, Oryza sativa
  Clone ID: TF_OSC401369j.C1.p3.fg
MNTPNSWLFADNSKYSTRARLLFMGLSFSIGILSFLVYLAIWYTCTRRRRSRQLRGGGSASADQEAPEANSHGMSAAAIAALPTFGYEASAAAAAALDCAVCLGQVDAGEKVRQLPKCGHLFHAECVDAWLRAHSTCPMCRAAVEGPATAAIAKKASSGGGATDTPPVVAPAPPAAAEALPLPPV

SEQ ID NO: 18437 - protein, 953 aa, Oryza sativa
  Clone ID: TF_OSC401238j.C1.p36.gm
MRVELEMDCAMVATRLTSKVQDRSQWSFQIREASASNGNSSDEWLAPSFNRTAPASLAPSPCRRGGAMLRDRAFDAGYKDDVFVCSSLLHLYARWGAMGDAVKVFVRMPRRDRVTWSTMVAGFVSAGQPLDAIQMYRRMREDGVKGDEVVMIGVIQACTAARNVRMGASVHGHLLRHGMRMDVVTATSLVDMYAKNGLLDVACRVFGLMVHRNDVSWSAMISGFAQNGQSDEALRLFRNMQASGIQPDSGALVSALLACSNIGFLKLGRSVHGFIVRRFDFNCILGTAAIDMYSKCGSLASAQMLFNMISDRDLILWNAMIACCGAHGRGQDALTLFQEMNETGMRPDHATFASLLSALSHSGLVEEGKLWFGRMVNHFKITPAEKHYVCLVDLLARSGLVEEASDLLTSMKAEPTVAIWVALLSGCLNNKKLELGESIADNILELQPDDVGVLALVSNLYAATKKWDKVRQVRKLMKDSGSKKMPGCSSIEIRGTRHVFVMEDQSHPQREEIVSKVAKLDLEMRKMGYIPRTEFVYHDLEEEVKEQQLSYHSERLAIAFGLLNTGPGTRLVIIKNLRVCGDCHDAIKYISKIADREIVVRDAKRFHHFKDGVCSCRDYWLPRTSMARGCVLLYVYPTDPPRRGPSEEVQPRKAATSVRPSRGTRRRGSGAVPVAFAIPGRGRHLSRRKRPGRWRQRLLLPTRWGARVADDHPRPLHCTCPMWEQHPAWPVRNATPLRCRRHPRRLLCALICVVGLAAVARCARNRRNSGGAGAGAGSASPSHSPAHAGHFGGGGSGGGGVTTTTAATTAAKGLKKKALKALPKLAYADAVAAAAAARGTVVGEEEEGKVEVLAECAICLSEFGEREEVRVMPQCGHGFHVACVDTWLRSNSSCPSCRRPIVLDDPSPPKRCRKCEAIVLEAVVAASSSSSSSAATATGSGGGGGGGGGRFLP

SEQ ID NO: 18438 - protein, 213 aa, Oryza sativa
  Clone ID: TF_OSC405088j.C1.p2.fg
MECCFRVYGLAIANAVSIGGTSLLVYQLVRLARTPGSKGGVVALAIFLVFWVSINAVAYSVFCGMLFPWSALRRCLAPLPSAARWLLCLPCRCARRRRRRPATSTSSSASALPPHMYVLEREPPVRWGARVATADDIPAYEQPAASEGGAAAAAAECAVCLGEVEKGEMVKRLPVCLHMFHRRCIDPWLRDHSTCPVCRCDAFAAPPLPAQMV

SEQ ID NO: 18439 - protein, 238 aa, Oryza sativa
  unsure (1)..(238): unsure at all Xaa locations
  Clone ID: TF_OSC400261j.C1.p18.np
PRVSSPPASAPAPSPASSSPDAAGDVWAKLVPSDSVFPEVELAEDDAVVCSRVTPDGGGEVVAWCKIRRGGDVSAATIWNLSLDAIIVDGRVIQQAVDIKPGSEIVPGPQKDGYLLYTFDITGLNRTKIISIVLGIENAKCSICLNLWDDVVTVASCLHNFCNGCFFEWLRRSSANSRDKSXSAACPQCRTTVQLVGGNHFLHNIEEAILXVFSSLQRSDEEIALLESYAPVKTNIVI

SEQ ID NO: 18440 - protein, 213 aa, Oryza sativa
  Clone ID: TF_OSC900165j.C1.p12.fg
MSLTNAPSSMVSIVTPVTDRDSGRRVAGVPPVLVGASVSSAPELRGRAYLVHHVFYEDGSASADGGGGVAPASRASIAALREVEEEDDDGEEASDCAICLDDGEESRETCGSGRRKEIPCGHRFHGECVERWLGIHGSCPLCRHEMPPATAAEAEEEEVVVAMVHGERVVMRGRRVVLSVLVMGRAHDDGEGPEQRGTDPIPPLPRVLIDDVD

SEQ ID NO: 18441 - protein, 220 aa, Oryza sativa
  Clone ID: TF_OSC14849j.C1.p7.fg
MDDDGGAGRDGILAFAHQLARQAAFLLQASNDLLASLLQSTSRGGGGADILSFANQLARQAGAFLQDSNDILASLLQSTSRGASAGAAAASDEAIQALKDVGGGDVDGGGQKLDCAICLNHDDPSASAAAGWKEMPCGHRFHGGCLEKWLRMHGTCPMCRHQMPAAEVVEGAASEVTTSEPLLLIARVRRSGDGGNEEEHYHYYLYEIRVQYSTNVEINP

SEQ ID NO: 18442 - protein, 181 aa, Oryza sativa
  Clone ID: TF_OSC400505j.C1.p10.fg
MEILVSALLLLLVPPLSALLAVAAPSLAWPSGSSSVRKLIAKKVAPEQAARDELLRVARYSSASAAAAASAVQQPGGSESSRPAAAAADDGGRPDQCAVCLSGIEEGDEVRELRCRHLFHRGCLDRWWLSARPPATCPLCRCRLLQSPSAAADDGDGDGEEDSDSDMVMFMAYLRSSSTWL

SEQ ID NO: 18443 - protein, 349 aa, Oryza sativa
  Clone ID: TF_OSC2013j.C1.p1.fg
MGRRARCLCLLLLLLLVVGGGFHVANAQASPAPPQTGTRAVNRAVSTVITVVIGVFFVLVFVCVIVNQCCDCDSSAGAGAGQGQSSAARRRRGLDPAAVAAIPVVPYAEVRKHRSGGGGALECAVCLTVFDDGDDLRLLPQCSHAFHPDCIDPWLEGHVTCPLCRANLEKQPAPSPPAVEFSSSPAAAAAAAEESRTPEAAAVRVEEVAEASDEEETRRREEEAVELESLRAVRRAARMPRSNSTGHSLCALPAPRAPGPGDGGDHERFTVRLPPHVREEVLKSRRLRHATSLVLGIRGSSREGSSRGGGGSWHGARRWPSFLARTVSWARGGVGADTSAKETPCRDAV

SEQ ID NO: 18444 - protein, 268 aa, Oryza sativa
  Clone ID: TF_OSC416014j.C1.p1.fg
MGRRARCLCLLLLLLLVVGGGFHVANAQASPAPPQTGTRAVNRAVSTVITVVIGVFFVLVFVCVIVNQCCDCDSSAGAGAGQGQSSAARRRRGLDPAAVAAIPVVPYAEVRKHRSGGGGALECAVCLTVFDDGDDLRLLPQCSHAFHPDCIDPWLEGHVTCPLCRANLEKQPAPSPPAVEFSSSPAAAAAAAEESRTPEAAAVRVEEVAEASDEEETRRREEEAVELEICAPNSGFGTFNGIAEKGELMNDFTNIAFSLELFALERCF

SEQ ID NO: 18445 - protein, 141 aa, Oryza sativa
  Clone ID: TF_OSC32353j.C1.p1.np
PPALADAGQWSCPDCSGDSTDAPPPAPAPLAPGSAGQLVADIRAIECDATLSDQEKARRRQELLGGAAPAGADANDDEGDDVLQVIGKNFSCAFCMKLPERPVTTPCGHNFCLKCFQKWIHSGKRTCGKCRAQIPAKMAEQ

SEQ ID NO: 18446 - protein, 209 aa, Oryza sativa
  Clone ID: TF_OSC33081j.C1.p8.fg
MPPPTRTRRGVTLAEQMAASSNLRDLLKLRDNDDDDDDGGGQGGRRQPRPLPDAVVVAAGRRRTLLDVIRGVDDDDGHDHPPTGVLEGHRPATSTRTAAAGGARGGRVSLMALLEQAERQWTTAAAGDASRRRVADDHAAAAEAGTNKGFAGAAAGVGGRCCVCMARGKAAAFIPCGHTFCRACARELRVGRGRCPLCNAAIHDVLNLF

SEQ ID NO: 18447 - protein, 99 aa, Oryza sativa
  Clone ID: TF_OSC33082j.C1.p1.fg
MALLEQAERQWTTAAAGDASRRRVADDHAAAAEAGTNKGFAGAAAGVGGRCCVCMARGKAAAFIPCGHTFCRACARELRVGRGRCPLCNAAIHDVLNLF

SEQ ID NO: 18448 - protein, 94 aa, Oryza sativa
  Clone ID: TF_OSC33082j.C1.p1.np
GARGGRVSLMALLEQAERQWTTAAAGDASRRRVADDHAAAGRCCRCCVCMARGKAAAFIPCGHTFCRACARELRVGRGRCPLCNAAIHDVLNLF

SEQ ID NO: 18449 - protein, 156 aa, Oryza sativa
  Clone ID: TF_OSC406125j.C1.p4.fg
MCALCQGHRNSSRASAAAAAAAAAAQSRPPPQMRSGGDGGDDGGGGERQLGRSSASPSAPPWPTALVPAFTYSRSVRRNVGGDDGEEEETAAAAAACSVCLGAFQLGETVRLLPACLHLYHAECIDPWLDAHTTCPLCRSDTGDPSPVDAGRIPPV

SEQ ID NO: 18450 - protein, 148 aa, Oryza sativa
  Clone ID: TF_OSC932j.C1.p3.fg
MLFLKELPIWQAFGFSLFTGALAGSILYAVCVLLLCCVDRRRRHAGAPPPDPKIWLPDHAHHRRRRDESSEMECSICLGELEEGERCCTLAACRHEFHKECIYRWLANRNTCPLCRHISLPPASSPPPAPPPHHASPPPSNVLAAAHV

SEQ ID NO: 18451 - protein, 260 aa, Oryza sativa
  Clone ID: TF_OSC12971j.C1.p1.fg
MPSSSSSSVAAAPSGSNGTRRDGGSGSVTGCLPADQACFALSSSASSPGYLHASATTTRRDASATVARACCTTASYVVVLGISFGSLLAILLILCIIRWYLVWRSARPRRDDGAADEAVGSAKKRSAGLDDDAIAALPVFAYKQREEGGGGAVGAAEEEKEERECAVCLPVMADGKAARRLPRCMHVFHRGCVDVWLREHSTCPVCRAKVVVRPAGAARVEKLPKSSASRALTSPVPAPAPRPTGTVVDDGRERDLEAQQ

SEQ ID NO: 18452 - protein, 171 aa, Oryza sativa
  Clone ID: TF_OSC900034j.C1.p1.fg
MNPASRRHYDSLVARYGDQDALADRFGGQNDGPDAWWSNLRVRMSQDHLLRHEARRRAATLEVFEDRENSHDGAFGCGDRASAKAMVTLHQPNLGETREQDCAVCLEPFEEGNTLRMMPCFHSFHQRCIFSWLRISRICPVCRFTLPSQADFESEKAEKERVSASPEDGNN

SEQ ID NO: 18453 - protein, 154 aa, Oryza sativa
  unsure (1)..(154): unsure at all Xaa locations
  Clone ID: TF_OSC900034j.C1.p1.gp
MNPASRRHYDSLVARYGDQDALADRFGGQNDGPDAWWSNLRVRMSQDHLLRHEARRRAATLEVFEDRENSHDGAFGCGDRASAKAMVTLHQPNLGETREQDCAVCLEPFEEGNTLRMMPCFHSFHQRCIFSWLRISRICPVCRFTLPSQADFEX

SEQ ID NO: 18454 - protein, 163 aa, Oryza sativa
  Clone ID: TF_OSC401539j.C1.p112.gp
MDRTSAVPGRVSDPGSAWFGGGERSSSAGPGRNVRLIATAVAAFVSVLGLALFLHLYVCHVRRRNRRRAAEAAALATVNAGAPPKQVGLDPSAIAALPTAAYGKVAGGDAAGGTTECAICLGAMQEADAVRVLPACRHVFHVACIDKWLASSSSCPVCRAGVE

SEQ ID NO: 18455 - protein, 238 aa, Oryza sativa
  Clone ID: TF_OSC401539j.C1.p91.fg
MDRTSAVPGRVSDPGSAWFGGGERSSSAGPGRNVRLIATAVAAFVSVLGLALFLHLYVCHVRRRNRRRAAEAAALATVNAGAPPKQVGLDPSAIAALPTAAYGKVAGGDAAGGTTECAICLGAMQEADAVRVLPACRHVFHVACIDKWLASSSSCPVCRAGVEPPPPPPSTAAARCVHEKQDAEKEEAAAGSSAPVRVLGASLMKMLSRERPSPRRQPGVHAVEMEDLESQLPRPQQQ

SEQ ID NO: 18456 - protein, 692 aa, Oryza sativa
  Clone ID: TF_OSC409503j.C1.p6.fg
MGAGSSRADAPPRRRAAARGLGLGLAGCFGGGSSGAATGGGGGGGATAASSSRAHEVESWQAARAVAEMDFRASVAAKDIRISSESDPRVHPSSSTISHHLRFNHLNSHENKEDALGTEIAETSVRQSSSGKEVMPRGNFSNEVAYAEITSREGISHIGRDILEPAANNAETDTVCIPEVGGPVSESGFSSSQRASERIMADLEAGEIAHGTSSTTIMSSERSDTSQSSLTSVLPATSTAPSTIGESLPDTVPSREDVPIFSGTQGEIGGNTLHDDMMSIFSNDGPARVRDSSSNEMRRSHRRVLWDTFSRRSSRGYLDSDTDDLGFYSRWLDLGDELFADEIEEARFFHRRRHGSIRVSQYSRSRIREHRRAVFDSGTDQSTVACPLGIHQIGRCTCDSFLIAEESSARASISRIVMLTEALFEVLDEIHRQPASLSLSMVSAQAPESVVNSLPCKSYKKQTAQCSDDMEQCHICLTEYEDGDQIRSLPCKHEFHLLCVDKWLKEVHSVPKLISKALTNRLQLIIDYLIDPMQSSFIKNRSISENFILASKMVQSALKRKEPMIVLKLNFHKAFDTVSWDALFKTLEARGFPELWIRWMKCLLCTGKAQRQIKHQGKQQPTDFINLKTYRLSLWEVLIGVGPYGKHATPGSLMGSKILSLSCQVKSGNPLNSGVIEAKKQPGLSSCPGVKG

SEQ ID NO: 18457 - protein, 595 aa, Oryza sativa
  Clone ID: TF_OSC407936j.C1.p30.fg
MAEQPRINSALVSVIRMAKVSKNANSAVSAAAYHYIRNDDRPDKAFTTERAKRAGKANASSGQIFVTIPPDHFGPILAENDPKRSIGVLVGDTWEDRLECRQWGAHFPHVAGIAGQSTHGAQSVALSGGYVDDEDHGEWFLYTGSGGRDLSGNKRTNKEQSSDQKFEKLNAALRISCLKGYPVRVVRSHKEKRSSYAPEAGVRYDGVYRIEKCWRKISVQGKFKVCSDIYGDRPRPLPKVDELKGATDISERKGTPSWDFDEKEGWKWVKPPPISRKPNLSGDPATDKEIRRVARRAQMSVTERLLKEFGCSICKQVMKEPLTTPCAHNFCKLCLVGTYGSQSSMRERSRGGRTLRAQKIVKKCPSCPTDICDFLENPQINREMMDLIESLQRKAVEEGDTKTSSDVSNGAESSGDDGNNEALEKGEDDSSLKDDGSLKDDGKVVKAVVVIKEEDLQPKKSKGEDEKEQGDKKMDSADVVDIAVEKKQATKRASEKAEKKQARKRKGDAVATNDGKRMKTGGDAMETAAEEDAPLSGGTPVKRNSRKSSEVDAKGGGGSPVVSSPRRVTRSNAKASGEADGSPATRTRRATRAEA

SEQ ID NO: 18458 - protein, 204 aa, Oryza sativa
  Clone ID: TF_OSC14789j.C1.p6.fg
MVSIVTPVTDRDSGRTVAGVPPVLVGASVSSAPELRGRAYLVHHVFYEDGSASADGGGGVAPASRASIAALREVEEEDDDGEEASDCAICLDDGEESRETCGSGRRKEMPCGHRFHGECVERWLGIHGSCPLCRHEMPPATAAEPEKKKVVVAMVHGERVVMRGRRVVLSVLVMGRAHDDGEGPEQRGTDPIPPLPRVLIDDVD

SEQ ID NO: 18459 - protein, 156 aa, Oryza sativa
  unsure (1)..(156): unsure at all Xaa locations
  Clone ID: TF_OSC14789j.C1.p7.gp
GSASADGGGGVAPASRASIAALREVEEEDDDGEEASDCAICLDDGEESRETCGSGRRKEMPCGHRFHGECVERWLGIHGSCPLCRHEMPPATAAEPEKKKVVVAMVHGERVVMRGRRVVLSVLVMGRAHDDGEGPEQRGTDPIPPLPRVLIDDVDX

SEQ ID NO: 18460 - protein, 204 aa, Oryza sativa
  Clone ID: TF_OSC400332j.C1.p12.fg
MVSIVTPVTDRDSGRTVAGVPPVLVGASVSSAPELRGRAYLVHHVFYEDGSASADGGGGVAPASRASIAALREVEEEDDDGEEASDCAICLDDGEESRETCGSGRRKEMPCGHRFHGECVERWLGIHGSCPLCRHEMPPATAAEAEEEEVVVAMVHGERVVMRGRRVVLSVLVMGRAHDDGEGPEQRGTDPIPPLPRVLIDDVD

SEQ ID NO: 18461 - protein, 156 aa, Oryza sativa
  unsure (1)..(156): unsure at all Xaa locations
  Clone ID: TF_OSC400332j.C1.p15.gp
GSASADGGGGVAPASRASIAALREVEEEDDDGEEASDCAICLDDGEESRETCGSGRRKEMPCGHRFHGECVERWLGIHGSCPLCRHEMPPATAAEAEEEEVVVAMVHGERVVMRGRRVVLSVLVMGRAHDDGEGPEQRGTDPIPPLPRVLIDDVDX

SEQ ID NO: 18462 - protein, 110 aa, Oryza sativa
  unsure (1)..(110): unsure at all Xaa locations
  Clone ID: TF_OSC900163j.C1.p11.gp
GSASADGGGGVAPASRASIAALREVEEEDDDGEEASDCAICLDDGEESRETCGSGRRKEMPCGHRFHGECVERWLGIHGSCPLCRHEMPPATAAEAEEEEVVVAXMVHGR

SEQ ID NO: 18463 - protein, 242 aa, Oryza sativa
  Clone ID: TF_OSC900163j.C1.p7.fg
MSLTNAPSSMVSIVTPVTDRDSGRTVAGVPPVLVGASVSSAPELRGRAYLVHHVFYEDGSASADGGGGVAPASRASIAALREVEEEDDDGEEASDCAICLDDGEESRETCGSGRRKEMPCGHRFHGECVERWLGIHGSCPLCRHEMPPATAAEAEEEEVVVANVVLHGDERRGEERREEAEAVGHWGRGGGSDGSEGREEKTAVAVEGEEAEVAKRRVRGVAAIHRRGRGKMKIHRHRRTRS

SEQ ID NO: 18464 - protein, 375 aa, Oryza sativa
  Clone ID: TF_OSC900418j.C1.p14.fg
MAGLAGDDSSFFGDDGDGDEFCYGPFDVEDLCYGASDVDDDWEEFCDGPFGGGGVEEFCVSGFSVRDLSDASSSGARETGDPHDDDPLPQTLARSLDSDGDLSATLHQIVSAMRLSEDEEEEEEEELLVLGHGHGVGIGGGGDVDGFMVSAFDLDTAMAIGGILEDIHEVMGADEVREEVVVEEEEAGNGGGIMPNGFEFGPPPRAISGTAAGFRMMVDADDTDSDDFQFVEVLGGGQVREAGAGMSMRPSRASQLVVESLPEATLSEEEASRGCAVCKDSFASGQIVALLPCKHYFHGDCIWPWLTIRTTCPVCRHQVRTEDDDYEQRMARRVIVLAAVEHQGAPAQGCGDSATMGAEGASECVVENGPEKTSF

SEQ ID NO: 18465 - protein, 338 aa, Oryza sativa
  Clone ID: TF_OSC401561j.C1.p21.fg
MNKRFNPQYRAWRPPTGPQGHRAGPESGIVPPTRDYVVEEEDEERHPHPHHRLLLDDDAAGFDHDETLAAPAPAPGSPFSFASDPDPDPDIDLELRLSSRSPPFWDCLEDDLADEEMVGGGFEWEEIADAAVPAPGAVAAGGGGGGGGGDGGLVGDGDVFGFLDEREILGAMEGLDSGDDESGFSDEPFDFGDEGDDIGDIFRSVGWEVLPVPLDEDDFEVLPGHVADAAAGGAPPAARAAVERLQVVPVGGGGEEAAAASRGCAVCKDGIAQGELATQLPCAHLYHGACIEPWLAIRNSCPVCRYELPTDDPEYEKRRVKRRSSGDSVAQLGTPMQI

SEQ ID NO: 18466 - protein, 645 aa, Oryza sativa
  Clone ID: TF_OSC34790j.C1.p5.fg
MEPSRRLLLSDYDGAIVSPLPSPPPSSATPFRPGVAVVVGILTSVFSITFLLLLYAKHCKRNAAESSGPYGSGGAFGSSGGGGAGERRNSGVDRAVVESLPVFRFGALRGQKAGLECAVCLGRFEPTEALRLLPKCRHGFHVECVDTWLDAHSTCPLCRSRVDPEDVLLLPEPPKPSTTGPPDPPETKVAAAAAAATAKDKEASLAPAAPAPSPAFRGFFSGRHSTGSVRAPGRVGPASRRSADLVGGDGGAVVGCFEAAKVRKDRVLLMEPAAAVAEPDPEAYDRRFGHRILVSTAGGCEDETAPAAKQRWSEVRPSDLMFVRSEMLVTEAGRVQLETITSRALFLSTIGCYYYPMVNMHVSRRQSGDVIVVRVSLIETWRTTDDDVLSRSSLLGGPDEHDVREHLLDVDGVGEEGAAAAAGPKIRVRGLTRRSEARGEEILRGVDLDVPRGVVVGVIGPSGSGKSTLLRALNRLWEPAPGAVLLDGVDICGIDVLALRRKVGMLFQLPAMFDDKNYFEKYFYCGRNYNYPKLPKVVFEGTVADNVRYGPQLQGKKLTDAEVLLLDEPTSALDPISTQNIEEAIVRLKKTRGLTTVMVSHSVKQIQRIADLVCLLVAGEVVEVLPPSELSEAKHPMARRFLELS

SEQ ID NO: 18467 - protein, 363 aa, Oryza sativa
  Clone ID: TF_OSC400903j.C1.p30.fg
MMVAGVIRSNQDGGGGGGTVSGAARISPAVVFVLVILAVVLFVSGLLHLLVRFLLRRGRGRDGGGGGDAEAAEGVEESALQRQLQQLFHLHDAGLDQDVIDALPVFMYREVVVGVGGGGGAGGGAKEPFDCAVCLCEFAGDDRLRLLPVCGHAFHIDCIDTWLLSNSTCPLCRAALGADAAALFDAAFDEMADEEDRKQQEDAVFPVRLGKFKNLSRAVGPVHDRDDAAAAAAGVGVGGGIITREEGESSSSSLDARRCFSMGSYQYVLAEASLQVSVHRRHGDGNGRARLRGLAGANPAGNDAAAAADGKKIGAGSKGDSFSVSKIWQWPRQGKGKLPVLASDDSPAVDGRLPWPRRSPGAS

SEQ ID NO: 18468 - protein, 364 aa, Oryza sativa
  Clone ID: TF_OSC21352j.C1.p8.fg
MSTKRLNKGSAGVACVYFAFLHILVLRTLQVCTFYQKGSCSYGSRCRYDHVKVSRNPTVAPPPSSSTTTRASSSLQPLSFGRPHHVGYQADSSNPRQQISMDVLAHSGSKPVWRNDFQHESVLEDGIDWSISPTVQNQTTLSPADLPICSFAAGGNCPYGEECPQMHGDLCTTCGKMCLHPYRPDEREEHTKLCEKNHKRLESLKRSQEIECSVCLDRVLSKPTAAERKFGLLSECDHPFCISCIRNWRNNSPTSGMDVNSALRACPICRKLSYYVIPSVLWYFSKEEKLEIIDNYKAKLKSIDCKYFDFGTGTCPFGSSCFYKHAYRDGRLEEVILRHLDADDGSTVIAKNIRLSDFLSRLHL

SEQ ID NO: 18469 - protein, 298 aa, Oryza sativa
  Clone ID: TF_OSC7089j.C1.p1.fg
MKEKTLAMVSGLPSARMMRQSRASWVYQLSPMTCAVAGTSTLVSMEVMHDTTGKKEVVVCYMNAPLPYMIEENYGGCFFEDDVDLAQVLQDQEIVYQLIQGNYGTGSSKTHSNPSSSYSHGCELGERKPSGVASYEAQLVVDEALARELQQMEDQLASASIDDHNIIEHGRKPIASSTSSGGNASASRPPQVVMEDGIDPDNMTYEELQQLGEAIGTESKGLPEDVIALLPTSTYKIRIFSRKEKHDECVICCMTYKNRDRLTKLPCEHQYHQTCVTKWLKINKVCPVCNKEVYGSGK

SEQ ID NO: 18470 - protein, 748 aa, Oryza sativa
  Clone ID: TF_OSC900071j.C1.p19.gm
MASSLLSSPKPSSFSSANPTSTPRPRAQTLSPFRAAAPRFSHGLATAAAAANPSASRRCYHRAFARPVRASMAQPRRPEYVPNRIDDPNYVRIFDTTLRDGEQSPGATMTSAEKLVVARQLARLGVDIIEAGFPASSPDDLDAVRSIAIEVGNTPVGEDGHVPVICGLSRCNKRDIDAAWEAVRHARRPRIHTFIATSEIHMQHKLRKTPEQVVAIAKEMVAYARSLGCPDVEFSPEDAGREFLYHILEEVIKAGATTLNIPDTVGYTLPYEFGKLIADIKANTPGIENAIISTHCQNDLGLATANTLAGAHAGARQLEVTINGIGERAGNASLEEDGMLKYKGTYEIISPDDIGLTRANEFGIVLGKLSGRHAVRSKLVELGYEITDKEFEDFFKRYKEVAEKKKRVTDEDIEALLSDEIFQPKVFWSLADVQATCGTLGLSTATVKLIGPDGDEKIACAVGTGPVDAAYKAVDDIIQIPTVLREYSMTSVTEGIDAIATTRVVVTGDVSDSKHALTGHSFNRAFRKTEDAAMIGNGIAPRMAGDQSIVMSEQQRAEFCLTLMAVMYGHTRQPADAELLRRPQRRRAAAAADPPPHIRNASVVENTEPDVLFAYTPHDGLSPEFDDDSGGVADYFAADDDEAYSNGGFGAVPALSEAIVSMPELSVGEAREKQCGVCLEGFEEGDKLRKMPCEHYFHESCVFKWLQVSRLCPYCLFAMPAAEEEEHNNDDEEEEDEAMMCIRFLFPE

SEQ ID NO: 18471 - protein, 562 aa, Oryza sativa
  Clone ID: TF_OSC422112j.C1.p3.fg
MAADDAARSSRRMDLNLYLGLPRAPRLRRPDLGSDLALGTPMLSSSPSSSAASADAPPLETEPLHPPYSPPPAELVRPPTPLPEPYDPSAPEAHPPYVPPPVPPPEAIPELADDLEFGFSHPPLLLRPSELLGWVDRPSSSTASSSFRPERVDRYRPPVICLNSRQSRCLRPRRFRSDLPPLGSEAPALENDAAAQPPPQEPMQDTVEENKVVADGAIVGASEEEPAERGKSVAMFECNICFEMASEPVVTSCGHLFCWPCLYQWLHVHSTHKECPVCKGEVTEGNITPIYGRGNSTSDAEKKVAEEGNVSGPTIPPRPHGNRLESFRQKFHHLRPISRRLGEAHGILSSWRRILDQQIMNSVSRFEGPPESTVQEMIDHAHHASRLGRITTRMRARRLQREAENSTFVASSAAESGLPANSTSDLPRRSSSPFSSERIDLLQHFVDLASTERLASAVSDLRRMVRPSPYGASTSSNPPNPPNTELLPVDGNHVAVALAADQASNSSTMAVIQEDAAFTESTGEPSNAGSSRSLRRRGRNDALGSLDVDGVGLHRNKRRRLN

SEQ ID NO: 18472 - protein, 323 aa, Oryza sativa
  Clone ID: TF_OSC402805j.C1.p20.fg
MAEAAITRYWCHECEQAIEEAMVDEIKCPSCGGGFVEEMTDEEIERLTNRQPEPGFSQWNPIEHPGETMDSDDEDNDLGREFEGFIRRHRRASTLRRVLDSIHDDLADDQERDSSILINAFNQALALQGSVLDPDEGQGDQGGSTNDDGLLEEYVLGAGLSLLLQHLAESDPSRNGTPPAKKEAVEALPTVKIEEVVSCSVCLDDLEVGSQAKQMPCEHKFHSSCILPWLELHSSCPVCRFELPSEETKDLNEPSNIGRVEDSHEEVRADGPGNVSESSNRPWAIVPWLNELFSTREAQNAGGVSTDQQSPHTSGTNPNAGHS

SEQ ID NO: 18473 - protein, 285 aa, Oryza sativa
  Clone ID: TF_OSC400283j.C1.p26.fg
MELTGWHLPEPPSSTVRSVIDGGGAHHPRLISSQVGQPARPTSPSPLPPRHRHRHIPKAEAVQGERQSPRHGSMELSASALGFGLCLDPHPVGGLRRRLRRGGGRHTSRSDCRRRLGYVPRPAHFPVSGVGGGLRGFLHRAPPGSARNDKGCARRHKTASSSATSAEPMDEGEADLLQFLFVTSGVSWGGIVGVVVAVNASVPAARVWMLPGVTTLDRELGGDDCSMCQYDKDAGAVVRTLSCDHVFHKACIDVWLREHGMACRLCRRTASCVLPWKTGGRRRHG

SEQ ID NO: 18474 - protein, 456 aa, Oryza sativa
  Clone ID: TF_OSC401376j.C1.p7.fg
MGPSAAALRAAAVVGLVVAVGLALPPLAAALRPLRERVASAGAASSSGSWGDEHAFFKRDENEISPYSWNITGTYKGSWNFAGSTNGSSRFLEFTKLKGDAVLELLSTPTKISGVHYVQGSVTFHDVLDNAHDRGVAQISGADGEPLQEEDYFLSNPYHLNMSVQFGPLAFHNLKDSSFEVVYIILQGAAKVSILMIGQQAIMDAYLCLLHLTAGILVESLFNAFATAAFFKFVVFSIFEMRYLLAIWKASRPLNSGEGWEVMRRELSVLYSRFYGILLGGILLMYELHNFLRPLLFLMYSFWVPQIVTNVIRDTRKPLHPQYILGMTITRLAIPLYIFGCPSNFMRIEPDKTWCIAVTIFMGIQAAVLLLQHYFGSRCFIPHQILPEKYCYHRKVEDNTNQPIDCVICMTTIDLTQRTSEYMVAPCEHIFHSGCLQRWMDIKMECPTCRRSLPPA

SEQ ID NO: 18475 - protein, 206 aa, Oryza sativa
  Clone ID: TF_OSC416737j.C1.p20.gm
MARSCSSSGSDHSSYDLALTLRRKLLLLDILAVLRFLAAALLERLGVVSCQEDNELPGCHSWCDSDVVDTGAMERLMQAKLSTSWYRLRRRASRGGSDNMASPHGDTSADICTICLAELEAGGGGGGCQRQVAELSSCSHAFHAACIDGWVVEAGTCPLCRTPEYIFIASTIMPVGNFPCSSCNLDDLQNLYSGNDSWSVHQLGIH

SEQ ID NO: 18476 - protein, 468 aa, Oryza sativa
  Clone ID: TF_OSC900230j.C1.p4.fg
MVIDRNKNGNGKKYGNENGNGFAVIPIVSVFTVFLRKLPFLIIWCFSGRCNQLNSYATFWLMAVPPVESETRSEETDNFPLLADHMENTGHHAHAVDIPWDSSPSTSRRDNHNGFDQLPRILEGSPGTSTPSNSQNGPLARRDDNRGRRQPSPLNSGCWISVELVVNVSQIIAAICVLSVSRNEHPHSPLFEWVIGYTVGCTATLPHLYWRYLHRNLPTTGQEPTVQNIPPNNTPEANSYGVTGTNGVSRNNEATVNPRFQAFADHFKMALDCFFAVWFVVGNVWVFGGHSSAHDAPNLYRLCIAFLTFSCIGYAMPFILCALICCCLPCIISILGFREDLNQNRGASAETINALGTCKFKSKKTRDGDGNEVGVGVVAAGTNKERVISAEDAVCCICLARYVDNDDLRELPCAHFFHKDCVDKWLKINALCPLCKAEIDGVSTSAPAIGFGRRHSDNRVGNDIESQL

SEQ ID NO: 18477 - protein, 261 aa, Oryza sativa
  Clone ID: TF_OSC400545j.C1.p54.fg
MAMETIIRLRSSSKQLEGHHGTAPLEEGPSYVRFVCDVKVRCWSRRLGGGGEPVRHDGIKFTLETERKHVLDGAGGDVFLDYEETRRMAWAVFTGMRELRCVDLSRSNWATPMPDDDAAAWIHRAVRRNHDDGLAGGHYRFAARVKVAVELVFSEPVSLVRGLVWLETRAGDTCGICLDGLTASERCKTPPANLPCGHAFHPPCITRWLFKGTTCPICRDDLTGLAAAPWESGVMSCPGCIMPSTPCVEDCPSLKALSLNS

SEQ ID NO: 18478 - protein, 398 aa, Oryza sativa
  Clone ID: TF_OSC900378j.C1.p8.fg
MEQTTGVSGHEHIIDIPRDSGPSTSTSHSVARENHGEPNPVDRSATRALVPALQAPSAVGAPSAGHTSGARRSDNYVRRHRSPLNSGLWISIEVLVNVSQIVAAIVVLSLSRKEHPQAPLFEWVIGYTVGCFATLPHLYWRYIHRNIVNGENEPAHTLQGSSQNNSTEPSASASERRRNAARNAVLANPRINALFDHFKMALDCFFAVWFVVGNVWIFGGRSSAADAPNLYRLCIVFLTFSCIGYAMPFILCAMICCCLPCIISVMGFREDTNNTRGATSESINSLPTYKFKTKKRRHSSGNEAEGQDGGIVAAGTDKERSLSAEDAVCCICLAKYAHNDELRELPCTHCFHKECVDKWLKINALCPLCKSEIASSSGTSDTRRSDHTDIPVQEIEMH

SEQ ID NO: 18479 - protein, 304 aa, Oryza sativa
  Clone ID: TF_OSC400225j.C1.p16.fg
MDVQLESTAVQHGQAKINVEEHALVSLLSDEKYATEKTEDVDPDDYEKLEEGIMQYGCAHYRRRCRIRAPCCNEIFDCRHCHNETKNSIKIDAVKRHELPRHEVQQVICSLCGTEQEVRQVCISCGVCMGKYFCEVCKLFDDDIGKHNDTSFYNVRFQNSNIIAMVVEYAGCCYSIVLKNSHACVEGAMHHDCPICFEYLFESTNDVSVLPCGHTIHVKCLREMEEHCHLKLMLRFACPLCSKSVCDMSKAWERLDEELATISDTCDNKMVRILCNDCGATSEVQFHLIAHKCQKCKSYNTRQI

SEQ ID NO: 18480 - protein, 186 aa, Oryza sativa
  Clone ID: TF_OSC33582j.C1.p2.gm
MGRHYAFVAHVILLLSIAHAAPRPPLPRIVAVGAVLCTPARPFASSVGNIGGGTWGSTYATARAVKAGHGALECAVCLAEFVDDGEKLCLLPGCCHVFHTACIDVWLAAHVTCPVCRADLADRAVAAAGHVLAADQAAPQVGEHGHHARDRIKRAVGFGGIADNVGGASEPVMVAAAPCIVQATLE

SEQ ID NO: 18481 - protein, 246 aa, Oryza sativa
  Clone ID: TF_OSC400800j.C1.p38.gm
MGRHYAFVAHVILLLSIAHAAPRPPLPRIVAVGAVLCTPARPFASSVGNIGGGTWGSTYATARAVKAGHGALECAVCLAEFVDDGEKLCLLPGCCHVFHTACIDVWLAAHVTCPVCRADLADRAVAAAGHVLAADQAAPQVGEHGHHARDRIKRAVGFGGIADNVGGASEPEKENNMPTPRQAEQETLERCARTPRASTPSSLWELTDDAFSGNERKRKKRMGERTRDIHEKIHVLWMSHSKCHKF

SEQ ID NO: 18482 - protein, 204 aa, Oryza sativa
  Clone ID: TF_OSC401325j.C1.p13.fg
MEIGGVLVSLLFAAFSLPCLLLLLVLAEAGLRLASLALRGGRYAWPTRSDFLGYRIARRRRAAVSGGAGGADGEEEAQPTAECCDRLAVAMYRRGRDAAPVDCVFCLSRVDDGEEVRELRCRHVFHRACLDAWLVLPRATCPLCRDCLLPPPCEPPRSFPLDYYDDDDDVHFGFNDFSITSSTTTTTSAAAAVAYPHGVALWPM

SEQ ID NO: 18483 - protein, 192 aa, Oryza sativa
  Clone ID: TF_OSC13655j.C1.p5.fg
MAPPPPSSELPPPPPTNAATSSSAMAVPYFCRKHVALATSRSSTVWTVAKQTGLRSVTVGSDTAVACAVCTDDLPPAATACRLPCGHLYHADCFVQWLSRRNSCPVCRRRVPLFPDHGAAYTDEDEDEDEEEIAPSPPPPHGPETTATDDHRPRSLPGASWIGRICRRLLGYTETSHPRQLNRCSGDTTQQW

SEQ ID NO: 18484 - protein, 834 aa, Oryza sativa
  Clone ID: TF_OSC13655j.C1.p5.gm
GIAGRYVRFDKGSDAYDLPDGVRVPRSTRTLVRKLCELGWLFRKVRGFISDNISRSPSDAATEVGTVAQAFCSALQEELSDYYKLLAVLESYSLNPIPTPGSDSGVSGNYLSLRRLAVWLAEPAVRMRLMAVLVDGCRGLRGGAMAGAIHGHAQHGDPTFQDFMGRLLRRVCSPLFEMVRSWVLEGELEDVFAEFFIVGQPVKAESLWQEGYLLQSDMLPAFISPVLAQRILRTGKSINFLKVCCDDNGWADAATEAAVCVGTTTSRGGLGYGQIDALEALVVEAAKRIDRHLMDVIHKRYRFKDHCLAIKRYLLLGQGDFVQYLMDVVGPELSEPANRISSFHLAGLLETAIRASNAQYDDRDILDRIKVKMMDHGDGDRGWDVFSLEYDARVPLDTVFTASVMKRYLKIFNFLWKLKRVDHSLTGIWKTMKPNCIVSSPFYKEGTNIRSQFVSVLRKCQVLFNEMNHFVTNFQYYIMFEVLEVSWARFSEEMDSAKDLDDLLLAHDKYLTSIVEKSLLGERSHGILRNLFALFDIILQFRSHADRWFERIYELQLRGKGSASREEAEHLVVVFLGHDGAASALVRAAASAADERRHLFVGYGCPVLLPQARRSGHVREAPVPAVLVQDERDLPNYRSAGGGGDDDGSFSLPAPAATPSTRTPRTAPSPVDSLECVSLFSSRSSTVWTVAKQTGLRSVTVGSDTAVACAVCTDDLPPAATACRLPCGHLYHADCFVQWLSRRNSCPVCRRRVPLFPDHGAAYTDEDEDEDEEEIAPSPPPPHGPETTATDDHRPRSLPGASWIGRICRRLLGYTETSHPRQLNRCSGDTTQQW

SEQ ID NO: 18485 - protein, 575 aa, Oryza sativa
  Clone ID: TF_OSC401539j.C1.p2.np
MSAGLPAWKINRTFPLRVCSLRSTTLLKRGNNSKAEYNHRTQQATPTMQTCKGNTRTRKATLQAQPLPTLACGAGPTRQRQSPPWTESTAAAGHVGAHPTLRIGRGRSDGRGRPSGTTGQARPQAAATAEPRPPATTPAAGGDGARGGERVEREAVLTERMGRRDEDEEGDGRGATGGTKVAVARVHRGAGGSGVEWRSGVVAGLAGGAAKLVVVAARLEVDGNGGKRLPKAAKRRRCSDRGVHHHHHHSSSPTIPNPSSSDSPPVAASVCSPARRAPAGECTARGRLVDAISGVLRGDLCCARSRSSLAVDGDLCCARSRSSLAVDRPVQIRVVYTVRGCSSIYGSDLGLMENRVGESSATAVDGGGGAKDSGSFECNICLELAQDPVVTLCGHLFCWPCLYEWLHVHAHSRECPVCKAGLEEEKLVPLYGRGKASTDPRSRSVAGVQIPSRPAGQRPATASQPDHHHDHLPHHDPWFMGGAGAPVAGGRWGNYTFSAAIGGLFPLLSFQVHGFPQAAAYGPAAGFPYGYGHSFHGWHGHGFPHQAPQGQHVDVFLKVLLVLVGVLVIASLIVF

SEQ ID NO: 18486 - protein, 354 aa, Oryza sativa
  Clone ID: TF_OSC401785j.C1.p9.fg
MVAVPVVADDGGGGHGAKGEESVSGSVAGISPSILIIAVIVVVMLLASVSIHYFIRHLCRRSSASAAASSSAPVLPVVVRPASSAAVGEQVVGKASAERAAEMERLISRLPLFTLASSLAALPKSSRDCAVCQSAFRDDDELRLLPACRHAFHSRCVDPWLRANPSCPLCRASIALPHPPLPDLLRVELGSVSSRRSNPNSAAAVASAPPEGAAVRAYPLPTLPNSEYLVEEELEVVIKQPAAAAAPRTGEPSQHPLPAAQAERGQPSSVTPTASFSSARSQERWSNRWSSRWSSRWSSGRWSSRYDAGTVTAAATAEWWWDMDGGAAPAARRREVEEQGNAFHGFMRWLTGAY

SEQ ID NO: 18487 - protein, 1902 aa, Oryza sativa
  Clone ID: TF_OSC21831j.C1.p4.fg
MGKHKGRAASSGLAASLLPHAQGAVPIVGFGGYHGASRVEPAAPSSSTDPDASILLPPDVDSEVLQHLRRLGRKDPTTKLKALSTLSMLFAQKPGQEVVQIVPQWAFEYKRLLLDYNREVRRATHDTMSSLVKTVKKGLAPHLKALMGPWWFSQFDPALEVAQAARHSFEAAFPQSDKRLDALMLCVKETFLHLNENLKLTTQALSDKATPMDELEDMHQRGGIEAGQVTGTVCHKSLQQPSDEHKQLFVGWVISSSLLAMATLIDILLGVKLQNCVRDNSSSENTSLSKVLSGTLSSAESAFSMNKYFLDFLKSKSAIIRSATYSLLASYIKHVSHVFNEEAMKVLSPALLGAFNEKDPSCHSSMWDAFLAFSRRFPEAWSYCNIHKVVFSRFWHFLQNGCYGSKQASYPLLVQFLESIPSKAVTTEQFVFDFLHNLWAGRNQRQLSAADSLAFFTTFKQSFLWLLKVLPRHSGGGSSDDIPIKLITYFLAKVVWHDYLRIPSSKNQDISLSGLSDEAISGDCQLSHKESLLASSTRYPTYYLQDLGKCIIEILDEISAMENHLLNIACETLLKDCLDIIHQRESLPNFQYHVEQVVSFFISLDQLIVQKGKTWPLESLARPLIEQSVPAIKSMIQKDTPIVVKLLSVLVEIFRPVPLFLKNSQKESEESVQDECFFDQWCTIIKYTSAKQKHPVDNKNSHVDDQFELLTLILQKVRERIAGGKLRNLQKNGSLPEHWRHDLLDSAAESVFCDLPATDSHVHYVCAALGGSDQDDQICFLSADTVHKMLGSILKCLTSVLMTSTFEWARFAYVVLLPTEPKDSKVIGAQSFSSNIKMAHFAFKVLEGSLFALRRLEEDSLFPSVLAALFIIEWEYSMALTLDEEHDLKGYKEDIDVGSSACNSSDDHLDEGIHLKANLAESIHTFCQSLSPSFWSDLHPFTLNNLLNILAQSVRCALFQTLELPTESTSVLCSEWMVNMLKLISLDHTKLQSFFYLLLSEGEYWPLWVKPSLQNENAPVKIKFEPVITNETGLKHHQFVAFVDKLVLNLGFGEVILGVPGNTCYNTSQSIDTTSTVPSLSRAWVAAEILCTWKWKGGSVFSTFLPSMIQHLKMESCAEVSILSILLDTLLEGAFHECNQWVLFNAWHISDNEIEKIQDHFLRALVALLFSINSINECIWRESEALVFFEKLLSNLFIGSTVNRKCVKTLPFVMSTIIKPLSGKLKLNEASCYTDLVGQNILSWLDVAISCLSSSPREVLQQDIVDWMQVVLSCFPLNITCGTQKLEVKIEREISDTERSLLLTLFQKYKIFCAIEAPSLSTSGTTLSTMVELLGVKLIAVMVGYCWTELQENDLHFVFHTVQKWIESAVLLVEEMTDAINDAVINQKSNEDTLEKLKLVVSSIDELTLSFGEFALVTLCHLNHLVDIQETENFQSLQIIKSGDFADRNNNMMESMLRLFLASGVSEAIAKSSCEEASSIIASSRVAYMHFWELVASFVIYASPQTRRCALESMELWGLAKGSVSGLYSILFSSQPISHLQFAAYSLLLSEPLCQFSLIKECSLGSNRPLTQESCMGQSIELMPDSEKTLDLREELSSLIEMPTSELLQTDLLAHDRVDAFIAWSLLLSHLQLLPPASITRERHIPLRTGAPCGKKKDAELMPEAEVAAQASKNAIITCSLLPCIESLWPVGTWQMASLAGGLYGMMIRLLPSYVRTWFTSLRDRSLSSSIESFTRAWCSPPLLLDEFSQVKDSLYADDNFSVSVNRSAYEIVATYKKEETGIDLVIRLPSCYPLRHVDVECTRSLGISEVKCRKWLLSLTAFVRNQNGAIAEAIHTWKSNFDKEFEGVEECPICYSILHTSNHSLPRLACKTCRHKFHGACLYKWFSTSNKSTCPLCQTPF

SEQ ID NO: 18488 - protein, 256 aa, Oryza sativa
  Clone ID: TF_OSC400601j.C1.p18.fg
MTMRRTGGVGCRNAKGADADATAAGEECGEVGGEAHEDGAREEDAAVSFGIGSLGPVAMSDRGTSSSVSGDTDADSVPTADAAAPLWAPHGRALTGCLVVVNVALVLLVYLYFWRVFSRKRAAAAASARSDDDDDDDEASSSASAPPPAAAAVSVRTRDDVLASLPVFVVRSSGGEKAEAEAECAVCIAELRDGDECRALPRCGHRFHASCVDGWLRLHTTCPLCRASVVALAAAPERKGGVADTTAAAEDVDARV

SEQ ID NO: 18489 - protein, 266 aa, Oryza sativa
  Clone ID: TF_OSC408540j.C1.p1.fg
MRGRRRRGVGRRSRREGAVVASLTVFTMASALAALPKSSPDCAVCLSPFAPEAELRLLPACRHAFHASCVDAWLRTTPSCPLCRATVSLPHPPLLTAAAAAVSNAVQQDPLYSRSSNNSRSFRVEISSISNRRSSAAADDRRTYSLGSFDYRVDEEVEAVVSRIARPAAAKSTTGSVTPAPGEALAEAAGSRGWLREYVDRLASSASSLSGRWSGRWSARWSQSHHSNRQEDSWRWDPEAAVMSAPRGVDDDEPGFVTLYRWIVGV

SEQ ID NO: 18490 - protein, 373 aa, Oryza sativa
  Clone ID: TF_OSC408596j.C1.p11.fg
MASLPPPAPPAIGGDPLAATIPPSLPSPAPSSSSLNLSPSLLIITALLAFVFFASVSIHFLLRCLARPSHPAPSPLPRASAAAQRATTASAVEAGEATAASAVGRSHEGEAAAGGGEEVDDEKERLIASLPLFTMASALAALPKSSPDCAVCLSPFAPEAELRLLPACRHAFHASCVDAWLRTTPSCPLCRATVSLPHPPLPTAAAAAASNAAQQDPLDSRSSNNSRSFRVEIGSISNRRSSAAADDRRTYSLGSFDYRVDEEVEAVVSRIARPAAAKSTTGSVTPAPGEALAEAAGSRGWLREYVDRLASSASSLSGRWSGRWSARWSQSHHSNRQEDSWRWDPEAAVMSAPRGVDDDEPGFVTLYRWIVGV

SEQ ID NO: 18491 - protein, 111 aa, Oryza sativa
  Clone ID: TF_OSC402928j.C1.p3.gm
MATTGRLLLPHDINGRFGSVPACSEAIAALEETSAGEAKEKDCSVCLEAFEEESDKLMRKMPCCHAFHESCIFEWLQVSRLCPLCRFALPTQAEAEAGLWPLLTPGSGSGT

SEQ ID NO: 18492 - protein, 717 aa, Oryza sativa
  Clone ID: TF_OSC34790j.C1.p7.fg
MAFGREKGIQGNTMRESRAIEGPHVLRQTLSNGCNCSTKLFMAVKEAGGPNAKAGCSIVVLEKQSWRKEEKEMETRGVRKRQLRRTFHGGGGRLTRGADVDESHAAHESRRGANGRICLRGGGHVRGISAPRVKTGLRYVEDSGRSISTTGFLRRGSSVSLKDQGNEERPNKTKLNPMNARWADSKEKPRYLREPFRSSGTKAACPSSSKAPVRKYFEEKQGRTFLGEADNAESSSRRTEANRLQCSKKAVVEEDVHPYGQQDEPEDLLSTSTTEDQPAELDPELLDSSVSSGVSAHAIGSVVRNAALRSKSRQQKGKEELCQIRPQTASAFVNRSTIPRNSTNGVKSSNAAGPGVQRRTLKNLGCTSISDVLPSGCSSANSIHNKRAEVMRNRAFDGESSSRPRGLNGHSSLGHSPAMYSGITGPRVRTAEQSASQQTRTSSRSIQESADSSRIRRPSTQHARVRVPNEREDSVFALRETLARDRQPEWAHFSLGEAAPRRSMRPFSMELPHEIYSSSRQGSSNQTARSRSSYRPDESPPQMFHGLLVERENYRRINMEGIAEVLLALDRIEQDDELTYEQLLVLETNLFLSGLGLHDQHRDMRMDIDNMSYEELLALEERIGSVSTALSDEQLVKCLKRNVYKLPNSDLEANRAVLDDAKCSICQEEYIEGEEVGRMQCEHQYHVSCIHEWLRQKNWCPICKTSAIPSEMDKGGT

SEQ ID NO: 18493 - protein, 200 aa, Oryza sativa
  Clone ID: TF_OSC900007j.C1.p17.fg
MSTPTVQMVAPAAAVVEDPSKHWTRHGPVLTACLVGINLLMVLLVFFYFWRFFSGKRGPPTSSTSTMASGGDDDEEEGASSSSSSADTSPGRHHQDREDIASSLPVFVYSSSAAAPDVGDAGGNGKAAAAAECAVCIVEFRDGDRARLLPRCGHRFHADCIGAWLQLHSTCPLCRAAVLLHPAAAEPAKNDQPKDDDCPV

SEQ ID NO: 18494 - protein, 84 aa, Oryza sativa
  unsure (1)..(84): unsure at all Xaa locations
  Clone ID: TF_OSC900007j.C1.p23.gp
VGDAGGNGKAAAAAECAVCIVEFRDGDRARLLPRCGHRFHADCIGAWLQLHSTCPLCRAAVLLHPAAAEPAKNDQPKDDDCPVX

SEQ ID NO: 18495 - protein, 218 aa, Oryza sativa
  Clone ID: TF_OSC422132j.C1.p3.fg
MDPPARRLMDSRAAQLAAPLPDPYSAETFEDLLRELGVDPSIHTIVRSAGRWMDPAAAAARVPVRFHRTLQRLGIDPNSDARSIRDMLQEFYRVVYHGEVYWAGRVIRPRPSSMPTPVIGRRRRAADGDAPMQPPSKYARVHAVSRDVLLGLALTKACDARQEECAVCLSDFEEKDRLRTMPCNHSFHENCLFRWLRDSCLCPLCRYALPKQQQVQSC

SEQ ID NO: 18496 - protein, 149 aa, Oryza sativa
  Clone ID: TF_OSC900071j.C1.p17.gm
MATTGRLLLPHDMYRRLQAPTAAAAASLFILAPHLHFQRPNAAAAAPEGYSNGRFGSVPACSEAIAALEETSAGEAKEKDCSVCLEAFEEESDKPMRKMPCCHAFHENCIFEWLQVSRLCPLCRFALPTQAEAEAGLWPLPTPGSGSGT

SEQ ID NO: 18497 - protein, 501 aa, Oryza sativa
  Clone ID: TF_OSC400410j.C1.p4.fg
MSHYTMHAHINYTALPPTSPLQLPLPYLPPPPPPPQPPLLQLQPPPPPSSPVSFDTAFQSRISPSILLIILILAVIFFVSGLLHLLVRFILRPAPRDAGDADSGDANVTAFQGQLQQLFHLHDAGVDQSFIDTLPVFLYGAVVGAGRKDPFDCAVCLCEFADDDRLRLLPKCSHAFHVDCIDTWLLSHSTCPLCRRSLLADFSPYGGGCSPLLFVLESGSEGSISDRLDAASSAHLSLVMEQEEEAEPEQKHAEAAEKADEVVVSVKLGKFRSQATEVAAGGGCGGSSSANPEQDVRRCYSMGTYEYVMDERSLLRVAVKPPAKKRPTTQMPGHRVAMSECDCHSKRESFRGLDALPGGKLAQAQPPKPPAKVGKKESFSFSKIWMRGAPRIRKDGASSRRASSFRLSSVLQRAASDVGATAAPKPLRPDVVSPVTESEYNVSAWDKSEKSASGSVADWDLESAAATAAVPGAGAGNGLSSRADEAPSFARRTLLWIRGHL

SEQ ID NO: 18498 - protein, 502 aa, Oryza sativa
  Clone ID: TF_OSC401273j.C1.p23.fg
ILADWCFGLQLGAANVVLMGTNLTLSFDDVEASFAPGVKGSGFEGVVYTAEPLDACSPLTSKAEKGPPSPFALIIRGGCTFDEKVKNAQDAGFKAAIVYDNENSGVLISIHLALFRLWGHMVLHYLTLKFTVAGSSGGIHIYAVFISKASGEVLKKFSGHTDVEVWILPAFENSAWSIMAISFISLLAMSAVLATCFFVRRHHIRRDRPRIPEAREFHGMSSQLVKAMPSLIFTKVQEDNCTSSMCAICLEDYNVGEKLRVLPCRHKFHAACVDLWLTTWRTFCPVCKRDASTGIPDPPASETTPLLSSAVRLPSQSSSFRSSVAASPPRPISRRPSSQSISRIYAASGTPNSPNPIRSFTNSTAMSISRSNVDLSNMSSRPRASHLASAHSLVGSHLSPPINIRYASPHMSHSGYASPSPHVSSSYVSNSGYGSSSYYLGSSSQHRSYLRRCGESGPSLSTMAPQSPQQSQLGHSGAYGLSLSRSILRPVVRRSSLRLCAD

SEQ ID NO: 18499 - protein, 1234 aa, Oryza sativa
  Clone ID: TF_OSC400549j.C1.p7.hg
MDHHPPPPSPPRDSGGSLEVRLFYVRLSPRGPTPPPRLALALRSSRGGDEEEAPTPLSLPLRLDRRDPASGEATYVSTASARLPPPSAAFEVADHRGAALLRGSLRRCPDAKPDSSPAWAIDCIPAAGAEAETSAFEVYVAGCCAGEPAVLTCALRLATPEEQKAAGGLVRRRSPTSNAAGDEDVNGSIQHPEGWYSDDDDGQLTWFNAGVRVGVGIGLGVCVGVGASGFFSPPLPNPTTRRGGGGHRSHPPDATAADDDDAAMTGAAAWPVCTICYEDLRPLSDQHLHCLPACGHVFHALCLEQWLEYCPGGKKKLTCPICKQPCGAAHPPTRLFFQSTGACPTQTASSSPSRHEPTDGGADRDELAAEVARLEQKAASLGRVLDEQRDGIQKLNAEASAAAGPPNLGGSCVAMWREKAAEAEVMKESVRREKECVQHLLNAKTEELSRKSSECGRLQEKGLSLAKELAALKLSTDMNLQEEEILKLASLGNHGNAANAVDVLTRSLALRNKSYKELMIQCNVLGRSESRSQQRFEKAKELIKKLKARVQDLEKEQEEKENGVIRDLRSAKKFKADQTNSGNTTVNNGFSGLAAGCGDYPMKLDEVVQDPCDKPGPSPEAKNDLNIKDKMDDKHADVIDLDADDSVFQHEHKKGLSAKPFGNDATRMAPGTGPQQVHNFNSLSDDFQIPIRNLGGEGTGKSVGKWCKGVATPGSLNTNANKRNLIAVGPDGRGGKDSKTQALWPKAQKVGSRAIVPSLGEVAVALRRKAAEMASTAAAASSQGCISWALRQRGLGGGGARAVPVLPRRRFCVSAAAGAGFDNENREYVIVGGGNAAGYAARTFVEHGMADGRLCIVSKEAYPPYERPALTKGYLFPPDKKPARLPGFHTCVGSGGQRQTAEWYKENGIEVLYEDPVVAFDGKTHTLKTSSGKILKYGSLIISTGCEASRLPAKIGGNLPGVHYIRDVADADSLVSSLGKAKKIVVIGGGYIGMEVAAAACGWNLDTTIIFPEDHIMPRLFTPSLAKKYEELYQQNGVKFIKGALIDKLEAGSDGRVSSAVLEDGSVVEADTVIVGIGARPVIGPFEAVGVNTKVGGIEVDSLFRTSIPGIFAIGDVAAFPLKMYDRMTRVEHVDHARKSAHHCVEALLTSHTKPYDYLPYFYSRVFEYEGSSRKIWWQFYGDNVGETIEVGSFEPKIATFWIDSDSRLKGVFLESGSSETKLSSKVQPLSRMP

SEQ ID NO: 18500 - protein, 306 aa, Oryza sativa
  Clone ID: TF_OSC401172j.C1.p1.gm
MNGFAPTGYQQPPPPPAASASPGGWIASTAIFMSIFFSTFLLAMAVSVYCCLLCRDRVRSDDDDTGAAAERARGGGTIAPFPVEALPPAYAYVVGSSEDGGATAASGGGGRECAVCLGAVREGEMVRRLPACEHVYHADCIDRWLAAHRTCPLCRRELDPGKNPPDQLPRAHPPSPATRRAEVDEEVGRRHRARPPKVLVTEPPLLLVTEPRRCRSSSSATSHPPAPQDPPSRESALRVPSRRIRRLQALPLSVPPSARLVATGSAASRVTEAPPVDQATARHELHRRSSRGPAGGRMERWRKEGE

SEQ ID NO: 18501 - protein, 190 aa, Oryza sativa
  Clone ID: TF_OSC406124j.C1.p3.fg
MTGAGVETCCGGGGQAAAASASGPPPRGLIVVSAVFLSIFLATFLTLMSLAFCCCRRWRERDAVSGYVDGEGAVVVVAAGESGGGEPFPVEALPPAYAYVVGSSDDGGATAASGVGRECAVCLGAVREGEMVRRLPACEHVYHADCIDRWLAAHRTCPLCRRELDPGKLAAGAPPAPAQQQVDPTDQLPV

SEQ ID NO: 18502 - protein, 155 aa, Oryza sativa
  Clone ID: TF_OSC900108j.C1.p16.fg
MDGEMDWIAARFVLSAIMGVHPLVAVDDAGADDEHFPVDDAAAVHGHASPPPVALPAAVLAPEEVAGAVVCAVCTEEVAARQAVVRLPCAHWYHAGCIGPWLRIRTNCPTCRAELPREPAAADWRVPRRPAVAETAGSRLRREASYTMLAGTLPS

SEQ ID NO: 18503 - protein, 239 aa, Oryza sativa
  Clone ID: TF_OSC900112j.C1.p15.fg
MCCHSHPDLTGLLLLVSCSLHRRRPGQQLSTMARKLRGQAASSGTQNSNGLSNSSLELPSEHHFLAARTGMNGFAPTGYQQPPPPPAASASPGGWIASTAIFMSIFFSTFLLAMAVSVYCCLLCRDRVRSDRDDTGAVAERARGGGIVAPLPVEALPPAYPYVVGSSEDGGATAASGGGRECAVCLGAVREGEMVRRLPACEHVYHADCIDRWLAAHRTCPLCRRELDPGKNPPDQLPV

SEQ ID NO: 18504 - protein, 713 aa, Oryza sativa
  Clone ID: TF_OSC400934j.C1.p47.np
MAEHLASIFGTEKDKVNCPFYFKIGACRHGDRCSCLHNRPTISPTVVFANMYQRPDMITPGVDAQGQPIDPRQMQEHFEDFYEDIFEELSKFGEIENLNVCDNLADHMIGNVYVQFREEDQAAAAHTALQGRFYSGRPIIVDFSPVTDFREATCRQYEENSCNRESHNEAGAAAQAQSHNEAGAAAQAQAHAIGGSDMIVMTIEDVTITLVVVEGGVEAADMKGMMMEEGVGTVVALQGVRGVQSGRAARSAGPRSNSGIVKGTKSRGDRLCPSLARACDRTAMRRLTKRLLPSFRGAGRACHRRMARYRQAGTGTPGGGGGFLLICSTGDALFDETEFTFGKVEIFNTMHSCFKFSNDLGNQLKTIFFKKENKGGMQGKSKSMYNPCMSTTSMNQYVSHTQSFGLPSNQVVLGSMDEESAQHGNYAFPTSHISQCFQPTSNTWISQSANGIADGIPQWEYVNGMNNAPGMTETVNGSFREYQNGPSTLCRGPLPYFHQHAGMHAHNLLDHTQVQAPYQQCHNNPVLHGVNHSGNRFHLGPRIPVLFSNSERTFGPPHHPLLANPVNHRNIRILPPEHATIMDFSRLYEVSNVVDEHRDMRLDIDSMTYEELLALEEQIGDVNTGLAKSYIVEKLKTSLFVPGSSCMSNKSSESSMENDACIICQEEYQVKECIGTLDCGHRYHEDCIKQWLMVKNLCPICKTTALSTGRRSG

SEQ ID NO: 18505 - protein, 187 aa, Oryza sativa
  Clone ID: TF_OSC415400j.C1.p1.fg
MVCKNGSYLCNVISTTTGHPVFYLASPCGRLVLMKLLLVDLSFSSQLASYFVIICVIVAVFYCFLKQLAEFSDTDHQTVRDQDARNNETEPILPRKRVVFSYGATEEQPESSMCSSEDMCSENVCKICYDAPRSCFFIPCGHGFACFTCARRIAEDKNQACPICRRLIHRVRRLVEPLGSSCGKDFQ

SEQ ID NO: 18506 - protein, 267 aa, Oryza sativa
  unsure (1)..(267): unsure at all Xaa locations
  Clone ID: TF_OSC407922j.C1.p16.np
LRARRHAGGGGHHSSSPSPSWSPPNHQPPPFQSSFDEPPEVIPVVSSLNFQYQHPMNVVPGIPQSHRFTGPGASSSRSHQHPRLRSGFLLERQGDCLGCSVVNXEQGRKKINXEIRNALEMIHRGENVRFEVYLFLLQSIFYGGVDIHDRHRDMRLDIDNMSYEELLALEERIGNVELLALEERIGNVSTGLSEEEVTKLLKQRKFSSWLEASVEEEPCCICQEEYVDGDDLGTLDCGHDFHVGCVRQWLVVKNTCPICKNTALKSX

SEQ ID NO: 18507 - protein, 128 aa, Oryza sativa
  Clone ID: TF_OSC900212j.C1.p6.fg
MLPVSAVSSGAGAGGGKAALGELDISALPVFVHVAGCEAAAAVECAVCLGEVRDGERGRLLPRCGHRFHVECIDRWFRANSTCPFCRAAVVAGEPGGAAAAAGDKGDAVAVAVVGVPDVVVHVQVEEG

SEQ ID NO: 18508 - protein, 847 aa, Oryza sativa
  Clone ID: TF_OSC400256j.C1.p9.fg
MAAGTASPPPDAEPPECPVCLSPFDAASAAPRVLPCGHSLCGPCIASLPPASASASASAASLRCPLCSQCVPFSRALGPSSLPKNLALISLLPSPPNPSRSRTAAAAPPPPHVPLHADHSRLLSRFRHAVLPESASPLHSPAPAAGLAIGSFASDLGAPWFCPRGHPVSLLPIETPAAAAKQESPLYYRPSHAARVAAAIDALSAAARDEVIDLVAVSSRLARRVCRVYGFWMGPEAAPLWLLSERHSRGVSCLLEERSRREETVALIRNVGMEVCEAFMGLHGEGLVLGCIGLGCFCLDRFGHCLLDLNQVLALCHGVRVGVCSSKSKAFMAPEVAEVVHDKLQIKDHDFSGLLGPSSDAWLLGCLLVALVTGDEQLAAGWSTEGSYDDWKNEVLTKVDASLVGTHMEPWSATIVSCLNYDPEGRPEIADVWKCINGSLMNSDIEALIPNVDLAARKSFMCLLLGELSSMCSNLGAVESDDTMHLSQDLDDKHSTPDDASSGGIINNEEVGAAGMDGPKCGLYNSSTLLAHRDCITGLAIGVDIFNVMHLTRTATQGLPNNRSSLTAGGFLFSSSYDKTINVWSLQDFSHKQSLKGHEHKITAIVVVDNDNQSLCISGDSGSGIFVWCVDPSLSNEPLNKWYESNDWIYRGVHCLAVSGTGYLYTGSRDKSIKAWSLEDYSLRCTMTGHKSTVSCLAVACGILYSGSWDGSIRSWWLTDHSPLSVLEDGTPGSITPVLSISTELDFVVASYENGCLKIWKDDVLVKSEKLQNGAIYAAKLNDKWLYAGGWDKVVNIQELLEDDSEVEIRDVATFTCDSIITSILYWDGRLIVGLSNREIKVFYKAS

SEQ ID NO: 18509 - protein, 271 aa, Oryza sativa
  Clone ID: TF_OSC400608j.C1.p11.fg
MASSSLLVRLASDEMPQTLDASSSSSCYDAFVPVFHPDPSSGFSAASVVAAADRLRSQFLSVEPDLFHDALVAPSPDHLGFPDEEEEEEIRWDCLQLDDDDEEEEGVADLRLEASNAAEEFDWEEVASPSGGAGMDQPEPEWEVLADVPPPPPPPADEGFVYTSDRDVYEVLVGEGLFLKSKPPAARSAVEALPSAVVAAGEDGEGEECAVCRDGVAAGERVKRLPCSHGYHEECIMPWLDVRNSCPLCRFELPTDDPQYESWKASRAAAA

SEQ ID NO: 18510 - protein, 164 aa, Oryza sativa
  Clone ID: TF_OSC5328j.C1.p2.fg
MDPDAALRVELVGVVAVGAVVVVLAAGAFPGGRWRKRAAARVDDVERALGAATLMTYEQAAAAAAKKASSSSRAAAAAEEQGEDRCAYCQSEYAGADEVRVVQCGHFFHAGCIDRWLRKHRRCPLCRGGLSPLPPLPKPGCRPMPPRTSRPAASSATATASAAG

SEQ ID NO: 18511 - protein, 135 aa, Oryza sativa
  Clone ID: TF_OSC8949j.C1.p12.gm
LSSDDEEEINHHPTHATSPPTNAAASSSAYRRAGLDNIPRLDSSSHPGPDFVAVDKLRMMPCCHTFHQRCIFDWLRLAAAMHLLSLPPPPLPTQHNRRMIRLGARSQGRSQGRNFFSLQKWLPLQQQTNHAQGNC

SEQ ID NO: 18512 - protein, 241 aa, Oryza sativa
  Clone ID: TF_OSC419098j.C1.p9.fg
MGSALSGSGSGSLLVLSVSVVGILFTSILLLAYYLFLACSWRRRSHQTARPTPPLPSFFLAADQPRRGLGLEEAAIRRIPTLRYQQQQQHNKQQQCGVCLGEFREGERLRRLPPCLHSFHIDCIDAWLATALTCPLCRAHVTVDTNHIAAATTSTRHDDDQLLSGVHQPMRRSFSLDSCHLYLAIILHPHQLSDSDTRSRSRREPKPAVLESERPSRTLRRSFFSFSHTTTSPVPTPILPI

SEQ ID NO: 18513 - protein, 202 aa, Oryza sativa
  Clone ID: TF_OSC401894j.C1.p13.fg
MLGSGLNLVSAALGFGMTAAFVAFVCARFVCCRARRADASASRPHPSPVDFDADFPSDFDRPIEHSRSGLEPLAVAAIPTMKYNCEAFHSEDDTQCSICLSEYKEKDILRIVPICHHNFHLYCLDAWLLKQTTCPICRISLKELPDGKSTVSSAPTMSQPPTLPESSVNPTSHFLPVHQEHRSHQDGPDMPESVEVVIEIRQ

SEQ ID NO: 18514 - protein, 115 aa, Oryza sativa
  Clone ID: TF_OSC402429j.C1.p6.fg
MSYLLSYISKMLCIKIPSEARQASEDGGSGGLTECSVCLSRIRVGEATRRLPCRHAFHRDCVDRWLLSCRRTCPLCRVYVVVDGNKPGVAAKHTGEPPLAEDMVIWFSAMLVPGF

SEQ ID NO: 18515 - protein, 178 aa, Oryza sativa
  Clone ID: TF_OSC421349j.C1.p1.fg
MSASSPVAYDANVLLAAVTALSAAIAFVAALHLYARCLLRRRVAGAGAGAAGNPHALRRPVTPGGNYELEVISVAACALEGGGLDAKQLGALPVFTWGSSSPATAAADAAVQCAVCLGEMEDGELGRLLPACRHVFHAECIDTWLAVSSTCPVCRAAVGAAEDDEPAAAPVAGVSPAS

SEQ ID NO: 18516 - protein, 474 aa, Oryza sativa
  Clone ID: TF_OSC401970j.C1.p9.gm
MDMLKEINIMVEDNKNEDGVRSYKIEDPFEWRNRMREIDSKEKFQQVRALAKFLQDLYAMSHSIGISCGHETSSTQEGFPEALGRDLETPGLCKPGFQEALEITSMHPRRDSSAYTTRPPPPPPTADGGGNGGRISPAVLFIIVILAVIFFISGLLHLLVRLLMKKQHRRGGAENAAPSPHSRHVGRDAAMDRQLQQLFHLHDSGLDQAFIDALPVFAYRDIVGGDKEPFDCAVCLCEFDGEDRLRLLPVCGHAFHLHCIDTWLLSNSTCPLCRGTLYVPGLTIESLMFDFDERLEEGRLSEECEDGFQSSRQKKPMDEEQTVTEKRVFPVRLGKFKNVGNTGVGGVDNGNAAGIVSREPGESSSSSLDTRRCFSMGTYQYVLGASELRVALQPGRNKNGVGSRLKGRATGISSVNAEIMEGKRICAKSKGESFSMSKIWQWSNVKGKLPAVLVVEFLNYSYSFGLISHVYVFH

SEQ ID NO: 18517 - protein, 114 aa, Oryza sativa
  unsure (1)..(114): unsure at all Xaa locations
  Clone ID: TF_OSC24818j.C1.p1.gp
MPPRDGGGGGADEEGGSGDCAVCLAEYAAGDEVRVLPACGHGFHRECVDRWLLTRAPTCPVCRAPVVARVEGPDDDAKEDYCGDGESVERHGGGGGDIGFLSVAGESRVLPAIX

SEQ ID NO: 18518 - protein, 188 aa, Oryza sativa
  Clone ID: TF_OSC900356j.C1.p14.fg
MDRAQRAHMVRALGVTTTVLFVASVSYIALTALYACFCDGGGRRRREDGGSSSVRPEPSEETKRALDGIPVHVVQMPPRDGGGGGADEEGGSGDCAVCLAEYAAGDEVRVLPACGHGFHRECVDRWLLTRAPTCPVCRAPVVARVEGPDDDAKEDYCGDGESVERHGGGGGDIGFLSVAGESRVLPAI

SEQ ID NO: 18519 - protein, 327 aa, Oryza sativa
  Clone ID: TF_OSC401948j.C1.p36.fg
MAGDRRGGGGVVSADGERRRGIRRLLLPRGEGSSSSSPPQPPPLQAEEGRRKGFASAALRGLGCTSAAASQAYAPGAGAAAAAAVRSSADWHGRRRRRGKEKRKERGGGGGGGGGGHLVGGGIGADVWCAPGIPFAAEASSVDCVVARHQMVGRGRGGDAERPHRERPCLSRRVTVQEQISSSFMDSPPPPHLDVAPFFGADLLPSGRLRRMRGYRHSPVGLEEEIMMFQTRVLLGGMSMYDRYQDWRLDVDNMTYEELLELGDKIGYVNTGLREDEIVRNLRKEEFEANEEMGRLDCGHSYHVYCIKQWLSQKNVCPVCKTAVTKT

SEQ ID NO: 18520 - protein, 197 aa, Oryza sativa
  Clone ID: TF_OSC412775j.C1.p23.fg
MLASAAEFTDNPAATATVAARHGVDGGGSRVVVPLFLVTVSLFFVTYQLFGVAAAAGAMVLDVCAVALAALNVTVTRARRFPFLRLSLGGEEGHGGGGGAGGGDVAPAAAGMDAAAIMALPAAFGYKREQTAAAAGGWAQCSICLGLARVGEAVRRLPSCGHLFHAGCVDEWLRAHATCPLCRAAVCAAGPEPELPV

SEQ ID NO: 18521 - protein, 285 aa, Oryza sativa
  Clone ID: TF_OSC401064j.C1.p6.gm
MSSSSSSLLSSLATLGLGYSIAIALGFLVLLASLLLASYFCFRRGGGGGHFSGVLTPSSSSSHLSITVPRVLFVAEGSESPDAYSSGVAAASSPVGLDPAAIASYPKVPFYSGAGADADAMCSICLSEYADGEMLRVMPDCRHRFHVCCLDAWLRRNASCPVCRSSPIPTPVATPLATPLSELVPLSQYAADRRRSRGLCLGYLEKFGRCKTTTRDHALGENRSLVTCLGKRRGQGELAVVIVAATEVALPLHVADEVVSPLQVATAKIRRCQWPLDCREKGAGG

SEQ ID NO: 18522 - protein, 570 aa, Oryza sativa
  Clone ID: TF_OSC14624j.C1.p1.fg
MAMGGIRCPVCFAAMAAGQAIFTAECSHTFHLRCVPGGAAACPVCATPWRDAPSPLTTSSIPAAYDDDDPVEPVATAARNSSGGGGGVLVLKTHCEYPALSRGAARDGFAVLVHAKAPAAAAEAAGRAPLDLVTVLDVSTSMTGDKLALVKRAMGFVIDSLGAADRLSVVAFATPTRAGCSAAPPDAHVGGREGTAKRAVDALVANGNTNIRDGLDVDAKVLDGRRHTDAVASVILLSDGQDNQTMGYRGRFHMTDFKAAATSYDVLVPPSFTRAGGGERCAPVHAFGFGTDHDAAAMHSISEITGGTFSFIENLAVIQDTFARCIGGLLSVAAQNARISVECLDPGVRVRAVKSGRYESRIDAEGRAATVDVGELYADEERRFLLLLDVPRADGDAAVATRLASVRCTYRDTATEQSVDVAGEEDAVVLRPAVATGVAPSMEVELERERVRLEAADDIALARAAAERGAYGEAARILDARREALSRSAPAASGDAMCAALVAELRELSERVADEREYAQTGRACVLAGMSSHGQQRASSVQLGELRVRVFVRVRDTGDAEDGEALGDFA

SEQ ID NO: 18523 - protein, 571 aa, Oryza sativa
  Clone ID: TF_OSC900244j.C1.p19.fg
MAMGGIRCPVCFAAMAAGQAIFTAECSHTFHLRCVPGGAAACPVCATPWRDAPSPLTTSSIPAAYDDDDPVEPVATAARNSSGGGGGVLVLKTHCEYPALSRGAARDGFAVLVHAKAPAAAAEAAGRAPLDLVTVLDVSTSMTGDKLALVKRAMGFVIDSLGAADPPQRRRLRHADARRVLPRLRLTRMSEDGKATAKRAVDALVANGNTNIRDGLDVDAKVLDGRRHTDAVASVILLSDGQDNQTMGYRGRFHMTDFKAAATSYDVLVPPSFTRAGGGERCAPVHAFGFGTDHDAAAMHSISEITGGTFSFIENLAVIQDTFARCIGGLLSVAAQNARISVECLDPGVRVRAVKSGRYESRIDAEGRAATVDVGELYADEERRFLLLLDVPRADGDAAVATRLASVRCTYRDTATEQSVDVAGEEDAVVLRPAVATGVAPSMEVELERERVRLEAADDIALARAAAERGAYGEAARILDARREALSRSAPAASGDAMCAALVAELRELSERVADEREYAQTGRACVLAGMSSHGQQRASSVQLGELRVRVFVRVRDTGDAEDGEALGDFA

SEQ ID NO: 18524 - protein, 423 aa, Oryza sativa
  Clone ID: TF_OSC400993j.C1.p79.np
MAKCQFSPIPRAIAASSLVLPLPPHPGEHILRHRCLLRSPFIARASTASSLVLPLPPHPGEHILRHRRLLRSPSIARASEGRRRSSCCFRRIDKMPNRATHWCYACRRPIRVSGQDITCPNCNDGFIQEISEIGGSLNTYGIFDPSFDERRDRSFGMVEAMSDLMRQRMAEMGRNRVLDFHGTRGASSHQGRQPTVRPMLIFGSNAPDRVSSSSEEADILLRQGRRIGADRPNFSRFLVGPSLEALFEQLLLHNNRQGPPPAPQSAIDSMPVVKINLRHLRDDPHCPVCTDKFEVGTEAREMPCKHLYHAECIIPWLVQHNSCPVCRHPLPSSSHRSGSTRSSSTHSNEAISHGVARSDADPVPVARSDDSRNHEMHGSFSFLWPFDSPTPDSSSYTHEGGVGEPTVHDDAGQMTYSEWHYDY

SEQ ID NO: 18525 - protein, 162 aa, Oryza sativa
  Clone ID: TF_OSC416737j.C1.p15.fg
MSFPLVCFCRQIPRPIVALFKLLQAVALAFVLILCFLGLYEFPYTVEDHAPLIHGRRRDPLGDDGLQPEAVKRGLPLVEYMQLADLSADCHDGESGYPATCRVCLERLEATDEVRRLGNCTHAFHIGCIDRWIDLGEVTCPLCRSHLLPRQRRGLLGSRRFG

SEQ ID NO: 18526 - protein, 320 aa, Oryza sativa
  Clone ID: TF_OSC900362j.C1.p8.fg
MSAPAAVEQRLQALRQKLGRKQHFEEAVADLAAAVRDHHAAASPALRDLMYSTVCRVATVLQTRYTAPGFWRAGLNLFLGTEKLVTNPSEKEQLKTFILRAREHLDEKENEESMPNNRETDTRFLFEGHLTVGPEPPPPAWLVAQNLARELSILAEPSGDQGANNNGESRAEEMAPAAAIMNFLNTMTVDGDLEAALEESLQNVMANPKVPPASKEVVANLPVVTVTEEIIARLGKETQCAVCRESLLVDDKMQELPCKHLFHPPCLKPWLDENNSCPICRHELRTDDHVYESRKEREREEEEDRKGAANAVRGGEFMYV

SEQ ID NO: 18527 - protein, 331 aa, Oryza sativa
  Clone ID: TF_OSC421892j.C1.p4.np
GAPCSAGSGGATSPGTTRRSRSGSARRRRRRRRGSRRSGPCGTTRGGSAGSRGSSTGRCTTYSVTARKNQSVNANYLLNFHYDPISRPQPRGPRTYPTRRQRKIRPYNKDLFLQANFKFVVLDTGSYEIELMDPDKMLQWEDIVCVRYYSPCEVQCPICLESPLCPQITSCGHIYCFPCILRYLLMGKEDYKGESWKKCPLCFMMISTKELYTIYITQVQHFHVGDNVTFTLLSRSKNSLTPSIKNLTDESTIDEDPCSAFSKFILTSDVELSVREAKTDLVNWLHMADLGLVDDLEKLPYVSTALEQLEERMKYWSEYKLLTYKLWVSKL

SEQ ID NO: 18528 - protein, 521 aa, Oryza sativa
  Clone ID: TF_OSC420404j.C1.p5.fg
MGSGSSKAGASSASSSSSASASASASGGDEASKGNGKGQRRGRGRGRGLLQRLPSSSSSCFRGHGTPSRDDASSASSPPPPPRPPRRPFESSKGEENGSLPSIAQMDKSEEDAPTIPKSHPGEGATLPSSHINRDQDVDVLQNATAVNNRVEVNQSPNHSDSSRPRFGVNFGLSRAVSLGSSVACSILSSDLSTSANPDGGHGNVDNSSDANISQQGGASTAGIDSTLDMLRDSVTAQARAAHQARRNLLESDNANLRYSNRRMGPQEPFEGSVRFSRTLSVGRLRDRVLRRTPFSDGLFTPSLLYDRAIWPSGNASARQNSAIMQRTNSERNSELQLDSSTDSATLREANNRDLLERRSAFLERRRIRSQVRALQRLGSRTSSRPGNSDEETNTRASISRIVMLAEALFEVLDEIHQQSAALSSRPSFSSIGSVPAPKEVVERLPVKVYRRSLKHQTEEAAQCYICLVEYAEGDCVRILPCNHEFHLTCVDKWLKEIHRVCPLCRGDVCRSNASGIGKTT

SEQ ID NO: 18529 - protein, 353 aa, Oryza sativa
  Clone ID: TF_OSC21192j.C1.p6.fg
MAHRRIALAVLVTLLLSAFRPCLAQQSNDDTSKHHRSATAGGFTPTTVVVLVALITAFVLLTVFSVLINRCAQARAPPRRAFRSTASHQPVGGAAAASRASRGLDKEVVEAFPTAVYGDVKARMAAKSGPLECAVCLAEFADSDELRVLPACCHVFHPDCIDPWLAAAVTCPLCRANLTAPPVSLAAAESSDLTAPEEAVQEEESEELDEASLMATFTPESVIDFGATHDHEFDRAGYPHYRRTQSAMDAAPDRHTLRLPEHVMKELAADRRHRRAASLAGYPDSVERTPRWLTSLWRSVSWQRQSRADWDAGEEHGGSKRVHPVAGAQDETPSGSGSDGSKENSDSDALNRV

SEQ ID NO: 18530 - protein, 387 aa, Oryza sativa
  Clone ID: TF_OSC21192j.C1.p6.np
VGPLVNLSFSVVLLRLFLSVQAQQSNDDTSKHHRSATAGGFTPTTVVVLVALITAFVLLTVFSVLINRCAQARTASHQPVGGRRRTASHQPVGGRRRRASRGLDKEVVEAFPTAVYGDVKARMAAKSGPLECAVCLAEFADSDELRVLPACCHVFHPDCIDPWLAAAVTCPLCRANLTAPPVSLAAAESSDLTAPEEAVQEEESEELDEASLMATFTPGRTQSAMDAAPDRHRTQSAMDAAPDRHTLRLPEHVMKELAADRRHRRAASLAGYPDSVERTPSLRVDASRMCVDYWEEKRTPAAAMRRRRRGPGRRCWSYSARASSSSAPAGRSSSASFVHGGTRLWLSATLRSPAGRCCCRRCACRSTAAAGTGSATSSSRGASSAPP

SEQ ID NO: 18531 - protein, 391 aa, Oryza sativa
  unsure (1)..(391): unsure at all Xaa locations
  Clone ID: TF_OSC410031j.C1.p6.np
HRRIALAVLVTLLLSAFRPCLAQQSNDDTSKQPERHGRLTPTTVVVLVALITAFVLLTVFSVLINRCAQARAPPRGVPQHGVPSARRRRRRLSRASRGLDKEVVEAFPTAVYGDVKARMAAKSGPLECAVCLAEFADSDELRVLPACCHVFHPDCIDPWLAAAVTCPLCRANLTAPPVSLAAAESSDLTAPEEAVQEEESEELDEASLMATFTPESVIDRRDARPXIRQSRVPSLPEDAVGHGAAPDRHTLRLPEHVMKELAADRRHRRAASLAGYPDSGRGRRGRGRTARRRTPRRWRSSSSGTAGIAAAGRGRRRRGAAGXTRRTAIADSSGGXPVRSSTSSAXMYMGSSSTAHASSTIPNAACTPPSCGTSSRRTPAHSVSSALAMPS

SEQ ID NO: 18532 - protein, 260 aa, Oryza sativa
  Clone ID: TF_OSC412577j.C1.p7.fg
MEAVAVHASFSSYSPPVVAGGRDDAGSSSSSRSMSRLPARVAGAVARGIVTFVFATVGTILGAITGGLIGLATESGMVRGTGIGAISGAVVAMEVVDSSVAMWCSHDSGIWSVLYVLDVIWSLLTGRLVREKVDPAVQNAVDSQMNAADAPFRESAPTLAEMFDTGIPGVAAAATGMPADAIAALPVTTFAAAAGGDDRAGCSVCLQDLEDGERARRLPECGHTFHLRCIDSWLLRHASCPLCRRTVVAAAVAVDDVVVG

SEQ ID NO: 18533 - protein, 391 aa, Oryza sativa
  Clone ID: TF_OSC20834j.C1.p2.fg
MAAAAREAAESPNPRSAPRRAAAAAAKDASSFLSPRFRSAAAQAGWDEESLLHAALVVEDTPVRESRRRRRASTTSSSAGGGGSAGSNTRKRRSWRQPPGSIPPVVFLLDDDEKKPDTTADGKKEVKEEEKKTVVVGEKEACSEKAAATSELPCMDRLREELSCAICLEICFEPSTTPCGHSFCMKCLKHAAAKCGKRCPKCRQLISNSRSCTVNTVLWNTIQLLFPSETEARRTSIASSSETNDDLAQQISQRSNSMAQGGIRSSSSNGIGYITQRSTRSSATNNRSFTTTGSRRSTFVAQEGSSTATGRGFVRASQLVPSARVVSVRSHQSDDAALAYRLQQEEFMTAFESEGERQPPRSSSSTVSAARANLRAMASRAIRLRARGWPV

SEQ ID NO: 18534 - protein, 197 aa, Oryza sativa
  Clone ID: TF_OSC900034j.C1.p2.fg
MEVDASAVARALPRDFPPIENLSFEGFPRYTFKIGNRIHCTNLMYRPGSRTLLTQEEAHEIIREGLRSDIRRGRIQLNADFLQQLVDQVRDHILQRQRRGTATAMDGVVEVEDAYRNGGFGAIPASSKAMAELQEAMASDARERGCAVCLEDFEAGEKLTRMPCSHCFHATCILDWLRLSHRCPLCRFPMPTQDQSY

SEQ ID NO: 18535 - protein, 199 aa, Oryza sativa
  Clone ID: TF_OSC900071j.C1.p5.fg
MEVDASAVARALPRDFPPIENLSFEGIPRYTFKIGNRIHCTNLMYRPGSRTLLTQEEAHEIIRERLRSDIRRGRIELDADFLQQLVDQVRDHILQRQRRGTATAIAMDGVVEVEDAYRNGGFGAVPASSKAMAELQEAMASDARERGCAVCLEDFEAGEKLTRMPCSHCFHATCILDWLRLSHRCPLCRFPMPTQDQSY

SEQ ID NO: 18536 - protein, 162 aa, Oryza sativa
  Clone ID: TF_OSC401236j.C1.p2.gm
MMMSSSSSAAAGYDGELGPSAAAQAAGVRRKALRAMPTMVYSAAGGPSPACAICLADLEPGERVRVLPKCNHGFHVRCVDRWLLARSTCPTCRQPLFATPPVRPFLAPLRPEGFVTPSNVGGGAVVLGTLAMVSAVLEEEEDDDPCSTGGRRSAGSRAELTV

SEQ ID NO: 18537 - protein, 158 aa, Oryza sativa
  Clone ID: TF_OSC900293j.C1.p4.fg
MALSLGEVAMLVVDVAFVLCLIVAIMCCCEDDRRRPRSSSQRDAQVGGRVVMLRVVEAPPGQQRVAPAAAKAALPYFPYAQAQGRTSSSETQTLVCAVCLEELRHGELCSEVPACRHIFHRGCVGSWMKKSDSCPLCRVKISSWIAGPTESPTAADAV

SEQ ID NO: 18538 - protein, 248 aa, Oryza sativa
  Clone ID: TF_OSC401206j.C1.p18.fg
MVLCSMRKSFKDSLKVLEADIQHANTLASDFSRDYDGACLQMRMSYSPAAQFFLFLVQWTDCSLAGALGLLRILIYKVYVDGTTTLSTHERKASIREFYAVIFPSLMQLHKGISDVDDRRQKAICTERYRRRDEDESKRHVSEIDVEREEECGICMEMNNKVVLPNCSHAMCMKCYRQWRSRSQSCPFCRDSLKRVNSGDLWMLTDDRDVIDMATITRENLRRLFMYIEKLPLVAPDNIFYAYDSHVK

SEQ ID NO: 18539 - protein, 255 aa, Oryza sativa
  Clone ID: TF_OSC900263j.C1.p18.fg
MVLCSMRKSFKDSLKVLEADIQHANTLASDFSRDYDGACLQMRMSYSPAAQFFLFLVQWTDCSLAGALGLLRILIYKVYVDGTTTLSTHERKASIREFYAVIFPSLMQLHKGISDVDDRRQKAICTERYRRRDEDESKRHVSEIDVEREEECGICMEMNNKVVLPNCSHAMCMKCYRQWRSRSQSCPFCRDSLKRVNSGDLWMLTDDRDVIDMATITRENLRRLFMYIEKLPLVAPDNIFYAYDSHRMFLVVGCG

SEQ ID NO: 18540 - protein, 529 aa, Oryza sativa
  unsure (1)..(529): unsure at all Xaa locations
  Clone ID: TF_OSC410012j.C1.p1.np
MNCTKGGGFPLLFCAVICLMAQQGACNVVLIANNTTLSFDDVEATFTPEVKDSGVNGAIYAVEPLDACSPLRKKAANGPVSPFALVIRGGCQFDDKVRNAQNAGFKAVIVYDDEDSGVLVSSNFTVAGSSSGIYIYAVFLSKASGEVLKKYSGQSDVEVWILPVYENSAWSIMAISFTSLLAMAAVLATCFFVRRHQIRRDRGRIPVTREFHGMSSQLVKAMPSLIFTKVQEDNSTSSSCAICLEDYSFGEKLRVLPCRHKFHATCVDMWLTSWKTFCPVCKRDASAGTSKPPASESTPLLSSVIHLSAESTALSSFRSTVAVSPPRPIRRHPSSQSTSRAYSISSAPRNYNLQRYYTNSPYISTSRSNVDLANMSSRSHTPHQASMHSLRSGHLSLPINIRYTIPHVSRSDYGSASLGLSHDSCSHHGSPSYYHSSLGQQRSYLMHRTESGPSLSTMVLQSPQXSQXQYNGESGKSISCGLTRSLRQAYVQHCLDSDGSLSAVTSDQSLPRCXLSYEVHCFMSICASP

SEQ ID NO: 18541 - protein, 228 aa, Oryza sativa
  Clone ID: TF_OSC400622j.C1.p98.fg
MATAPRARRLAAADVQPATPAVGPASGGRPQFNLSSGAATAVVFVSIVLCFILLCTYCRCARQRAIAGARSRVMREIRERVPGVLLLRPAAAAAALPVLPYSAAAAAAGAKKGPLVEDCPVCLEAFAGDDGVKVVPACGHVFHAACIDQWLAVRNSCPVCRCAVVCYYADRARDTAVVVDDDDDDQEVVLERVVAMIEAIREEQREEEAAARRAPASDGGGGEGLMTS

SEQ ID NO: 18542 - protein, 469 aa, Oryza sativa
  Clone ID: TF_OSC16299j.C1.p4.fg
MATATAVYYAFSSREQFYPAMVYLSTSKICFVLLLNTGLVAMCVAWQLVKRLFLGTLREAEVERLNEQAWREVVEILFAVTIFRQDFSVSFLAMVAALLLVKALHWLAQKRVEYIETTPSVPMLSHARIVSFMLFLLVVDCLFLSNSLRSLIHKREASVAIFFSFDDMLMEGQWEKKAVYTFYLELISDLVHLSLYMLFFIAIFLNYGVPLHLIRELYETFRNFRIRIADYVRYRKITSNMNERFPDATADELNASDATCIICREEMTTAKKLLCGHLFHVHCLRSWLERQHTCPTCRAPILPPDNGRTAARPHGVHPGVQPGNGTPGSERAAGENISRRQAKLEAAASAASLYGRSFAYPPANNLNRYSTPPQSTSNGPQSGEASTSNQSPKGHATADPSAPTFYARGAVSSVTTTRELESSLQKAYENAIKSQIERLMQAACKFLDMSVVNTSLTALKLHAWYEPLG

SEQ ID NO: 18543 - protein, 303 aa, Oryza sativa
  Clone ID: TF_OSC16389j.C1.p1.fg
DMLMEGQWEKKAVYTFYLELISDLVHLSLYMLFFIAIFLNYGVPLHLIRELYETFRNFRIRIADYVRYRKITSNMNERFPDATADELNASDATCIICREEMTTAKKLLCGHLFHVHCLRSWLERQHTCPTCRAPILPPDNGRTAARPHGVHPGVQPGNGTPGSERAAGENISRRQAKLEAAASAASLYGRSFAYPPANNLNRYSTPPQSTSNGPQSGEASTSNQSPKGHATADPSAPTFYARGAVSSVTTTRELESSLQKAYENAIKSQIERLMQAACKFLDMSVVNTSLTALKLHAWYEPLG

SEQ ID NO: 18544 - protein, 77 aa, Oryza sativa
  unsure (1)..(77): unsure at all Xaa locations
  Clone ID: TF_OSC461j.C1.p4.gp
GGEETAETDVCAICLGEFADGEKVRVLPRCRHGFHVRCVDAWLVSHGSCPTCRRQVIGGGGSTPPPDSDTIAVVVAX

SEQ ID NO: 18545 - protein, 439 aa, Oryza sativa
  Clone ID: TF_OSC400542j.C1.p6.fg
MGAARGGVRRVRREALVACMTCPLCKGLLREATAITECLHTFCKECIMEKIDDEEVDHCPVCNIDLGCDPEEKLRPDHNVQDIRNKVFPLKVKKVGAPKAPTVTLPVKRKQRSLSSLVVDTPRVAVQTGLTGRRTKTARRTAVSHVNSPGNNGTIKLANKSEGRDHKTQKISAAQSAKMTKTGNKKKNNTDVDVTIQSSSEDRKDDHTIDKEDLKKPLNSLVDTANRTKFFRSGPKGQAAKEDKIKNSIKLLAEDDTEDKLVVTGRKVMPCSNKLKVKEENNRSPSQSASSKDKTTSDYELRKGQHADSQQGQIGSTRTGALHDGITRPVWFLLVPSPDQKQDPRLPQLPTYYVRIKDGSLQTSLIQRYIMNKLDLASEDEVEITCHGEAISPSTTLQGLLELWLKSSPVEQVQASLGAQAKEFVMELGYRRPQRPPSS

SEQ ID NO: 18546 - protein, 166 aa, Oryza sativa
  Clone ID: TF_OSC405090j.C1.p6.fg
MSSHDPSSATAADAVAGGSYRVCDTVVLVCLAFASSIIVFTVAVCFRRAVTLQGYAASASASPSGRGGGAAAAPAAVGGLRGLAPSALAAIPKFAYRRGAAGGGGGWAQCAICLGVVRDGEAVRRLPECKHLFHVECVDMWLYSHATCPLCRRDVGAAAAAAGDKV

SEQ ID NO: 18547 - protein, 542 aa, Oryza sativa
  Clone ID: TF_OSC421348j.C1.p9.fg
MAVPGPLKQQFRTDCTEYFLWRYPFDGGGRKERLVNSQKLFMHPRSDPANGAGSSGYVGNTMRSNDLPSSSYAGQAYGQQNRAPIHASYSGHAPAGSSSGSYAPYNTQHMPASSYPHGSEDNFIPSSHVDGRRVALKRRNPIIHPTDGFGVGNYYAGSSSNTQFSRPMPPNPIPPPESCVRMPSHLGSNHWNDHRYVNHEGSQRNVRGRHDHSTIHLEQSPAAACPSSSINVPPYHPNANGPFGSAPVQRDRAPLSVHPRILPPGPDGSSIAFRERPYYPAPQSTNISAPVPTLPISCDSAPFAHGGYAPRSAHRNNLRTYPPPAFASSSNPGAVSHEPAIPSYPPAAPSYPPATSAASSSVQPFHAEAAAHLRHPRHVSVGGSGSARSRRMRDSYHGFHHLMIEDNNLGRSAAERFMMLDQLVIHESREAFDPHWDMRLDIDDMSYEELLALEERIGHVNTGLADEKISGCVMEVACCSSSHLQDDQDNERCVICLEEYKHEDTLGRLKCGHGFHCNCIKKWLQVKNTCPVCKAAAADEGS

SEQ ID NO: 18548 - protein, 338 aa, Oryza sativa
  Clone ID: TF_OSC8255j.C1.p5.gm
MSSSPAHAQRFYCHQCDRTVPIPPPTFPDADVLCPFCGGGFVEELGEDINPNPNPNPSPFLPHHPFFPFASPSFDLRNPSDLAAFFGPPSPSPSPSPAARHFDPSNFLHDHFTGLLSGGATIQIVLEGSSASLPLGGAAAGPGGISLGDYFVGSGLEQLIQQLAENDPNRYGTPPAAKSAVAALPDVAVSADMMAADGGAQCAVCMDDFHLGAAAKQLPCKHVFHKDCILPWLDLHSSCPVCRFELPTDDPHHAHPTLGSHRPAAPASASASPSPAPPPRLAERRFRISLPWPLRAAFGGQAESSNPTNQDPVGGSTDASGSGNNNATGGHRGYDDLD

SEQ ID NO: 18549 - protein, 338 aa, Oryza sativa
  Clone ID: TF_OSC900291j.C1.p18.fg
MSSSPAHAQRFYCHQCDRTVPIPPPTSPDADVLCPFCGGGFVEELGEDINPNPNPNPSPFLPHHPFFPFASPSFDLRNPSDLAAFFGPPSPSPSPSPAARHFDPSNFLHDHFTGLLSGGATIQIVLEGSSASLPLGGAAAGPGGISLGDYFVGSGLEQLIQQLAENDPNRYGTPPAAKSAVAALPDVAVSADMMAADGGAQCAVCMDDFHLGAAAKQLPCKHVFHKDCILPWLDLHSSCPVCRFELPTDDPHHAHPTLGSHRPAAPASASASPSPAPPPRLAERRFRISLPWPLRAAFGGQAESSNPTNQDPVGGSTDASGSGNNNATGGHRGYDDLD

SEQ ID NO: 18550 - protein, 233 aa, Oryza sativa
  Clone ID: TF_OSC18908j.C1.p3.fg
MSSSNGTTTYLPGGEAAGGGGGGNSGCCSTTTLFGALAASFALSFFLITIFICLRALRVARRRRDRPLVMEQEQRRPTPPRFGLDAAAIARLPSFPYVRARDDGEVSDSASSSSVECAVCLSAVDEGETVRQLPACGHVFHRECIDMWLSSRASCPVCRGKAAPADELADAIVARIAVTPDLVGPRVSMSVVVPVEMLKGEMVGASSTSRAASAPPEQLDARAPGPETDLESK

SEQ ID NO: 18551 - protein, 212 aa, Oryza sativa
  Clone ID: TF_OSC16946j.C1.p2.fg
MEVVVARRGVVVLRLRHGEPPPSAAARSGGRCSRLLLLWTFAVGFAAGLFMFASHVLAAVAAAVLFAAMCLYTCLCLNNAAPEEEEEQQQQPPVLLLPGQALRVAVMPPSVGRLQQQEVNGGGGGGGLRQEDVEAAIPAFEYSKGSGGAAEAEQCAVCIGVVRRGKTVRRLPACGHAFHAACIDGWLRAHATCPVCRADVKVAAGGGGGAPV

SEQ ID NO: 18552 - protein, 177 aa, Oryza sativa
  Clone ID: TF_OSC405090j.C1.p5.fg
MSLSSSSNSLPYSTDQGGYSTHDTLVLLGIGFFATAVSVLMIVLCECLCCRRRRRGGGTVVYVAARPFFLGGGGLSASAVATLPSFVYRREEWAEAAPRGDGSGSGRGGGGGWAQCAVCLSIVQEGETVRQLPACKHLFHVGCIDMWLHSHSTCPLCRASVEPLGKETPLKDQAPPV

SEQ ID NO: 18553 - protein, 418 aa, Oryza sativa
  Clone ID: TF_OSC900340j.C1.p12.fg
MLYPERPSRVNGTATVDCSAYPLDCHPVCPGGSCYEIAEPPPPSPVVPRVDVAVDDHHLPVRLLLTVSLLSAFLFISLSVSTILLYRRRVVLRRRRRAATAPLPGDDGFGDGDEEAGGGGGDVHHVWYIRTVGLDEATITSIATAEYRAGVGWGGDCAVCLGEFRDGELVRLLPRCSHPFHAPCIDTWLRAHVNCPLCRSPVVVPSDLPATATEGEAEGGGQAEEHQVFDEISLSESRADVSEDSDTSSDTQSEDTAASPEDGGRVMPKPIRRSASMDSPLFLVVVPEAQDDAMRGDRKFPNGQEMKLFSVKEKDATGTSSSSCQAGRFGIGRSMSSSGQGFFFSRNGRSSSAVLPLFRKDSPDQGTSYQLFHFPRFFISISFGAQSKIWDHYINILMCLLLKLYSTFQILLSTDYFG

SEQ ID NO: 18554 - protein, 279 aa, Oryza sativa
  Clone ID: TF_OSC24709j.C1.p1.fg
MASSPVSYWCYHCSRFVRVSPSTVVCPECDGGFLEQFPQPPPRGGGGSGRRGAMNPVIVLRGGSLSGFELYYDDGSGDGLRPLPGDVSHLLMGSGFHRLLDQFSRLEAAAPRPPASKAAVESMPSVTVAGSGAHCAVCQEAFEPGASAREMPCKHVYHQDCILPWLSLRNSCPVCRRELPAAAAPESEADAGLTIWRLPRGGFAVGRFAGGPREQLPVVYTELDGGFSNGVGPRRVTWPEGDGHVDGGEGRIRRVFRNLFGCFGRSSRPESSSSQSRSG

SEQ ID NO: 18555 - protein, 341 aa, Oryza sativa
  Clone ID: TF_OSC900024j.C1.p21.gm
ARMASSPVSYWCYHCSRFVRVSPSTVVCPECDGGFLEQFPQPPPRGGGGSGRRGAMNPVIVLRGGSLSGFELYYDDGSGDGLRPLPGDVSHLLMGSGFHRLLDQFSRLEAAAPRPPASKAAVESMPSVTVAGSGAHCAVCQEAFEPGASAREMPCKHVYHQDCILPWLSLRNSCPVCRRELPAAAAPESEADAGLTIWRLPRGGFAVGRFAGGPREQLPVVYTELDGGFSNGVGPRRVTWPEGDGHVDGGEVDNRVVFLLEFVPDEIKDSAFVSPDSIRRHRRGLAVPISEVDIRRLVLTYVVASVVPCMLTVVGSDKALSALGIPSRSFLRFLGVLVKTA

SEQ ID NO: 18556 - protein, 696 aa, Oryza sativa
  Clone ID: TF_OSC900134j.C1.p9.fg
MGRRTWQWHAIAALGVACAAAAAVAADRRAFSVTSAAGGGAAAAAAVVAATPEEVGILRKVANFLWQTDGNSYHHVWPEMELGWQIVLGSLIGFFGAAFGSVGGVGGGGIFVPMLTLIIGFDPKSSTAISKCMIMGAAVSTVYYNLKLKHPTLDMPVIDYDLALLIQPMLMLGISIGVIFNVLFPDWLVTVLLIILFLGTSTKAFLKGVETWKKETIIKREAAKRLEQTSEEPEYAPLPTGPGAVADAKRPSDEAASLMKNIYWKEFGLLAFVWMAFLVLQVTKNYTATCSSWYWILNLLQLMFLFIPKKWKPLKITYSKSFTLYGIKIPVSVGVTMYEALGLMSGKRVLSSKGNEQTTLKFHQLCIYCFFGITAGVVGGLLGLGGGFIMGPLFLELGIPPQVSSATATFAMMFSSSMSVVEYYLLNRFPVPYALYFVIVAFIAAIIGQHVVRRLINWLGRASLIIFILAFMIFVSAISLGLSLEITGAKGEKRTFCVFLQGAMEPSSLSLRLKAAIYDLFNSNSLQTYVPFRIRHINGGGNPRPRQEDPGLTDAEFKKAMEQLNKQAYRSLDPHKMVESNRGGRNHAKSARSKPAPNNTEEEKACTICLETFLAGEQVVATPCNHIFHQECITPWVKGHGNCPVCRFALCERNTVSDNSQSGVGEVEVDLDLLEMMRAMEEIFSRVTFSNFMPYN

SEQ ID NO: 18557 - protein, 383 aa, Oryza sativa
  Clone ID: TF_OSC400939j.C1.p7.fg
MASSAPAWVPYEPTRDCSQGLCSMYCPQWCYFIFPPPPPFDVAGTSADDSSGPVFSPLVIAIIGVLASAFLLVSYYTFISKYCGTVSSLRGRVFGSSSGGAAYGGGAGSGGRHGHGQSRSHESWNVSPPSGLDETLINKITVCKYRRGDGFVHTTDCSVCLGEFSDGESLRLLPRCSHAFHQQCIDTWLKSHSNCPLCRANITFVTVGLASPEPEGCAPGETGGDNTHEVVVVMDGLENLCEEQQEAVSRASTADDDHDAKDVAEGMEEANGAAEIREEGSPPKRGASSFDLHRDNRMCIADVLQESMEDELTAARESGLLAGGAGTSRRCHGENSKGRGGRSRRALQLQDAMEALPGKRLPSGGRSCFSSKSGRGKDSDHPM

SEQ ID NO: 18558 - protein, 364 aa, Oryza sativa
  Clone ID: TF_OSC900225j.C1.p18.fg
MARRDGVGGDGGASAAEQQRRVALRVLLSRAEASSPPPATVEEEAQRGRSGGGNKGLASAALRGLGCTSTAALRAHAPASAVEVASSSERWHGRRRRRKVQERRSARGGGGGGGGGVAPPGPAPAAAGDVWCTCAPGIPFAAEASSVDCVVVARHHHAHHTAAAMGSGRRGEAERRHRERPAAPRARRVTMREHISSSLMDSPPFPDMPLLNADLLPPPPSGRHRHGYRHPHVGAAEEEIMMLRTRLLWGRFGMHDQHQDWRLDVDNMTYEELLDLEDRIGYVSTGLHDDEIARSLRMVKYSAFNPKHFATEVERNCSICQEEFEANEETGRLICGHSYHVQCIKQWLSRKNTCPVCKTVVSKT

SEQ ID NO: 18559 - protein, 936 aa, Oryza sativa
  Clone ID: TF_OSC826j.C1.p13.fg
MSDHRTHASDCHPVASQPDVQCLVCTRPFTLDAQVTDTFEALAICRDCKMTVLNDDERDEITSTYRQNTRRRQISRTASIDFLEDAFLQEFSQLIDLARRQGRETDIDSSSVAPQHASFNSTPSQSQRWHASDDESDGLNYVDSVFGEIESAISLGDYGGDSDTSIEEHSVMTRRRISIQLDNDSYMNTDTDIDPMNARLDQWDSDDQEDVEESGFDEIVNTMTQHQQQSHDIQLSGLSEDESEDGVWNWSVSVRQRANVTNLLDDMEEPEMRTTFVGNPDDYVDARQFEMLLEQFAEDNDSRRGAPPAATSFIENLPSVIISASHQTNGDVICPVCKDPIPTRARAKQLPCMHLYHSSCILPWLSSRNTCPVCRYELPTDDAEYERSKQATTNVRDIQVVEEISDEQEVQVTRQMAAGVIEETNTSEHNVRVDEQPNSARRRSGWLFIAAAPVCFCQNSTQCPVESLALFYLCNILWLRAVKIRKKLRRQGIRGPKPTFLYGNTKEIKRIRQELKFSQKQGTNNFISTLFPHFLLCRETYGPVFLYSTGALEILQVSHPDMVKDIGRWTPSELGKPNYLKKSRKALFGGGLFTENGDEWAYQRKIIAPEFFMDKIKGMIQLIEDATVTVLEAWEDMIDDVGGCREIVVDDYLRNLSADVIARACFGSSFTKGEEIFCKLRQLQKVIAQQDSFVGLSALWKYLPTKSNQEIQMLDEQVRLLILDVAKEQHHYQDSHNSLVNAIIDGAQDGRSAAEAEDFIVGNCKTIYFGGHESTAVTAIWCLMLLATHSEAMEVTMVIQETLRLYPPASVMMQEALTDVKLGNIEVPRGTIVQVPRLMLHLDKEAWGADADEFRPDRFANGVTAACRAAHMYVPFGHGPRTCIGQNLAMAELKVVLARLLTKFAFSPSPRYRHSPAFRLTIEPGFGLPLMVTKLP

SEQ ID NO: 18560 - protein, 684 aa, Oryza sativa
  Clone ID: TF_OSC421431j.C1.p19.fg
MDQQNLLPSNPTADEQNLLPNTLEDDDYPHYLLGSHEVEMPNGSVIGQQNTSLNLWDSAGSSSMGCVADHDSLFEAKREHFAPALSIRAPLIIGGRRHEGSSSLPSQSLNLDLNLNQADQFDSEDVDMIQSNGQPGINAFPLNRGLSIPEHVLRHTNSSSATGNPSQVASFSDGMTGQEVNLFGGHRSSCKRKNIDGSLAESSANGSSRNNQRNNIILEPSPSSHESTSGLTAPAPTNHVFSYSPVEQLNQNTNMSANAMLSDHYSLYGDHERERFLRNTRMRTSPNEYDQSSSNLLPEGSLRCSVYQPTQQQSLFIPVQPRASSSSTSSLSRPYVPAVTQFSQNLHRAPSSGNFGSRIGIFPSSADTTNQLSSQDPNRSSVRGNFPEPLLLGSSLFPSDSAELLSMPGGRSNQQNSSSTIRTAVNIGAQQIAGLNASQPTSSSRGSVDIVRRSLQAASVPQSRGSSITSQQQRGHSSTSHEIRSHQPGSSSRANQQHYVRAVPHSVDRQNSNYLDLQSFMQSIAASRDGIRTVSESANQLVHLRNVVEQIRQGRGGRFEDPNFERALFARRASLIDRHRDMRLDVDNMSYEELLALGERIGYVNTGLSEDKIRTGLKQWKYVSIPIEEPLTGVEPCCICQEEYAEGEDMGRLDCGHDFHTACIKQWLVIKNLCPICKKTGLGT

SEQ ID NO: 18561 - protein, 499 aa, Oryza sativa
  Clone ID: TF_OSC414513j.C1.p15.fg
MAEEADETTVAARGMHARSRRCSKDLTLENGDAEGAQGCDDGGVKSSAMASEEREADNIVPSDSAFPEVELAEDDAVVCSRVTPDGGGEVAAWCEIRRGGGDGDASSATIRNLRGEPLETGKRQSGHGSDAIIVDGRVIQQEAVDIKPGSEIVSGPQKDGHLLYTFDITGLNDQDKTNIKIVLDIENAKCSICLNLWHDVVTVAPCLHNFCNGCFSEWLRRSSANSRDKSQSAACPQCRTAVQSVGRNHFLHNIEEAILQAFSSLQRSDEEIALLESYASVKTNIAWHAFIPFPWSYAGAMILRSTMGINICQREVLGKQKIQSRKRRLPRSNDEANHTNHADFLCPQCGLGCDRAFCGAYWCSQGVNSSQHNPICDQETFKMISQRHISSVPDTVHGGNQYEKDVGSFNMILYYHIAPFIPQIVVSHITERCIQQSGKALQAIISEWIVKFDNKELDRSRLQLNHVDAITSRTYVCNQCYSKLIDFLLYWFRVSMPRN

SEQ ID NO: 18562 - protein, 74 aa, Oryza sativa
  Clone ID: TF_OSC419672j.C1.p5.fg
MSRDVLLGLALTKACDARQEECAVCLRDFEEKDMLRTMPCNHSFHEICLFRWLSESCLCPLCRYALPKQQQIRL

SEQ ID NO: 18563 - protein, 167 aa, Oryza sativa
  Clone ID: TF_OSC4300j.C1.p1.fg
MGMASFTRQPFYCKSLACHHQQNPASTIVAIDKNLDTSTPDTYRAPPTPLPYDVGLVLKDNPDLEKTGIKRKIHEHKESLMMDDNESLQKCVSEDKPDEEDVCPICLEVFRYSPEYDEENPRSMTKCEHHFHLCCILEWMERSETCPVCDQGKLVVDLKLKNTNFDV

SEQ ID NO: 18564 - protein, 338 aa, Oryza sativa
  Clone ID: TF_OSC900381j.C1.p6.np
PLEGGALRTWAPRWPTAAAAGRPGRSAPVCSFVRKPPKNIRKRPTAPAGSDDDDEDGSGAIAAARAKKAPSSTSKLFFSSDGSSEPRRFQYESSRTIQASTDSRATATLETETEFDRDARAIRERQLKQAEESLKKNRSGSGSGEVYKGIHGYTDYKAGFRREHTVSSEKAGGSHGPLRASAHIRLSARFDYQPDICKDYKETGYCGYGDSCKFMHDRGDYKSGWQIEKEWEEAEKARKRRIAMGGDGSDYEAGEEDDDDDEEALPFACYICREPFVDPVVTKCKHYFCEHCALKHHSKNKKCFVCNKPTLGIFNAAQEIRKKMAQDKKQYEILKKRV

SEQ ID NO: 18565 - protein, 342 aa, Oryza sativa
  Clone ID: TF_OSC409503j.C1.p3.fg
MRCPFSILNSVRGMNPRFSSPSILVSATTQNWIVRRLIQQGSQLVWVGATNNAEWQPQPGCSKVAGPCLVRHEHEMHWRKALLIETAHKHIMEDQKRLRDFDLLQALSVVLFVEKDMRIRLEVDRSVDGTDGRDASRSGVRAAATSPAGRRGGAVRDAAAVIVPDNHRSDIEFEIAVFGIGIMLQQQRSACEEQQPGWWTLDSNVREAKERLDQKLRSQRESAVVVVKRHNKAQVAGTSSDGGEQSTATTAAPQWEVYTRKEGRRRMWFRRLGRRPTPEEEEECAVCLEELRAGEAVAHLPCTHRFHWGCAVPWVQTASRCPVCRAAVYLTSPAPAASNNYN

SEQ ID NO: 18566 - protein, 325 aa, Oryza sativa
  Clone ID: TF_OSC900024j.C1.p9.fg
MSFVFRGSRGDIEAGGFPGFAPERRAMRIHAGGRPVNSNLAFLVTVLMLFMVLNSHQMSPNFLVWLVLGVFLMATSLRMYATCQQLQAQAQAHAAAANGFLGHTELRVHVPPTIALATRGRLQSLRLQLALLDREFDDLDYDALRALDADNSPHAPSMSEEEINALPVFKYKVQAHQGSASFRKSDGPSQPSVSSTESGNEKKQDRFKADATDNTLEDELTCSVCLEQVVVGDLLRSLPCLHQFHANCIDPWLRQQGTCPVCKHRVSDGWHGEADASNMVVIFLVDLYPVQYELTYNPFYSVSVGKLAYYGCLRLKISRGFKIQE

SEQ ID NO: 18567 - protein, 166 aa, Oryza sativa
  Clone ID: TF_OSC18908j.C1.p5.fg
MATVGAVDGVEVVSALIGQYYDGLALELVVFSLAIVVLRYAAVLYANHLVDSLSELQAAVGAGIGGSSSGGGLDSAAIARLPCFVLPPRRGGSAAAAAAECAVCLGAVEEGETVRALPCCPHAFHARCVDAWLRLRPTCPLCRADVPVPARPTAPRRRHVPRGTVE

SEQ ID NO: 18568 - protein, 184 aa, Oryza sativa
  Clone ID: TF_OSC413688j.C1.p3.hg
SPPGFSGYAPPLFGKFCLLDHRGAQKTSRGVSLIQNPGCSNRPSGETCCGGPLVFLALPGPALGVKGRRRQTGGNRGAPRVRGRGGGGPSLANSFRNSFRPQSFGRRQGGGAGATNCRVCLARFKPESVVNRFPCGHFFHRACLEKWLDYDHATCPFCRHRFLPATTESPSPSPATATPHFARI

SEQ ID NO: 18569 - protein, 267 aa, Oryza sativa
  Clone ID: TF_OSC400547j.C1.p23.fg
MEVAAAEDALEESGVAVYLPRLLAGVISGALTGLFALAGALTGAVTGALAGRASDSGVLRGAGLGAFAGAVLSIEVLEASRAYWCSDRLGSHGTSSMVSISDFGHDDLYDIFGDCSSKGLSRESLNKLPHYVVTDQTRNSFGEDLSCTICLQDIVTGETARRLPNCSHTFHQPCVDKWLVGHGSCPCCGCASSACARPFRSPLFGYGEEKEKPGQCAYEKVDWVPDVDGGGSILVQRRISSESRRAAAANCWMVVVAAQNLCPPWRC

SEQ ID NO: 18570 - protein, 750 aa, Oryza sativa
  Clone ID: TF_OSC401537j.C1.p14.fg
MASSSNPSNLPCSSDGVCMLCKVLTTEVEQLRCSTCATPWHTPCLSSIPPLTDVAHWVCPDCSGDVTASYPPSDVVRPESSLIAAIRVIEADPVLSIQEKARRRQELLGHAGDAGAAITEAVGENVEDSESNNPLSMLNKNINCSFCMLLPERPVTTPCGHNFCLKCFRRWIENGKRACVICRAPITQKVAQDLRINLALVQAIRMAKAANNASTTGETTVYHYKENEDKPDRAFTTERAKRAGMANASSGQIFVTIAPDYFGPILEDHDPRRNRGVRVGDHWKDRMEGRQWGAHFPHIAGIAGQSTHGAQSVALSGGYLDDEDHGEWFLYTGSGGRDLSGNKRTSKEQSFDQKFEKLNAALRVSCLNGYPVRVVRSFKEKRSPYAPESGVRYDGIYRIEKCWRKTGVQGTFKVCSDEHGDHPRPLPDIEELKNAIDITERKGNPAWDFDATDGWKWMITPPISRKAVVTGDPRGKKMQGAARHTNNLSMRERLLKEFRCSICRNVMEEPVTTPCAHNFCKKCLLGSYDNLSLTEERSRGGRTLRARKIVKKCPSCPSDIADFVQNPQVNRDIMNVIESLQKEAEKEDHARVSGEGSSAALVDSDDENDTAWENQDDGNLDEGGCNNPEDMITESVDLNSVTNVDNTENKVEVQQPHKRTAGAGKGKGGKWARTSSAPGDADARNVVTSTETLDGIAAENVADLVQIEDCTFTGVERADPNALEVDGKNMIPDFSEAEKVNPKQDQEVLP

SEQ ID NO: 18571 - protein, 361 aa, Oryza sativa
  Clone ID: TF_OSC407908j.C1.p13.fg
MASAASPPRSGDASPSSPLLPSPTSPDRRSGGGGGGGRLLPGLRGAARFLGRTGSRRLMREPSVAVRETAAEHLEERQTDWAYSKPVVVLDVLWNLAFVAVAAAVLAASLPESPSVPLRVWLAGYVLQCLFHVLCVTVEYRRRREARGGGFGADQGAAADGDFKLSIVKHLESANTMFSFIWWIIGFYWISAGGQALSHDAPQLYWLSIVFLAFDVFFVVFCVALACVIGIAVCCCLPCIIAILYAVTDQEGASEEDINNLSKFKFRTMGDADKLVAGIAAPVGGVMTECGTNPPVEHFLSAEDAECCICLCPYEDGAELRELPCNHHFHCTCIDKWLHINATCPLCKFNIIKSNLGPEDV

SEQ ID NO: 18572 - protein, 260 aa, Oryza sativa
  Clone ID: TF_OSC900241j.C1.p6.fg
MPSSSSSSVAAAPSGSNGTRRDGGSGSVTGCLPADQACFALSSSASSPGYLHASATTTRRDASATVARACCTTASYVVVLGISFGSLLAILLILCIIRWYLVWRSARPRRDDGAADEAVGSAKKRSAGLDDDAIAALPVFAYKQREEGGGGAVGAAEEEEEERECAVCLAVMADGEAARRLPRCMHVFHRGCVDVWLREHSTCPVCRAEVVVRPAGAARVEKLPESSASRALTSPVPAPAPRPTGTVVDDGRERDLEAQQ

SEQ ID NO: 18573 - protein, 145 aa, Oryza sativa
  Clone ID: TF_OSC18110j.C1.p2.fg
MATSSESVNQLKDDGTEEMDVDDYIGGGSGGGGEALIGMKTVEAPDDGSNCPICLDGGGGGGEKTTTEAWVETPCAHRFHSRCLESWARVKLGTCPMCRRELTAAAAAATTTAGEDVHVLVADPMVADPLQARWNLFVQRSTDGF

SEQ ID NO: 18574 - protein, 1021 aa, Oryza sativa
  Clone ID: TF_OSC21837j.C1.p7.gm
MATSSESVNQLKDDGTEEMDVDDYIGGGSGGGGEALIGMKTVEAPDDGSNCPICLDGGGGGGEKTTTEAWVETPCAHRFHSRCLESWARVKLGTCPMCRRELTAAAAAATTTAGEDVHVLVADPMVADPLQASVTHVQPEQTAGEMPPAAGESGDDVVRLSFYDVMFVSMMPIQRLFFYEGAALPPFPSLVGSLRSSLAAALAAFLPLAGKLTFRAALGDVVLDYSAAAVPPGVKFVEAEYGSSDEISAFDAMRRLAGDVEHNVEAFMELVPELEVEQLPAPVLAVQVTRPAFRNDDGDDAVGVVAVGVSVHHAVADGQSLWQFMKAWSAAAMVGSPAAPGLLPPTFDRALIRHPRSEELASKFLQLSSPTLPEVKLSRVAADVIKGQRTRTFLLRADQIRSLKRRISRRIAAGEPPRETASPVTAYVAIASLVWTSVVRAKPHDAADEAYLMVTADCRRRLRPPIDPGYFGNCVAACYARANVGALRRGGGDNGGDDEGLARAAAAIGAAIREQLEDPLGGDIEGWLQFHLSLPAARLTAVGSSHRFMAYETDLGWGAPSRVELVSPFARELVMLLGAAGGGVQVSVSLDEAHMDAFETSCIRMSTLVRVLAVSHVHPDEAAVGAAWPPPNTVELSFLDSFQVARGAIQRLFFYEGDDLPPFQSIVGALQSSLAAALPVFLPLSGKLAYLPESGDVVIDYSPDAVSPGVRFVEAEYSGSVDDMRRLAGDDEHQIEAFLQLVPELEVSMLPAPLLAVQVTRPRDDNVGGGGAGGAVAVGVAIHHGVADGQSVTPLPMGVDMSQQRRRTFLLNAGEIESLKQRISESDAGREQLRNRLSTYVAISSLAWTSIVRAKSLDAADKVYFMVSADCRRRLRPPADKGYFGNCVTTCVAKAISGDLSAGSDDGLAGLARAAAAIQRAIREGLEVPFGNSERWLDGATATTPPVRSFTRSGSSHRYMAYETDFGWGAPSRAELATVYGEEVVMMLGAADGGVQVSVVLRRALMDAFATNFRRQLVAST

SEQ ID NO: 18575 - protein, 532 aa, Oryza sativa
  Clone ID: TF_OSC400832j.C1.p5.fg
MAGRCAGGGDGGGEGMLARLRRAAARRIGLSCASFFSHAATSPSPPPKTISCSALNAPADSTDEDQEKLEEPTSTRMADKNLCAICLEPLSTGSVDIDNGDRPAIFTSQCSHSFHFLCIASNIRHGNVTCPICRAQWSQLPRDLKVPPLLQNNQSDPILRILDDNIATSRFNRRSSIRAARYNDDDPVEPYTLTEHVDPCLRFALIPSPVAAHHHALGHYPCGRVMPLQQHCQYSSSSMLSPPQIASPSGQRRAYLSVSLAPQPAMDLVLVASPNGPHLRLLKQAMALAVFSMRAIDRLAIVTNATTATRAFPLRRMSSHGKRMALQVIEHLCCVGGTDPVGALQKGLKILEDRAHQNPSSCILHLSDHPIRSCFGVDMNRFNIPVHQFHVGLGFGVQNGFVMHEFEELLARLLGGVISDTQLRIGEHGGVVRLGELRGGEERRIPLDLVSDCGFILVGYSYLEGGREDQFRTGEVAVGFEEKGDNRYCGVRDAGGLSIGGERRSSCCAERWDYLDPFMARRWAKHFNVYRA

SEQ ID NO: 18576 - protein, 156 aa, Oryza sativa
  unsure (1)..(156): unsure at all Xaa locations
  Clone ID: TF_OSC900165j.C1.p19.gp
GSASADGGGGVAPASRASIAALREVEEEDDDGEEASDCAICLDDGEESRETCGSGRRKEXPCGHRFHGECVERWLGIHGSCPLCRHEMPPATAAEAEEEEVVVAMVHGERVVMRGRRVVLSVLVMGRAHDDGEGPEQRGTDPIPPLPRVLIDDVDX

SEQ ID NO: 18577 - protein, 251 aa, Oryza sativa
  Clone ID: TF_OSC900112j.C1.p20.fg
MELPWLDLPFTLLTLLLATRLAYDYYGVVAATFTGSFSLQIFLFYCFARWYRHTIAARAAADADGDGGGGAVADEEAAPPVLIPLLEGRGGGGGGAGAASSLANRCFAVVFMVFVPLVIVVFERSQADVVAYALCLANILVMVVWLSPDAAADPASAAKSFLRLSDDEDEGSCSGSGHGAAEDKCCVCLAGMREAQALRDLPRCGHRFHAKCIGKWLTAHPTCPVCRTTAVPPPAPLPASGDHADDAITPV

SEQ ID NO: 18578 - protein, 167 aa, Oryza sativa
  Clone ID: TF_OSC900112j.C1.p18.fg
MLYLAGARWVLLLLAAVTVLLCLQLSARDNAVDGAAAAAAAAGPAQTADLPLQQPAALPREAPAEGDLRGLGASSSPVFVVAVLPAYAWRKKAAVDGDDGDGECAICLGEVRRGQVVKQLPACTHLFHARCIDKWLITSQGTCPVCRTPVDSAAAALQAVRVADQPP

SEQ ID NO: 18579 - protein, 561 aa, Oryza sativa
  Clone ID: TF_OSC401716j.C1.p92.fg
MDADEAAGSSRRMDLNLYLGLPRAPRPRRSDLGSDLALSTPMPSSPSFSAASVDAPPPPPELSHPPYSPSHADLSPPLQEVYSLYNPDDPPASETHLPPYAPPPAPVVSELPDDLEFGLHPPPPLVRASELLGWEDRPSSSTASSSFLPDTAARYWRLLEQTGSRWLRARRFRSDLPPLSSEAYPAGRDAAAVPVLQHEPMNDTVEHNKVAADGAEVGASEESEEQGRSAATFECNICFDMASEPVVTSCGHLFCWPCLYQWLNVYSNHKECPVCKGEVTEANITPIYGRGNSCLDAEKAVEGGKQTGPTIPPRPHGNRLESFRQQFHHLRPISRRLGEAHGLLSSWRRLLDQQIMNTASRFEGPPESAVQEMVDTAHAQHTSRLSRLASRMRARRLLREADNPNPPDGGSTSPDSGLIRNNASDPSRNGPSSLLPDGIDWLRGLTLLGYEDTERFASAMSDFRRITGPSQYGASASSSNPPNLESTFDRTHVVAAPSADQASNSSTAAVIQGDAGISESAGEPSNAGSSRSLRRRGRSSALGSLDADGGGLQRNKRRRIN

SEQ ID NO: 18580 - protein, 199 aa, Oryza sativa
  Clone ID: TF_OSC405090j.C1.p7.fg
MSSTAAGGAPGPAAQRHGGGGGGGGCCSSGVTLELVGAFTAVCLVLYGVILYFNYLYVRWSGRDGVHRTSGGGGGGGRGAAARKRGGGGGLDKAALAAIPVFRFKASASAAALGGGEAECAVCLSGMQDGDAVRALPGCGHAFHAGCVDAWLRAHGTCPVCRARPAVPPPPPAKPPCLKAPEPAAAAAGRQPVDLESHV

SEQ ID NO: 18581 - protein, 789 aa, Oryza sativa
  Clone ID: TF_OSC401785j.C1.p3.fg
MDAAALQYENQKLVQQLEAQKSKMRALEGKFKELRDEQCSYDNTLICLNKMWNQLIDDLVLLGVRAGGDLNGLQALDHEEMSEESLESCPSEEIFLFRLLNSRNFRNNDDSSLSKLVEEALALRYSTTVTLMKSLQEAFAVQQARSESLSLALNGQNSSEDVIVALENHNDYLKEVVDNLRQAVSIINRKHEKYLDEIEAFKNNQSRELHEVKCLSGELEESMAELEESRRKLAVLQLQTGGGSLMNTSAPNGVNGSVSTDKSSDKGMGWRDLKDAVEEAKTLAANRLFELHETQEDNLILSKQLEDIQDQLKDENYIVTSKPYTILSDQLHHLNAEIERYRGLVEVLQAKIEDLEHEIQKLMAEKNDLEIKAEEALQDSGKKDFKDEIHVMAASLSKEMELLDNQMNRSKDAASEALALREEADYLRTLLAKKIETLDQEKQELQFIVDMLGKECSESRAISEIEESENRARKQAEYLRKCLEEHNLELRVKAANEAETACQQRLSIAEAELEDLRAKVDASERDVMKLKESIRIKEAEVDGHISEIETIGQAYEDMQTQNQHLLQQVADRDDFNIKLVSDSVKMKQAYGSLLAEKNMLQKQLQHVNSSLESSKLKITSGEEQMKTYVAQAMKSSSENRHLAISLERTMLEVSDAEKELKWLRSATGSAEKEYEINQKKIAELKMELERERNERIKLEEEYEEVKNEVSELTSETEETTIQKLQDEIKECKAILKCGVCFDRPKEVVITKCFHLFCSPCIQRNLEIRHRKCPGCGTPFGQSDVREVKI

SEQ ID NO: 18582 - protein, 459 aa, Oryza sativa
  Clone ID: TF_OSC422293j.C1.p1.fg
MLAKPESVDAVQQSITTYKAKIEDLEHEIQKLMAEKNDLEIKAEEALQDSGKKDFKDEIHVMAASLSKEMELLDNQMNRSKDAASEALALREEADYLRTLLAKKIETLDQEKQELQFIVDMLGKECSESRAISEIEESENRARKQAEYLRKCLEEHNLELRVKAANEAETACQQRLSIAEAELEDLRAKVDASERDVMKLKESIRIKEAEVDGHISEIETIGQAYEDMQTQNQHLLQQVADRDDFNIKLVSDSVKMKQAYGSLLAEKNMLQKQLQHVNSSLESSKLKITSGEEQMKTYVAQAMKSSSENRHLAISLERTMLEVSDAEKELKWLRSATGSAEKEYEINQKKIAELKMELERERNERIKLEEEYEEVKNEVSELTSETEETTIQKLQDEIKECKAILKCGVCFDRPKEVVITKCFHLFCSPCIQRNLEIRHRKCPGCGTPFGQSDVREVKI

SEQ ID NO: 18583 - protein, 105 aa, Oryza sativa
  Clone ID: TF_OSC900044j.C1.p9.gm
MGVVEKTDASNPVFIGEIRVGGELSKAIQGLREVTAAGAREEECAVCLQDFVAEEKLRMMPCSHTFHQRCIFDWLRLSCICPLCRRALPTQHYSRRMTTSLGARS

SEQ ID NO: 18584 - protein, 197 aa, Oryza sativa
  Clone ID: TF_OSC400283j.C1.p28.fg
MEKGGFIAIFVAFGLINLGLHLYERAPGWLVWMLGGVTTLDRALGDCSMCRYGMVAGDVVRTLSCGHVFHKDCDYSVDKWLREHGLSCPECRKKARSVRVLPWRARPQQPLPEEQNPPPQETSASSSSSSSTHVRIAPEEPGDLDLEAQDQLLPPPATGSPKGPEEQHPPRPAAATSSSSADTSSLEEPLLRPSASP

SEQ ID NO: 18585 - protein, 345 aa, Oryza sativa
  Clone ID: TF_OSC400555j.C1.p10.fg
MASWPTSCTKVYEIIQFSRCKEEASATSSIIDHRTAKVGRRDDGPNMSKVLRATIPENSVSGSSVRGKLREMEMDLAVEQYGSIGASSILSTLSVPEYSNLAWDETYPKTMLSALSATKNRMYNRIAPIVGHAWVNISAQNATFMMTMQVVLNMHSCDGVMKYEPFLINLTITFYRTGGAENFFHCDKCGCCYSYVLKDSHHCVERAMHHNCPVCFEYLFDSTKDISALHCGHTIHLECLYEMRSHQQFSCPVCLRSACDMSHAWQKLDQENTIQITLHSGCSIADASDLSEENDMDPMQRLWDDIERAIPHIGTQVPRMQLLQHPADKSRPCCRVLQSLNSEEQ

SEQ ID NO: 18586 - protein, 415 aa, Oryza sativa
  Clone ID: TF_OSC419721j.C1.p5.fg
MPLHHRRALHSNDCDDGGYGCSSWPLSPPPPSVILTPFASPSPAPWACPPAFPAPSPSPLHGAAGGRRDQGGYHGSPPGGGGDADEHRRRIINLIVVGAAALAFLSMILLVVIVAVRRRRLRRRRQRQQALLAPAAPADAVAVNVEDGGDDDAEGGGGGGGGGGVVHHIWYIRTVGLDEAAIDSIAATRYRAGAGLLGAADCSVCLGEFQDGELVRLLPKCGHAFHVPCIDTWLRAHVNCPLCRSDVLGPAATATESGGGDTGSMPQADPVANTIAAAQQAAAPGDAILERQEEEEEAEQEDQGAPPHMEENRQEQSSSPDPLPPPRNVRRAASMDAAIVSTAAEVAALERLPEAAPEEEQSGGGGGGDKRGGAPGASCLKVSSSGRLSNLGAAERLPRSFFSRHCRARSSVLPL

SEQ ID NO: 18587 - protein, 442 aa, Oryza sativa
  Clone ID: TF_OSC401685j.C1.p93.fg
MVQPNNEQLNQPLPLGQKLFVHAGNDAALKIGPSYHGNVAIRSNDLPSSSRVAQYSGHRVKNTGTLHNSYVHYPAGSSGGHVSYNPQTEPVITYPHRSEGEFARGSSQIDNRTAAVKRKNPVIYPEYSINGDGYCAGSSSSTQFSNYPQPAPFSESLHRQMPPSVGPINWNDQSLHMYLNDYVGASGMHSGEMPYTMGSSNSSVPVPTLQGSSSSAIFASGVFAPRHVHGDTVPSYIHLPSVASSSSTAIPHEVIIPSYQPATSATTSTPMRASQPLPVRAVASSRHARNVLIGHANSGRNRRARSSYYGIQPLMIDAQQLIMMQQFALRESREAQDPHRAMRLDIDNMSYEDLLALGESIGNVCTGLVDEKISGCVREVIYCSSDEQQNDQDDGKCAICLEEYKDNSLLGILKCNHDFHTDCVKKWLKEKNSCPICKSAAA

SEQ ID NO: 18588 - protein, 192 aa, Oryza sativa
  Clone ID: TF_OSC400860j.C1.p33.fg
MAARKLLEQPGTAAPPVLGGSIADDRDIVIILASLLCALICVLGIGLVARCACSRRGGGGPDAAAANKGVKKSVLRAIPTVEYVSPGGGGKGKEEEEAAAEEGEQSECAICLSDFEHGDAMRVLPQCGHAFHAACIDKWLRGHSSCPSCRRILVLQLPQGERCQRCGARPEPAAASAVWKPTHYSEVPPFLP

SEQ ID NO: 18589 - protein, 455 aa, Oryza sativa
  Clone ID: TF_OSC20771j.C1.p9.gm
MEDISCQGRKASKTPRHVVVVFLVAVAEFPPPSRALGINRREKFLRALSHPPTPHRGDDDEEEMLPGVELARRRRVHYHGDGAAAGAGFGEHHHGHYNYFHQQHHRQAVASAEAGAGAGGEVSPAVAARIRLEEKLRGAAAAPSSSLSRQQNNQQEQQIQLPTEPRPTPKHSMTMLEAPSTRKAPRREMRRTLSKADLCAVCLDEVRERHQRVTRLPCSHKYHSECVLPWLAIQPDCPCCRTQAMIAMLPDGAGAQNGDGSRCSKVRCGMGSCSESSDYVFGFACRCNPGWSRYHLGNLQFPFLPCVIPNCTINYSCQNGSSSPSPSPPPPPPPPPAMPSLTNLSIYDPCLLQYCGDGGSCERSSEFGHRCACHDGFQNLLNDTSYPCYRQCSLGSDCSGLGISMFNGSQPGTAPPAPFSFTVKKSGAAASSLLPAGGGVLLHLLLVLVSSFMIG

SEQ ID NO: 18590 - protein, 301 aa, Oryza sativa
  Clone ID: TF_OSC900339j.C1.p2.gm
MASRSPPPPPPPPPFPDLETWDYFFGQYDHPSSPSSSATAMPHLPLSRVSSSSSFVSTELELPPPPPPPLPTLPAKPLLRRRVASPSSSSFSTELLPPPPPLLRREPSSSSSSFSTELLLLPPPPPPPPFLSSDYFISSDPDTPPHAGGPPTSSIHDSSFVSGPSSSRPALATVITVTVSDDAAAAAACAVCTDALQLASPASRLPCGHLYHAHCIAQWLSLRNTCPVCRRSVPMRTEETAPPWSPPTETDQEAVPSPPPTTTTATDHRRRSLPGERRIRRICRRLLNYMEISRQRQQHTD

SEQ ID NO: 18591 - protein, 208 aa, Oryza sativa
  Clone ID: TF_OSC101188j.C1.p17.fg
MSGGGAPPGAPGMMTPGDGNSVGMFSSDRIGGFGYGVGVSVGILLLITTITLASYFCTRAPVTAADAAAAAGSSRRHRGGGGGGGGGGGGAGHEHDDVELGIDEATLKGYPEVVYGQPRKEAAKAASAAATKKGGATTCSCCSICLDNYGDGDVLRMLPECGHLFHRECVDPWLRQHPTCPVCRTSPLPSPLPTPLAEVTPLAMARPS

SEQ ID NO: 18592 - protein, 145 aa, Oryza sativa
  Clone ID: TF_OSC964j.C1.p1.fg
MLFLKELPIWQAFGFSLLTGALAGSTLYAVCVVLLCCVDRQRRHAGAPPPDPKIWLPDHTHHRRQRDESSECSICLGELEEGERCCTLVACRHEFHKECIYRWLANHNTCPLCRHMPLPPASSPPPAPPPHHASPPSNVPPAAHV

SEQ ID NO: 18593 - protein, 455 aa, Oryza sativa
  Clone ID: TF_OSC401457j.C1.p8.fg
MAAESSAAAAAGGGERRGPMDLNLYLGLPPLPPPPGRLDVAADYPSLLLNSAATVANEQRGSVVVAAPPPAAAAYSPSNALSAPEQVLVDPVAAWLVDPGEQQPVPPLETPSYMARASSTLPQIFACAALEMLVQTGGAIPPTGLIRGAEIAAASRPMTPENRLRRLIQVSDQHGVGNGRAGTGPVSRSRRANSPEADNLARAIQRSHNSLEASRRQMLDGDGSDATKKDDGCGCNGSFECNICFESAKDPVVTPCGHLFCWPCIYQWLHGHSEHSDCPVCKGEVLEVNVTPIYGRGGGEENSSRNDIQIPPRPSAQRTESLRQQLQRPDTRGGIANMVRRLMQNQDIVVGQAASSAPRPRGRGRRQAKQDAPSAPATQQQVVNADAGSGHQAPLPPPDANGAAPAAAVAPQQSSSVEQASTSSTVGVIAGGPAQGRRSRVSESTPARRTRRRHQ

SEQ ID NO: 18594 - protein, 247 aa, Oryza sativa
  Clone ID: TF_OSC900031j.C1.p15.fg
MELDDASRHGFGRMGFGCKHYRRRCRIRAPCCNDVFHCRHCHNESTVICLVCDTEQPVAQVCYNCGVCMGEYFCSACKFFDDDVRCRCCLLCFCWIWLTGNTSTAKIAASAGSCYSVSLRDKHCCIENSMKNNCPICYEYLFDSLRETSVLRCGHTMHLQCFHEMLKHDKFSCPICSMPIFDMDKFLRALDAEIEANMLHIDYMGKGWIVCNDCRDTTQVYARVAGHKCCHCQSHNTCRVAAPVLPA

SEQ ID NO: 18595 - protein, 444 aa, Oryza sativa
  Clone ID: TF_OSC400897j.C1.p19.fg
MDTSASTSPPPPRSVLSTIEDKMSPGVLLIIAILAVVFFLFGLLNLLIQNLLRMRRARRRRRRVGDGGGGVGMGSPTAFQGQLQQLFHLHDAGVDQTFIDALPVFVYRAVVGAGLRKDDPFDCAVCLCEFAGDDKLRLLPTCGHAFHVPCIDAWLLSHSTCPICRGSVLAAAAAADDDDDSSASTPVARRVLDSESLGETFANNGGGDSEGSSPKAAAAEEEEVVEVKLGKLKCIDGNGNAGDLAVVKGTTTSNDGDIGGGGRGDLGQRRCFSMGSYEYVMDEHAALRVAVRTPKRRPPARSRSRRRLALSECDFAGSASKKGAWEAAVIEAASADAAAARLNRDSFSVSKIWMTSATRKEDVRTAAELAGGGRRAASFRWPAMAEASKKHGGINDERRDVEAGGNGDSSLADERPSLARTALQYIVGGGGGGRQQSSRVGSHS

SEQ ID NO: 18596 - protein, 205 aa, Oryza sativa
  Clone ID: TF_OSC21837j.C1.p18.fg
MASSSSSSFAMDDGEAYLRDMTAITELLDGDMTAITESLDGDMTAIAELLDQARSYSFADLQSHDPPAAAAAAVNDDDDNVSGLMMAMMKTVDAPAGGGDGGDCPICLNNGGGEEWKETACGHRFHARCVARWARVGRKGMSCPMCRRDMMSPAVDLLVRDIRALYGDEELSDVRELLEDGLRQLEISSSIAGGAEEAAYRASQA

SEQ ID NO: 18597 - protein, 559 aa, Oryza sativa
  Clone ID: TF_OSC418082j.C1.p3.fg
MAPARVHSNGRLLMLLLLLAVAGFAAAQPSQDNPPAGYYATNFSPSMAIVIVVLIAAFFFLGFFSIYVRHCYGGRGDYSTTPLPRSGAARSRRQRGLDQSVLATFPTMAYADVKAHKSVKGALECAVCISEFDDDETLRLLPKCSHVFHQDCIDTWLASHATCPVCRANLVDGASEPASDVAAELPTAPAPRPEGATPSEAAAPGGEAPAAAAAAAVVIDVEETEEERIIREEAAELTRIGSLKRALRSKSGRAPAARFPRSHSTGHSLSSSAAASAGAERFTLRLPEHVLREVIAAGQLQRTTSLVAFRAGRQGSTRRGLRSGGGGGGGEGSSRAGRSVRLGQSGRWPSFLPRTFSARLPAWGSRSTRRGDGDGSSKGGRTAGSGAGAGGNTTTCSPRISSPCSPRTSPPVPPHLFVMECYLGGADACAELTENGQLLVMAKRLGEEGLMQEFASRVRLLMDPAWTTPWRRPGGEAGHAVDAAAEEEEDAGHRTAAGSGGDEEDDDADKEERIPSGRAGTGHADADDHREKGENRGNKERRLTWITLTCRAHGNSAAT

SEQ ID NO: 18598 - protein, 596 aa, Oryza sativa
  Clone ID: TF_OSC403595j.C1.p4.fg
MPAAESCHSRSLSWLVKSCIPADPARHIAVPVLCPTPQPPPPSSPPAPPISTLPDDLLLECLARVPRASLPPLPAVSRRFATLLASDAFLHLRRAHAHLRPSLLALSVSDNGCVPQALLRFESSVPVLEVAPLPLPPTLLHCGGSVFAHARAVVLGRDVFLIGRGATLRVDALTGAARACAPTLFPRKKFAAAAVGDRIYVAGGSARTAAVEEYDPEVDAWRVVGEAPRRRYGCAGASAGGVFYVAGGVAVSGEGARALEAHVCAGSVDALHVASGTWARPRALPGGGCVVGACGVGDHLYVVASHAVELSFWRWSGATGRGGDGRGWGGWVALEAPPMPRGSVGLGMAVRVAMAGLGTNRVAAVLRLKFCHAIFNSYAARIAARSCHYPAASSTSLQPQSPSIPFDLPTLLLRMHASISFALAPASSPDAASFAPTAADVGGAVCLGYGIAIAVGVLVFISTVMLASYICVRAKAGAAAVLLADDDGGGAPAASAVVVLGLDGPAIDALYPKLLHVGVGDDDDACAGAQCAICLGEFVAGDALRRGHGCGHRFHAECAERWLRVSATCPVCRDSPLPSPMATPLAEAVPLAAHAR

SEQ ID NO: 18599 - protein, 321 aa, Oryza sativa
  Clone ID: TF_OSC414138j.C1.p13.fg
MAAVAAVFLAFVLCFYIFVCAKRYRGGAPPAEGGVAARLWFLLGGGGGGGGAAGSGDAAWCYDGGLDEASMAKLPCRVVGKGEEAVDCAVCITELAAGETARVLPRCGHGFHVACVDMWLKSHSTCPLCRCPAVDEPPPAAPPPVVAPPEADPESPNFPTNVLFFGSQDELLRIEKKLVDLGGKIVELAASMVLQSSWPNKQQTAKPATSKNWRNGDSPANHLQITSSSDLLCDATGKYIFFVRRKFRYSAFTKSKDSFLIHMRLSCCMEMFQFQSHPDTERMILAIWGLKLTSATDIKYLLRWVWTIIDTNRDEQLVAEM

SEQ ID NO: 18600 - protein, 320 aa, Oryza sativa
  Clone ID: TF_OSC412751j.C1.p3.fg
MAAGATLSVLLLVAGVVLMLVLHVVVVFWALRRGVFLRGAFRVEERRDQRAAGLTPDEIAVLPCHERKEDGGGGGGGECAVCLEAFQAGDRCRVLPRCEHGFHARCVDSWLRQSRVCPICRAEVEVSGYAGKPAAAVAEASQATTLEIVTERLGGTERLEVSNVCEVHPLDSVDRMKGDNSNVFLVAGLSLVVVVHVLVLLWALWWGYGRSRLALARARVVGQHDVARGGLSAEQVGELPCHVVKEGAGECAVCLEAFRAGDRRRVLPRCEHGFHAQCVDSWLRVSRLCPICRAEVAASRGKEGDAPVAEAASLEIVAER

SEQ ID NO: 18601 - protein, 769 aa, Oryza sativa
  Clone ID: TF_OSC400839j.C1.p11.gm
MWPVRPCYSATARKLAVVVLSEGPIGLAGQTEVEWPVRPALARSDRHRLGLTDYGSVGFVSAIPSSTIPASTGPAERLNTLIYFALGSPRLDLVGWFYLGLMNDIVDERERGLDTDRLRCSWRKKRRTSSLSSQLDVDGGDGVLDGGGCRCSGGRGQSRRGRGAACDGDPPAIRLGAPDQGAVKVRCAVGPDGWEIYLTHINKENEDSRDRQTIDACTLSVKPTAACVLPSHARHEVRKSNPRADARPTRNTWTARIPRPRPVTDAKTPSRLVHSNPSKPKPPNSDRANRDSRHHQTRRHDTLRPKSYTARRDLVQQTQRKHSLDRHMPTPRPRHRHHALPLALALAAPLLLLAAADGQPNESRDKNNGGGGGGFMAPSGGGGGMGSQSPSFSAPMVVLLVALIAAFFFIGFFSIYIRRCGGEASTGPTIPAAALAALSRQEQRSRRQRGLDPAVVESFPTMKYAEARELRDGGKDAVLECAVCLSEFDDDEELRLLPKCSHAFHPDCIGEWLAGHVTCPVCRCNLAPDAAAAEANVVSGEVDGEQQEEEVVVAIDVDREGEEEDEERRREAMELERIGSQRRAVRSRSGRPLPLPRSHSTGHSLATTRLGDAGDLERFTLRLPEHVRREMVAAAGEESLRRTAVREGRVGGGARSARIGRSDRWPSFIARTFSSRIPFWSASRRVLDAAEAGADAAATTTTTTPTSTARTKRDKTAAAADGSVSSAKGSVRFDCLGGGGGGGGPSNRVVAFANDDEEDDDEKPIARQV

SEQ ID NO: 18602 - protein, 159 aa, Oryza sativa
  Clone ID: TF_OSC900212j.C1.p9.fg
MKVAIAGNVVVAVLFVAVIVWRLFFFGGRDRAGGAAASAAADADGESSSAGSSPCASPRAGGGLGREDLMALPVYVHGASAAADGGAKAEECAVCIGELRDGDTGRLLPRCGHRFHAECVDKWFRSHATCPLCRAAVAAADGDSGGEGDTKVAVVQQDV

SEQ ID NO: 18603 - protein, 240 aa, Oryza sativa
  Clone ID: TF_OSC410532j.C1.p3.hg
AGAAHNADVGAQRAGRGDTAPGAHRKPELPPKKRKDNSPPAGGFFGPGARSLPVGAGGGKTRAPAPGLPQGTPPAPPGHRTGKGGRHGRRRRECAGAGARLLSLGVQAAVMAAALALFLLFAAAAAILLLHLVVAARAFRNQRHGGAGRSRYRVPETSYTPSRAGLSPADLRFLPCFAASASASASPELCAVCLEAACAGERWRALPACGHAFHAACVDRWLARAAACPVCRASVSASAS

SEQ ID NO: 18604 - protein, 380 aa, Oryza sativa
  Clone ID: TF_OSC401894j.C1.p36.fg
MATPRSPSTRGDALLDSAPLLGGGGGGGGGRRRGGALRRPSLRGAARLLRRGGRRAMREPSVLVREAAAEHLEERQADWAYSRPVVALDLLWNLAFITVAAVVLVLSRGEDSPMPLRTWVAGYALQCVVHMVCVAIEYRMRRGQRDRAPASADEERGSDGSSSSSDDDVTEDDRRGSCTDCVSIAKHLESANTMFSFIWWIIGFYWISAGGEDVIRDAPQLYWLCIVFLAFDVFFVVFCVALACIIGIAVCCCLPCIIAILYAVSDQEGASEDDIRQIPRYKFRRTDEPEKQTADETGPFGGIMTECGTNQPIEKVLAPEDAECCICLSAYDDGAELRELPCGHHFHCACIDKWLHINATCPLCKFNIRKSGSSSGSEEV

SEQ ID NO: 18605 - protein, 449 aa, Oryza sativa
  Clone ID: TF_OSC23746j.C1.p3.fg
MAQQQKKNAHVPKFGNWDNGGNVPYTVYFENARKGKVAAAGKMFNPNDPVDNPEAFSSSIAAPSPSRAPPPPPSHHERAPSDAPPPPPPAPYAGGSPYHRHAAGGGETPPARRGGGRTSGGGGSSYSVEHSPSPSPLHPYSDSGSGSYGGGLVANSRAKGGGGGAPRGNETPTRGSAVPRFGDWDSNPASADGYTHIFNKVREEKQTGQAAGKPAAGLGKGGAAAAGHGNAAKRYHDDDFASTVIPNIIRIMSTASTARSRKRAHDGSRQKVDVINLETTAPVVNTGSQHEALILRGTRTSPIDVEALDDKRRSRKIMRRSVAVVDPEKDTGPGGYGVAGAIFSRGRNFQGAVHVICLSPDREEGTSKPKNVAQTSTTHAKVAPKEPTFTCPVCLNKLDKPSTTNCGHIFCEKCIQAWLKAQKKCPTCRKSLGIKSFHRVYLPTPADYD

SEQ ID NO: 18606 - protein, 465 aa, Oryza sativa
  Clone ID: TF_OSC405088j.C1.p5.gm
MTRASRASLLLFCFGGGDDDYECRACYGVSVACVSLLLFCVLAASVSVTKACAVAGLAVLLFGVIGWFVPLCGAGGPPARAGAAAGGGGRGAGAAGVTRCACRLVGAALIATLPAFVFEGPAEGGAGGGGGSKHGGSVLCAVCLEDVARGETVRRLPACGHLFHRDCVDMWLHSHTTCPLCRCEVLPRKPAAKPAPPPPAQAAESTSAYADPDALPPPRIPRARNLKTGRAAGPTPTPRARTRRATTGLQMFNGERRPAASQRGGDGGYLACYSVVMVCASLLLLSVLAATVSIAKACVFAAAAAVLFCAVGCVSRWCGDAGGAPAALPTTAAAAEEARARAPAAAACATCGLVGAAIDALPAFAYARPAADDGGGGGSKSGRCALCSVCLEDVQAGEMVRQLPACRHLFHVGCIDMWLHSHSTCPLCRCNVSPPATIVVKATATSTATAAAAAQQLPADTLPPV

SEQ ID NO: 18607 - protein, 183 aa, Oryza sativa
  Clone ID: TF_OSC5323j.C1.p1.fg
MDTEEAVHLVVVGVVAVGAVVFLLAAAASGACGCAAAFPAARWRKRAQVGDDDDDVESALGGATTVTTYEQAAAASSSSPAAGAAAEGADTCAICCQEYSGADKVRRVVRCSHFFHAGCVDGWLREKRNCPLCRAVLSSLPPLPNPGCRRGRAAPPCPPPLPPPLSSANYLSGFCRSHFVLDY

SEQ ID NO: 18608 - protein, 242 aa, Oryza sativa
  Clone ID: TF_OSC18908j.C1.p1.fg
MLTCSSTNPSLVGRAAGGEVGGFVESAAELQLQRARAAHGRRDPVRDRRRLRRHPRLAVLPRGAVRRWRRRPSSWRPGRGDLAVVELARRERRRGLDASALAALPVTAYRKNGGGGGGGEGSNRGGPGATAADCAVCLSELADGEKVRELPNCRHVFHVECVDAWLRSRTTCPLCRAEAEVPKARASAAATATAQSSSSLGDGGITVVVTIHGGSDEAGGRSTALTGQPGSSNSPSCEAARN

SEQ ID NO: 18609 - protein, 237 aa, Oryza sativa
  Clone ID: TF_OSC401369j.C1.p9.fg
MSDTALSGAPPAARSEDSWSQQQSYNFSGRVLLTAVVILFVIAVVFAVTRVLLYYLVVRPGGGGGGRRRGGLAGGILRSLNSLGVSGRRGLDASALAALPVTAYRKNGGGGGGGEGSNRGGPGATAADCAVCLSELADGEKVRELPNCRHVFHVECVDAWLRSRTTCPLCRAEAEVPKARASAAATATAQSSSSLGDGGITVVVTIHGGSDEAGGRSTALTGQPGSSNSPSCEAARN

SEQ ID NO: 18610 - protein, 105 aa, Oryza sativa
  Clone ID: TF_OSC21790j.C1.p1.gm
RHGVRAEGAALDAKQLGALPVFTWGSSSPATAAPNAAVQCTVCLGEMEDGELGRLLPACRHVFHAECIDTWLAVSSTCPVCRTTVGAAEDDEPAAAPVAGVSPAS

SEQ ID NO: 18611 - protein, 161 aa, Oryza sativa
  Clone ID: TF_OSC401978j.C1.p3.fg
MVVILASLLCALICVAGLALVARCACRRRGAATTTTTTTTTPAATSPAPKGLKKKAIDALPTVSFALKQQQQQAECAICLAEFAGGEELRLLPHCGHAFHVSCIDTWLGTHATCPSCRATVGTSTLFLPLPGRCRRCGEVDLPTLHDFSTATATAHHNTPP

SEQ ID NO: 18612 - protein, 807 aa, Oryza sativa
  Clone ID: TF_OSC400058j.C1.p5.fg
MEMEMEDNKAPSPPSPMESDVAGEKRKREDDASSSAVLAAANNTGGAQHPMWKTSLCSFFRRRAASSADGCSHGDSCRYAHSEEELRPRPDGTWDPTSDRAKKLRKVAADEVEEEVVTIDDKALDKCLVGLPRGWANDRLKTFLQDKARTNYSSILPPALLLGISYATAKKKKGMTVGFVTFENIEQLKNAIEVLTENQSGGKEIKIADANRRSHQKLHTEKPVSDNGVTTENGTSVDVPPGETSAPEAAISNKKSVRDAVTPLAHMSYNDQLEHKKNSVAQILKRLTRNARKACPTGIPLPDWVFKSKEIGGLPCKLEGILESPVINGYRNKCEFSVGFSLEGKKTVGFMLGNFREGVTAVEEPVDCPNVSEISCKYALMFQDFLQSSSLPVWNRVDNCGFWRQFTVREGRCQAQAVAQNAENQISEVMLIVQVCSTGVDDAVMKDEFDKLTVALQQGAATCSPPLPLTTIVVQDHKGISNAAPADCPLIPLLVPKVDQSEGTVDKTRIHDHIGNLWFSISPTAFFQVNTLAAERLYTLAGDWANLNSGTLLFDVCCGTGTIGLTLAHRVGMVVGIEMNESAVSDAERNALINGVSNCRFVCGKAEDVMGSLLTEYLGSPQQDIPVSEGAVSGTVKDEEVIDSSKNSGENLDSSMQKNDNGESQQLGDAPADSSSSAIDEIKGNSNDRVGNGLEGSHDEYNEVAGEDIHGEASLINESVDLKVSDCLEDRKTSDDGSSISNNDVTAATACQFEDIVAIVDPPRVGLHPTDQAYTLNLIGDQGIEDSSTNSTSSVNPKRGQGVAVFI

SEQ ID NO: 18613 - protein, 363 aa, Oryza sativa
  Clone ID: TF_OSC418263j.C1.p1.fg
KFIHAISPTPASTMSSVDIHARPPNTTLSPYISPAKSVPVEETPKRPAEDADLQYWRYDVKKQRHGEAGGNRLCFKFTSSGSCPRGSKCNYRHDEEAREHYNRNVCFDFLNKGKCEKGPECRFAHSLSDEGAVRDTKPRSERRRVESSCWFCLSSPDVESHLVISIGEGYYCALAKGPLVPNHVLVIPVEHCSSTLKMPVEAEAELGRYKDALAKYFEKQGKIAIYFEWVSQQSRHANLQAVPVPLSKASSVKKIFHLAAQRLGFEFSVVNPDGDANRARELLRSECDSKSSLFYVELPEGSVLLHLVDSNEKFPAQFGREVLAGLLSMADRADWRNCKVSKEEEIQMVDDFKQGFREFDPAE

SEQ ID NO: 18614 - protein, 784 aa, Oryza sativa
  Clone ID: TF_OSC400591j.C1.p19.fg
MEEPSPVPPAAAPASLAAAPPTTDVLSRRRAHLDSASYRALSRLFSHCLHLHPPRHAARPDAEVEPAAAAAIPPGGSGGLPHGDSPPPADVGGDRGKNLEVEVALGNHAPHETPSTSASPDAAVNPTTDPGVVPQGTEEGRVAGVERVEGVEEVVFAGGTSGEADADGDELGAGAGLMGDDEALRSMQACLDGEDSELVIEMVGNDNEQLQLDAMMNNLSGLIDDASACVMSAQSCGVSGDKLQSDDRVAEEVKELGAGIGNDRSVCSLDHGSLDGGGGFEEGEIEGDTQNLDADDSGNSELQDDVELEEDFDSRRIEEDGSCGHDLKSNLHLIPQKGNGDTARNMLCNSKGDSQMHVARAQAVSYDEVLDWNETPLPDDKALKHGNTRKRTLTEERKAKKTKTKRIKRALQREAEGVKRLKLQPVIKPKVVKVCHFYLHGKCQQGNLCKFSHDTTPLTKSKPCTHYARGSCLKGDDCPYDHELSKYPCHNFMENGMCIRGDKCKFSHVIPTAEGPSTPDAKKSNASSVPEKANCQEQTSRQKTSTVYSGEPATSVPIKHHSILKNLAGISGNAQKDVVSTEKHKNPTGGPHQNFGRPQPADGKKLGKHNGHRSAPLLDEKDSSKQANLHPCSEPKKNSLPTTAAVPSSHTWMLFSDEPVPMRLCSIFCIPHTSFIAVTPSCKLQLLMWTYFAELGANIYCQILKIGNYQMNALLFNPQAYNSKSQFLIFISLQQQEANSAAKGSMPVCIHQLVLSMFLNKDLNWKVGVYLFVWDYENAKRHMT

SEQ ID NO: 18615 - protein, 1389 aa, Oryza sativa
  Clone ID: TF_OSC400657j.C1.p8.fg
MSRRQEICRNFQRGSCKYGAQCRYLHASPHQQQQQQQAKPNPFGFGTGSRQQQQPSFGSQFQQQQQQQQKPNPFGFGVQGANAQSRNAPGPAKPFQNKWVRDPSAPTKQTEAVQPPQAQAAHTSCEDPQSCRQQISEDFKNEAPIWKLTCYAHLRNGPCNIKGDISFEELRAKAYEEGKQGHSLQSIVEGERNLQNAKLMEFTNLLNSARPSQTPSFPTMSSFPEVKNNSSFGASQTNGPPVFSSFSQIGAATNIGPGPGTTAPGMPASSPFGHPSSAPLAAPTFGSSQMKFGVSSVFGNQGSGQPFGSFQAPRFPSSKSPASSVQHRDIDRQSQELLNGMVTPPSVMFEESVGNNKNENQDDSIWLKEKWAIGEVWDTFLLVIFEVLFARNVCSFTTFVPAMEVIGIRNSIAILSDWPGDWSGLEKFHDLPLNMQAFEIYHLIHVTFEICTEMRISSPYHFGPSEEIDRWCKFMSIVAIVHTFYGNLWMRDGVFITEIQDRWQDKIQLDIMDNILVVCKSTLADDESASEVSSGSDSDSDCILGDDCPSDDDEEAAQIHKRFKELKEKLKTGKVDKLDDVVFEAGAEQDGNDTPSFDSDDEESVEEVASDEEVSARKLIKYPRFKEKPGVPTFELGMTFSCKKQFKKAITAYGLAERKAINFVKDDPKRVRARCDWPSCPWVCLLSKNSRTDGWQIATLENSHLCPSRRDNKLVTSSRIAEKYGKFIVANPSWKLAHMKATVQEEMFADVNISKLKRAKSITMKKAINAAKWQYQKLYNYQLELLRSNPGSTVVVDREVDMDPPVFKRIYICLDACKKGFLAGCRKVIGLDGCFFKGAKNGELLCAIGKDANNQMYPIAWAVVHKANKEEWHWFCGLLCSDLQVGDGSGWVFISNQQKEIINAMDKWAPQAEHRICARHIYANLKRHFYDNEHQKFWKCAKAPCITLFDLAMAELVQLTTPAVQTILNNHPQHWSRAWFRSGSNCDLVDNSMCESFNKWILEARFFPIITMLETIRRKVMVRIHDQRTISGRWTTSVCPNILKKMNVYITESAFCHATCNGGDSFEVKHHDNRFTVHLDKKECSCRYWQLSGLPCPHAISCIFFKTKTNSLDEYIAECYSVKEFKKIYSQCLEPVEGMSSWPEDDKEPLNAPGYIKMPGETRRESNEPLKATKLSRIGSIIRCSKCKQIGHNKSTCNKHHGGGSSTPDSLQVVNPADNLMLSNTQQSSKQSRKRKSRTAANTNSASQSRKTVSSKQKALVELHAHSQGSTSATIKVTSGQAFVNVSTQESAKFKPKKLTPVARLNGILMQSRKPSGSFGSSCSSINNFLKSSAGTTKMKMKMNNLVKEKWAIGEFVCHLSEGIDSGSYVAAPGSTKDLSNNQKKNTQE

SEQ ID NO: 18616 - protein, 424 aa, Oryza sativa
  Clone ID: TF_OSC6623j.C1.p1.fg
MSRRQEICRNFQRGSCKYGAQCRYLHASPHQQQQQQQAKPNPFGFGTGSRQQQQPSFGSQFQQQQQQQQKPNPFGFGVQGANAQSRNAPGPAKPFQNKWVRDPSAPTKQTEAVQPPQAQAAHTSCEDPQSCRQQISEDFKNEAPIWKLTCYAHLRNGPCNIKGDISFEELRAKAYEEGKQGHSLQSIVEGERNLQNAKLMEFTNLLNSARPSQTPSFPTMSSFPEVKNNSSFGASQTNGPPVFSSFSQIGAATNIGPGPGDCVTNLLPPFHNFSNEVWSFEYVAESCAFTSIFVAVYHGRILETRGSGQPFGSFQAPRFPSSKSPASSVQHRDIDRQSQELLNGMVTPPSVMFEESVGNNKNENQDDSIWLKEKWAIGEVWDTFLLVIFEVLFARNVCSFTTFVPAMLHDDTKELYNKQENLQE

SEQ ID NO: 18617 - protein, 278 aa, Oryza sativa
  Clone ID: TF_OSC415553j.C1.p1.fg
LNGGGKTTHSAEYPERPGQPVCEYYMKNGTCKFGSNCKYDHPREGSVQAVMLNSSGYPLRSGEKDCTYYVKTGHCKFGSTCKFHHPEIGGVSETPNMYPPVQPQPISSSHPYQHLAGWQMGRPPVLPGSFLSGSYPPMMLPSTVVPMQGWNPYISPVNQVASAGGHQTVQAGPFYGLSHQGPSAAVTYGSQYAPLSSSTMPSSSSKQEPAFPARPGQPECQYYLKTGSCKFGSACKYHHPQYLNTPKSNCMLSPLGLPLRPHAVARIVSPNVYRLSLD

SEQ ID NO: 18618 - protein, 476 aa, Oryza sativa
  Clone ID: TF_OSC422882j.C1.p4.fg
MADADARAPPKSDPGATPIDEVSGGEKLPGEVAAAVGVEGAAADSRPRFPRRPGEPDCTYYVKFGSCRFGMKCKFNHPARKKKSRVKGSNGGSGSGGSNSSSNKASSPDDEQQAPKEEYGSYVPDISPEVDSLGFADKGSASNLENFKKYSYEIIDVKKGRVEPKELKVLKVAKEKRKEFISEGSSQEECKYYSTPGGCKFGKACKYLHRDGKEGKTDAEKVDLNFLGLPLRPGEKECPYYMRTGSCKYATNCKFHHPDPSNVASKDPQLEHENGDAPQQDVQGSSSQPNASIWPDQRTVNEHHVPFIAPSPSYSAGMLPPQGMYPPPEWNGYHQVPLNPYYPPGVPFQHFPAAPINHPMYKAPEIPGHQQVPSEEYPERPGQPECQHFVKSGFCKFRMKCKYHHPRSPVPPAGALSPLGLPIKPDQPVCTYYGRYGVCKFGPACAYNHPFNFSPVPAAGPPLLPAQYPTPGNYTL

SEQ ID NO: 18619 - protein, 718 aa, Oryza sativa
  Clone ID: TF_OSC27392j.C1.p3.fg
MAAPAADDDDHRAALPREEDDGEEEEGSEEEVESDDEEEEEGEGYDWSEEDDPEAASLAGICDPDAGSYDDPTFDPAADGDLEVDAVLRSRMARMSLSSARKDRKGSRMPKMGKEEMDLLAMVDKLMHGQFFLRLPLCDCDISNNVMQTDGQLEKLKVYECKAYLRMHKLRLSGNKEVLLTRIRGQIEYELYPLCNLSFFFICYLSTLLIFCNANELLLFDHFLVLQNQGENYGRGDSCKGDVVVFEQNIYKRKKGAPRGVKGHLCGQRTNAGRIIKESYGTKKQQHTFTPWLDEEERNRALQEKHARGYVARKTREVRIKDKENERMRRLNRNKENKSKGQDNMNKKSSQAVFPQHTVTTNTVQKRAEKIIPSLQHGESGNSSQQHLSSKQTPTEQLLHYLPQFPHPQQHNEVLLQKGTSRTSTTQLINHQAPSLQHAVKVETTQQQQQQQPPKSIKPAPIQQSSAYPQQYPKHQHHNQALPRVPPSQEQRAAVSQTSAARQDFTNHQAPPSRQHGGSENMRRQEISSRPTPTPTPQQAVSYTQQQPPNHQYRNEAFWQQGGTSTSRTGFMDRQSNNWGSTDHDKPAFQPFTQKAKTYQHGSNGSGHHQARVDRETHQPLRSRNQDYHWEDQSYHHQQNHHQNYYGHRQMSQDQYHHQQNHHQNYHGRQGMNGNQYHDRQNHNQNPQRFRPWKPCFIYQQQGWCPYGENCKFMHDLR

SEQ ID NO: 18620 - protein, 719 aa, Oryza sativa
  Clone ID: TF_OSC411215j.C1.p5.fg
MPQDDDWFWGRPTPVVVGDGETTSKPKPPVAGKTKKVEEQHPRRPGEPDCSYYVKFGSCKFGISCVYNHPDPRPQHGADDKKPAEQFPRRPGEPDCSYYVKFGSCKFGMNCRFNHPPRMPVPPQQEYFSGNACHCHHIEGKSKVEQVKLNVLGLPLRPGTGLCSYYMNRGICKFGTNCKFDHPDPGSDHEKWVVSSNANQVSSQVNIYSVLDHGESNEHTFTSEEVHQPGIPSFHQRISYTRDQLLQLCQNVEVPKDILKFCQDINVELNGEDKISGFGAEKDHVSILPFSYVIMAEIVCAALINVPQRCKVLYFIVQTPSYKRFDATDSRDWHSWSAQTNWEQKFWDNFSEAKEPYSLGWKQEKFNKPDQSSFHFDSKDQRGIISGKDEVLKTLKSILNTFSPKMFDLQKGQLIETRISSADILKDVINLIFEKVVAEPAFCSTYAQLCTYLNQNLTPFPPEDCDCEEITFKQALSNKCQEIFESAHTVCSEIGKLIGQDREMEQRDKERVVKLETLGNINFIRALLKKKLITNKIIDHIVQAVMDCCKFRFEPLGKVDLLNIIFEGMLDSDSAGDESNICVNAMIGGNKSSIASNDVEMTRKNVNRQNEEAILQKSYDEVPNNKMDPQKNYADGAISYLIEKEKPTNLESSVRICRGGCSISEIMELVVDAGAVEGSDEHFMATLLFIKPEYREIFLTLDTREGRLGWLKRMYKVKE

SEQ ID NO: 18621 - protein, 90 aa, Oryza sativa
  unsure (1)..(90): unsure at all Xaa locations
  Clone ID: TF_OSC32478j.C1.p1.gp
GEPVCTFYSRYGICKFGPNCKFDHPMGTLMYGSATSPRGDVSSMHYQLSPSPGHPGILLDGGSGRSHRVPQSDSQQIPSGDGNAEREASX

SEQ ID NO: 18622 - protein, 413 aa, Oryza sativa
  Clone ID: TF_OSC101178j.C1.p1.fg
EAKKEYPPDLTLPDLKSGLFSTDEFRMYSFKVKPCSRAYSHDWTECPFVHPGENARRRDPRRYSYSCVPCPEFRKGGSCRKGDACEYAHGVFECWLHPAQYRTRLCKDEVGCARRICFFAHKPDELRAVNPSAVSVGMQPTVSSPRSSPPNGLDMAAAAAAMMSPAWPSSPASRLKTALGARELDFDLEMLALDQYQQKLFDKVSGAPSPRASWGAAANGLATASPARAVPDYTDLLGSVDPAMLSQLHALSLKQAGDMPAYSSMADTTQMHMPTSPMVGGANTAFGLDHSMAKAIMSSRASAFAKRSQSFIDRGGRAPAARSLMSPATTGAPSILSDWGSPDGKLDWGVQGDELHKLRKSASFAFRGQSAMPVATHAAAAEPDVSWVNSLVKDGHAAGDIFAQWPEQEQMVA

SEQ ID NO: 18623 - protein, 240 aa, Oryza sativa
  Clone ID: TF_OSC33167j.C1.p1.fg
MYLRPDMITPGIDAQGNPIDPEKIQADFEDFYEDIFEELSKYGEIESLHVCDNFADHMIGNVYVQFREEDQAARALQALTGRYYSGRPIIVEFSPVSDFREATCRQYEENSCNRGGYCNFMHVKEIGRDLRKRLFGHLHRSRRSHSHGRSRSPSPYHYRRDYDRRSSSRSRDHDDYYRGGSHDYYRGGSRRSSERHRSSYDSDGSRRRHRSRTRSPVRDGSEERRAQIEQWNREREAAQV

SEQ ID NO: 18624 - protein, 355 aa, Oryza sativa
  Clone ID: TF_OSC14394j.C1.p1.gm
MTTKFADLPRVVTSEKKEYPVDPSLPDIKNSIYASDEFRMYSFKIRPCSRAYSHDWTECPFVHPGENARRRDPRKYHYSCVPCPDFRKGVCRRGDMCEYAHGVFECWLHPAHTIPKSLGNSYNGDGCSNGLDAWFSIISFSSHVPIYTTNVPFRQWDAPFIGLAAAKCSDTTPSRQQPQSSRLRTSLSARDMPADDYSLMQDIDSQLINDLCYSVLGGMFSPSHKAAFLNQFQQQQQALLSPINTVFSPKSVDNQQLPSHSSLLQASLGISSPGRMSPRCVESGSPMNSHLCAALAQREKQQQTMRSLSSRDLGPSAARASGVVGSPLSSSWSKWGSPSGTPDWGVNGEELGKLR

SEQ ID NO: 18625 - protein, 386 aa, Oryza sativa
  Clone ID: TF_OSC400431j.C1.p28.fg
MMMMGEGVSSVPPWSHLPVSGVDVLGGGGGGGDEMTPYVIAALRDYLPANDVGVGADEEEEAAAMAAAVDAYACDEFRMYEFKVRRCARGRSHDWTECPFAHPGEKARRRDPRKYHYSGTACPDFRKGGCKRGDACEYAHGVFECWLHPARYRTQPCKDGTACRRRVCFFAHTPDQLRVLPAQQSSPRSVASSPLAESYDGSPLRRQAFESYLTKTIMSSSPTSTLMSPPKSPPSESPPLSPDGAAAIRRGSWPGVGSPVNDVLASFRQLRLNKVKSSPSGGWSYPSSSAVYGSPKAATGLYSLPTTPLASTATVTTASSFMPNLEPLDLGLIGDEEPVQRVESGRALREKVFERLSRDGAISGDATAFATAGVGLDVDWVSDLIN

SEQ ID NO: 18626 - protein, 464 aa, Oryza sativa
  Clone ID: TF_OSC900188j.C1.p9.fg
MVRKRRDTARVNPTAVSGGGLSGLYSRASSSPPLHHSGSRRRLRTNTLPRRSWRRGEELESKMMMMGEGAHAPPWQQHVASPVSGVEGGGGREIEVVATPYHLLDTLRHYLPSNEAAAPKDKEKAAPVAAAVDAYACDEFRMYEFKERRCARGRSHDWTECPFAHPGEKARRRDPRRYCYSGTACPDFRKGGCKRGDACEFAHGVFECWLHPARYRTQPCKDGTACRRRVCFFAHTPDQLRVLPPSQQQGSNSPRGCGGGGAGAAASPLAESYDGSPLRRQAFESYLTKSIMSSSPTSTLVSPPRSPPSESPPLSPDAAGALRRGAWAGVGSPVNDVHVSLRQLRLGSPRSAPSCASFLPAGYQYGSPKSPAAAAAAALYSLPSTPTRLSPVTVTTASGATVTVEPLDLGLIEEEQPMERVESGRALREKVFERLSKEATVSTDAAAAAAGVAPDVGWVSDLIN

SEQ ID NO: 18627 - protein, 388 aa, Oryza sativa
  Clone ID: TF_OSC418457j.C1.p13.fg
MADPNGRRRLPTGDPDQANASPSRRVSAVDGVTGGEGRPTYSHFPPGAYEPTDVAYGIRDAANDERARARARARHDQGGGAHDHHHDRPRQDQRGEAHLHDLPGEKSEVPDVGPSDQQGKEASDTDMAPLAALAKRSYDVNFPPLHEHRAAPFPAPAPAFAPAPAGTMGSSSAQVQGDGAPDNHDHDPRHLPRQDQSGGAHPDDLHGEKTIGSGSDILDDSKRGMINAGPQHGRITTSNGGSGSGSDKGKGVSYAGDKPASSSSSSSSAGQQGSDTDKTPSAAAASSYAVNFPPLLPAPAPVPAPAPAPAVAGAMGVANAHHKIALCSKWRKGRCHNGAACRYSHGEEEQRIVPEMRVGGGGRPCPELAAAKGWCRYGLNCKYCHGGV

SEQ ID NO: 18628 - protein, 53 aa, Oryza sativa
  Clone ID: TF_OSC32469j.C1.p1.gp
EAMWQMTLGGGESMESTPYPERIGEPDCSYYMRTGLCRFGMTCKFNHPPNRKL

SEQ ID NO: 18629 - protein, 506 aa, Oryza sativa
  Clone ID: TF_OSC419228j.C1.p18.gm
MEQPHAAAAAAGGGEGEGGASPDTGLEGPMWRMGLGGGGGGGGGGGGGDGDAAGRLPERPGEEDCVYYLRTGACGFGDRCRYNHPRDRGGTELENWACHCLDLVRRIGSTHRVAALEFGFAVEGEKECSYYMKTGQCKFGTTCSYTPMMLSSGMIPLQGWSPYPASVNPVVSGGAQQNVQAGPVYGMGHHGSSSTIAYGGSIVLIGSSRHWETRIHSLVAGGEKGQSAPTWRRFGDIVHLDTSGGRGGYSSSSSPLLVTGQWSPLAGEEDKLVVVVGRLAIIRQRRPMLVQPPNADAQHTDIPDGRSFLGVPRYYRHSLTVLQRAVRSWNAHNHKHPMTAAVAPSLLAVQAVVAEFDRFLDAYDFNAVGWSRDHPMAAAAGRFLDKRNPNTDKNNPSGLAGVARRFVMFNGAVCEAQLRWLDGVLRGLMWNYEGVMRVVHRWTRGPTCHRLPPTVSSSLLSPEAPPVGSFPHLPPIPVSPSLVRTSASPVFAASLVFLRRPLPPLR

SEQ ID NO: 18630 - protein, 566 aa, Oryza sativa
  Clone ID: TF_OSC400711j.C1.p10.gm
MATTTSSSASDPAAISPTPSQQHASSTVKTLDDRRPAGTSSSAGETEPKAAVEPQEYPRRPGVPDCSYYVEFGSCKFGMRCLYNHPAKHAGGCDKLEHPQRPGEHDCLHYLRFGRCKYGMNCRFNHPPDRLPQQQVPAEQIRYTRDQLLKLRETVDVPKDIMKLIQDINVELRAEDESRAPNETNYETDSHDWHSRSLQTPVVAEEEKSQDDTREAKEPYALGWKQKEFNKQDQKSFQSDSKAQAGPTLALHKAEDPWSIQRSTVPEKYKVLKTVKGILNLLTPEKFDILKDQLIEAGITRTDILKDVIDLILEKAVAEPTLCPMYAQFCSYLNENITAFPPKDTHCEQITFKQALSDKCQQAFEIARNVRADIYKLTGREQEMERRDKERLVKHQILGKIRLIRDLLKQKMVPDKIVHHIAQAVTDCENFHFEPLENVDLLNIIFDGVLDSVLPGTEANKVVNAIIGIEKCSIASNDAGIIHKDVNRRNEEAKLQKSSNDIPNNLIDPQKNYVVSAFGHPIENEKQTNSETSVRISEVGCGISEIMELIVNAGAEEGTLKEDFGG

SEQ ID NO: 18631 - protein, 428 aa, Oryza sativa
  Clone ID: TF_OSC400964j.C1.p103.np
MDDAGRASAPAVVTLPATAAATDLPATAAATDEPSHDPAALYGEGMWQQMTMSGSGAMQPGPYPERSGEPDCTYYLRTGLCRKGEYPERMGQPECQYYLKTGTCKFGPTCKFHHPREKAGIAGRVQLNTLGYPLRPSEKECAYYLKTGQCKYGNTCKFHHPELFNAMASSRGSPIYPSVHSSATAGPPYTGTMASWAFPRGSFIPSPRWQNPSNYAPMIVPQGLVQVPSWNSYTGQMMPVSSSESRLQSPGAQQTYGTSQQVDASAGNQGMLSPYRSSSYPVPQYALQRENVFPERPDQPECQYYMKTGDCKFGAVCKFHHPRVRSMPTPDCVLSPVGLPLRPGEELCKFYSRYGICKFGANCKFDHPTMAPPMGVYAYGSASTNVPMIVGIGFSGSWQQGAKDPTDSSGAPPNTHVLGEDPIPYRKI

SEQ ID NO: 18632 - protein, 609 aa, Oryza sativa
  Clone ID: TF_OSC22496j.C1.p9.fg
MLLVDGEPVSASASPTFGSSRGVRLLGCWRDFFPPRLSPSRFLQGSGGRELVAALMGNPGLRAASERLRAEPERRISSGPEEDDADAAAAAAPRHVYVFQREFATVDPARVELVGTDEVTTCVGVVIRNNKTGMTSISHMDFPKIVEGGLKQMLELLGDDNAPFDVVHSAGRKHIKQEGYSYPLCCRILEVLYKSRQQFHLRTFCVLGSNTTTDSYGNTRPIIGGFVVETSSGAVNPASFEMNSRCPDEIVRRIRVSVSSYDPNWQGRLLETYDTHSDAFEIAPACWMPDWAEMASSLNQLSDSEVLLQCSTSPAAEPPHFVENERRIWRYLIENPYWQDTFPKYKPRVFHRTSDGSTSGCPFGSSCHFLHNFPGGYQAAAKMTSHGGTAVAAPPGRMPLGPGAPNGPPTSSVKTRMCNKYNTAEGCKWGSKCHFAHGERELGKPMLLDNSMPHPMGSMPFEAPPMPGPDIVPPSTFGASATAKISVDASLAGGIIGKGGTNTKHISRMTGAKLAIRDNESNPNLKNIELEGTFDQIKHASAMVTELIVRISGNAPPAKNPGRGSHAGGPGSNFKTKLCENFNKGSCTFGDRCHFAHGESELRKPPAAA

SEQ ID NO: 18633 - protein, 496 aa, Oryza sativa
  Clone ID: TF_OSC26691j.C1.p8.fg
MADSEDGDHVATTTTEQRYDDDGHLVPSSGGQEEEGSGGRDVVVPGGHVAEDYRSGVGVPVGRDAGGATSSPPQPVHVTPSILVGSIHAPVFQGELVGMKFGVGSGSMGAGTSATRRLPATGFGALPTSSMAEDSADHADDDHLAEEEEEEEEEHYIDDGPLVPSSGGQEEEGSGGRHVFVPGGHDGEEDHPDDLVADLDLDLLVDGVVGPVPGGHLNADAPAFVPTTRGRQDLYSALSSSAPAAGYRYRHYITSSALAEAGHVSPFLGLPYATAFDSPLDRELVGPSSAPPPCSAASRAWLVRCSSPLSDSEWTRRSILAREAAHTPASTVTGRGRFEFVPIPGAPYAPPPSFAPIAAGAGPAARPLQQLAFGLEEHKTKLCAEYYSRGLGCPRGNTCKYAHGEDDLRLVVAVSSLADAGEGSSSSDSSFAALGGEDKYKTKLCKTFTSGGLCLFAANCRFAHGEVELGKKEPCWYFFSGQTCPRGDTCGFRHSY

SEQ ID NO: 18634 - protein, 534 aa, Oryza sativa
  Clone ID: TF_OSC418457j.C1.p20.gm
MSVMDANQAYARHHFDGGHLRGDRADVLAQQAGMDIGSMADSEDGDHVATTTTEQRYDDDGHLVPSSGGQEEEGSGGRDVVVPGGHVAEDYRSGVGVPVGRDAGGATSSPPQPVHVTPSILVGSIHAPVFQGELVGMKFGVGSGSMGAGTSATRRLPATGFGALPTSSMAEDSADHADDDHLAEEEEEEEEEHYIDDGPLVPSSGGQEEEGSGGRHVFVPGGHDGEEDHPDDLVADLDLDLLVDGVVGPVPGGHLNADAPAFVPTTRGRQDLYSALSLSAPAAGYRYRHYITSSALAEAGHVSPFLGLPYATAFDSPLDRELVGPSSAPPPCSAASRAWLVRCSSPLSDSEWTRRSILAREAAHTPASTVTGRGRFEFVPIPGAPYAPPPSFAPIAAGAGPAARPLQQLAFGLEEHKTKLCAEYYSRGLGCPRGNTCKYAHGEDDLRLVVAVSSLADAGEGSSSSDSSFAALGGEDKYKTKLCKTFTSGGLCLFAANCRFAHGEVELGKKEPCWYFFSGQTCPRGDTCGFRHSY

SEQ ID NO: 18635 - protein, 367 aa, Oryza sativa
  Clone ID: TF_OSC416788j.C1.p1.fg
MDYTNAIHIIPDAAGPDAWANAAAQGGDAGIWATEDDYNSQWNADGGGGGSSRAGSEQPPPGKKSRGGGGGEGGGNTSKSRAIGKMFFKTKLCCKFRAGTCPYVTNCNFAHGMEELRKPPPNWQEIVAAHEEATEAREEHQIPIMTSSGPTAGGDAGCGGGGGGGSGRAYKGRHCKKFYTDEGCPYGDACTFLHDEQSKARESVAISLSPSVGGGGGGGSYNSAAAAAASASAAAGNGPMQKPSNWKTRICNKWEMTGYCPFGSKCHFAHGAAELHKYGGGLVDIDSRDAAATPDSKQAVVSAKAPAETAAASTTVLPHADVYHLGVQAQRSTIAGQRSGQVQRPIQKWKGPDKISRIYGDWIDETE

SEQ ID NO: 18636 - protein, 387 aa, Oryza sativa
  Clone ID: TF_OSC400011j.C1.p3.fg
MQEALLPPAHPGRFYSDFGPKPFGSGDQRLSSPNLLTNGGDLFYGCYSPFSPTRVLSPPPPRRAASFSHCSSSSDSVVDDGDGAGAAAATEHRLHLAHLALQYQEMANRFELCLSHLADAADEAAALRQENAELRVANNDLACRIAKFGGRQSSAIALAGDLRRLRLPKEQTVPALPPPPQSPPAALMNPVAVPEKQAVLPKSISIRSTGYQKLNQGGKHRVSKPVNVGSVRPNPPIPPLCCVWLPLLQRTDSCAESKIPILTSTMFLMRQCKQQRVFVGIDGAEGGEHKVGVKKEEPPMGGLEFEVYNQGMFKTELCNKWEETGACPYGDQCQFAHGVAELRPVIRHPRYKTQVCRMVLAGGVCPYGHRCHFRHSITPADRFSFGH

SEQ ID NO: 18637 - protein, 441 aa, Oryza sativa
  Clone ID: TF_OSC400848j.C1.p12.fg
MSDPFYPHGHGGAAGGEGAAAAGYSSYEVDLIAARYGGRPLANPSSAAADLDARLAGARRSMGVLYHQPIMGSHSTVEQIEALYSSNTMTKRPRLESSLPIYPQRPGEKDCAFYMMTRTCKFGGSCKFDHPQWVPEGGIPNWKEAANVEESYPEQEGEPDCPFFMKTGKCKFGSKCKFNHPKEKVNALASGNTNDFYAKTGKCKFRAMCKFNHPKDIEIPSSQNEPESAVTVEGETDIGSAADSVSAKMQTPVAAAQEFNSKGLPMRPGEVDCPFYMKMGSCKFGSTCRFNHPDRLVLNFPLPLGQTILPTPESMLLNSSANFMQGFDFHAAHMPVGPGPVTYPQRPGATVCDFYMKTGFCKFADRCKFHHPIDRSAPDPSANWEPAEESVQLTLAGLPRREDAVVCAFYMKTGVCKFGMQCKFDHPPPQEAIAKVSNSGS

SEQ ID NO: 18638 - protein, 678 aa, Oryza sativa
  Clone ID: TF_OSC404615j.C1.p9.fg
MSTAAADPAAAADAAVTRKERRRERKKERRRRARREAAEAARKAAEALAADPEEERRLRELEEAEADASERARRAFEDAERRWLEAAAARAAEKAAAAREESTAPEDSSREYKDDHGNGTEEDDEWEYVEDGPAEIIWEGNEITVKKKMVKVPKKAKENQPIQQDKAHCPFHLKTGACRFGVRCSRVHFYPDKSCTLLMRNMYSGPGLALEQDEGLECTDEEIEQSYEEFYEDVHTEFLKFGELVNFKVCRNGSLHLRGNVYVHYKSLDSALIAYSSMNGRYFAGKQITCEFVAVTRWKVAICGEYMRSRFKTCSRGIACNFIHCFRNPGGDYEWADWDNPPPRYWIRKMAALFGPSDDSIYGKPSDTPHLERSQSSDRRRPRSSDPRYTPSRTRDEDAHKQHSSRDYSHSKHERSSHTEHRRDRKESSASDKHRHREIKDKTSKYSSNMESERESHKYMREEKHRIDHGNGGKGDHGKVRSRKNRSERQESLEPGSSGRSSDFIDQDTTESPSGSKSTGRHHKKTRRQSLEEHSTRRSSRHRDMEDDGRGQSVAVKRKDHHDTSDDRWVATNSDVDSDLETQYQRSSSEGSKLGMKYHARSDSETGYGRSRSGTTKSRRERKRQSGNGERSDTLEVTSDSDTRDMSSDAWRSRSRSSDENLSTHRSRRKRSRSSHDS

SEQ ID NO: 18639 - protein, 605 aa, Oryza sativa
  Clone ID: TF_OSC413661j.C1.p5.fg
MADMKQEEDELAVDPGVGAVCDPVTKLRFEAIVCLLDRIPITLQQIDMFGQDVAFRTKRIGNIEALLDFLKGSAAATWGARAGAGEPIDASSPELHRLVEDAETAYRDVRGLQPRMVVQMPRVFHKVCLPKLHQLLVIARRLLAQNVALRRLLLQPVGCDVSPMALAEAAVSSDDFERHGRNKVVIDEFGYEDLLRRRHTGHESQNDADDAEQHGREVREGEYEDLILMRHRDTSHELLQDDARRRRADAEAEQQGGDGEVRDEYEDYLCRQLGAVYSGPDQIYEHDMRGPEPAHSPNTPDQIYVPCERMLPYPSNCDNAEDRIHMACLALKNLVKDMEGIYSPRGTLWQYLEDVISLAHALFLENTKLHRFTDQASHQDLPLQPPQGFPFQQQPQHDGYQQPGVPFQQPQQGGYYGHGQGIMFQRGGYLQDVPFQHWQWQQGGYGQGFMFPQAQHQGGYGQGFLSEQPLPGDPSFMNMQAPYDGDGGVLFQKPQHYHHGHVPSEKGAIQAKGKQKMREPKTVMCPDWCRTGHCSSGDGCEYAHSQDELRVIDARPKYRTEPCRYWLAGKGCWYGDKCRYKQHRLAREPLYVDPFLTGHELRNKT

SEQ ID NO: 18640 - protein, 300 aa, Oryza sativa
  Clone ID: TF_OSC101298j.C1.p6.fg
MEVGGRKRGKPDGANGAGGKRARESESFQTGVGSKSKPCTKFFSTSGCPFGEGCHFLHHFPGGYQAVAKMTNLGGPAIAPPPGRMPMGNAVPDGPPTPTVKTRLCNKYNTAEGCKWGDKCHFAHGERELGKPMLMDSSMPPPMGPRPTGHFAPPPMPSPAMSTPASFGASATAKISVDASLAGGIIGRGGVNTKQISRVTGAKLAIRDHESDTNLKNIELEGTFDQIKNASAMVRELIVSIGGGAPPQGKKPVGGSHRGGGPGSNFKTKLCENFTKGSCTFGDRCHFAHGENELRKSAAA

SEQ ID NO: 18641 - protein, 466 aa, Oryza sativa
  Clone ID: TF_OSC419228j.C1.p6.fg
MEPYAAAEGGGGGGGGGSTDTGLEESMWRMGLGGGGGGGGEAVAAGRLPERPGEADCVYYLRTGACGYGENCRYNHPRDRAAAAVLNGGGKTTHSAEYPERPGQPVCEYYMKNGTCKFGSNCKYDHPREGSVQAVMLNSSGYPLRSGEKDCTYYVKTGHCKFGSTCKFHHPEIGGVSETPNMYPPVQPQPISSSHPYQHLAGWQMGRPPVLPGSFLSGSYPPMMLPSTVVPMQGWNPYISPVNQVASAGGHQTVQAGPFYGLSHQGPSAAVTYGSQYAPLSSSTMPSSSSKQEPAFPARPGQPECQYYLKTGSCKFGSACKYHHPQYLNTPKSNCMLSPLGLPLRPGSQPCAYYTQHGFCKFGPTCKFDHPMGTLSYSPSASSITDLPIAPYPLNYAVAPVAPPSSSSDLRPEYLLTKEFSANQSASPGTTCGPAGAMLKAYAPHMLIRPQTSGAGGMVTTHGGEL

SEQ ID NO: 18642 - protein, 690 aa, Oryza sativa
  Clone ID: TF_OSC400151j.C1.p17.fg
MARIKELCNSFSSAALLYIGSSISISMRMHDSLHAYGGEGWDGGVGGGAAAGFGGRDRAAPGPPARRRPPPVKAVEPESGGFAYEPPEKLFYKTRVCETFVTSGRCMFEDGCTFAHGDEELRPSLTACAGGWRKPSPSLSAAAPPVAVAPTPPPAQVVHELLARGSGSGGGGHRAITKVCFEFRDKGICYFGETCAFPHVSAAEIRQGSRLSSMSSSSWEMPARRSVAVTVPRTFVSVPPVAPPPPPPHYRVNNSSSYNAASMAAAAPAASDANLVAQQPPPEQGGRKMTRLEMLSLKKMTGIYGDWLEGAREMRIWCSLVQVKRRRPEEGKRGRRMGSGIGAVLVLVAAWLTFAPPGALASSRSIKLWMNRFDYRGLMQPFGGICEIPIIKLSPYQLNDYNQEAVEKGQHRWGKWFDLSIAQEKLVNSTGGSTASSSHLVFDPSKSKRLSWHPRIFLYEGFLSDMECDHLVSMGRGNMESSLAFTDGDRNSSYNNIEDIVVSKIEDRISLWSFLPKENGESIQVLKYGVNRSGSIKEEPKSSSGAHRLATILMYLSDVKQGGETVFPRSEMKDAQAKEGAPSQCSGYAVRPAKGNAILLFNLRPDGETDKDSQYEECPVLEGEKWLAIKHINLRKFDYPKSSLASEDECTDEDDRCVSWAASGECDRNPVFMIGSSDYYGSCRKSCRVC

SEQ ID NO: 18643 - protein, 478 aa, Oryza sativa
  Clone ID: TF_OSC400481j.C1.p19.fg
MAAGAGAGGGGGEGDSNGGGTSPGGVSAAAPAIGPHHLGVAAAEGGGGVICSVLLYLNLWGKRVSGVREAMWQMTLGGGESMESTPYPERIGEPDCSYYMRTGLCRFGMTCKFNHPPNRKLAVAAARMNGEYPYRVGQPECQYYLKTGTCKFGATCKFHHPREKAALANRVQLNVLGYPMRPNEKECAYYLRTGQCKFASTCKFHHPQPSNTMVAVRNSMYSPGQSATSPGQHTYPGAVTNWTLSRSASFIASPRWPGHSGYAQVIVPQGLVQVPGWNPYAAQMGSSSPDDQQRTPVTTQYYGSRQSETGGMGDHGMYQSYQGGSVPVGVYTVQGENIFPERPDQPECQFYMKTGDCKFGAVCKFHHPKERLVPAPNCALNSLGLPLRPGEPVCTFYSRYGICKFGPNCKFDHPMGTLMYGSATSPRGDVSSMHYQLSPSPGHPGILLDGGSGRSHRVPQSDSQQIPSGDGNAEREAS

SEQ ID NO: 18644 - protein, 304 aa, Oryza sativa
  Clone ID: TF_OSC413563j.C1.p4.fg
MAEHLASIFGTEKDRVNCPFYFKIGACRHGDRCSRLHNRPTVSPTIVLANMYQRPDMITPGVDAQGQPIDPEKMQEHFEDFYEDIYEELSKFGEVETLNVCDNLADHMIGNVYVQFREEEQAVAAHNALQGRFYSGRPIIVEYSPVTDFREATCRQFEENSCNRGGYCNFMHVKQIGRELRRKLYGGRSRRSHGRSRSPSPRHRRGNRDRDDFRRERDGYRGGGDGYRGGGGGGGGDGYRGGDSYRGGGGGGRRGGGSRYDRYDDGGRRRHGSPPRRARSPVRESSEERRAKIEQWNREREEKP

SEQ ID NO: 18645 - protein, 559 aa, Oryza sativa
  Clone ID: TF_OSC401249j.C1.p75.fg
MSSAYTVHRSISLLSVIQLNNSSQWRAERIKQQIKVHFCANRLAHRKLFVASLSFEKDMTGNKSFMEPRFFGPKVLRQAKHPMRHAVHHFFTFLFDYKYSVIRVLQNENDVGHVFRALAKFKSLLLDVVRKKRAPTRGGGGKKYAIGYRSRPEKSKKRIASFMKLLRFNWAAAAAVTPARAKDLELHYHPYYYDYDDSTWNVVVPADGAAEELRGGGGDDGEDCGYLCWLEEETSAGALPAAGEGEDGGNGNGDGDGNGAVNEIDRLAERFIARCHAKFLLEKQESYRRYQEMMARSITIGCPFGEGCHFSHFVPGGYQAVAKTLNLGNPAVPAPARAPMDHAAGGNSHPASSGKTRMCTKYNTAEGCKFGDKCHFAHGERELGKPAYMSHESAMAPPMGGRYGGRPEPPPPAAMGPPAGNFGASATAKISVDASLAGGIIGKGGVNTKQICRVTGVKLSIRDHESDSNLKNIELEGNFDQIKQASNMVGELIATISPSTPAKKPAGSAAGAAPAGRGGPGGRSNYKTKLCENFVKGTCTFGDRCHFAHGENEQRKGAA

SEQ ID NO: 18646 - protein, 333 aa, Oryza sativa
  Clone ID: TF_OSC401329j.C1.p67.fg
MQEALVSPVRSALELKPFNFGDQRLASSPRYLPSGDDALYRCSSPFSPSFGFSSPSPLATSVSLSPSSSASLVDDGDDGGAAADATGQRLQLARLALQYQEVADRYELCLSHLAEAAEEAAALRLENAELRVTNSDLALRLALLSGKHTAAVAVADEIRRLRLGEQKVAAATKERTPEKLAVLPKSISVRSTSYLKLNQQSQAATATSAAPNRKPRTSSNPTNPPNSQRAYDGGKKGDEQKAQPADSGAELEVYNQGMFKTELCNKWEETGDCPYGDQCQFAHGVTELRPVIRHPRYKTAVCRMVLAGDVCPYGHRCHFRHSLTPAERLLLRS

SEQ ID NO: 18647 - protein, 374 aa, Oryza sativa
  Clone ID: TF_OSC401327j.C1.p1.fg
MEQPHAAAAAAGGGEGEGGASPDTGLEGPMWRMGLGGGGGGGGGGGGGDGDAAGRLPERPGEEDCVYYLRTGACGFGDRCRYNHPRDRGGTEFGGGARNAAALDYPERAGQPICEYYMKTGTCKFGTNCKYHHPKQDGAVLPVMLNNSGFPIRLGEKECSYYMKTGQCKFGTTCKFHHPEFGGVPMTPGIYPPLQSPSIASPHPYASLANWQMGRPPVVPGSYIPGSYTPMMLSSGMIPLQGWSPYPASVNPVVSGGAQQNVQAGPVYGMGHHGSSSTIAYGGPYVPYASSTGQSSNNQQEHGFPERPGQPDCQYYMRTGDCKFGATCKYHHPRELSAPKSGYMVNSLCLPLRPGAQPCAYYAQNGYCRYGVAC

SEQ ID NO: 18648 - protein, 1981 aa, Oryza sativa
  Clone ID: TF_OSC33100j.C1.p1.fg
MAARRCGSRRRRRRAAATRVGLISRLADTPCIKRGLESPSAWKSPWFVDMQFQGSYFVSPADRTYNALGFVKQINVQTAAALAEAREVLVSGGQSENINSGKENLESPNAKKEPGATTKLQAKIKIGKGLLPPLPMAATEHKPAGRKTAEKVEEKPSPPPLLLLLLGVCFLWGESPRKQARLKSAIVVPETRKLSVFNRLSKGEPGAPSSIWQEVKPRFWWRQGRAPLPATASRRPTTGVIPAWRPFNPATLGRCLRCLAQDHKIADCRDPPRCYICKRSGHISSGCPSKYKNKPSIFSCIYSTHPAPPSKQEIPNPLAFPPLTGHKAPVRERLGPKMDYIPGLPENHPACGYAVVVADAAMEHEAMRLYNHGAVIKARLPNYDVSAKEMAQALQQQVGTPNYDVRRCSKMSASSTNPNLLPRVSVFTLFPAGVGQVLETGGMPTPSQEVASAPLGRVRHLLIHLDMVEDWRPLPARSSNSSGSTDSDDPPRRRVHRFDWHLGYEDGVSPPPLQPPQPPLPVRRLHEERGRPEQRGIDLRNRLSQRGSPKAETTAGTAAAPPVAAIATSPAIGWVAPQPGAHPGRLLAAGALAGRARQARGVVRSRRVAVFAGALPKVVGATREGEDPMFLELAVAAAFHAEKSANASTLEAGASVPIGSAAPLGPVAPIGPVSPGPVAPLGPDGSAASPGLIASPGLGLLELVGEQMEGTATQPMQGGVEPFFAPLPPPLVATPPVRRRGRPRKKVLLPSRHSKRLEARPSPVLISMRAQVRIMKEMRVLKPGEPVGDEAVAEYIKRFQDPLPTVVVQGIRALTGLDSGKPLPPDVTEEADGATPEWCTSLGVTYGSRMIEGLKILNWNVRGLNNPARREAICEVANNADASILCIQETKLANIDQFLGREIGGSRLRRFEFLPADGVRGGVAIFWDDTKVQVDNTQIHTFSVSIRAQVIGGNVPFILTSVCGPSEDEHKSDFLAELESLVPQPLLPWVVLGDFNLICEASDKNNLNLDRRRMGQFRSTLNRCCLKEFKLQNRKFTWSNEQEAPTLERIDKVFCNIDGDILFSNHTLQALSSSCSDHCPLLLAFTVSPPKRVVFRFENFWVWVPGFMEVVQQAWSSHTFGGHPFTKLSHKLTATAKALRKWSRSLFGEIKMQFHVAQEVILRLDLAQEDRILTADEHQLRKDLKLRILGLAAVAKSKKRQRSRLTWLKEGDANTKFFHIHANSRRRKNHIHQLHTTSAILTEHEEKSEALFNHFNSILGNKEARNCTLNWNAIDLPQVNPDELDEPFTEEEVWAALKQMQAEKAPGPDGFNGGNFGVLNRAAITLLPKRNAPTLVTDFRPISLIHSVAKLISKVLAIRLARQMDGLISVAQSAFIKKRCIQDNFLYVRNMLRNLNASKKPTLFFKLDIARAFDSVSWEYLLELMQNMGFGPRWRNWICLLFSTATSKVVLNGDQGECIAHRRGLRQGDPISPYLFILAIDPLQRLLHLATEGGQLTNIGSRHARLRTSLYADDAAVFLNPVQSEVDVLITMLRDFGKATGLHVNLGKSLVAPIRCQEVDLDDVLCSFSGARASFPLTYLGLPLTPGRLRKVHFQPLQDKIKGRLSGWKPSLLYMGGRRIMVNSVLSAIPTYTLTVLKPPKQSLQEIDKARRRFLWAGNENMHGGKCKVNWLKVCSPVRTPEKPWIGTETPCDELDKDLFAASTRVQIGDGQKASFWESNWIGGQRLKSQAPNLYRHSKRKTRTVQDALQQGRWINDILHSLTIPLLDEFFHVWEILARNTPQLTEGVQDSIVWQWTTNGEYSAKSAYQFQFNGMVLLPSTKLSWEAWAPVKCKIFSWLVLQNRVWTADRLQIRGWPNNYFYQLCFRNLETIDHLLFECLVSKQIWFGILTWLHQGHIIPKWNTSRNLLDWWTQGTSDLEATKQKGLRTLFLLIAWEIWKERNARIFRAKEATVHQMISRIQEELGWWSMAGAKHIGRMLP

SEQ ID NO: 18649 - protein, 462 aa, Oryza sativa
  Clone ID: TF_OSC900317j.C1.p10.fg
MAPQPTCQTCVRNYLGSKEDPALSENPNQLAEQVTNQVAKTDNTVPGPNKEVATRNQHSSMDIYQILANQTQMLQEIAQNLASIQQQLLLPQPKVNPDKSKNEAAEIQGTQSVEGTDTHKEKNKEFLNVMITGMKTPLRANNCPNLQNSINKSVSRENSMIKEGSCHKRKTLPSEVDMQDVPQCQTMQSCQNLPKSPTLKSKKIRHVPGFICFICHKIGHYMRHCPQKPYMDAPLQANMSTSRMPFYPQGSPNSPNVNAVRSTFPDDKRAKASCDMCQDIQEKKEMQEYKRRKVMSLEIQAKEDLCRKTNSPAQYYQKASQHSTSSGSTSRSTMSEPGQQATMINSNSHEGSNSVPCPTPSKRRGYKAGVECFICHEMGHYSWCCPQKVKSKRVQPTTSLPNVSGPKSSKSPNSGSASLTSPPVGQGRLNHVQVETNGKVGNLEQVEGAGEEQVPQARAEPQ

SEQ ID NO: 18650 - protein, 276 aa, Oryza sativa
  unsure (1)..(276): unsure at all Xaa locations
  Clone ID: TF_OSC28031j.C1.p1.np
SIEDPTHIITWMEFTTTFRDAFIPTAVIRMKKNEFRRLRQGFMTVQEYLIKFTQLARYAASDIQDEKEKIERFIEGLRDELRGPMISQDHENFQSLVNKVVRLENDRRMVEGLPKRRMNLQXQSLTRGSLQVRRPYPFKASLPNARPGMPPILPRPGLKMEDSPCYVCGKIGHFARLCPNRQNMGGQTSYQKPSTTGFIKKNPPIIKSGHNLGRGQVHHIKAEEAQQDPNILMGMFTINSKPVTILFDSGASFLSICQSQLESLYLKDNLDKAVLI

SEQ ID NO: 18651 - protein, 673 aa, Oryza sativa
  Clone ID: TF_OSC28041j.C1.p3.fg
MPPILPRPGLKMEDSPCYVCGKIGHFARLCPNRQNMGGQTSYQKPSTTGFIKKNPPIIKSGHNLGRGQVHHIKAEEAQQDPNILMDIILGMDWLAKNNGLINCATREVILTDEQGMNTRIIVKSNLSMEQHMTDICMLKPKEEVPVVQEYFDVFPEELSSLPPDREIEFIIELLPGMAPISKRPYRMPINELEELKKQIAKLQEKGFIRPSSSAWGALVLFVKKKDGSLRMCVDYRALNEVAIKNKYPLPRIDDLFDQLKGASVFSKIDLRSAYHQLKIRQEAFGLTNAPAYFMNLMNKIFMEYLDQFVVVFIDDILIYSKNKEEHKQHLRMMDLNLRQRRWLELIKDYNLEILYHPGKANVVADALSRKANCNLQQEIISEQLQAEMLKLNLGIIKFEELNTLELKPTLMDQIKEHQKEHSEIQTFKERKVQGKAADITEDLEGIFWYGDRIVVPQSGNLRKVILKEAHDSAYSLHPGSTKMYHDLKDLYWWPNMKRHIAEYVALCHVCQQVKAEHQKPTGLLQPLQIPEWKWDEIGMDFITGLPKTSTGYDSIWVIIDRLTKTARFIPVKTTYTGAQVAELYMTRIKLHYELGSYLDFSTAFHPQIGGQTERLNHTLEDMLTACGLDFAASWDKCLPYAEFSYNNNYQASLKMSPHEALYGRKCRTPLIWT

SEQ ID NO: 18652 - protein, 392 aa, Oryza sativa
  Clone ID: TF_OSC32878j.C1.p1.fg
MDEVGRRWTFSRANEGYTSCGPMFNREKGKNVSGYAPSNSSFQLNPPLASRELTRAHPWSIPSTLLSSQLPLVGSQDQNQYVFDRAFATQVNELPMPGEDVPFCHDCREQGHYALNCPWVYAKEAPSFGLTGQASLNQPPHTKSSLQPSVQSRELNGENPLNPGKCFPPSLSYHVGSHTKQAKGKKSKNQKRKAPMRTEEEVRKMTITSTEWPPAGITIPRRQKGNTFRGARQLTQHLLSHGGRVSDSEGSDQVSSDDEDESPRHLGEEEMESKACTRCGEIGHIASMCLTLCAYCEEDHPPGECPTRKVICFLCEGTNHVPKDCQLSVLLTKTAEIQRTTLRLSHQLVSSNSNIDDIIHNTNAPLAAPDSAVNHSDNTFSTNHSRHRQPQQ

SEQ ID NO: 18653 - protein, 1615 aa, Oryza sativa
  Clone ID: TF_OSC400152j.C1.p9.fg
MPYVTSEAQARALLQVGGWPVGTLVHVVIVDAACRARRLDHTLRAMVARRGWVVVNRHAVLRVIRVSDLVHNILDITLPRLLDDAYDATQLTHFRRQAAALRTMAGVIGGNFRNRAYVVVRKIRFVASSARNHSMAAARLQQRLLDIRRRLSGLVEAPDMNLQRLCADCSYLINQIAGELLALLADAAFETVSIPFRFIFAKVIGDCSLVAKQRAFIIHAACALDKAMMVRLCEKSGNFYCTELGRIANHFYLQYSSVETYNEMLWHHMNESKIRRPRVRSEFLASFPVLVSPSPRLSCSRFSASDLLRAREIGRSSASETTPSPEMGDQVFGGVPPARLLIAMSGVAAAAIGGGGAPPPTGAGAPGGGAVNDYNNGGNSASPSSGGPFSGYNLLLLLLLALLLFPLLALYCVRYVLVPVLHDAFSMLSHYWYVPDSDIHDALSMLLVMLRSPYTAYAMIIVSISWIKICRIMTIFPTIQKPDRSFSVVGFAAALKPHAFDGSNYKRWKARALLWLTAMQCFYVSRGKRSEPPLSPEEEAKFEASDCLFRGALISVLADNIVDVYMHMPSGKDMWDALEAKFGFYDYKMVDDRSVVEQAHEIQMLAKELENNNCELPDKFVAGGIIAKLPPSWSDFATSLKHKRQEFSVPDLIGSLGVEEKARAKDIRGKKVEGGSSANMVQKKNPHASHNNKKVKPDVKPKAATNFKKKGKGKAKGDCFVCGKSGHWAKDCLERKDRKSANMIISEGGGTSGYGRERFLLVDGKRVACGCSWCCSKCHTCVQSKQPRKPHKASEARNLAPLELVHSDLCEMNGVLTKGGKKYFMTLIDDCTRFCYVYLLKTKDEALHYFKIYKAEVENQLERKIKRLRSDRGGEYFSNEFASFCEEFGIIHEMTPPYSPQSNGVAERKNRTLTEMVNAMLDTAGLSKEWWGEAVLTACHVLNKIPMKHKEVTPFEEWERKKLNLSYLRTWGCLAKVNVPIVKKRKLGPKTVDCVFLGYAIHSVGYRFLIVNSGVPDMHAGTIFESRDATFFENEFSMKYTPSTSSKETVMPHEHFAPIEHNDETPEENPEEDNIVDTRKSKRQRVAKSFGDDYIVYLVDDTPRTIEEAYSSPDADYWKEAVRSEMDSIMSNGTWEVVERPYGCKPVGCKWVFKKKLRPDGTIEKYKARLVAKGYTQKEGEDFFDTYSPVARLTTIRVLLALAASHGLLVHQMDVKTAFLNGELEEEIYMDQPDGYVLEGQEEMVCKLLKSLYGLKQAPKQWHEKFDITLTSAGFVVNEADKCVYYRYGGGEGVILCLYVDDILIFGTSLNVIEEVKDYLSKNFEMKDLGEADVILNIKLQRGDEGGITLVQSHYVDKVLSRFGYSDCKPAPTPYDPSVLLRKNRRIARDQLRYSQIIGSLMYLASATRPDISFAVSKLSRFVSNPGDDHWQALERVMRYLKGTMSYGIHYTGYPKVLEGYSDSNWISDADEIKATSGYAFTLGGGAVSWKSCKQTILTRSTMEAELTALDTATVEAEWLRELLMDLPVVEKPVPAILMNCDNQTVIIKVNSSKDNMKSSRHIKRRLKSVRKQKNSGVIALDYVQTARNLADQFTKGLPRNVIDSASREMGLIPT

SEQ ID NO: 18654 - protein, 1782 aa, Oryza sativa
  unsure (1)..(1782): unsure at all Xaa locations
  Clone ID: TF_OSC401418j.C1.p2.np
MSDLGGKNGENGNEDGASSKETPSPKGATIPFDYSKLTIPPHNFVSVPSGRAPQFDGTHYAAWKHKMKLHLISLHPSIWKVVCIGVDVPNDDMELTSEQEQLIHRNAQASNAILSALSLEEFNKVDGLEEAKEIWDTLQLAQEGSPTVREAKIELLEGRLGRFVMDDKETPQEMYDRMMILVNKIKGLGSGDMTNHFVVKRLLRAFGPRNPTLVSMIRERKDFNRLTPSDILGRIVSHEMQEEEAREVRQMVKNAAMIKNQEVALKAKQEEMAFIVKRFKHFLRKSGYGKRRALKAKQEEMAFIVKRFKHFLRKSGYGKRRKDDDKGKRQSKRACFNCGEYGHFIADCSKSNEAKAKGGKKKPERAHVAEAHMAEVWYSGDEEDPEVKPKPKLKDKVEGEGGVATVAFKSSSSSKERLFNNLSDDDDDSYHYSCFMAQGRKVMTQKPSHTSLDVDSSDEESDNELDDVLKSFSKPAMQHLAKLMRALDSKVQSLERQEELLILEKKRNLALEESLAKECAKNEQLANELNLANGSLASLRDVNETLQEKFASLDKSHKDLEVQFDTLWNSTSQPNVVSNSSNPSTSNGCARCYNIDLNSHATNVDAMQALKKENERLGTLVKYGCMKTYHSKDALYKTITAHPNKDGHGLGFSSGSPVSKRVMVNGKECLMFVREGNAPQASEMTCPLTGQTPGTSGQNDRKFSCKTGSSGHFVRKFWASDRPKGLAGSSGYNARKFRPEGLYYDSYAYSSGGSSWVVDSGCTNHMTGEMSMFISLDEEGGSRENIVFGDDGKGKVMGLAYISIGGNKYGFVIVDDFSRFTWVYFLHDKSEAQDVFKRFAKQAQNLYDLTIKRVRSDNGGEFKNTQVEEFLDEEGIKHEFSAPYDPPQNGIVERKNRTLIEAARAMLDEYKTSDVFWAEAVSTACHAINRLYLHKILKKTSYELLSGKKPNVSYFRVFGSKCFILSKRPRSSKFSPEVDEGFLLGYESNAHAYRVFNKTSGIVEVTRDVTFDESNGSQGEQVVVHVVGDVDPSQAIGTKAIGDIRPVETQDDQEDRDQPPSSTSNSPTSAVSAEPEVPGPIDRNLRTSPGPEVPGSTVRNLQTSGSEDVSTAQVDGIDVEGTLEHSDQAQVPPVHHLRIHHTVQRDHPVDNILGDIRKGVTTRSRVASFCQHFSFVSSLEPTRVEDALGDPDWVMAIQEELNNFARNQVWTLVERPKQNAIGTKWIFRNKQDEHGVVVRNKAWLVAQGFIQVEGLDFGETFAPITRLESIRILLAYAAHHDFRLFQMDVKSAFLNGPISELVYVEQPPGLKDPKLPNHVYKLHKALYGLKQAPKAWYECLRDFLLKNSFEIGKADTTLFTKKFKSDLFICQIYVDVIIFGSTNVSFCEESSIMTKRFEMSMMGELTFFLGLQVKQAQEGTFISQTKYVKDILKKFGMEGAKPIKTPMPTNGHLDLDDNGKCVDQKGCDFKLLGYSDSDYAGCKVDRKSTTGTCQFLGRSLVSWSSKKQNSIALSTAEAEYVAAGSCCAQLLWMKQTLKDFGYNFTKIPLLCDNESAIKIAINPVQHSRTKHIDIRHHFLRDHETKGDICLTHKRQKLSQDVPGDSSPPVRGPRGRLGKEKVGDFYNGSQILIHSRRAGSIVIRDAPRSPSPAASESDDGGNEDEPGSESNPLRLYKTRAVDPDPKRPRVNYLKNLLKCGKDMIMGRSHPIMGRSHPVVEMKWLDWQYMSSKNNIVFNEVRKVCERKHVADLLALQYSXNEEVIGXFYSTAFFGTTRKGLISD

SEQ ID NO: 18655 - protein, 855 aa, Oryza sativa
  Clone ID: TF_OSC417975j.C1.p4.fg
MEALVGKYTPCLAKGRQAVGIHLAFGDAFIPTAVIRMKKNEFRRLRQGFMTVQEYLNKFTQLARYAASDIQDEKEKIERFIEGLRDELRGPMISQDHKNFQSLVNKVVRLENDRRMVEGLRKRRMNLQRQSPTRSSLQVRRPYPFKPFLPNARPGMPPILPRPGLKMEDSPCYVCGKIGHFARLCPNRQNMGGQTSYQKPSTTGFIKKNPPIIKSGPNLGRGQVHHIKAEEAQQDPNILMGASHSFLSAKASWNQSLPKDNLDKAMLIHSPGGTILVSSICRNVPIKLGDQIFLIDLMVLPTQTIDITLGMDWLAKNNGLINCATREVILTDEQGINTRIIVKPNLSMEHYMTDICMLIPKEEVPVVQEYLDIFPEELSSLPPDQEIEFIIELLPGTAPISKRPYRMPINELEELRKQIAELQEKGASIFSKIDLRSGYHQLKIRQEDIPKTAFVTRYGLYEFTVMAFGLTNAPAYFMNLMNKIFMDYLDQFVVVFIDDILIYSKNEEEHKQHLRLVLEKLRQHQLYAKFSKCEFWLDQVAFLGHIITKEGVVVDPEKIKVVMEWRTQTSVPEIRSFLGLAGYYRRFIKDFSAIAKPMTRLLKKDRKFEWTPECQSSFQRLKHKLTTTPVLILPDIQKDFEIYCDASRQGLGCVLMQEGKVVAYASRQLRPHEDNYPTHDLELAAVVHALKIWRHYLIGNHCKIYTDHKSLKYIFTQTDLNLRQRRWLELIKDYNLEILYHPGKANVVADALSRKAYCNLQQEIILEQLQAKMLKLNLGIIKFGELNTLELKPTLMDQIKEHQKEDSKIQTFKERKVQGKAAYITEDMEEILWYGNLNHRTTIRKLKEDNTKGST

SEQ ID NO: 18656 - protein, 937 aa, Oryza sativa
  Clone ID: TF_OSC101063j.C1.p15.gm
MSGQAGDGIDGDKGAKIPYDYPPTSTSYNPEDPTKEDDENEHKNAQAANAILSALSGSEFNRVDGIESAKVIWDTLRNLHEGTDSVRESKVEILKGQFERFVMLDGESPSDMYDQLSKIVNEIKGLGSKDMTNDVVVKMMVRAITPRNSTLVIIIRERPDYKTLTPRDFLGRILAHDMLVQESKDVIQYINQSSTASIKKEDLALKAKEEEEENRKSKSKAEIDDEEMALFVKKFGKFMRRSGFFKGGSSKHYSNKSSGRHSARVCYVCKEPGHFIADCPHLKDGSHIKEDKKKGEKKDEKKEKHKHRKREHYGQAHLVMIFGSDSESSSSDEEGVVAFAVKPSSPPRLFDNSSDEDAPICLMAKEPKVPSPLKSFNVDLVSDEEDEAKSILTNDYASHGSFDASYVLRKNASGYVVAKYVGLRGKNISIKREYVSGGRSWVIDSGCPNHMTREESMFSTLDPNGTSQDNIVFGDDEKGKVMGLGKIAISDLSMANVLFGCSQGRALPCGFFLNACQAGKQIGAHHPVKNVMTTTRPLELLHMDLFGPIAYLSIGGNKYGLVIVDDFSRFTDNGKEFKNTCIESFHDEEGIKHEFSAPYSPQQNGVAERKNRTLIEMAKIMLDEYKTSDRFWAEAVNTACHAINRLYLHRLLKKTPYELLTVNEGFLLGYGSNECTYRVFNKTSSIVEIARDGATTRSLFLNTSRTTYINPSRRSLYLKLESRVEEALNDPDWVMAMQEELNNFTWNEVWTLVERPRQNVIGTKWIFRNKQDEAGVVIRNKVRPINELVYVEQSPGFEDPKYPNHVSKLHKALYGLKQAPRACRMMTKRFEMSMMGELKFFLGLQIKQLKEGTFICQIKYLKDMLKKFGMENAKPIHTPMPSNGHLDLNEQGKDVDQKGARFDLIGYADADYAGFVSTCIISGSSLHHLLLLEVEDS

SEQ ID NO: 18657 - protein, 372 aa, Oryza sativa
  Clone ID: TF_OSC101552j.C1.p1.fg
MKCFWVSTGKPEGILTADQQKQFEEATTLFVGCILSVLGERLVEVYMHMTDAKELWDALNTKFVATNASNDLYIMEQFHDYRIADNRSIVEQAHEIQTIAKELELLKCVLPDKFVAGCIIAKLPPSSRSFGTALKHKRQEYSVEGLVASLNGEEKARKKTPRLRAMNKSKGKYKAQQNTNFKKQKKNNNNPNQDERTCFVCGQPGHLARKYPQRKGMKAPAGQTSKSANVTIGNTGDGSGYSNLPTVFSVNQSTNWWVDTAANVARSSTVLMGNGSHASVHGVGTVDLKFTLGKIVQLKNVQHVPSIDRNLVSGSRLTRDGFKLVFESNKVVVSKHGYFIGKGYECGGLFRFSLSDFCNKSVNHICGSVDDD

SEQ ID NO: 18658 - protein, 1735 aa, Oryza sativa
  Clone ID: TF_OSC102249j.C1.p19.fg
MSGQAGDGNDGDKGAKIPYDYPSTSTSYVSTYSGKAPYFNGTDYAAWKHKMKMHLKSINPSIWRIVKKGYVLQNPEDPTKEDDENEHKNAQAANAILSALSGSEFNRVDGIESAKVIWDTLRNLHEGTDSVRESKVEILKGQFERSVMLDGESPSDMYDRLSKIINEIKGLGSKDMTDEVVVKKMTLTPHDLLGCILALDMLVQESKDVIQYINQSSTASIKKEDLALKAKEEEEENRKSKSKAEIDDEEMAPFVKKFGKFMRRSGFFKGGSSKHYSNKSSGRHSARVCYVCKEPGHFIADCPHLKDGSHIKEDKKKDEKKEKHKHSKREHYGQAHLGMIFGSDSESSSSDEEGVATFAVKPSSPPRLFDYSSDEDAPVCLMAKEPKVPSLLKSFNVDLVSDEEDEVEDEVIDDELFKSITKESLPHLSELLERIEDQYATLERQETLLIREKERSHELKSELAKEREKNEALEYVSGGRSWVIDSGCTNHMTREESMFSTLDPNGTSQDNIVFGDDGKGKVMGLGKIAISNDLSIANILLVKSLNYNLLSVSQLCSMGYNCLFTDVDVTVYRRNDSSVVFKGVLKGKLYLVDFSSSKAKHETCLVAKSNTGWLWHQRLAHVGMRNLHKLLKHDHILGLTNVQFEKDRVCSACQAGKQIGAHHPVKNVMTTTRPLVLLHMDLFGPIAYLSIGGNKYGLVIVDDFSRFTWVFFLHDKSETQAIFKKFARRAQNEFDLKIKNIRSDNSKEFKNTCIESFLDEEGIKHEFSAAYSPQQNGVAERKNRTLNEMARTMLDEYKTSDNFWAEAVNTACHTINCLYLHRLLKKTPYELLTGNKPNVSYFRVFGSKCYILNKKARSSKFAPKVDEGFLLGYGSNECAYRVFNKTSSIVEIARDVTFDKINGSQVSERSNQKIGSWGREEGEQVPPSPINLARPRIHQSIQRDHPTDNILGDINKGVSTRSRIANFCEHYSFVSSLEPLRVEEALNDPDWVIAMQEELNNFTRNEVWTLVERPRQNVIGTKWIFCNKQDEAGVVIRNKARLVAQGFTQIEGLDFGQTFAPVARLESIRILLAFATNLNFKLYQMDVKSAFLNGPINELVYVEQPPGFEDPKYPNHVYKLHKALYGLKQAPRAWYECLRNFLVKRGFKIGKADSTLFTKRHNNDIFVCQIYVDDIIFGSTNKSFSEEFSRMMTKRFEMSMMGELKFFLGLQIKQLKEGTFICQSKYLKNMLKKFGMENAKPIHTPMPSNGHLDLNEQGKDVDQKVYRSIIGSLLYLCASKPDIILSVCMCARFQVALKECHLVAVKRILRYLVHTPNLGLWYPKGARFDLIGYADEDYAGCKVDKKSTLGTCQFLGRSLVSWSSKKQNSVALSTAEAEYVSINWEELQAHNDPVIDSMIANCDLMGIRSFMTLQQNWCNEVIAQFYATVYFDRYRAMHCMTQGSWYSVSYQQLAEIWGFRLRSLLNLDDLHNLQIPANTELLPLYTPNDPNVVLGKVDGLKPYFAYLNRMFRRSFVSMDSDANSINHLSRTVLLRFDPPPHRFHVYHFVWEEIRMASIQYKKGLVYALHIMRMIETVTQLQFRHDVTHSQLHLRLLKAPRSSAAWDIPSSSTLPPPAPERPASVARREPSPLFHNLRSLFGLCSTEAKKNRRLRNSAKKTARDVKFLKARYYEDHHIDIPPSPPGFEAEPDEPQDEAIEDPFAGLPYDFDFFGYGHGYGYPPPPPPEDPSQAPFA

SEQ ID NO: 18659 - protein, 124 aa, Oryza sativa
  Clone ID: TF_OSC11196j.C1.p1.fg
MDNRKRGRIVFQEAQGQEQSQQLGISGEINSETNASNEDNDEQATQSVSFQQDQSQEDNSNGREQRVCFNCYEPGHFVKECPKPKRQQPQGQVNNLVLTEANAVPVASQGIQLSHQFQSGISFL

SEQ ID NO: 18660 - protein, 1069 aa, Oryza sativa
  Clone ID: TF_OSC22995j.C1.p3.fg
MAQFNELRRNMEARQDRMAQDVQNILGHFENINPFGGDASVHSGEDEEDDNDDLPYRFGRIPRRRNNDEERLGKLKFTIPKFDGGSDLEAYLMWELKVDKIFHIHNYSEEKKLAMASLEFEDYALIWSRDIQCFKCGGRGHVVRECPNNRAIIVIEHGEFDSASEDAENGQRNNLFQTRAKVGGKVCKVIVDGGSCHNLASKDMCDKLGLKLLRHPHPYHVQWLNDSGDIKIGHRVKVSFKIGEYEDEVLCDVVPMTVCHLLLGRPWQFDRSSRHCGRTNQFSIKWKGRNFVLKPMTPQQIMAEHMQKSSEVRIESEKEREQNKFSDIHKSVSKSHKPNMSDKKKREGENFVMLATKSEMRDEYEDVFPMETPAGLPPLRGIEHQIDLIPGAALPNRAPYRTNPQETNEIQRQVQELLDKGYVRESLSPCVVPVILVPKKDGSWRMCVDCRALNNITVRYRHPIPRIDDMLDELSGSMIFSKIDLRSGYHQIRMKIGDEWKAVFKTKFGLYEWLVMPFGLTSEPSTFMRLMNHVLRTFIGKFVVVYFDDILIYSKSLSEHASHIKQVLDVLRKEKLFANIEKCTFCTEKVVFLGFVISGQGVEVDESKVEAIKDWPTPVNVSQVRTFHGLAGFYRRFVKDFSTIAAPLNELTKKGIEFHWGESQKDAFQKLKRCLTEAPLLVWPDFTKTFEIECDANGIGIGAVLMQDKKHVAYFSEKLGGAQLNYSVSDKELYVLVRVLETWQHYLWPKEFVIHSDHEALKYLKGQAKLNRRQAKWVEFIETFPYVVKYKKDGQTEVVNRTLSTLLRMMIKKNLKEWEDCLPLVEFAYNRAERTNMDASKRAAYVKKIHEKTKEEIEKKARSNTAKVNKHRKKVVYETGDLVWVHLQFRTTPFQEGEDDVPQPLSHDDEHIPATPDVNKGDVNNGDGSHHKSHEENEDDVNHVDGLCLNKNDQAYHGPITRSRARKIQQEVNSLFAQLNPNFCENFILPKCSTFLLLRFTPEEIITTPRRMGYIEDDKGYVEDDKGYDEEEPAHPKPVAVYANKKMVYSAKDSTSKACVTQPVNFLHA

SEQ ID NO: 18661 - protein, 82 aa, Oryza sativa
  Clone ID: TF_OSC25748j.C1.p1.hg
QATQSVSFQQDQSQEDNSNGREHRVCFNCYEPGHFVKECPKPKRQQPQGQVNNIVLTGANAVPVASQGIQLSHQFQSSSSFL

SEQ ID NO: 18662 - protein, 117 aa, Oryza sativa
  Clone ID: TF_OSC28706j.C1.p5.gm
MPQGGSSSVVRPQRQFFNNNTGNNIRNQAPRPVAAPTQQQPAKREQGSKPVVCFNCGDPGHYADKCPRPRRVKVVPTQSNSTVPASKARVNHVAAAEAQDAPDVISGQSYPARIQRP

SEQ ID NO: 18663 - protein, 256 aa, Oryza sativa
  Clone ID: TF_OSC28815j.C1.p1.fg
MNRAERQPITWEEFTEGFKKTHVPVGVVALKKREFRALKQKDRTVAEYLHEFNRLARYAPEDVRTDEERQEKFLEGPKDELSVMLISHDYEDFQELVDKAIRLEDKKNKMDNRKRKMTVSQEAQGSSQRQRIKPLQIGESFSAGQEQSQQQSQQLGISGEINSETNASNEDNDEQATQSVSFQQDQSQEDNSNGREHRVCFNCYEPGHFVKECPKPKRQQPQGQVNNIVLTGANAVPVASQGIQLSHQFQSSSSFL

SEQ ID NO: 18664 - protein, 1991 aa, Oryza sativa
  Clone ID: TF_OSC400269j.C1.p2.fg
MSGQAGDGNDGGKGANIPYDYPSTSISYNPEDPTKEDDENKHKNAQAANAILSALSGSTDSVRESKMEILKGQFERFVMLDGESPSDMYDRLSKIVNEIKGLGSKDMTDEVVVKKMVRAITPRNFTLVTIIRERPDYKTLTPHDLLGRILAHDMLVQESKDVIQYINQSSTASIKKEDLALKAKEEEEENRKSKSKAEIDDEEMALFVKKFGKFMRRSGFFKGGSSKHYSNKSSGRHSARVCYVCKEPGHFIADCPHLKDGSHIKEDKKKDEKKEKHKHSKSEHYGQAHLGMIFGSDSKSSSSDEEGVATFAVKPSSPPRLFNYSSDENAKVPSPLKSFNVDLVSDEEDEVEDEVMDDELFKSITKESLPHLSELLGRIEDQYVTLERQETLLIHEKERSHELKSELAKEREKNEALVRLYKQTKESHANLEVANAQLQERVDGLDKAYLTLEEKFKTLKNSVSLPSEPSCSKIVPSNEPCVRCKDIDIEACATNSISLSALQKQNEKLMGLLHNGLLKCHMDSKALKEYLGYQRDNFYHQGLGYVPPPKEKVDKSVLIRRPQGLSNFVKAKSILPNDYASHCSFDASYVLRKNASCRVVAKYVGPRGKNISIKRVLWVPKTLVTNMRGPKQGKVMGLGKIAISNDLSIANVLLVKSLNYNLLSVSQLCSMGYNCLFTDVDVTVYRRNDSSVVFKDVLKGKLYLVDFSSSKAKHETCLVAKSNTGWLWHRRLAHVGMRNLHKLLKHDHILGQTNVQFEKDRVCSAYQAGKQIGAHHPVKNVMTTTRPLELLHMDLFGPIAYLSIGGNKYGLVIVDDFSRFTWVFFLHDKSETQAIFKKFARRAQNEFDLKIKNIRSDNGKEFKNTKCYILNKKARSSKFAPKVDEGFLLGYGSNECAYRVFNKTSGIVEIARDVTFEETNGSQVEQVDSHVLGEEEDPSEAIKRLALGDVRPREPQQGVSSSTQVEPPTSTQANDPSISSLDQGEEGEQVPPSPINLARPRIHQSIQRDHPTDNILGDINKGVSTRSRIANFCEHYSFVSSLEPLRVEEALNDPDWVMAMQEELNNFTQNEVWNLVERARQNVIGTKWIFRNKQDEAGVVIRNKARLVAQGFTQIEGLDFGETFAPVARLESIRILLAFVTNLNFKLYQMDVKSTFLNGPMNELVYVEQPPGFEDPKYPNRVYKLHKALYGLKQAPRACEEFSRMMTKRFEMSMMGELKFFLVLQIKQLKEGTFICQTKYLKDMLKKFGMENAKPIHTPMPSNGHLDFNEQGKDVDQKVYRSIIGSLLYLCASRPDIMLSVCMCARFQAAPKECHLVAMKRILRYLVHTPNLGLWYPKGARFDLIGYANVDYAGCKVDRKSTSGTCQFLGRSLVSWSSKKQNSVVLSTTEAEYVSAGSCCAQLLWMKQTLRDYGLNVSKIPLLCDNESAIKIANNPIQHSRTKHIDIRHHFLRDHSIRGDIDIQHVRTDKQLADIFTKPLDEARMPPRKQTSHKSKRPRDRSPTPSSHDDSDSDWSGGEDAVPQVAWVARRSTQAHGGGGDGEGSSRQPQTPPHQPNVPIGPLRIHTPERDPAVIHQVYDWWRKSEVVAPRRDEDLRSFRRTATDLRFWTLFQQDFYESVIKSKTHPTVPMQWINWEELQAHNDPVIDSVIANCDLMGIRSFMTLQQNWCNEVIAQFYATVYFDRYRAMHWMTQGSWYSVSYQQLAEIWGFRLRSLLNLDDLHNLQILANTELLPLYTPNDPNVVLGKVDGLKPYFAYLNRMFRRSFVPKDGDASSINHLSRTVLLRFDPPPHRFHVYHFVWEEIRMASIQYKKGLVYAPHIMWMIETVTQLQFRHDVTHSQLQLRLLKAPRSSAARDIPSSSTQPPPAPERPASVARREPSPLFRILRSLFGLCSTEAKKNHRLRNSAKKTARDVKFLKARYYEDHHIDIPPSPPGFEAEPDEPEDEEIEDPFAGLPSDFDFFGYGHGYGYPPPRPSLESSSHRPLFLVS

SEQ ID NO: 18665 - protein, 1708 aa, Oryza sativa
  Clone ID: TF_OSC400615j.C1.p3.np
MSNEVNHVGKAPMFNGTNYSTWKIKMSTHLKAMSFHIWSIVDVGFAITGTPLTEIDHRNLQLNAQAMNALFNSLSQEEFDRVSNLETAYEIWNKLAEIHEGTSEYKDAKLHFLKIQYETFSMLPHESVNDMYGRLNVIVNDLKGLGANYTDLEVAQKMLRALPEKYETLVTMLINSDMSRMTPASLLGKINTNDMYKLKKKEMEEASPSKKCIALQAEVEDKGKGKVNEVNENLEEEIALLARRFNDFLGRRKERGKGSNSNRRRNRRPNKTLSNLRCFECGEKGYFASKCPSKDDDGDKSSKKKSGGYKLMKKLKKEGKKIEAFIGEWDSNEESSASSGSEEEDSDNASSKKKKMAVVAIKEAPSLFAPLCLMAKGSSKVTSLSDSESDDDCDDVSYDELVSMFEELHAYSEKEIVKFKALKKDHAFLEVLYEELKTSHERLTISHEKLKEAHDNLLSTTQHGALIDVGISCDLLDDSTTCHIAHVASSSISTSCDDLVDMSSSSSSSCVSICDASLVVENNELKEQVAKLNKSLERCFKGKNTLDKILSEQRCILNKEGLGFIPKKGKKPSHRATRFVKSNGKYCSKCREVGHLVNDCPGGKPPKTCMFDSHYMLRKAHDGSIVARYVGSPILGGKKNTIWVPKALVSNLQGPKQVWIILTILVFFLHDKSIVAELFKKFAKRAQNEFSCTLVKIRSDNGSEFKNSNIEDYCDDLGIKHELSATYSPQQNGVVERKNRTLIEMARTMLDEYGVSDSFWAEAINIACHATNRLYLYRLLKKTSYELIVGRKPNVAYFRVFGCKCYIYRKGVRLTKFESRCDEGFLLGYASNSKAYRVYNKNKGDEGLMRAMKDEGLMRAMKNMSIGDVKPIEVEDKPSTSTQDEPSTSASPSQAQVEVEEEKAQDPPIPPRIHTALSKDHPIDQVLGDISKGVQTRSRVASICEHYSFVSCLEPKHVDEALCDPDWMNAMHEELNNFARNKVWTLVERPRDHNVIGTKWIFRNKQDENGLVVRNKARLVAQGFTQVEGLDFGETFAPVARLEAIRILLAFASYFDIKLFQMDVKSAFLNGEIAELVFVEQPPGFEDPENPNHVYKLSKALYGLKQAPRAWYERLRDFLLSKDFKIGKVDTTLFTKIIGDDFFVCQIYVDDIIFGSTNEVFCKEFGDMMSREFEMSMIGELSFFLGLQIKQLKDGTFVSQTKYIKDLLKRFGLEDAKPIKTPMATNGHLDLDEGGKPVDLKLYRSMIGSLLYLTASRPDIMFSVCMCARFQAAPKECHLVAYPKGYPKGAKFKLVGYSDSDYAGCKVDRKSTSGSCQMLAPPHTRHGRREPTPDPVSKNEESSGDEYVQSDEDNMENVEGNELDVSDDGDDNGSGNSEDDEASDDGSPLDSTIQFVLNLRNAQQYTILHHHDQFRRPNDCNDPRFHTRFQKSVYEQVYANKAFAEHKWISWRHIGETPEFENLQEMFRTVGIDRIVTMKQPFDEDLIRQFYATVWVSGDCDAMKWMSGTLRCSINRREFKELLHIRFNNGDDLHDEHTHNPFPIDHFSQFYEEGGGYTYGKVAGLRALPSVINRRVRATILPRCGNNDDIRGVAWHVIDAIMDGRRFDVINLMMKEIAISKGTIGQGIYYAPYIMRLPPPRRLVEKLPGDLSEKIVEEARCQFVSGLEFTTFGVKEELPVIKAWVVLSVGRLPPCPPLDEGGVRRLRG

SEQ ID NO: 18666 - protein, 842 aa, Oryza sativa
  Clone ID: TF_OSC400752j.C1.p2.gm
MSGQAGDGIDGDKGAKIPYDYPPTSTSYNPEDPTKEDDENEHKNAQAANAILSALSGSEFNRVDGIESAKVIWDTLRNLHEGTDSVRESKVEILKGQFERFVMLDGESPSDMYDQLSKIVNEIKGLGSKDMTNDVVVKMMVRAITPRNSTLVIIIRERPDYKTLTPRDFLGRILAHDMLVQESKDVIQYINQSSTASIKKEDLALKAKEEEEENRKSKSKAEIDDEEMALFVKKFGKFMRRSGFFKGGSSKHYSNKSSGRHSARVCYVCKEPGHFIADCPHLKDGSHIKEDKKKGEKKDEKKEKHKHRKREHYGQAHLVMIFGSDSESSSSDEEGVVAFAVKPSSPPRLFDNSSDEDAPICLMAKEPKVPSPLKSFNVDLVSDEEDEAKSILTNDYASHGSFDASYVLRKNASGYVVANACQAGKQIGAHHPVKNVMTTTRPLELLHMDLFGPIAYLSIGGNKYGLVIVDDFSRFTDNGKEFKNTCIESFHDEEGIKHEFSAPYSPQQNGVAERKNRTLIEMAKIMLDEYKTSDRFWAEAVNTACHAINRLYLHRLLKKTPYELLTVNEGFLLGYGSNECTYRVFNKTSSIVEIARDGATTRSLFLNTSRTTYINPSRRSLYLKLESRVEEALNDPDWVMAMQEELNNFTWNEVWTLVERPRQNVIGTKWIFRNKQDEAGVVIRNKVRPINELVYVEQSPGFEDPKYPNHVSKLHKALYGLKQAPRACRMMTKRFEMSMMGELKFFLGLQIKQLKEGTFICQIKYLKDMLKKFGMENAKPIHTPMPSNGHLDLNEQGKDVDQKGARFDLIGYADADYAGFVSTCIISGSSLHHLLLLEVEDS

SEQ ID NO: 18667 - protein, 252 aa, Oryza sativa
  Clone ID: TF_OSC400773j.C1.p55.fg
MNRAEGQPITWEEFIEGFKKTHIPAGVVALKKREFRALKQKDRTVTEYLHEFNRLARYALEDVRTDEERQEKFLEGLKDELSVMLISHDYEDFQELVDKAIRLEDKKNRMDNRKRKMIVFQEAQDSSQRQRIKPLQIGESFSAGQEQSQQLGISGEINSETNASNEDNDEQATQSVSFQQDQSQEDNSNGREHRVCFNCYEPGHFVKECPKPKRQQPQGQVNNIVLTGANAVPVASQGIQLSHQFQSSSSFL

SEQ ID NO: 18668 - protein, 1715 aa, Oryza sativa
  Clone ID: TF_OSC400988j.C1.p4.fg
MSGQTGEGKHGDKGATFPYDYPPTSTSYVSTYSGKAPYFNGTDYAAWKHNMKMHLKSINPSIWRIVEKGYVLQNPENPTKEDDENEHKNAQAANAILSALSGSEFNRVDGIESAKVIWDTLRNLHEGTDSVRESKVEILKGQFERFVMLDGESPSDMYDRLSKIVNEIKGLGSKGMTDEVVVKKMVRAITPRNSTLVTIIRERPDFKTLTPHICSDSKDVIQYINQSSTTNIKKEDLALKAKEEEEENRKSKSKAEIDDEEMALFVKKFGKFMRRSGFFKGGSSKHYSIKSSGRHSARVCYVCKEPGHFIADCPHLKDGSHIKEDKKKGEKKDEKKEKHKHSKREHYGQAHLGMIFGSDSESSSSDEEGVATFAVKPSSPPRLFDYSSDEDAPICLMAKEPKEYVSGGRSWVIDSGCTNHMTGEESMFSSLDPNGSSQDNIDFEDDGKGKVIGLGKIAISNDLSIANVLLVKSLNYNLLSVSQLCSMGYNCLFTDVDVTVYRRNDSSIVFKGVLKGKLYLVDFSSSKAKHETCLVAKSNTGWLWHRRLAHVGMRNLHKLLKHDHILGLTNVQFEKDNVCSAYQAGKQIGAHHPVKNVMTTTRPLELLHIDLFGPIAYLSIGGNKYGLVIVDDFSRFTWVFFLHDKSETQAIFKKFARRAQNEFDLKIKNIRSDNGKEFKNTCIESFLDEEGIKHKFSAPYSPQQNGVTKRKNRTLIEMARTMLDEYKTSDRFWAEAKTPYELLTGNKPNVSYFRVFGSKCYILNKKARSSKFAPKVDEGFLLGYGSNECAYRVFNKTSGIVEIARDVTFDETNGSQVEQVDSHVLGEEEDPSEAIKTLALGDVRPREPQQGASSSTQVEPLTSTQADDPSISSLDQGEEGEQVPPSPIILARPRIHQSIQRDHPTDNILGDINKGVSTRSRIANFCEHYSFVSSLEPLRVEEALNDPDWVMAMQEELNNFTRQNVIGTKWIFRNKQDEAGVVIRNKARLVAQGFTQIEGLDFGETFAPVARLESIRILLAFATNLNFKLYQMDVKSAFLNGPINELVYVEQPPGFEDPKYPNHVYKLHKALYGLKQAPRAWYECLRNFLVKNGFEIGKADSTLFTKRHDNNIFVCQIYVDDIIFGSTNKSFSEEFSRMMTKRFEMSMMGELKFFLGLQIKQLKEGTFICQTKYLKDMLKKFGMENAKPIHTPMPSNGHLDLSEQGNNVDQKVYCSIIGSLLYLCASRPNIMLSVCMCARFQAAPKECHLVAVKRILRYLVHTPNLGLWYPKGARFDLIGYADADYAGCKVDRKSTLGTCQFLGRMPLHKQTSHKSKRPRDRSPTPSSHDDSDSDWSGGEDAVPQVARVARRSTHAHDGGGDGEGSSRQPQTPPHQPNVPIGPLRIHTPERDPAVIRQVYDWRRKSEVVAPRRDEDPRSLRRTATDPRFWTLFQQDFYESVIKSKAHPTVPMQWINWEELQAHNDLVINSVIANCDLMDIRSFMTLQQNWCNEIIAQFYATVYWMTQGSWYSVSYQQLSEIWGFRLRSLLNLDDLHNLQIPANTDLLPLYTQNDPNVVLGKVDGLKLYFAYLNRMFHRSFVPKDGDASSINHLSRTVLLRFDPPPHRFHVYHFVWEEIRMASIQYKKGLVYAPHIMRMIETVTQLQFRHDVTHSQLHLRLLKAPCSSAARDIPSSSTQPPPAPERPASVARREPSPLFRILRSLFGLCSEEAKKNR

SEQ ID NO: 18669 - protein, 365 aa, Oryza sativa
  Clone ID: TF_OSC401051j.C1.p10.fg
MVNTRASGSGNNNNEENPTLAQVLAQQTQLINMLVQQMQNQQGNNNVNPPPPQNKLADFLRVRPPTFSSTTNPVEAGDWLHAVEKKLELLQCTDQEKVVFASHQLQGSASEWWDHFRMNRAEGQPITWAEFTEAFKKTHIPAGVVALKKREFRALKQKDRTVTEYLHEFNRLARYAPEDVRTDEERQEKFLEGLKDELSVMLISHDYEDFQELVDKAIRLEDKKNRMDNRKRGRIVFQEAQDSSQRQRIKPLQIGEPSSASQGQSQQLNIAGEINSETNASNKDNDEQATQSVSVQQDQSQVNNSNGREQRVCFNCYEPGHFVKECPKPKRQQPQGQVNNIVFTGANAVPVVSSSVTAQRPVSKQ

SEQ ID NO: 18670 - protein, 1831 aa, Oryza sativa
  Clone ID: TF_OSC401179j.C1.p25.fg
MKMHLKSINPSIWRIVEKGYVLQNPEDPTKEDDENEHKNAQAANAILSALSGSEFNRVDGIESAKILKGQFERFVMLDGESPSDMYDRLSKIVNEIKGLGSKDMTDEVVVKKMEEEEDSHKSKSKEEIDDEEMALFVKKFGKFMRRSGFFKGNSSKHHSNKSSGRHSARVCYVCKEPGHFIADCPHLKDGSHIKEDKKKGEKKDEKKEKYKHSKREHYGQAHLGMIFGSDSESSSSYEEGVATFAVKPSSPPRLFDYSSDEDAPICLMAKEPKVPSPPKSFNVDLVSDEEDEVEDEVMDDKLFKSITKESLPHLSELLGRIEDQYATLERQEALLIHEKERSHELKSELAKEREKNEALARLYKQTKESHANLEVANAQLQERVDGLDKAYLSLEEKFETLKNSVSLPSEPSCSKIVPSNESCVRCKDIDIEACATNSISLSALQKQNEKLMGLLHNGLLKCHMDSKALKEYLGYQRDNFNHEGLGYVPPPKGKVDKSMMIKRPQGFSNFVKAKSILPNDSASHCSFDASYVLRKNASGRVVAKYVGPRDKNFSIKRVLWVPKALVTNMRGPKQVWEYLSGGRSWVIDSGCTNHMTGEESMFCSLDPNGSSQENIVFGDDGKGKVMGLENVSYFRVFGSKCYILNKKARSSKFAPKVDEGFLLGYVSNECAYRVFNKTSGIVEIARDVTFDETNGSQVEQVDSHVLGEEEDPSEAIKRLALGDVRPREPQQGVSSSTQVEPPTSTQADNPSTSSLDQGEEGEQVPLSPINLAHPKIHQSIQRDHPTDNILGDINKGVSTLCKFLVEEALNDPDWVMAMQEELNNFTRNEVWTLVERPRQNVISTKWIFRNKQDEAGVVIRNKARLVAQGFTQIEGLDFSETFAPIARLESIRILLAFATNLNFKLYQMDVKSAFLNGPINELVYVEQPPGFEDPKYPNHVYKLHKALYGLKQAPRAWYECLCNFFVKNGFEIGKADSTLFTKRHDNDIFVYQIYVDDIIFGSTNKSFSEEFSRMMTKRFEMSMMGELKFFLGLQIKQLKEGTFICQTKYLKDMLKKFGMENAKQSTLPCHQMATSTSTSKVKTSTKRPNIMLSVCICARFQAAPKECHLVAVKRILRYLVHTPNLGLWYPKGARFDLIGYADADYAGCKVDRKSTSGSCKFLGRSLVSWSSKKQNSVALSTAEAEYVSAGSCCAQLLWMKQTLRDYGLNVSKIPLLCDNESAIKLANNPVQHSRTKHIDIRHHFLRDHSTRGDIDIQHVRTDKQLADIFTKSLDEARFCELRRWFPSLNSFQITGSPVILLVVLECILMIRGQFKNQLYSRRGSMSSQGRSPSSKARHAIRRMSESRKDAIDAQAQASDQAAQVANVECGAPLPLRRSRVSGEGSSAPASKVRRGNPTDSSEPGHGSGSHAPSFEEEIQLEEDIAAQQAAQEEGPFFITAPSRDPNYHRRVVRWNRKWTEVEKECKKDPYKFQQLSTDPRFWNLFQQDYYEIVIAPKKGAILMQWVDWKYMEELHDPIIDEVIEACARQNLKELMGLQYPCVICQVCCHFGVSGSNRVKIHDEKPMDTNSLHFLYQDVDYELGTIKGLLPFYAYLNKLLRKTLNPKEGDASNVLAYTRNLLYKMKAHPQLFDAFDFIFEEIRLISMMPKRGLSYGPYITKMIEIVSKKKFHKEVAHTGYQVRPIKAAVVPAGRTTRASSRAGHSATVTKPDSNSSLRFFKSIFNLCKTISVRQAKERRARKKDTRRLKNLLRNAHLPCSPDGSEVEDSGEDVIEDPFAAEASSSHADRGKAPMEEEEEEKEGNLSPFVMASRILGFCVLLCAIIYYPCSNV

SEQ ID NO: 18671 - protein, 919 aa, Oryza sativa
  Clone ID: TF_OSC401834j.C1.p29.fg
MKCFWVSTGKPMGVLNVDQQKEFDEATTLFVGCILSVLGDRLVKVYMHMTDAKELWDALNTKFGATDASNDLYIMEQFHNYKMADNRSVVEQAHEIQTMVKELELLKCVLPDKFVVGCIIAKLPLSWRGFGTALNHKRQEYSVEGLIASLDVEEKAREKDAASKGDGGQSTANVVHKALNKSKGKYKAQQTTNFKKKNNNNNSNQDDRTCFVCGQPGHLARKYPQRKGMKAPAGQTSKSANVTIGNTGDGSGYGYECGGLFRFSLSDFCNKSVNHICGSVDDEANVWHSRLCHINFGLMSQLSSMCLIPKFSIVKGSKCHSCVQLKQPRKPHKAAEERNLAPLELLHSDLCEMNGVLTKGGKRYFMTLIDDATRFCYVNLLKTKDEALDYFKIYKAEVENQLDRKIKRVRSDRGGEFFSNEFDLFYEEHGIIHERTPPYSPESNGITERKNRTLTDLVNAVLDTVGLPKAWWGEALLTSNHMLNRVPNRNKNKTPYEIWIGRKPSLSYLRTWGCLVKVNVQITKKRKLGPKTVDCVFLGYAHHSIAYRFLIVKSEWKEAVHSEMDSIIANGTWEVTERPYGCKPVGCKWVFKKKLRPDGTIEKYKARLVAKGYTQKEGENFFDTYSPVARLTTSRVLLSLAASHGLLVHQMDVKTAFLNGELDEEIYMDQPDGFVVEGQEGKVCKLLKSLYGLKQTPKKWHEKFDKTLTSAGFAVNEANKCVYYRHGGGEGVILCLYVDDILIFGTNLEVINEVKSFLSQNFDMKDLGVADVILNIKLIRGENGITLLQSHYVEKILNRFGYIDIMEGYSDSNWISDVDEIKATSGYVFTLGGGAVSWRSCKQTILTRSTMEAELTALDTANVEAEWLRDLLMDLPIVEKPVPAILMNSDNQTTCEKTIEVCQEIEKLRSYNIGLHPNS

SEQ ID NO: 18672 - protein, 690 aa, Oryza sativa
  Clone ID: TF_OSC401856j.C1.p1.fg
MAGFADALRLDKFTGVHFKRWQIRVTLWLTAMKCFWVSNGKPEGILTADQQKQFEEATTLFVGCILSVLGDRLVEVYMHMTDAKELWDALNTKFGATDASNDLYIMEQFHDYKMADNRSVVEQAHEIQTMANELELLKCVLPDKFVAGCIIAKLPPSWRSFGTALKHKRPEYSVEGLIASLDVEEKAREKDAASQGDGGQSSANVVHKAQNKSKGKYKAQQTTNFKKQKKNNINPNQDERTCFVCGQPGHLARKYPQRKGMKAPAGQTSKSANVTIGNTGDGSGYGYECGGLFRFSLSDFCNKSVNHICGSVDDEANVWHSRLCHINFGLMSRLSSMCLIPKFSIFKGSKCHSCVQSKQPRMPHKAAEERNLAPLELLHSDLCEMNGVLTKGGKRYFMTLIDDATRFCYVYLLKTKDEALDYFKIYKAEVENQLDRKIKWLKSDRGGEFFSNEFDLFYEEHGIIHERTPPYSPESNGIAERKNRTLTDLVNAMLDTAGLPKAWWGEALLTSNHVLNRVPNRNKDKTPYEIWIGRKPSLSYLRTWGCLAKVNVPITKKRKLGPKTVDCVFLGYAHHSIAYRFLIVKSEVPDMHVGTIMESRDATFFESFFPMKDTHSSSSQPSEVIPSSITPPEQTEHTHEHVTEEDVSEAPRRSKRQRTAKSFGDDFTMYLVDDTPKSISEAYASPDADY

SEQ ID NO: 18673 - protein, 437 aa, Oryza sativa
  Clone ID: TF_OSC413011j.C1.p2.fg
MGRKPRIVEKGYVLQNLEDPTKEDDENEHKNAQAANAILSALSGSEFNRVDGIESAKVIWDTLRNLHEGTDSVRESKVEILKGQFERFVMLDGESPSGMYDRLSKIVNEIKRLGSKDMIDEVVVKKMVRAITPRNSTLVTIIRERPDYKTLTPHDLLGCILAHDMLVQESKDVIQYINQSSTASIKKEDLALKAKEEEEENRKSKSKSKAEIDDEEMALFVKKFGKFMRRSGFFKGHSSKHYSNKSSGKHSTRVCYVCKEPGHFIADCPHLKDGSHIKEDKKKGERKDEKKEKHKHSKQEHYGQAHLGMIFGSDSESSSSDEERVATFAVKPSSPPRLFDYSSDEDAPICLMAKEPKIHSPLKSFNVDLVSDEEDEVMDDELFKSITKESLPHLSELLGRIEDQYATLERQEALLIREKECRIEMSTRGGVNRRFKN

SEQ ID NO: 18674 - protein, 432 aa, Oryza sativa
  Clone ID: TF_OSC413746j.C1.p6.gm
MVVRSSGNTSGYSQTMGISSNFLKFFSTVTTGFPPNLIQGDPLLCAAATCSTPPSSPAELHPRRAAASVVAAGRRHRRKVRRGVEKPGRSLPAVAGHRSPVAAVDRSRAAARPRRRPSSFVVWFEGEYRWVRLVVLYVYMSSKVAADHPISGEVAILVRPLMSLTPLTIIMDVITGNNLLSSWFGVRSVQPGMVAFPSLEKFIDECVVALKKREFRALKQKDRTVTEYLHEFNRLARYALEDVRTDEERQEKFLEGLKDELSVMLISHDYVDFQQLVDKAIRLEDKNNRMDNRKRKMIVFQEAQDSSQRQRIKPLQIGESFSAGQEQSQQLGISGEINSETNASNEDNDEQATQSVSFQQDQSQEDNSNGREHRVCFNCYEPGHFVKECPKPKRQQPQGQVNNIVLTGANAVPVASQGIQLSHQFQSSSSFL

SEQ ID NO: 18675 - protein, 1556 aa, Oryza sativa
  Clone ID: TF_OSC414191j.C1.p11.fg
MASRPRRAARAPARFGFEDGRVEPEENHESANEQSHHSNRSHRTVSRNAEVGQPRRSNRSHRTVSHDAEMGQSHRSHRTASHNSGEERLPSPPHVENNMQHIMAVRKQILQGLTTAIASFQHNAHGNGHPHVGNNRSKLTDFLRSCPPEFSQTVEPVEADDWLKDVDRKLNFVQCTPVEKTLYASHQLRGPAADWWENYCNAHPEPTNIAWDEFATAFRAAHVPESTIDMKKEEFNRLKQGNSSVNEYLSQFNKLARYAPEEVDTDKKKIRKFLKGIAVGMRLQLLAHDFPTFQHMINKALLLEDARKEATEEYKKRKSNHQGNSSRGAPRPRYGQPMQYHQSVTQANHQPGYAPRPQMNRPAPQPQQRAPSGNTAPNSVTSFKSPQGPSAVQCFRCNRMGHYARQCPRNPTNTNSGHANGSTARTPAPAAAQSLPSSQASGQGSRASNHFGRGRVNHIQAETAQDAPDVVMGMFSVNSVPAIVLFDSGASHSFISQAFVKRNGWKTQNLRVPMIVHSPGRNIRATQICPEVNLRIEEVDFLAKPIVLDSQSLDIILGMDWLAKHKGQIDCAEKSITLQGPGGKQVRFTPNTPTASRSILTCLQVTSLESVPIVCEYPDVFPEELTRMPPDREIEFAIELAPGTAPIAKRPYRMAANELAEVKRQIEELESKGYVRPSSSPWGAPVLLVKKKDGSERMVIDYRALNEVTIKNKYPLPRIDDLFDQLKGARVFSKIDLRSGYHQLKIRSEDIPKTAFSTRYGLYEFTVMSFGLTNAPAFFMNLMNKIFMECLDQFVVVFIDDILIYSKNEEEHAEHLRLIMEKLRDHQLFAKFSKCEFWLDRVAFLGHVISPNGVEVDPSKVEAVLAWNPPKNVSEIRSFLGLAGYYRRFIEGFSKLARPMTELLKKEKKFQWSVACEDSFQEMKKRLTTAPVLTLPDIRKDFEIFCDASRQGLGCVLMQERKVVAYASRQLRPHEVNYPTHDLELAAVVHALKIWRHYLIGNRCEVYTDHKSLKYIFTQTELNMRQRRWLELIKDYDLGIHYHPGKANVVADALSRKAYCNVAQIRPDQDHLCRELEKLRLTVVQSGVPASLTVQPTLESQIREAQKDDEGIKELIKRIQEKKDTNFSIDDQGTVWCGPRICVPAKKELRDLILKEAHESAYSIHPGSTKMYQDIKAYFWWARMKRDVAEYVALCDICQRVKAEHQRPAGLLQPLPIPEWKWEEIGMDFITGLPRTPSGYDSIWVIVDRLTKSAHFVPVKTTYDGKKLAELYMTHVVCRFGCPKKIVSDRGTQFTSSTAYHPQTDGQTERVNQILEDMLRACALDFEGTWDRCLPYAEFSYNNSYQASIQMSPNEAMFGRKCRTPLCWDEVGEALVFGPDILKSAEEQVKLIRERLKTAQNRQKNYADNRRRDLEFEKGDHVYLRVSPLRGMRRFGMSGKLAPRYIGPYLITARRGEVAYQLELPEGLADVHNVFHVSQLKKCLRVPEEQVPLGNIELEKNLTYKERPIKVLEEAERQTRRKTIKFYKVQWSNHSEDEATWEREDLLRAEFPDLLP

SEQ ID NO: 18676 - protein, 258 aa, Oryza sativa
  Clone ID: TF_OSC8289j.C1.p1.fg
WWDHFRMNRAERQPITWEEFTEGFKKTHVPVGVVALKKREFRALKQKDRTVAEYLHEFNRLARYAPEDVRTDEERQEKFLEGPKDELSVMLISHDYEDFQELVDKAIRLEDKKNKMDNRKRKMTVSQEAQGSSQRQRIKPLQIGESFSAGQEQSQQLGISGEINSETNASNEDNDEQATQSVSFQQDQSQEDNSNGREHRVCFNCYEPGHFVKECPKPKRQQPQGQVNNIVLTGANAVPVASQGIQLSHQFQSSSSFL

SEQ ID NO: 18677 - protein, 1640 aa, Oryza sativa
  Clone ID: TF_OSC900097j.C1.p17.fg
MKMHLKSINPYIWRIVEKGYVLQNPEDPTKEDDENEHKNAQAANAILSALSGSEFNRVDGIESAKVIWDTLRNLHEGTDSVRESKGQFERFVMLDGESPSDMYDRLSKIVNEIKGLGSKDMTDEVVVKKMRPDYKTLTPHDLLGRILAYDMLVQESKDVIQYINQSSTASIKKEDLALKAKEEEEENRKSKSKAEIDDEEMALFVKKFGKFKRRSGFFKGGSSKHYSNKSSGRHSARVCYVCKEPGHFIADCPHLKDGSHIKEDKKKSEKKDEKKEKHKHSKREHYGQAHLGMIFGFNSESSSSDEEGVATFAVKPSSPPRLFDYSSDEDAPVCLMAKEPKVPSPHKSFNVDLVSDEEDEVEDEVMDDELFKSITKESLPHLSELLGRIEDQYATLKRQETLLIREKERSHKLKSELAKEREKNEALVRLYKQTKESHANLEVANAQLQERVDGLDKAYLTLEEKFETLKNSVSLPSEPSCSKIVPSNEPCVRCKDIDIEACATNSISLSTLQKQNEKLMGLLHNGLLKCHMGSKALKDYLGYQRDNFNHEGLGYIPPPKGKVDKSVMIKRPQGLSNFVKAKSILPNDYASHCSFDASYILRKNTSGRVVAKYVGPRGKNISIKRVLWVPKALVTNMRGPKQEYVSGGRSWVIDSGCTNHMTGEESMFSTLDPNGTSQDNIVFGDDGKGKVMGLGKIAISNDLSIANVLLVKSLNYNLLSVSQLCSMGYNCLFTDVGVTVYRRNDSSVVFEGVLKGKLYLVDFSSSTAKHETCIVAKSNTGWLWHRRLAHVGMRNLHKILKHDHILGLTNVQFEKDRVCSACQAGKQIGAHHPVKNVMTTTRPLELLHMDIFRPIAYLSIGGNKYGLVIVDDFSRFTWVFFLHDKSEIQAIFKKFARRAQNEFDLKIMNIRSDNGKEFKNTCIESFLDEEGIKHEFSAPYSPQQNGVAERKNRTLIKMARTMLDEYKTSDRFWAEAVNTACHAINRLYLHRLLKKIPYELFTGNKPNVSYFHVFGSKCYILNRKARSSKFAPKVDEGFLLGYGSNECAYRVFNKSSGIVEIARDVTFDETNGSQVEQVDSHVLGEEEDPSEAIKRLALGDVRPREPQQGASSSTQVEPPTSTQTDDPSISSLDQGEEGEQVPPSPIKLARPRIHQSIQRDHPTDNILETSTRVEQALNDPDWVMAMQEELNNFTRNEVWTLVERPRQNVIGTKWIFRNKQDEAGVIIRNKVRLVAQGFTQIEGLDFGETFAPVARLESIRILLAFATNLNFKLYQMDVKSAFLNGPINELVYVEEPPGFEDPKYPNHVYKLHEALYGLKQAPRAWYECLRNFLVKNGFEIGKADSTLFTKRHDNDIFVCQIYVDDIIFGSTNKSFSEEFSRMMTKRFEMFMMGELKFFLGLQIKQLKEGTFICQTKYLKDMLKKFGMENAKPIHTPMPSNSHLNLNAQGKDVDQKVYRSIIGSLLYLCASRPDIMLSVCMCARFQAAPKECHLVAVKRILRYLVHTPNLGLWYPKGARFDLIGYADADYAGCKVDRKSTSGTCQFLGRSLVSWSSKKQNSVALSTAEVEYVLAGSCCAQLLWMKQTLRDYGLNVSKIPLLCDNESAIKIANNPVQHSRTKHIDIRHHFLRDHSTRGDIDI

SEQ ID NO: 18678 - protein, 333 aa, Oryza sativa
  Clone ID: TF_OSC900176j.C1.p10.fg
MVNTRTSGSGNNNNEENPTLAQVLAQQTQLINMLVQQMQNQQGNNNVNPPPPQNKLADFLRVKPPTFSSTTNPVEAGDWLHAVEKKLELLQCTDQEKVVFASHQLQGRASEWWDHFRMNRAEGQPITWAEFTEAFKKTHIPTGVVSLKKREFRALKQKDRTVTEYLHEFNRLARYAPEDVRTDEERQEKFLEGLKDELSVMLISHDYEDFQELVDKAIRLEDKKNRMDNRQSQQLGISGEINSETNASNEGNDEQATQSVSFQQDQSQEDNSNGREQRVCFNCYEPGHFVKECPKPKRQQPQGQVNNIVLTGANAVPVVSSSVTTQPLVSKQQ

SEQ ID NO: 18679 - protein, 899 aa, Oryza sativa
  Clone ID: TF_OSC900258j.C1.p16.fg
MAGFADALRLDKFTGVHFKRWQIRVTLWLTAMKCFWVSNGKPEGILTADQQKQFEEATTLFVGCILSVLGDRLVEVYMHMTDAKELWDALNTKFGATDASNDLYIMEQFHDYKMADNRSVVEQAHEIQTMANELELLKCVLPDKFVAGCIIAKLPPSWRSFGTALKHKRPEYSVEGLIASLDVEEKAREKDAASQGDGGQSSANVVHKAQNKSKGKYKAQQTTNFKKQKKNNINPNQDERTCFVCGQPGHLARKYPQRKGMKAPAGQTSKSANVTIGNTGDGSGYGSKCHSCVQSKQPRMPHKAAEERNLAPLELLHSDLCEMNGVLTKGGKRYFMTLIDDATRFCYVYLLKTKDEALDYFKIYKAEVENQLDRKIKWLKSDRGGEFFSNEFDLFYEEHGIIHERTPPYSPESNGIAERKNRTLTDLVNAMLDTAGLPKAWWGEALLTSNHVLNRVPNRNKDKTPYEIWIGRKPSLSYLRTWGCLAKVNVPITKKRKLGPKTVDCVFLGYAHHSIAYRFLIVKSEVPDMHVGTIMESRDATFFESFFPMKDTHSSSSQPSEVIPSSITPPEQTEHTHEHVTEEDVSEAPRRTSHGLLVHQMDVKTAFLNGELDEEIYMHQPDGFVVEGQEDKVCKLLKSLYGLKQAPKQWHEKFDKTLTSAGFAVNEADKCVYYRHGGGEGVILCLYVDDILIFRTNLEVINEVKSFLSQNFDMKDLGVADVILNIKLIRGDDHWRALERVMRYLKGSMELGLHYTGYPAVLEGYSDSNWISDVDEIKETILMRSTMEAKLTALDTTTVEAEWLRDLLMDLPIVEKPVPAILMNCDNQTVIVKVNSSKDNMKSSRHVKRRLKSIRKLRNSGIITLDYIQTARNLADPFTKGLSRNVIDNASKEMGLRPM

SEQ ID NO: 18680 - protein, 562 aa, Oryza sativa
  Clone ID: TF_OSC900363j.C1.p1.fg
MKMHLKSINPSIWRIVEKGYVLQNPEDPTKEDDENEHKNVQAANAILSALSGSEFNRVDGIESAKVIWDTLRNLHEGTDSVRESKVEILKGPSDMYDRLSKIVNEIKGLGSKDMTDEVVVKKMVRAITPRNSNLVTIIRERPDYKTLTPHDLLGRIFAHDMLVQESKDVIQYINQSSTASIKKEDLALKAKEEEEENRKSKSKAEIDDEEMALFVKKFGKFMRRSGFFKGGFSKHYSNKSSGRHSARVCYVCKEPGHFIADCPHLKDGSHIKEDKKKSEKKDEKKEKHKHSKREHYGQSHLGMIFGSDSESSSSDEEGVATFAVKPSSPPRLFDYSSDEDAPVCLMAKEPKVPSPLKSFNVDLVSDEEDEVEDEIMDDELFKSITKESLPHLSELLGRIEDQYAILERQETLLIREKERSHELKSELVKEREKNEALVRLYKQTKESHANLDVANAQLQERVDGLDKAYLTLEEKFETLKNSVSLPSEPSCSKIVPSNEPCVRCKDIDINACATNSIALSGLQKQNEKLTGLLHNGLLKCYMGSKALNVATGKIAFSRTLVY

SEQ ID NO: 18681 - protein, 1270 aa, Oryza sativa
  Clone ID: TF_OSC900412j.C1.p1.fg
MSGQAGDGNDGDKGAKIPYDYPSTSTSYVSTYSGKAPYFNGTDYAAWKHKMKMHLKSINPSIWRIVKKGYVLQNPEDPTKEDDENEHKNAQAANAILSALSGSEFNRVDGIESAKVIWDTLRNLHEGTDSVRESKVEILKGQFERSVMLDGESPSDMYDRLSKIINEIKGLGSKDMTDEVVELYLERPDYKTLTPHDLLGCILALDMLVQESKDVIQYINQSSTASIKKEDLALKAKEEEEENRKSKSKAEIDDEEMAPFVKKFGKFMRRSGFFKGGSSKHYSNKSSGRHSARVCYVCKEPGHFIADCPHLKDGSHIKEDKKKDEKKEKHKHSKREHYGQAHLGMIFGSDSESSSSDEEGVATFAVKPSSPPRLFDYSSDEDAPVCLMAKEPKVPSLLKSFNVDLVSDEEDEVEDEVIDDELFKSITKESLPHLSELLERIEDQYATLERQETLLIREKERSHELKSELAKEREKNEALEYVSGGRSWVIDSGCTNHMTREESMFSTLDPNGTSQDNIVFGDDGKGKVMGLGKIAISNDLSIANILLVKSLNYNLLSVSQLCSMGYNCLFTDVDVTVYRRNDSSVVFKGVLKGKLYLVDFSSSKAKHETCLVAKSNTGWLWHQRLAHVGMRNLHKLLKHDHILGLTNVQFEKDRVCSACQAGKQIGAHHPVKNVMTTTRPLVLLHMDLFGPIAYLSIGGNKYGLVIVDDFSRFTWVFFLHDKSETQAIFKKFARRAQNEFDLKIKNIRSDNSKEFKNTCIESFLDEEGIKHEFSAAYSPQQNGVAERKNRTLNEMARTMLDEYKTSDNFWAEAVNTACHTINCLYLHRLLKKTPYELLTGNKPNVSYFRVFGSKCYILNKKARSSKFAPKVDEGFLLGYGSNECAYRVFNKTSSIVEIARDVTFDKINGSQVSERSNQKIGSWGREEGEQVPPSPINLARPRIHQSIQRDHPTDNILGDINKGVSTRSRIANFCEHYSFVSSLEPLRVEEALNDPDWVIAMQEELNNFTRNEVWTLVERPRQNVIGTKWIFCNKQDEAGVVIRNKARLVAQGFTQIEGLDFGQTFAPVARLESIRILLAFATNLNFKLYQMDVKSAFLNGPINELVYVEQPPGFEDPKYPNHVYKLHKALYGLKQAPRAWYECLRNFLVKRGFKIGKADSTLFTKRHNNDIFVCQIYVDDIIFGSTNKSFSEEFSRMMTKRFEMSMMGELKFFLGLQIKQLKEGTFICQSKYLKNMLKKFGMENAKPIHTPMPSNGHLDLNEQGKDVDQK

SEQ ID NO: 18682 - protein, 837 aa, Oryza sativa
  unsure (1)..(837): unsure at all Xaa locations
  Clone ID: TF_OSC400171j.C1.p2.np
MADFPPIHRAELANMTLVAGYIEASEYTVIEPLSGELLHRVRLEVHGSLGTPLVNMVVETSRGTIEHACQEAVYLVMTRIXEKFVFIFDGIAYRYHPSCSAGGIASSFSSASSENDTTFGRMRTVMRALDKMHQDLHRASETLNDKKLIQIARLQDEVDRLKVESAMLQGRPAPRRAKIRTMSRKRSTAPIRMQLASRPSRCPSRRPVPVPVRASSQLPMLSAAKAATVSDAVKWIVSISSSSSSSGDGNCFSPSLFLFSSSASDGETRTTRSGNNVNEEQLLGNGSGDISENPPLAXTIARQTQIMTTMINQMQQQYHQMMQHMMQQQXQNQQHNGPPQSKLPKFXCVRPLTFSSTSNPMEAYDWLYAIEKKLNLLKCTDQEKVAFATHQLQGLALAWWDNXMITYSAGIEVTWEFCRVFRKAQVPDGIVAXKKREFRSLHQGNMTVTEYLHEFNRLARYAPEDVRTDAERWEKFLAGLYDELTNELISRDYADFQRIVDKAIRQEDXRNKMDRKRKAIQFRSQQDGQXKLRYGPXQHNGPTTMIVRQHRPYQPGNFSQGNSGNQNNGPTTMIVRQHRPYQPGNFSQGNSGNQNNRNPVPRPPMKQSQASQPQQPKELGGKPLTCFNCGDPGHFAGKCPKRKRNGPKIVQARVNHVSTEEAQAALEVVLGTFPANSIPAIVFFSGATYSFISKRFVGVHGLRKVELSSPMKVNTPGNSSTLVSFCPSTMIEIQVSPFLANLILVECKDLDVILGMDWLTKHNGVIDCASRTVTLVNGKGEVVVMQSPLTQKKGVSLNQVESEHQVPLLTKNVQILHYKPYGTKYYHTCTFPYPCPT

SEQ ID NO: 18683 - protein, 659 aa, Oryza sativa
  Clone ID: TF_OSC400368j.C1.p20.gm
MRPDYSIPLASVHRRSGEQVSGTSAFDVLHREKAAIRHCDFTMAGFADALRLDKFTGVHFKRWQIRVTLWLIAMKCFWVSTGKPEGVLTAEQQKQFEEATTLFVRCILSVLGDRLVEVYMHMTDTKELWNALNTKFGATDASNDLYIMEQFHDYKMADNRSVVEQTHEIQTMAKELELLKCVLPDKFVAGCIIAKLPTSWRSFGTALKHKRQEYSVEGLIVSLDVEEKAREKDAASKGDGGQSSANVVHKAQNKSKGKYKAQQTTNFKNQKKNNNNLNQDERTCFVCGQVSHLARKCPQRKGMKASAGQTSKSANVTIGNTRDGSGYGNLPTVARGSTVLMGNGSHASVHGVGTVDLKFTSRKIVQLKNVQHVPSIDRNLVSGSRLTRDGFKLVFESNKVVVSKHGYFIGKGYECGGLFRFSLSDFCNKSVNHICGSVDDEANVWHSHYWKEAVRSEMDSIIANGTWEVTERPYGCKPVGCKWVFKKKLRPDDYSIPLTGVHRRSGEQVSGTSAFDVLHREKAAIRVGGERQEMMGMEGIGEGIGTAADEEDVGAGGGGKSAPAMADGAEVGTGRGGSGGGEEAAAPASGMRRQSTWGRSTSSGGRAESAAPAAAIHAGRISSEDAAARRQNMRGGGGEAKYQLDLDLVFITGHWEWEQ

SEQ ID NO: 18684 - protein, 124 aa, Oryza sativa
  unsure (1)..(124): unsure at all Xaa locations
  Clone ID: TF_OSC400628j.C1.p2.np
CKKVMVCYNCKEPRHYSRDCPXPRKKNRPPHFRQFTRSRHANRQVFTGANAVPVSLKGSRPKDLIARSTHNIRSEEYLVEKVDTKGMNYEKSSTETPSSSTAPQSKSAQGATKDKSGEKKIPSA

SEQ ID NO: 18685 - protein, 989 aa, Oryza sativa
  Clone ID: TF_OSC401122j.C1.p81.fg
MYAAAAPGDGTLGAGYGAANDNTNGGSSASQSSGGTFTGYNFSFGYESKNDKSHIYIENMEIMKSRQSRNRSDRADGGLTEPWTLVWHLIILGKHPRLVTLGGCRLLDGLCRCCPVTSPRRLWWKPGAVWKDMWDALEAKFGVPDAGNELYVMEQYYDYKMVNDRSVVEQAHEIQMLAKELENNNCELPDKFVAGGIIAKLPPSWSDFGTSLKHKRQEFSVSDLIGSLGVEEKARAKDIGGIKVERGSSANMVQKKNPHASHNNKKVKPDVKAKATANFKKKGKEKANGDCFVCGKFGHWAKDCLEHKDRKFANMVISEGGGTSGYDKLLPTVLSVFHSPDWWVDTGANIHVGRGSSLLMGNESLAVVHGVGLSKEWWGEAVLTACHVLNKIPMKHKEVTPFEEWERKKLNLSYLRTWGCLAKVNVPIAKKRKLGPNTVDCVFLGYAAIHSVGYRFLIVNSRVLDMRVSTIIESRDATFFENEFPMKNTPSTSSQETVIPHKHFALIEHNDQTPEGNPEEDNIVDTHKSKKLRVVKSFVDDYIVYLVDDTPRTIEEAYSPPDTDYWKEAVRSEMDSIMSNGTWEVVERPYGCKPVGCKWVFKKKLRPDGTIEKYKASLVAKGYTQKEGEDFFDTYSPVARLTTIRVLLALAASHGLLVHQMDVKTAFLNGELEEEIYMDQPDGLNVIEEVKDFLSKSFEMKDLGEADVILNIKLLRGDEGGITLVQSHYVDKVLSRFGYSDCKPAPTPYDPSVLLRKNRRIARDQLRYSQIIGSLMYLVSATRPDISFAVSKLSRFVSNPGDDHWQALERIMRYLKGTMSYGIHYTGYPKVLERYSDSNWISDADEIKAISGYMFTLGGGAGSWKSCKQTILTRSTMEAELTALDIATVEAEWLRELLMDLPVVEKPVPAILMNCDNQTVIIKVNSSKDNMKSSRHIKRRLKSVRKQKNSGVIALDYVQTAKNLADQFTKGLPRNVIDSASREMGLIPT

SEQ ID NO: 18686 - protein, 423 aa, Oryza sativa
  Clone ID: TF_OSC401126j.C1.p53.fg
MSGEEGAGATAHRHQRYDDKDEEQSVADDEEEDESVGNRRRRRIRDKDDPLSKVKFTMPSFDETYYQEMMIALSRCNLQETEDARISRFYGGLNREIRDILEYKEYNTMNRLFHFACKAEREVQGRNKHRSSFAGATSTRQSTPRQSTTAVRPPTSTPSHAQETSKNASVQTPAKSATSVDSTRRTRDITCHRCHGIGHIARDCPNRRALFVNADGEYTSASDYDDEYALAATDHAGGQDNDDIEEVQLHPESLDQYPSLIVKLALSAKEKCEEQNQRHNLFQSKVLVKGHTVKMIIDSGSCNNLASEEMVKKLGLTTHPHPHPYHIQWFNTCGKMKEYEDVFHDEIPPRMANGRESAHNQEDGIESRTTPILEEEDDEDITSLDTLITSHTPMIIPSPSPVRPPETALTSNGPSAFMPTRFG

SEQ ID NO: 18687 - protein, 1689 aa, Oryza sativa
  Clone ID: TF_OSC401435j.C1.p51.gm
MTKIGDSSPPKIGEGSSSGAAERVMANSSVVELPLLTRTNYHEWSLVMQVSLEALEQWDAVEAVSKDRGKDRRALATIIRAVPREMKAGLAVKKSAKEAWDVVKKMHAGDDRVKATSVQRLMKQFENMAFRDGENVGDFAMRINGLVASLRELGEEMEDSRVVKKVLRVVPKRLKQVAVAIEMLADIDTMEIEELVGRLQVAEDADAEDQAASSAEHAGQLLLTEEQWEARRRQRRGKEHAHGGVGEKGGGHDDDDDDGSSTSSGRGKKRYRGKCFDCGVRGHMARDCPKKKKERALLVDVDDEPTLLGRLLGINALSWPCLRFATARQWRMASGQVLAVERMQEHAMREGWRPVHVEEYVAHERVKPGRPGCHAYVRVKLAKWVRGRCVAVGAIGSAAFVAETPLFIFNLQPFLHGMEAPANVGVAMPPPKQVMAEPLPLTTPQRKSWPRAMREKSRPLSKLSPGHSQHVGSWASERPQTTTQRMAAWLPLGAMRPHKMLVPAAMAARSSTAAAALHSCSAAADALLHSASLLPRHLRRDRHRPAKEHALRENMTKIFCLCRHCKNQKLLVDPGEILGHIMEYGFTANYKVWTYHGEFANPEDDDEELSFEMSEAENFIIEDMSRERMVVDVSTDSDDFDGGFDLEDMLRHVEPEGKRGKIPSMVMWYLPIKDRLKRLYSNPTDAELMRWHQESRKIDGMIRHPADARQWKTFDAKHPEFAKDPRNVRFALSTDGMNPFVENDTAPVARGGTYVYEITKKIKVVYGKGKKKTVKRKKADGDNGTASPFKKHSIFFKYLDYWKDLEIRHAIDVMHLEKNVFDSTVGTLLDIPSPLQTFAVETVCQLEMYFPPSFLDMMEHLIVHIVPQIIELGPLYLHQMWAYERYMSILKGYVRNRAHPEGSMIEGYTTEEAVECCMDYIKDANAIGIPVHRHEGRLSGRGTVGRKQFFDNDYKKVSAAHNSVLQQLAIVEPFIERHLEEIKACFPGRSNDWISREHKRRFPLWLKDLNLPVGDSVEELTLQRLACGPSSIVNSWQGYDINGFTLSTTTKDMKSTTQNSGIRVEAIDTSGEKRSYYGTIQEIWELDYGLNIQIPVLRCEWVKDTIGVSVDDYGLTIVNHSKTSHKDDPWVLAERVAQVFYVKDPSDERKTIVISGKQQIVGIDNIEDPNDYNQFDDVPLFTDLPMRIKKVERTIDEANMSYVRADGVAKAAKISQVAVAVVPATAGSSPKSPRHRRLLPEVAPPLAVADATARTVALAVAVAAARWPSPPHGPLPPRRCHRRRQVVAAARSSPPSLGGSGKKRRGERSKNKLPKETYNVIALDQDGKPIEPPIVRSKFSNACGTLVRTRCPINVKLWETVDDNIKTLLWNELQKYFVFPPGSEADWDTFVADRTTAEALALRKKMSELAKKNRYPHRLGSSGYAGHVDQWREIEQRFAAAGKPLLVDPMVERSKNWVAKVHSDHVSLELDIPAPEGIELLGDAVNQFILWHRRDIILSAAVLAAGSLTPSSSQAMTAAAPAPPSPPEPPSPRHLPSPPPLRNSEKRKELAHVLSDSQKSVLAAQDEVQSWLSADVPKTYEYGKPFLPTYLMNKLPWEMRVMHECMQFHEADRTGAKVGYVDPTRICKTQHTVELRQDCEQLVGKTPEEKEEYVKTLHKRKKLEVATYLAIAMLAHADKDVLMVPYQFT

SEQ ID NO: 18688 - protein, 767 aa, Oryza sativa
  Clone ID: TF_OSC419986j.C1.p9.fg
MSGTSSDEPTLENLAHKLKGMENWYEELMRNSKSYKESTDKHLKTLSESLVKVVDQIEQMNRSHKQLTENIQNINIGHENIVRRIGLLEAVGEEGVGATAHRHQRYDDEDEEQSVADDEEEDESVGNRRRCRIRDKDDPLSKVKFTMPSFDGKFEPSVYLDWELAVEQKFSCYDFPDNKKVKAASSEFTSFASLWWNDICGRGLRPRTWDDMKRTMRSRFVPSYYARDMLNKLQLLRQGSNSVETYYQEMMIALSRCNLQETEDARISRFYGGLNREIRDILEYKEYNTMNRLFHFACKAEREVQGRNKHRSSLAGATSTRQSTPRQSTTVVRPPTSTPSHAQETSKNASVQTPAKSATSVDSTGRTRDITCHRCHGIGHIARDCPNRRALFVNADGEYTSASDCDDEYALAATDHAGGQDDEDIEEVHLHPESLDQYPSLIVKLALSAKEKCEEQNQRHNLFQSKVLVKGHTVKMIIDSGSCNNLASEEMVKKLGLTTHPHPHPYHIQWFHTCGKMKVTRLVKIPFSIGSYHDQIECDVVHMQACSVILGRPWQYDREVVFDGRTNTYKFMFDGKRVVLHSMTPAAALKDDLARLECEKKAKSENQIIAKHPASTSKIEPSTTKNEIKLKGALLASKYNICALDEPDSCCYALFCKDPILTLATAPSTLYSLPPAITNLLQEYEDVFHDEIPPRMANGRESAHNQEDGIESRTTPIQEGEDDEDITSSDMLITSHAPMIIPSPSPARPPETALTSNGPSAFMPTPI

SEQ ID NO: 18689 - protein, 256 aa, Oryza sativa
  Clone ID: TF_OSC102121j.C1.p11.np
DGFQGHGMRSKDQKRKAPMRTEDEVRKMIITSTEWPPPGMTKCQRRNSSRGAQQLTEHLLANGGRVSGSEDSDQVSSDDEDEKSPQGFNQNKIELKACSRCGEIGHVASSCASTCVHCEEDHPPDRCPTSRITCFFCEGTDHVPKDCRFSFLLTKKMANQPVSSNGEKHQGNTNPRQDYSKQCTNAPPAAPDSAINHSNHSLHRQPQQRIVVDGRSCVSPRPTPGRAKSNQPPEGDTKQKTVIRFNQQSEGSFSCE

SEQ ID NO: 18690 - protein, 257 aa, Oryza sativa
  unsure (1)..(257): unsure at all Xaa locations
  Clone ID: TF_OSC26158j.C1.p1.np
DRLYKITLGKNCPQQKRKAPMRTEDEVRKMIITSTEWPPPGMTKHQRRNSFRGAQQLTEHLLANGGRVSDSEDSDQVSSDDEGAKPPHFNQNKIELKACSRCGEIGHVASSCASICVHCEEDHPPDRCPTSRITCFFCEGTDHVPKDCRFSFLLTKKMANQPASSNGEKHQGNTNPRQDSSKQCTSAPPAAPDSAINHSNHSLHRQPXQRIVVDGRSCVSPLPTPGRAKGNQPPEGDTKQKTVIRFNQQSEGSFSCE

SEQ ID NO: 18691 - protein, 1541 aa, Oryza sativa
  Clone ID: TF_OSC400455j.C1.p1.fg
MDIVRSNDRKRFGIVRYQYFEKENRVGFEMAGVFASMAIEWAIDKLYSLLPACLVSTPASSSSSAAPAESEDLEVLKRLERTMHRIHATLHDAEEQWNIREETAKLRLKELKKVAYDAEDVVDEYGYEMTRHKVEAFEQSARANRSGKRRREEMQPSFAVLFCCKFGFVFVLETFRKIRSNDAFMLVFICNVMIYLWNRLNHYMSIISTIQKPYYRHCDFTMAGFADALRPDKFTGVHFKRWQIRVTLWLTAMKCFWVSTGKPVGVLTAEQQKQFEEATTLFVGCILSVLGDRLVEVYMHMTDAKELWDALNTKFGATDASNDLYIMEQFHDYKMADNRSVVEQAHEIQTMAKELELLKCVLPDKFVAGCIIAKLPPSWRSFGTAFKYKRQEYSVEGLIASLDVEEKAREKDAASKGDGGQSSANVVHKAQNKSKGKYKAQQTTNFKKQKKNNNNPNQDERTCFVCGQVRHLARKCPQRKGMKAPAGQTSKSANVTIGNTGDGSGYGNLPTVFSVNQSTNLWVDTGANVHVCADISLFSSYQVARGSTVLMGNGSHASVHGVGTVDLKFTSGKIVQLKNVQHVPSIDRNLVSGSRLTRDGFKLVFESNKVVVSKHGYFIGKGYECGGLFRFSLSDFCNKSVNHICGSVDDEANVWHSRLCHINFGLMSRLSSMCLIPKFSIVKGSKCHSCVQLKQPRKPHKAAEERNLAPLELLHSDLCEMNGVLTKGGKRYFMTLIDDATRFCYVYLLKTKDEALDYFKIYKAEVENQLDRKIKRLRSDRGGEFFSNEFDLFCEEHGIIHERTPPYSPESNGIAERKNRTLTDLVNAMLDTAGLPKAWWGEALLTSNHVLNRVPNRNKDKTPYEIWIGRKPSLSYLRTWGCLAKVNVPITKKRKLGPKTVDCVFLGYAHHSIAYRFLIVKSEVPDMHVGTIMESRDATFFESFFPMKDTHSGSNQPSEIIPSSITPPEQTEHTHELVSEEDVSEAPRRSKRQRTVKSFGDDFTVYLVDDTPKSISEAYASPDADYWKEAVRSEMDSIIANGTWEVTERPYGCKPVGCKWVFKKKLRPDGTIEKYKARLVAKGYTQKEGEDFFDTYSPVARLTTIRVLLSLAASHGLLVHQMDVKTAFLNGELDEEIYMDQPDGFVVEGQEGKVCKLLKSLYGLKQAPKQWHEKFDKTLTSAGFAVNEADKCMYYRHGGGEGVILCLYVDDILIFGTNLEVINEVKSFLSQNFDMKDLGVADVILNIKLIRGENGITLLQSHYVEKILNRFGYIDSKPSPTSYDPSLLLRKNKRIARNQLEYSQIIGSLMYLASATRPDISFAVSKLSRFTSNPGDDHWRALERVMRYLKGTVELGLHYTGYPAVLEGYSDSNWISDVDEIKATSGYVFTLGGGAVSWRSCKQTILTRSTMEAELTALDTATVEAEWLRDLLMDLPVVEKPVPAILMNCDNQTTCEKTIEVCQEIKKLQSYNVGLHPNSEKPGRSLHEGTITKCDKQCIEGDGFETHSILERTNLCELDCWSQSMKILGESSRKLTKDLGV

SEQ ID NO: 18692 - protein, 1522 aa, Oryza sativa
  Clone ID: TF_OSC401054j.C1.p38.fg
MSWHRAGVLLLGAQSCLPVPGVPAVGGIGSVLLSMARMGWKLCHVFRLYTVVPRPRLWASRAMYPNSGNGPPPLPENPTLAQVMAHQTQMMAAMIQQMQQQHQQMHQRMMQHVEQQHQQFGPPPPQSKLPEFLRVRPPTFSSTTNPMEANDWLHAIEKKLNLLQCNDQEKVAFATHQLQGPASAWWDNHMATRPPGTEVTWAEFCRSLRKAQVPDGVVAQKKREFRALHQGNRTVTQYLHEFNRLARYAPEDVRTDAEKQEKFMAGLDDELTNQLISGDYADFERLVDKAIRQEDQRNKMDRKRKAAQFRAPQGSHQRPRFAPGQQGGPTTMIVRQHRPFNPSNFPQGASGSQNHHGGQSNRGAASRPPMAPAQSGQPAQAKKETGAKPGSCFNCGKLGHFADKCPKPRRAGPRFIQARVNHASAEEAQAAPEVVLGTFPVNSIPATVLFDSGATHSFISKKFVGMHGLIREELSTPMRVHTPGNSSTSVQFSPSITIEIQRSPFLANLILLESKDLDVILGMDWLTKFKGVIDCANRTVTLTNEKGETVVYKSLVSPKKGVSLNQIEAEIPVDTVEKNSRKLEDIPIVCEYPEVFPEDLTTMPPKREIEFRIDLAPGTAPIYKRPYRMAANELAEVKKQVDKQLQKGYIRPSTSPWGAPVIFVEKKDKTKRMCVDYRALNELRIREEDIPKTAFTTRYGLYECTVMSFGLTNAPAFFMNLMNKVFMEFLDKFVVVFIDDILIYSKSEEEHEQHLRLVLEKLREHQLYAKFSKCDFWLTEVKFLGHVITAQGVAVDPSNVESVTKWTPPKTVSQIRSFLGLAGYYRRFIENFSRIARPMTQLLKKDEKFKWTAECDKSFEELKKKLVSAPVLILPDPMKDFQVYCDASRHGLGCVLMQEDRVVAYASRQLRPHEGNYPTHDLELAAVVHALKIWRHYLIGNRCEVYTDHKSLKYIFTQPDLNLRQRRWLELIKDYDMSIHYHPGKANVVADALSRKSYCTALCIEGMCEELRQEFEHLNVGIVELGFVAALEARPTLVDQVRAAQANDSEIAELKKNMRVGKARDFHEDEHGTIWLGERLCVPDDKELKDLILTEAHQTQYSIHPGSTKMYQDLKEKFWWVSMRREIAEFVALCDVCQRVKAEHQRPAGLLQPLQIPEWKWEEIGMDFITGLPRTSSGHDLIWVVVDRLTKVAHFIPVHTTYTGKRLAELYLSRIMCLHGVPKKIVSDRGSQFTSKFWQKLQEELGTRLNFSTAYHPQTDGQTERVNQILEDMLRACALDFGGAWDKSLPYAEFSYNNSYQASLQMAPFEALYGRKCRTPLFWDQTGERQLFGTEVLAEAEEKVRIIRERLRIAQSRQKSYADNRRRELTFEAGDYVYLRVTPLRGVHRFQTKGKLAPRFVGPYKILERRGEVAYQLELPSNMIGIHDVFHVSQLKKCLRVPEEQADSKHIDIQEDLTYVEKPVRILDTSERRTRNKVTRFCRVQWSHHSEEEATWEREDELKAAHPHLFTSSSESRGRDSV

SEQ ID NO: 18693 - protein, 1083 aa, Oryza sativa
  Clone ID: TF_OSC900367j.C1.p21.fg
MAGFADALRPDKFTGVHFKRWQIRVTLWLTAMKCFWVSTGKPEGVLTAEQQKQFEEATTLFVGCILSVLGDRLVEFHDYKMADNRSVVEQAHEIQTMAKELELLKCVLPDKFVAGCIIAKLPPSWRSFGTALKHKRQEYSVEGLIASLDVEEKAREKDAASKGDGGQSSANVVHKAQNKSKGKYKAQQTTNFKKQKKNNNNPNQDERTCFVCGQVGHLDRKCPQRKGMKAPAGQTSKSANVTIGNTGDGSGYGNLPTVFSVNQSTNWWVDTGANVARGSTVLMGNGSHASVHGVSTVDLKFTSGKIVQLKNVQHVPSIDRNLVSGSRLTRDGFKLVFESNKVVVSKHGYFIGKGSKCHSCVQSKQPRKPHKAVEERNLAPLELLHSDLCEMNGVLTKGGKRYFMTFIDDATRFCYVYLLKTKDEALDYFKIYKAEVENQLDRKIKRLRSDRGGEFFSNEFDLFCEEHGIIHERTPPYSPESNGIAERKNRTLTDLVNAMLDTAGLPKAWWGEALLTSNHVLNRVPNRNKDKTPYEIWIGRKPSLSYLRTWGCLAKVNVPITKKRKLGPKTVDCVFLGYAYHSIAYRFLIVKSEVPDMNVGTIMESRDAIFFESFFPMKDTHSGSNQPSEIIPSSITPPEQTEHTHELVSEEDVSEAPRRSKRQRTAKSFGDDFTVYLVDDTPKSISEAYASPDADYWKEAVRSEMDSIIANGTWEVTERPYGCKPVGCKWVFKKKLRPDGTIEKYKARLVAKGYTQKEGEDFFDTYSPVARLTIIRVLLSLAASHGLLVHQMDVKTAFLNGELDEEIYMDQPDGFVVEGQEGKVCKLLKSLYGLKQAPKQWHEKFDKTLTSAGFAVNEADKCVYYRHGGGEGVILCLYVDDILIFGTNLEVINEVKSFLSQNFDMKDLGVADVILNIKLIRGENGITLLQSHYVEKILNRFGYIDSKPSPTPYDPSLLLRKNKRIARNQLEYSQIIGSLMYLASATRPDISFAVSKLSRFTSNPGDDHWRALERVMRYLKGTVELGLHYTGYPAVLEGYSDSNWISDVDEIKATSAYVFTLGGGAVSWRSCKQTILTRSTMEA

SEQ ID NO: 18694 - protein, 449 aa, Oryza sativa
  Clone ID: TF_OSC101880j.C1.p3.fg
MGVPAFYRWLADRYPQTVSDAVEEEPVELEPGAFVPVDLRRPNPNGLEFDNLYLDMNGIIHPCFHPEGRPAPTTYDEVFKSIFAYIDHLFGLVRPRKLIYMAIDGVAPRAKMNQQRSRRFRAAKDAADAAAEEERLRKEFEAEGRTLVAKEKSEAIDSNVITPGTPFMFVLSSALQYYIQLRLNHTPGWQSVKVMLSDSNVPGEGEHKIMSYIRLQRNLPGFDPNTRHCLYGLDADLIMLSLATHEVHFSILREVITMPGQHEKCFLCGQVGHLAAECRGSGQADKTVELPPIHKKKYQFLNIWVLREYLEKDLEIVDPPFKINFERVVDDFVFMCFFVGNDFLPHMPTLEIREGAINLLMNIYRREFTSMGGYLTDGGEVLLDRVEHFIQSVAVHEEQIFQKRARIQKAIQNNEERNRVQTENSEDNQYVDKSMIYCPTVTVKYYKND

SEQ ID NO: 18695 - protein, 240 aa, Oryza sativa
  Clone ID: TF_OSC16994j.C1.p1.fg
MEQKKRSSQRPRIALGPQAAPYPQGGSSSVARPQRQFYNNNTSNHSNDNRNMVTRHVAAPTQNHPVRKEQGSKPGVCFNCGDPGHYADKCPMPRRVKNAPVQNNSNAPAPKARVNHVAAAEAQNAPDVVLESNDLDVILGMDWLTHHIGVIDCANRNVTLTSSNGQTVSFFVSSPKSHGLTLNQVALQEIPIVRDYPDVFPEDLPGMPPKRDIEFWIDLVPGTNPIHKRPYRMAANELAE

SEQ ID NO: 18696 - protein, 1839 aa, Oryza sativa
  unsure (1)..(1839): unsure at all Xaa locations
  Clone ID: TF_OSC400433j.C1.p6.np
MADHPPNHRGEGMDDFVAELACMTLVVGYPNAPEYSTVLLLSGELPHRVRLEVHGYVGTCLANMVVEASGGNRDHACQEAAYLMMARLRDRHNYIFYNTAYRFHPRRASGDDASTFRPTVGENHTTFGHMCTVMRGMDKMHSNLHKASKALNDGKLVRIIALKDEIARLKKENAQLKGLPAAGGVRIRTTPRKSTIAPVCIQLAPRNPAPTAPPTVPAAPPAAPPAPVPAPVPVLAPVSALSFAPASAARGPPAPVPAPVPVLAPVSALSFAPASAARGPASGNGGWLPATPSGSRDRSSSGSEPGSGETYLPDSRSCSEGPGLFLPMVNTRNGSRAAGEGSNDEERADGGYPNSASGNGPPPLPENSTLAQVMAHQTQMMAAMMQQQHXQMHQRMRXQAEQQQXQFGPPPPQSKLPKFPRVRPPTFSSTTNPMEANDWLHAIEKKLNLLQCNDQEKVAFATQQLQGPASAWWDNHMATHPPGTEVTWAEFCRSFRKVQVPDGVVAQKKREFRALHXGNRTVTEYLHEFNHLAXYAPEDVRTDAEKHEKFLAGLDDELTNQLIYGDYADFEKLVDKAIRQEDQRNKMDRKRKAAQFRSNQGSHQRPRFTSGQQGGPTTMIVXQHRPYNPSNFHPGSSGNHLGGQHNRGAAPHPPMAPVQQTAPAPKYTGGKPGACFNCGESGHFADKCPKLRRAGPKFVQAQVNHASAEETQAAPEVVLGTFPVNSIPATVLLYSGATHSFISKKFVGHGLIREELSTPMRVHTLGNSSTSVQFSPSVTIEIQRSPFLANLILLESKDLDDILGMDWLTKFKGVIDCANRTVTLTNEKGETVVXKSPVALKQGISLNQIEVENSVVTAEKSSRKLEDIPIVCEYSEVFPEDLTTMPPKREIEFRIDLAPGTAPIYKRPYKMAANELAEVKKQVDEQLXKRYIQPSTSPWGAPVIFVEKKDKTKRMCIDYRALNEVIKNKYPLPRIDDLFDQLKGARVFSKIDLRSGYHQLRIQEEDIPKTAFTTRYGLYERTVMSFGLTNAPAFFMNLMNKVFMEFLDKFVVVFIDDILIYSKSEEEHEQHLRLVLEKLKEHQLYAKFSKCDFWLSEVKFLGHVITAQGVVVDPSNVESVAKWTPPKTVSQIRSFLGLAGYYHRFIENFSRIARPMTQLLKKDEKFKWTAECDKSFEELKKKLVSAPVLILPDQTKDFQVYCDTFRHGLGCVLMQEGRVVAYASRQLRPHEGNYPTHDLKLAAVVHALKIWRHYLIGNCCEVYTDHKSLKYIFTQPDLNLRQRRWLELIKDYDMSIHYHPGKANVVADALSRKSYCNALCTEGMCKELQQVLEHLNLGIVEHRFMATLEARPTLVDQVRAAQVNDPEIAELKKNMRVGKARGFLEDEHGTIWMRERLCMPDDKELKDLILTEAHQTQYSIHPGSTKMYQDLKEKFWWASMRREIAEFVALCDVCQRVKAEHQRPAGLLQPLQIPKWKWEEIGMDFITGLPRTSSSHDSIWVVVDXLTKVAHFIPVHTTYTGKKLAELYLARIMCLHGVPKKIVSDRGSQFTXKFWQKLQEELGTRLNFSTAYHPQTDGQTERVNXILEDMLRACALDFGGAWDKSLPYAEFSYNNSYQASLQMAPFEALYGRKCRTPLFWDXTGERQLFGIEVLIEAEEKVRTVRERLRVAQSRQKSYANNRRRELTFEAGDYVYLRVTPLXGVHRFQTKGKLAPRFVGPYKILEXRGEVAYXLELPSNMIGIHDVFHVSQLKKCLRLPEEQADSEHIDIQEDLTYVEKPVRILETSERRTRNKVTRFYRVQWSHHSEEEATWEREDELKATHPHLFTSSSESRGRDSV

SEQ ID NO: 18697 - protein, 1604 aa, Oryza sativa
  Clone ID: TF_OSC400575j.C1.p14.gm
MAKEDEDKTAFITPFGVFCYVKMPFGLITTGNTFQRTVQGALSDQLGNNVEAYVDDIVVKTKTSDSLIDDLRETFDNLRRYRLMLNPEKCTFGVPSGKTPRALLYPSPPSPSPLVVGEALAPCALAQPSPPSLQPCAAAVPAVAVAREGHRWDRQVAAVLVRCFAAVGDRRSTIAVVEPKSSAASSSSPPPSVGFPPSFWSPMPRYKPEYLFGVEGFVQELRTMSFVIGFGTAPFYAQIPHDRHEEKCRVKVTLNSNSEDIPSVMFEAGGRNYIHASQEVARIAIGELRDRYSDQLADTEYRYHPRQPQGSDRGSYLETEGIENDATTRHLVEMLWAMDESRAETVLAAQDREDRNRGKICKLEDKVDRLEKELAALKGEAPPQKARIRLTARKRALFVPRYQLAPKVRVVEKEVAPTLADPPVNIISDDEEEESKRNHSKIEWVATQDDEDEPKEPSIDLRCSEELDKMVNTRSNGNGPNNPNNNNNEGNPTLAQVLAQQVQLMNMMMQQLQNQQNQGNNHAPPQNRLTDFLRVRPPTFSSTTNPVEAGDWLHAIEKKLDLLQCTDQEKVSFASHQLHGPASEWWDHFRLNRTTAEPITWLEFTAAFRKTHIPSGVVSLKKKEFRSLTQGSRSVTEYLHEFNRLARYAPEDVRNDEERQEKFLEGLNDELSYSLMIGDYPDFQKLVDKAIRQENKYNCMEQKKRRIAQFKTQQGNNQKPRLTLGPQSIPHGSSSSVVRPQRQFFNNNAGNNIRNQVPRPVAAPTQQQPIKREQGSKPAVCFNCGDPGHYADKCPKPRRVKVVPAQNNSTVPVSKARVNHVAAAEAQDAPDVILDKFVVVFIDDILIYSRTEEEHEEHLRLALEKLREHRLYAKFSKCEFWLSEVKFLGHVISAGGVAVDPSNVESVTNWKQPKTVSEIRSFLGLAGYYRSRAPPPFQPSPSLGKATVGIAKSPPSSSVASPPSETAGAPSPSSNRRAPPLLLRRRRRPLGFRRRFGRRLRSGGDKPTGVAGESITSGFEGEIMIQERCTVVDCVVRERNRSKSREDHGNREHEVAYKTQGSTEANRMHGSTKQEAEEAFIAFKRYLSNPHVLVAPQPNEELFLYIAATPYSVSTIIVVEREKVQLPVYYVSEALHDVMTRYPQIQKLLYAVIMTSRKLCQYFQAHRVTVVSSFPLGEVMRNKDVVSRIAKWVVELSQFDIHFVPRTAIKSQVLADFVADWTMPDNRSDNQIDNETWTMAFDGALNSKGAGAGFILTSPSGDQFKHAIHLNFRATNNTAEYEGLLAGIRVAAALVVRKLEKRFDGIEVRHVYRKDNIEPDDLARRASRREPLEPGTFLDVLTRPSVKEASGEDSPVAPDISSGAIEAERTVADIETTDDWRTPLIKFIGSEELPEDDAEVEKISRKAKVYCMIGNDLYKKAPNGVLLKCILSDDGRHLLLDIHEEICGSHAAGRTLVGKAFQQGFFWPNALKDACDMVQQCEACQFHSKHTKLPAQALQTIPFTWPLSCWGLDILRPFPRGQGGYRFLFVAIDKFTKWIEATPTGEIKADNAIKFIKGIFCKFGLPHRIITDNGSQFISADFQDYCIRLGVKICFASVSHPQSN

SEQ ID NO: 18698 - protein, 1813 aa, Oryza sativa
  unsure (1)..(1813): unsure at all Xaa locations
  Clone ID: TF_OSC401921j.C1.p15.np
MADHPPNHRGEGMDDFVAELARMTLVVGYPNAPEYSTVPPLSGELPHRVRLEVHGFVGTCLANMVVEASGGTVDHTCQEAAYLMMARLRDRHSXIFCNTAYRFHPRRASGDDVSTFRPTASENDTTFSHMCAVMRGMDTMHSDLHKASKASNDGKLVRIIALKDEIARQKKENAQLKGLPAPGGVRIRTTPRKSTTAPVRIQLAPRNPPPPAAPPAPPTVPAAPAVPAPAVPVSAPASALSFALASAARGPAIGNGGWLPATHSGSHDRSSSGSEPGNGETYLPDSRSRSEGPGLFLQMVNTRNGSHAAGEGSNGEERTDGGYPNSASGNSPPPLPKNPTLAQVMAHQTXMMAAMMQLMQHQPXQMHQRMQQQAEQQQQQFGPPPPQSKLPEFLRVRPPTFSSTTNPMEANDWFHAIEKKLNLLQCNDQEKVAFATHQLQGPTSAWWDNHMATRPPGTEVTCAEFCRSFQKAQVLDGVVAQKKREFQALHQGNRIVTEYLHEFNCLARYAPEDVHIDTLKQEKFLAGLDDELTNQLISGDYTDFEKLVDKAIRQEDQRNKMDRKRRFRQFRSNQGSHQRPRFTPGQQGGPTTMIVRQHRPYNPSNFHPGSSGSHGQGQHNRSAAPRPPMAPVQQTAPVPPKKDTGGKPGACFNCGESGHFADKCPKPRRAGPKFVQARVNHASAEEAQVAPEVVLGTFPVNSIPATVLFDSGATHSFISKKFVGVHGLIREELSTPMRVQTPGNSSTSIQFSPCVTIEIQRSPFLANLILLESKDLDVILGMDWLTKFKGVIDCVNRTVTLTNEKGETVVYKSPVVLKQGISLNQIEVENPMVTEEKSSRKLEDIPIVGEYPEVFPEDLTTMPPKREIEFQIDLAPGTAPIYKRPYRMAANELAEVKKQVDEQLQKGYIRPSTSPWGAPVIFVEKKDKTKRMCVDYRTLNEVTIKNKYPLPRIDDLFDQLKGAKVFSKTDLRSGYHQLRIQEEDIPKMAFTTRYGLYECTVMYFGLTNAPAFFMNLMNKVFMEFLDKFVVVFIDDILIYSKSEEEHEQHLRLVLEKLQEHQLYAKFSKCDFWLSEVKFLGHVITAQGVAVYPSNVESVTKWTPPKTVSQIRSFLGLAGYYRRFIENFSRIARPMTQLLKKDEKFRWTAECDKSFEELKKKLVPAPVLILPDQTKDFQVYCDTSRHGLGCVLKQESRVVAYASRQLRPHEGNYPTHAAVVHALKIWRHYLIGNRCEVYTDHKSLKYIFTQPDLNLRQRRWLELIKDYDMSIHYHPGKANVVANALSRKSYCNALCTEGMCKELQQELEHLNLGIVEHGFVAALKARPTLVDQVRAAQVNDPEIAELKKNMRVGKARDLLEDEHGTIWLGERLCIPDDKELKDLILTKAHQTQYSIHPGSTKMYQDLKEKFWXASMRREIAEFVALCDVCQRVKAEHQRPIGLLQPLQIPEWKWEEIGMDFITGLPTTSSGHDSIWVVVDRLTKVAHFIPVHTTYTGKRLAELYLSRIMCLHGVPKKIVSDRGSQFTSKFWQKLQEELGTRSNFSTAYHPQTDGQTERVNQILEDKLRACALDFGGAWDKSLPYAEFSYNNSYQASLQMAPFEALYGRKCRIPLFWDQIGERQLFGTEVLTEAEEKVRTVRERLRIAQSRQKSYADNRRRELTFEAGDYMYLRVTPLRGVHRFQTKGKLAPRFVGPYKILERRGEVAYQLELPSNMIGIHDVFHVSQLKKCLSLPEEQANSEHIDIQEDLTYVEKPVRILDTSERRTRNKVTRFCRVQWSHHSEEEATWEREDELKAAHPHLFTSSSESRGQDSV

SEQ ID NO: 18699 - protein, 1209 aa, Oryza sativa
  Clone ID: TF_OSC5141j.C1.p2.fg
MDAHPPKNLIEVLGFVRELRMMAFEVGYEVAPEYRQIPHDPNEEKCRVRVTLTSDREDLPSIKFEAEGKKYSHVCQETALVAIGELRHRFDEELESSAFQYHPHKPHGQDYRTYNCPEGEGSATVMHAVYMLSAMDAVGVEREKAAHDRENWNRGRICKLESKVYRLQKELAELKGEAPPPAPKLRLTARKRTSLPPRLQLASKTRVMVNTRTGSESGSGNGHNEGDPTLAQVLAQQTQLINLLVQQAQNQQANNNNQPPPPQNKLADFLRVRPPTFSSTTNPVEAGDWLHAVGKKLDLFQYTEQEKLVDKAIRQEDKYNRMEQKKRSSQRPRIALGPQAAPYPQGGSSSVARPQRQFYNNNTSNHSNDNRNMVTRHVAAPTQNHPVRKEQGSKPGVCFNCGDPGHYADKCPMPRRVKNAPVQNNSNAPAPKARVNHVAAAEAQNAPDVVLGTFPINSIPATVFFDSGATHSFLSKSFAGNHGMEVISLGRPLLVNTLGNQVSSTQYCPSVTIEIEEIPFPSSLIFLESNDLDVILGMDWLTHHIGVIDCANRNVTLTSSNGQTVSFFVSSPKSHGLTLNQVALQEIPIVRDYPDVFPEDLPGMPPKRDIEFWIDLVPGTNPIHKRPYRMAANELAEVKRQVDDLLQEGYIRPSTSPWGAPVIFVEKKDHTQRMCVDYRALNEVTIKNKYPLPRIDDLFDQLEGATVFSKIDLRSGYHQLRIREECTVMSFGLTNAPAFFMNLMNQVFMEYLDKFVVVFIDDILIYSKNKEEHEEHLRLALEKLHEHQLYAKFSKCEFWLPEVKFLGHVISTGGVAVDPSNVESVLNWKQPKTVSEIRSFLGLAGYYRRFIENFSKIARPMTRLLQKDVKYKWTEECEQSFQELKKRLAAAPVLVLPDPRKGFQIWRHYLFGNRTEMYTDHKSLKYIFTQPDLNMRQRRWLELIKDYHPEAQPTLFDQVREAQMNDPDIQEIKKNMRRASQGGASEASRSAATVEDSRVEMGGNRNGFYHRSTQNIDVGGSWDKNLSYAEFSYNNSYQASLQMAPYKALYGRKCRTPLLWDQTGERQVFGTDVLREAEEKVKIIQERLRVAQSRQKSYADNRRRDLTFEEGDYVYLRVTPLRGVHRFQTKEKLAPRFVGPFKILKKCLSVPTEEADPERLEIQEDLTYVEKPVRILEFPTFRRRAFTLRKVQKCLKKLKASHTDPKQRF

SEQ ID NO: 18700 - protein, 1643 aa, Oryza sativa
  unsure (1)..(1643): unsure at all Xaa locations
  Clone ID: TF_OSC900370j.C1.p6.np
VTSWYQSHLDLRTSQMVNPHPPKNLIEVLGFVRELRMMAFEVGYEVAPEYRQIPHDPNEEKCRVRVTLTSDREDLPSIKFEAEGKKYSHVCQETALVAIGELRHRFDEELESSAFQYHPHKPHGQDYRTYNCPEGEGSATVMHAVYMLSAMDAVGVEREKAAHDRENWNRGRICKLESKVYRLQKELAELKGEAPPPAPKLRLTARKRTSLPPRLQLASKTRVVGDAVPDHAEPVIHVLSDEEEEEDPKEREPATPEEEDPSLRSDARRTTNPVEAGDWLHAVGKKLDLFQYTEQEKVSFASHQLHGPAAERCDHFLLNRAEGQPITWREFTAAFKKTHIPSSVVALKKREFRALNXGSRSVREYLHDFNRLARYAPEDVRTDEERQEMFLEGLNDELSFALMAMDYRDFQXLVDKAIRQEDKYNRMEQKKRSSQRPRIALGPQAAPYPQGGSSSVARPQRQFYNNNTSNHSNDNRNMVTRHVAAPTQNHPVRKEQGSKPGVCFNCGDPGHYADKCPMPRRVKNAPVQNNSNAPAPKARVNHVAAAEAQNAPDVVLGTFPINSIPATVFFDSGATHSFLSKSFAGNHGMEVISLGRPLLVNTLGNQVSSTQYCPSVTIEIEEIPFPSSLIFLESNDLDVILGMDWLTHHIGVIDCANRNVTLTSSNGQTVSFFVSSPKSHGLTLNQVALQEIPIVRDYPDVFPEDLPGMPPKRDIEFWIDLVPGTNPIHKRPYRMAANELAEVKRQVDDLLQEGYIRPSTSPWGAPVIFVEKKDHTQRMCVDYRALNEVTIKNKYPLPRIDDLFDQLEGATVFSKIDLRSGYHQLRIREEIPKTAFTTRFGLLECTVMSFGLTNAPAFFMNLMNQVFMEYLDKFVVVFIDDILIYSKNKEEHEEHLRLALEKLHEHQLYAKFSKCEFWLPEVKFLGHVISTGGVAVDPSNVESVLNWKQPKTVSEIRSFLGLAGYYRRFIENFSKIARPMTRLLQKDVKYKWTEECEQSFQELKKRLAAAPVLVLPDPRKGFQVYCDASRHGLGCVLMQDGKVIAYASRQLRPHENNYPTHDLELASVVHALKIWRHYLFGNRTEMYTDHKSLKYIFTQPDLNMRQRRWLELIKDYHPGKANVVADALSKKSYCKMLEGRHLPWELCEEFEKLNLGIVNKGFVAALEAQPTLFDQVREAQMNDPDIQEIKKNMRRGKAIGYIEDEQGTVWLGERNCVPDNKELKDTIMKEAHETLYSIHPGSTKMYQDLKQQFXWASMRREIAEYVALCDVCQRVKAEHQKPAGLLQPLKIPEWKWEEIGMDFITGLPRTSVGHDSIWVVVDRRTKVAHFIPVKTTYMGNKLAELYMARVVCLHGVPKKIVLDRGSQFTSKFWQNLQEGMGTRLNFSAAYHPQTDGQTKRVNXILEDMLRACVLDVGGSWDKNLSYAEFSYNNSYQASLQMAPYKALYGRKCRTPLLWDQTGERQVFGTDVLREAEEKVKIIQERLRVAQSRQKSYADNRRRDLTFEEGDYVYLRVTPLRGVHRFQTKEKLAPRFVGPFKIVSRRGEVAYQVELPLSMEGIHDRFHVSQLKKCLSVPTEEADPERLEIQEDLTYVEKPVRILEFPTFRRRAFTLRKVQNRPCRAAQVRAGRAVSSFGVAASTS

SEQ ID NO: 18701 - protein, 173 aa, Oryza sativa
  Clone ID: TF_OSC9910j.C1.p4.fg
MTEYLHEFNRLARYALEDELVVKAIRLEYKKNRMDNRKRGRIVSQEAQGSSQRQRTKPLQIGESSSACQEQLQQLDISGEINSETNTRNEVNMEKATQLVLVQQDQSQEGNSNGREQQLCFNCYEPGHFARECSKPKHQHPQGQVNNIILTGANAVPVASSSDTAQRSVSKQQ

SEQ ID NO: 18702 - protein, 938 aa, Oryza sativa
  Clone ID: TF_OSC10744j.C1.p25.fg
MEALVGGYTPHLAEGRQAAQTLLDWDSTLELDDFRVASTVSIDIVITRTMAEGHEQKVIEIAITIHDNDYTDQLISLMTKLKINEKPEFYSHAYQWGERWECDMTVKINPPRGERDMYYFRTRHREAFLRLNHIYQDKLQHSRYSYHPMRKPGEDYCTLQDVDYHEQPVKATMSIWMEAADDMYEEALEHMDVQRKRLEEAERREAVLKHKYRILHELYEEREKHNSILNICVARAAFCLHQIPNMGSDDDDDDDGMEGHISPVREDEPHPQDNGEGVLQGLPPSPPPLYPIYSDDEAEEMHSAIDISEPSQEPEVLRPNRDIAKNQGNKGYSAHAEFLRIKPPVFSKSKEPMDAEDWLRAIEKKLTLVRTNEQEKVTFATHQLEGPANEWWEAYQASIEDPTHIITWMEFTIAFRNAFIPTAVIRMKKNEFRGLRQDIQDEKERIERFIEGLRDELRGPMISQDHESFQSLVNKVVRLENDRRMVEGFRKRRMNLQRQSPTRSSLQVRRPYPFKPSLSNARPGMPPILSRPGLRMEDSPCYVCGKFGHFARLCPNRQNMGGQTSYQKPSTTGFIKKNPPIIKSGPNLGRGQVHHIKAEQAQQDPNILMGIGLICTGKINNPRRVVELHLGFADWAFFYFGRACVVHERRKARVSRIRKIIGDSCAQHRHLRRDMRSDQYDHYEEVHNHEKEERDMKEPPVPLFTLKVEAPPSSEEGIKAEQPLVEPTAEIPLSQVDLFAVPCDKEELCDNASLISMPQLVNEHAIPTVNSYCADFKHVVHIANEVEKRELRSSLNTLGYVQFDDFCELDNLKEKLFAKSDLPYPTNIIFHIFGEYNDLGIYFVHRVYICSDLELPVHVDKTYKLERNVIANQIVSTLPCFDWKKQAQGAASPIMGLWACNFIWDPGPGGAHVGCAPTRNRVDLHRQDQQPTERCIDR

SEQ ID NO: 18703 - protein, 480 aa, Oryza sativa
  Clone ID: TF_OSC15148j.C1.p1.fg
MGKPSNVPKSVFQFLKFAQQLKCGVVGLGWLGTSWDPGSGCQFGLNHRRPWVKAGLKCLCNNMFNREKGKNVSGYASSNSSFQLNPPLASRELTRAHPWSIPSMLLSSQLPLVGSQDQNQYVFDRAFATQVNELPMPEEDVPFCHDCREQGHYALNCPWVYVKEAPSLGLAGQTSLNQPPHTKSSLQPSVQSRELNGENPLNPGKCFPPSLSYHVGSHTKQAKGKKSKNQKRKAPMRTEAEVRKMTITSTEWPPAGITIPRRQRGNTFRGAQQLTQHLLSHDGRVSDSEGSDQVSSDYEDESPRHLGEEEMESKACTRCGEIGHVASMCLTLCTHCEEDHPPGECLTRKVTCFLCEGANHVPKDCQLSVLLTKTVEIQRTTLRLSHQLVSSNSNIDDIIPSTNAPPAAPDFAINHSDNTFNTNHSLHRQPQQRIVVDERSCVSPRPTPGQAKGNQPPEGDTEQKTVIRLNQQSEGNFSGE

SEQ ID NO: 18704 - protein, 956 aa, Oryza sativa
  Clone ID: TF_OSC15235j.C1.p1.fg
MVGQLGGPSTLIVCQHHPYHPSNFNNDYNGGSHNNSKQHNHNSTPPPLMAPAQSDLPAMLAQLEQLKKESGGKPGPCFNCGELGHFADKCPKPRRAGPRFVQAHVNHASTEEAQAAQEVVRGTFPVKSIPATVLFDSGATHSFISKKFVGMHGLIREELSTPMRVHTPGNSSTSVQFSPSITIEIQRSPFLANLILLESKDLDVILGMDWLTKFKGVIDCANRTVTLTNEKGETVVYKSLVSPKQGVSLNQIEVEIPVVIEEKNSRKLEDIPIVCEYPEVFPEDLTTMSPKREIEFQIDLAPGTAPIYKRPYRMAANELAEGAPVIFVEKKDKTKRMCVDYRALNEVTIKNKYPLPRIDDLFDQLKGAKVFSKIDLRSGYYQLRIREEDIPKTAFTTRQLLKKDEKFKWTAECDKSFEELKKKLVSTPVLILHDQMKDFQVYCDASRHGLGCVLMQEGRVVAYASRQLRPHEGNYPTHDLELAAVVHALKIWRHYLISNRCEVYTDHKSLKYIFTQPDLNLRQRRWLELIKDYDMSIHYHPGKANVVADALSKKSYCNALCIEGMCEELQQELEHLNVGVIEHEFVAALEARPTLVDQVRAAQVNDPEIAELKKNMRVGKARDFHEDEHGTIWLGERLKRLAELYLSRIMCLLGVPKKIVSDRGSQFTSKFWQKLQEELGTRLNFSTAYHPQTDGQTERVNQILEDMLRAYALDFGGAWDKSLPYAEFSYNNSYQASLQMAPFEALYGRKCRTPLFWDQTGERQLFGTEVLTEAEEKVRTVRERLRIAQSRQKSYADNHRRELTFEAGDYVYLRVTPLRGVHRFQTKGKLTPRFVGPYKILERRGEVAYQLELPSNMLGIHSVFHVSQLKKCLRVPEEQASPDQIEIQEDLTYVEKPTRILETSERRTRNKVIRFCKVQWSHHSEEEATWEREDELKAAHPHLFASSSKSRGRDSV

SEQ ID NO: 18705 - protein, 235 aa, Oryza sativa
  Clone ID: TF_OSC26960j.C1.p1.fg
MRTEEEVRKMTITSTEWPPAGITIPRRQRGNTFRGARQLTQHLLSHGGRVSDSEGSDQVSSDVEDESPRHLGEEEMESKACTRCGEIGHIASRCLTLCPHCEEDHPPGECPTRKVTCFLCEGTNHVPKDCQLSVLLTKTAEIQRTTLRLSHQLVSSNSNLDDIIHSTNAPPAAPDSAVNHSNNTFNTNHSLHRRPQQRIVVDGRSCVSPRPTPGRAKGNQSQECDTKQKTVICFK

SEQ ID NO: 18706 - protein, 415 aa, Oryza sativa
  unsure (1)..(415): unsure at all Xaa locations
  Clone ID: TF_OSC32656j.C1.p2.np
HTITWDEFSSVFKRSHVPAGMITLRKREFRYLKQEDLTVTEYLHEFHRLAHYAPEDVENDEDKQEKYLQGLKDEITVQLLLEEYEDFEKLVDKAIQLESEHNRMKNCKRRIVSIPVFPCGNQRQRTEPLQITGSSVAHQEFPPQEDGHNADNNISNTNDDDTTNNHASCPISDHSNQACNVNIIHQGVDDSINDGTQNDNPSNCDSEKDSNGDSNYGTTDANVSKDFQPPIPTPSQNDRPQTDSSAKKTLICYNCKGPGHYSRDCLQPRQSRSPHYRQFTRSRHPNRIVVTGANAVPVSLKGSKPKDLIVPRSVRNPHKEYHLLEVDAKDMNDKKSRTEAPSSTTAAXSGSVRSSTRDKSGEEKIPSATGDRAKRSRVEKSCXASWLXKTERKKSDKKRSPTYLHASLLESRGPD

SEQ ID NO: 18707 - protein, 922 aa, Oryza sativa
  unsure (1)..(922): unsure at all Xaa locations
  Clone ID: TF_OSC404962j.C1.p3.np
LHAAAPRRCAMSDARSRRSVASSTRRQQDAELAAAEERRXATAHTAAAAARAARLAAAELAAARAEAEAAEDAARAAEVEVETLRSSINGSIAGDITADRELEELARGRARERAERWAAAHLHGGDGGPRDRAPADGNPDGRGLAGGRGLAGGSPEPARGPRRQHGSLSPDRRHGHHGVQMVVRDFGPGGGWPTLTKTNYIEWAAVMRVRLQVRHMWDAVRYGDVDYDEDRRALDALIAAVPPEMQFSLSQKRTAKEAXDAIAAARIGSDRARKSTLQALRKEWENLAFKPGEDVDDLQKMVQYGDDTYDEERAVEKLFRCVPEKYRQIARSIESLLDLSTMSIEEALGRLKVVDGDEPQPLSGPITIGGKLHLTQEQWEASQGDGRKGESSSPTGGHKPRKARGGVQLWWARRRAEGGARRGAQGVATGNHKPARDDACRNCDKLGHWAKDCRQPRRGQAHVARVEEEALLLAHASIELPPAAPAAAAFLHLDEPKVLVSLCNGSSNDKADGWYLDTGATHHMTGRREFFTEFDSSVRGSIKFGDASGVEIKGVGFVTFTAKSGEHRLLTRVYYIPALRNSIISVGQLDENGSRVLVEDGLMRIWDRRRRLLAKVTRGTNRLYILSAQVAQPVCLAARRDDEAWQWHERFGHLHFEALKQLSAKEMVXGMLCLDHVEQLCDVCVVTKQRRLPFPQQTSFRANERLELVHGDLCGPVTPATPGGVHGDLCGPVTPATPGGRRYFLLLVDDLSRYMWVMVLGSKGEATDAIRHEQAAAEAECGRKLCVLRTDNGGEFTAAEFASYCADEGIQRHYTTPYSPQXNGVVERRNQTVMGMARALLKQRGMPVIFWGEAVVTAAYILNRSPTKALDGRTPYEAWHGRKPAVSHLRVFGCLAFAKELGHIGNGQYRYRHSFCFAYAMK

SEQ ID NO: 18708 - protein, 440 aa, Oryza sativa
  Clone ID: TF_OSC417494j.C1.p3.fg
MDEVGCRWTFSRANEGYTSCGPMFNREKGKNVSGYASSNLSFQLNPPLASRELTRAHPWSIPSMLLSSQLSLVGSQDQNQYVFDRAFGTQVNELPMPEEQVPFCHDCREQGHYALNCPWVYVKEAPSLGLAGQTSLNQPPHTKSSLQPSVQSRELNGENPLNPRKCFPPSLSHHVGSRTKQAKGKKSKNQKRKAPMRTEEEVRKMTITSTEWPPAGITIPRRQRGNTFRGARQLTQHLLSHGGRVSDSEGSDQVSSDVEDESPRHLGEEGMESKACTRCGEIGHVASRCLTLCPHCEEDHPPGECPTRKVTCFLCEGTNHVPKDCQLSVLLTKTAEIQRTTLRLSHQLVSSNSNIDDIIPSTNAPPAAPDSAINHSNNTFSTNHSLHRQPQQRIVVDGRSCVSPRPTPGRAKGNQPQEGDTKQKTVIRLKQQSEGSFSCE

SEQ ID NO: 18709 - protein, 470 aa, Oryza sativa
  Clone ID: TF_OSC900108j.C1.p26.fg
MSWHRVGALLLGAQSCLPVPEVPAVGGIGSVLLSMARMGWKLCHVFRLYTVVMFNREKGKNVSGHASSNSSFQLNPPLASRELTRAHPWSIPSMLLSSQLPLVGSQDQNQYVFDRAFATQVNELPMPEEHVPFCHDCREQGHYALNCPWVYVKEAPSFGLAGQTSLNQPPRTKSSLQPSVQSEEPNEDNPLNPRKCFPPSLSHHVGSRTKQAKGKKSKNQKRKAPMRTEEEVRKMTITSTEWPPAGITIPRRQRGNTFRGARQLTQHLLSHGGRVSDSEGSDQVSSDVEDESPRHLGEEEMESKACTRCGEIGHVASRCLTLCPHCEEDHPPGECPTRKVTCFLCEGTNHVPKDCQLSVLLTKTAEIQRTTLRLSHQLVSSNSNLDDIIHSTNAPPAAPDSAINHSNNTFSTNHSLHRQPQQRIVIDRRSCVSPRPTPGRAKGNQPQEGDTKQKTVIRFNQQSEGSFPCE

SEQ ID NO: 18710 - protein, 1530 aa, Oryza sativa
  Clone ID: TF_OSC10731j.C1.p5.fg
MPRYKPKYLFGVEGFVQELRTMSFAIGFGTAPLYAQIPHDRHEEKCRVKVTLNSNSEDIPSVMFEAGEGNYIHACQEVARIAIGELRDRYSDQLADTEYRYHPRQPQGSNHGSYLETEGIENDATTRHLVEMLWAMDETRAEVVLAAQDREDWNRGKICRLEDKVDRLEKELAALKGEEPPQKARIRLTARKRALFVPRYQLAPKVRVVEKEVTPALADPPVVNMVHTRSNGNGPNNNNNNNNNGENPTLAQVLAQQAQLMNMMMQQLQNQQNQGNNHAPPQNKLAEFLRVRPPTFSRTTNPVEASDWLHAIEKKLDLLQCTDQEKVSFASHQLHGPASEWWDHFRLNRTSAEPITWLEFTAAFRKTHIPSGVRQFFNNNAGNNIRNQAPRPVAAPTQQQPAKREQGSKPGVCFNCGDPGHYSDKCPKPRRVKVVPAQSNSTTPASKARVNHVAAAEAQGAPDVILGTFLVNSVPATVLFDSGATHSFLSMSFAGNHGMEVEDLRRPLMVSTPSNQALSLQRSPSVRIEIQEVPFLANLILLESKDLDVILGMDWLARYKGVIDCANRKVTLTSNDGRVVTVHALSSESLRSRLNQMTLEEIPIVREYPDVFPDNLPGMPPKRDIEFRIDLVPGTTPIHKRPYIMAANELAVVKRQVDDLLQKGYIRPSSSPWGAPVIFVEKKDHTQRMCVDYRALNDVTIKNKYPLPRIDDLFDQLKGATVFSKIDLRSGYHQLRIKEEDIPKTAFTTRYGLFECTVMSFGLTNYPAFFMNLMNKVFMEYLDKFVVVFIDDILIYSRTKEEHEEHLHLALEKLREHQLYAKFSKCEFWLSEVKFLGHVISAGGVAVDPSNVESVINWKQPKTVSEVHSFLGLAGYYRRFIENFSKIAKPMTRLLQKDVKYKWSEECEQSFQELKNRLISAPILILPYPKKGFQVYCDASKLGLGCVLMQDGKVVAYASRQLRPHEKNYPTHDLELAAVVHALKIWRHYLFGTRTKVYTDHKSLKYIFTQPDLNMRQRRWLELIKDYDVGIHYHPGKANVVADALSRKGYCNATEGRQLPLELCKEFERLNLGIVSRGFVVALEAKPTLIDQVREAQINDPDIHEIKKNMRRGKAIGFLEDEQGTVWLGKRICVPDNKDLKDAILKEAHDTLYSIHPGSTKMYQDLKERFWWASMKREIAEYIAVCDVCQRVKAEHQKPAGLLQPLKIPEWKWEEIGMDLITGLPRTSLGHDSIWVIDDRLTKVAHFIPVKTTYSGSRLAELYMARIVCLHRVPKKIVSDRGSQFTSKFWKKLQEEMGSKLNFSTAYHPQTDGQTERVNQILEDMLRACALDFGGSWDKNLPYAEFSYNNSYQASLQMAPYEALYGRKCRTLLLWDQTGERQVFGTDILREAEEKVKIIQERLCVAQSRHKSYADNRRRDLSFDEGDYVYFRGTPLRGVHRFHTKGKLAPRFVGPYKIVSRRGEVAYQLELPQSLAGVHNVFHVSQLKKCLRIPTFPESPFLQEKNLKSSKASKASHTDPKQPFEHVDPV

SEQ ID NO: 18711 - protein, 588 aa, Oryza sativa
  Clone ID: TF_OSC401125j.C1.p1.fg
MPRYKPEYLFGVEGFVQELRTMSFAIGFGTAPLYAQIPHDRHEEKCRVKVTLNSNSEDIPSVMFEAGGGNYIHACQEVARIAIGELRDRYSDQLADTEYRYHPRQPQGSDRGGYLETEEIENDATTRHLVEMLWAMDETRAEVVLAAQDREDRNRGKICRLEDKVDRLEKELAALKGEAPPQKARIRLTARKRALFVPRYQLAPKVRVVEKEVTPALADPPVVNHTNPGEAGDWLHAIEKKLDLLQCIDQEKVSFASHQLHGPASEWWDHFRLNRTTAEPITWLEFTAAFRKTHIPSGVVSLKKKEFRSLTQGSRTVTEYLHEFNRLARYAPEDVRTDEERQERFLEGLNDELSYPLMTGDYHDFQKLVDKAIRQEDKYNRMEQKKRRIAHFKAQQGNSQRPRLTLGPQSMPQGGSSSVVRPQHQFFNNNAGNNIRNQAPRPVAAPTQQQPAKREQGSKPGVCFNCGDPGHYSDKCPKPRRVKVVPAQNNSTAPASKARVNHVAAAEAQGAPDVILGTFLVNSVPATVLFDSGATHSFLSMSFAGNHGMEVEDLRRPLMVSTPSNNCTLLSICYCVPRLIPGRGFTHM

SEQ ID NO: 18712 - protein, 690 aa, Oryza sativa
  Clone ID: TF_OSC401249j.C1.p59.np
KVRCGGLCCARGTVTAPFRALGLEWYIPGLEIDLYSRMPRYKPEYLFGVEGFVQELRTMSFAIGFGTAPLYAQIPHDRHEEKCRVKVTLNSNSEDIPSVMFEAGGGNYIHACQEVARIAIGELRDRYSDQLADTEYRYHPRQPQGSDRGGYLETEEIENDATTRHLVEMLWAMDETRAEVVLAAQDREDRNRGKICRLEDKVDRLEKELAALKGEAPPQKARIRLTARKRALFVPRYQLAPKVRVVEKEVTPALADPPVVNMVLTRSNGNGPNINNNNNNNNGENPTLAQVLAQQAQLMNMMMQQLQNQQNQGNNHAPPQNKLAEFLRVRPPTFSSTTNPVEAGDWLHAIEKKLDLLQCIDQEKVSFASHQLHGPASEWWDHFRLNRTTAEPITWLEFTAAFRKTHIPSGVVSLKKKEFRSLTQGSRTVTEYLHEFNRLARYAPEDVRTDEERQERFLEGLNDELSYPLMTGDYHDFQKLVDKAIRQEDKYNRMEQKKRRIAHFKAQQGNSQRPRLTLGPQSMPQGGSSSVVRPQHQFFNNNAGNNIRNQAPRPVAAPTQQQPAKREQGSKPGVCFNCGDPGHYSDKCPKPRRVKVVPAQNNSTAPASKARVNHVAAAEAQGAPDVILGTFLVNSVPATVLFDSGATHSFLSMSFAGNHGMEVEDLRRPLMVSTPSNNCTLLRSDPPDRW

SEQ ID NO: 18713 - protein, 1633 aa, Oryza sativa
  Clone ID: TF_OSC401778j.C1.p1.fg
MHARAAAGGDVTANVIVVVPRGPVPTFLESLSLQEKILKSSKASKASHTDPKQPLSMLIPFKAIVSIQLLHLFSNMPRYKPEYLFGVEGFVQELRTMSFAIGFGTAPLYAQIPHDRHEEKCRDKVTLNSNSEDIPSVMFEAGGGNYIHACQEVARIAIGELRDRYSDQLADTEYRYHPRQPQGSDCGSYLETEGIENDATTRHLVEMLWAMDETRAEVVLAAQDREDRNRGKICRLEDKVDRLEKELAVLKGEAPPQKARVRLTARKRALFIPRYQLVPKVRVVEKEVTPALADPPVVNMVLTHSNGNGPNINNNNNNNGENPTLAQVLAQQAQLMNMMMQQLQNQQNQGNNHAPPQNKLAEFLRVRPPTFSSTTNPVEARDWLHAIEKKLDLLQCTDQEKVSFASHQLHGPASEWWDHFRLNRTTAEPITWLEFTAAFRKTHIPSGVVSLKKKEFRSLTQGSRTVTEYLHEFNRLARYAPEDVRTDEESQERFLEGLNDELSYQLMTGDYHDFQKLVDKAIRHEDKYNRMEQKKRRIAQFKAQQGNSQRPRLTLGPQSMPQGGSSSIVRLQRQFFNNNAGNNIRNQAPRPVAAPTQQQPAKREQGSKPGVCFNCGDPGHYSDKCPKPRRVKVVSAQSNSTAPASKAHVNHVAAAEDQGAPDVILGTFLVNSVPATVLFDSGATHSFLSMSFAGNHGMEVEDLRRPLMVSTPSNQALSLQRSPSVRIEIQEVPFLANLILLESKDLDVILGMDWLARYKSVIVCANRKVKSEPIASEEIPIVQEYPDVFPDDLPGMPPKRDIEFRIDLKDHTQRMCVDYRALNDVTIKNKYPLPRIGDLFDQLKGATVFSKIDLRSGYHQLRIKEEDIPKTTFTTRYGLFECTVMSFGLTNAPAFFMNLMNKFSKCEFWLSEVKFLGHVISAGGVAIDPSNVESVTNWKQPKTVSEIRSFLGLAGYYRRFIENFSKIAKPMTRLLQKDVKYKWSEECEQSFQELKNRLISAPILILPDPKKGFQVYCDASKLGLGCVLMQDGKVVAYASRQLRPHEKNYPTHDLELAAVVHALKIWRHYLFGTRTEVYTDHKSLKYIFTQPDLNMRQQRWLELIKDYDMGIHYHPGKANVVADALSRKGYCNATEGRQLPLELCKEFERLNLGIISRGFVAALEAKPTLIDQVREAQINDPDIQEIKKNMRRGKAIGFVEDGQGTVWLGERICVPDNKDLKDAILKEAHDTLYSIHPGSTKMYQDLKERFWWASMKREIAEYVAVCDVCQRVKAEHQKPAGLLQPLKIPEWKWEEIGMDFITGLPRTSSGHDSIWVIVDRLTKVAHFILVKTTYSGSRLAELYMARIVCLHGVPKKIVSDRGSQFTSKFWKKLQEEMGSKLNFSTAYHPQTDGQAERVNQILEDMLRACALDFGGSWDKNLPYAEFSYNSSYQASLQMAPYEALYNRKCRTPLLWDQTGERQVFRMDILREAEEKVKIIQERLRVAQSRHKSYADNRRRDLSFDEGDYVYLRVTPLRGVHRFHTRGKLAPRFVGPYKIVSRRGEVAYQLELPQSLAGVHNVFHVSQLKKCLRVPTEEANLEQIEVQEDLTYVEKPIRILEIDERRTRNRVIRFCKVHGVITRKKNQLGNEKMN

SEQ ID NO: 18714 - protein, 440 aa, Oryza sativa
  Clone ID: TF_OSC401829j.C1.p8.fg
MDEVGGRWTFSRANEGYTSCGPMFNREKGKNVSGYASSNPSFQLNPPLASRELTRAYPWSIPSMLLSSQLPLVGSQDQNQYVFDRAFATQVNELPMLEEDVPFCHDCREQGHYALNCPWVYAKEAPSFGLAGQTSLNQPPRTKSSLQPSVQRREPNGENPLNPGNCFPPSPSYHVGSRAKQAKGKKSKNQKRKAPMRTEEEVRKMTITSTEWPPAGITIPRRQRGNTFRGARQLTQHLLSHGGRVSDSEGSDQVSSDYEDESLRHLGEEEMESKACPRCGEIGHVASLCFTLCPYCEEDHPPGKCPTRKVTCFLCEGTNHVPKDCQLSVLLTKTAEIQRTTLRLSHQLVSSNINIDDIIPSTNAPPAAPDSAVNHSNNTFNTNHSLHRRPQQRIVVDGRSCVSPRPTPGRAKGNQSQECDTKQKTVIRLNQQSEGNFSCE

SEQ ID NO: 18715 - protein, 1370 aa, Oryza sativa
  Clone ID: TF_OSC900386j.C1.p22.fg
MFEAGGGNYIHACQEVARIAIGELRDRYSDQLADTEYRYHPRQPQGSDRGSYLETERIENDATTRHLVEMLWAMDETRAETVLAAQDREDRNRGKICKLEDKVDRLEKELAALKGEAPPQKARIRLTARKRALFVPRYQMAPKVRVAEKEVTLALADPPVVNMVLTRSNGNSPNINNNNNNNGENPTLAQVLAQQAQLMNMMMQQLQNQQNQGNNHAPPQNKLAEFLRVRPPTFSSTTSPVEPGDWLHAIEKKLDLLQCTDQEKVSFASHQLHGPASEWWDHFRLNRTTVEPITWLEFTAAFRKMHIPSGVLSLKKKEFRSLTQGSRSVTEYLHEFNRLARYAPEDVRTDKQRQERFLEGLNDELSYPLMTGDYHDFQKLVDKAIRQEDNQRPHLTLGPQSLPQGGSSSVVRPQRQFFNNNAGNNIRNQAPRPVAAPTQQQPAKREQGSKPGVCFNCGDPGHYSDKCPKPRRVKVVPAQSNSTAPALKARVNHVAAAEAQGAPDVILESKDLDVILGMDWLARYKGVIDCANRKVTLTSNDGQVVIVHALSSESLRSSLNQMTLEEIPIVREYPDVFPDDLPGMPPKRDIEFRIDLVLGTIPIHKRPYRMAANELAEVKRQVDDLLQKGYIRPSSSPWGAPVIFVEKKDHTQRMCVDYRALNDVTIKNKYPLPRIDDLFDQLKGATVFSKIDLRSGYHQLRIKEEDIPKTAFTTRYGLFECTVISFGLTNAPAFFMNLMNKVFMEYLDKCVVVFIDDILIYSRTKEEHEEHLRLALKKLREHQLYAKFSKCEFWLSEVKFLGHVISAGGVAVDPSNVESVTNWKQPKTVSEIRSFLGLAGYYRRFIENFSKIAKPMTRLLQKDVKYKWSEEYEQSFQELKNRLILAPILILPDPKKSFQVYCDASKIGLGCVLMQDGKVVAYASRQLRPHEKNYPTHDLELTAVVHALKIWRHYLFGTRTEVYTDHKSLKYIFTQPDLNMRQRRWLELIKDYDMGIHYHPGKANVVADALSRKGYCNATEGRLPLELCKEFERLNLGIVSRGFVAALEAKPTLIDQVREAQINDPDIQEIKKNMRRGKAIGFLEDEQGTVWLGERICVPDNKDLKDAILREAHDTLYSIHPGSTKMYQDLKERFWWASMKREIAEYVAVCDVCQRVKAEHQKPAGLLQPLKIPEWKWEEIDGQTERVNKILEDMLRACALDFGGSWDKNLPYAEFSYNNSYQASLQMAPYEALYGRKCRTPLLWDQTGERQVFGMDILREAEEKVKIIQERLRVAQSRHKSYADNRRRDLSFEEGDHVYLRVTPLRGVHRFHTKGKLAPRFVGPYKIVSRRGEVAYQLELPQSLAGVHNVFHVSQLKKCLRVPTEEANLE

SEQ ID NO: 18716 - protein, 1045 aa, Oryza sativa
  Clone ID: TF_OSC30542j.C1.p1.fg
MSYTPPGRRGGGGGGGSGNGRGSASGSGVGNCADGASLPLVPQGRDAGHTARLPILSRTNYPDWALLMRVNLQAQGLWTAIDPGYAEYREDRAALSAILQAVPREMLRGLAKHNSAKATWDAIKTMRVSVDRVREAKEQGFRRQFEAMRFKDGETPEEFAMRLTAVVADIRDMGGVMEDEHINKKLLRVVPKKYKPVAISLEQLLDVKTMALEELVGRLSTVDSYSDDEEASDGSKLYLTEEQWQARVKQREQEGSSSSNKGRAGSSNQNRRGKAGDSPKGKKMATGGHGRRDISKVKCFNCDEYGHYSKQCRKPRRQRRGEANANLVQAEEEPTLLMAHVMGVSLAGEAAIGRTPCVQEVHLTEKKVVLDREDGREEEKTSEWFLDTGATNHMTGARSAFAELDTGVVGTVKFGDGSVIDIQGHGTVVFQCKNGDHRSLEAVYYIPKLRKNIVSVGRLDARGYDAHIWHGVFTLRYPEGMLLAKALRRLAQGGMVRGLQQIDHNDQLCDGAQTALELVHGDLCGPITPATPGGKKYFLLLVDDMSRHMWIRLLSAKHEASAAIKQFQAGVEKESNRKLMALRIDRGGEFTSVEFMEYCADTGVKRQLTAPYSPQQNGVVERRNQTVVAAARSMLKAANMPAYFWGEVVVAAVYVLNRSPTKSLDGVTPYEAWHGRRPTVEHLRVFGCVGYVKTAKPNLRKLDDHGTRMVFIGYEQGSKAYRMYDPVARRLCVSRDVIFDGTTFWDWGSNTDEEGDQDAYVEFTVENFTVPVQGGETHAQDAAVTPTMLATSPTSSTGTAITLPSGVEFCSSPTDASEGTNEGPRRYRTVANTLATTAPILDFDYSDQCLMAAEEPANFLEAEQESCWRKAMLEEMDSIEGNNTWFLCDLPSSHRAIGLEWVYKIKRDAKDAIVKYKARLVAKGYVQQHGVDFDEVFAPVARMETVRLLIAMAAHQGWEVHHMDVKSAFLNRELEKDVYVVQPPGFVVDGKEDKVLKLKKALYGLKQAPRAWYAKLDSSLVSLNFVKSGVESAVYIQGEKNSRLV

SEQ ID NO: 18717 - protein, 1282 aa, Oryza sativa
  Clone ID: TF_OSC900297j.C1.p6.fg
MSYTPPGRRGGGGGGGSGNGRGSASGSGVGNCADGASLPLVPQGRDAGHTARLPILSRTNYPDWALLMRVNLQAQGLWTAIDPGYAEYREDRAALSAILQAVPREMLRGLAKHNSAKATWDAIKTMRVSVDRVREAKEQGFRRQFEAMRFKDGETPEEFAMRLTAVVADIRDMGGVMEDEHINKKLLRVVPKKYKPVAISLEQLLDVKTMALEELVGRLSTVDSYSDDEEASDGSKLYLTEEQWQARVKQREQEGSSSSNKGRAGSSNQNRRGKAGDSPKGKKMATGGHGRRDISKVKCFNCDEYGHYSKQCRKPRRQRRGEANANLVQAEEEPTLLMAHVMGVSLAGEAAIGRTPCVQEVHLTEKKVVLDREDGREEEKTSEWFLDTGATNHMTGARSAFAELDTGVVGTVKFGDGSVIDIQGHGTVVFQCKNGDHRSLEAVYYIPKLRKNIVSVGRLDARGYDAHIWHGVFTLRYPEGMLLAKFQAGVEKESNRKLMALRIDRGGEFTSVEFMEYCADTGVKRQLTAPYSPQQNGVVERRNQTVVAAARSMLKAANMPAYFWGEVVVAAVYVLNRSPTKSLDGVTPYEAWHGRRPTVEHLRVFGCVGYVKTAKPNLRKLDDHGTRMVFIGYEQGSKAYRMYDPVARRLCVSRDVIFDGTTFWDWGSNTDEEGDQDAYVEFTVENFTVPVQGGETHAQDAAVTPTMLATSPTSSTGTAITLPSGVEFCSSPTDASEGTNEGPRRYRTVANTLATTAPILDFDYSDQCLMAAEEPANFLEAEQESCWRKAMLEEMDSIEGNNTWFLCDLPSSHRAIGLEWVYKIKRDAKDAIVKYKARLVAKGYVQQHGVDFDEVFAPVARMETVRLLIAMAAHQGWEVHHMDVKSAFLNRELEKDVYVVQPPGFVVDGKEDKVLKLKKALYGLKQAPRAWYAKLDSSLVSLNFVKSGVESAVYTQGEKNSRLVVGVYVDDLIITGASLMEINKFKEQMQALFKMSDLGLLSYYLGMEVKQGKEGITVSQGAYAAKILDKAGMRDCNPCQTPMDARLKLSKEGGECVEETQFRSIIGSLRYLVNTRPDLSYSVGYVSRFMEKPTSEHWAAMKHILRYVAGTLNLGVEFRKKQHQVPQLNGYSDSDMAGDIDDRKSTTGVLFKLGDSLISWQSQKQKVVALSSCEAEYIAAATAAVQGVWLARPIGELEGQEPGCALIKVDNKSAISLCKNPVLHDRSKHIDTKFHFIRDCVDQKRVEVEYIRSEDQLADILTKPLGKIRFLELRGKLGLVPV

SEQ ID NO: 18718 - protein, 435 aa, Oryza sativa
  unsure (1)..(435): unsure at all Xaa locations
  Clone ID: TF_OSC23022j.C1.p3.np
MSWQRVGALLLGSVLPACPGYPGRRGIGSVLLSKARMGWKLCHIFTTGSKAMMRSKDVSWVKMYTSDQSKSIRIAEPSDMGKPSNVPKSVLSKPLQQMADNEKGNKVRSQDIGTSSSRVNEAPDTSCVTLVQHLINQNRLLIEILQQHQTPILNLSNTTSSAVGGSPSTHTTSQHAASIPKDPWXRATCXPKRSKXHLLMCDEQGHYARERPQQKRKTPMRTEDEVRKMIITSTEWPPPGMTRRQRRNTFRGAPQLTEHLLANGGRVSDSEDSDQVSSDDEDEMERKACSRFFGSKACTRCGEIGHVASMCLTLCTHCEEDHPPGECPTRKVTCFLCEGTNHVPKDCQLSVLLTKTAEIQRTTLRLSRQLVSSNSNIDDIIHSTNAPLAAPDSAVNHSNNTFSTNHSLHRQPQQRIVVDGRSCFSPRPTPGRAKG

SEQ ID NO: 18719 - protein, 165 aa, Oryza sativa
  unsure (1)..(165): unsure at all Xaa locations
  Clone ID: TF_OSC25029j.C1.p1.np
SKACTRCGEIGHVASMCLTLCTHXEEDHPPGECPTRKVTCFLCEGTNHVPKDCQLSVLLTKTAEIQRTTLRLSHQLVSSNSNIDDIIHSTNAPPSSAINHSNNTFSTNHSLHRQPQQRIVVDGRSCVSPRPTPGRAKGNQPPEGDTKQKTVIRFNPQSEGSFSCE

SEQ ID NO: 18720 - protein, 211 aa, Oryza sativa
  unsure (1)..(211): unsure at all Xaa locations
  Clone ID: TF_OSC32065j.C1.p1.np
TLEDPLVSSXSIMNQPSDXWRLKSSDQPKRHLFGPRVSDMSSLSKACTRCGEIGHVASMCLTLCPHCEEDHPPGECPIRKVTCFLCEGTNHVPKDCQLSVLLTKTAEIQRTTLRLSRQLVSSNNNIDDIIHSTNAPLAPPNSAINHGNNTFSTNHSLHRQPQQRIVVDGRSCVSPRPTPGQAKGNQPPEGDTKQKTVIRFNQQSEGSFSCE

SEQ ID NO: 18721 - protein, 1109 aa, Oryza sativa
  Clone ID: TF_OSC400192j.C1.p34.fg
MEANDWLHAIEKKLNLLQCNDQEKVAFATHQLQGPASAWWDNHMATRPPDDVRTDAEKQEKFMAGLDDELTNQLISGDYADFERLVDKAIRQEDQRNKMDRKRKAAQFRAHQGSHQRPRFTPGQQGGPTTMIVRQYRPFNPSNFHQGASGSQDQHGGQLNRGAAPRPPVAPAQSGPSAQAKKETGTKPGSCFNCGELGHLADKCPKPRRAGPRFVQARVNHASAEEAQAAPEVVLGTFPVNSIPATVLFDSGATHSFISKKFVGMHGLVREELSTPMRVHTPGNSSTSVQFSPSITIEIQRSPFLANLILLESKDLDVILGMDWLTKFKGVINCANRTVTLTNEKGETVVYKSPDSPKQGVPLNQIEVEIPVVTEEKNSRKLEEIPIVCEYPEVFPEDLTTMPPKREIEFRIDLAPGTAPIYKRPYIMAANELAEVKKQVDEQLQKGYIRPSTSPWGASVIFVEKKDKTKRMCVDYRALNEVTIKNKYPLPRIDDLFDQLKGAKVFSKIDLRSGYHQLRIREEDIPKTAFTTRYELYECTVMSFGLTNAPAFFMNLMNKVFMEFLDKFVVVFIDDILIYSKSEEEHEQHLRLVLEKLKEHQLYAKFSKCDFWLTEVKFLGHVITAQGYYRRFIENFSRIARPMTQLLKKDEKFKWTAECDKSFEELKKKLVSAAVLILPDQMKDFQVYCDASRHGLGCVLMQEGRVVAYASWLLRPHEGNYPTHDLELAAVVHALKIWRHYLIGNRCEVYTDHKSLKYIFTQPDLNLRQRRWLELIKDYDMSIHYHPGKANVVADALSRKSYCTALCIEGMCEELQQEFEHLNVGIVEQGFVAALEARPTLVDQVRAAQVNDPEIAELKKNMRVGKARDFLEDEHGTIWLRERLCVPDDKELKDLILTEAHQTQYSIHLGSTKMRASTVRDRGISGSRRESQNHQERLRIAQSRQKSYADNCRRELTFEVGDYVYLRVTPLWGVHRFQTKGKLAPRFVGPYKILERRGEVAYQLELPSNMIDIHDVFHMSQLKKCLRVPEEQADSEHIDIQEDLTYVEKPVRILDTSERRTRNKVTRFCRVQWSHHSEEEATWEREDELKAAHPHLFASSSESRGRDSV

SEQ ID NO: 18722 - protein, 1662 aa, Oryza sativa
  unsure (1)..(1662): unsure at all Xaa locations
  Clone ID: TF_OSC100051j.C1.p6.np
IKYDCHVALKASNNGKLVRIIALKDEIARLKKENAQLKGLPAPGGVRIRTTPRKTATAPVRIQLAPRNPPPPAILAAPAPTPAVPVPAPASALSFAPASAARGPASGNGGWLSATPSGSRDRSSSGSEPGSRETYLPDSRSRXEGSGLFLKMVYTRNGNRAIGEGSNGEERTNGVHPNRDSGNGPPPLPENPTLAQVMAHQTQMMTAMMQQMQQQHQQMYQRMQQQAEXQFGPPPPQSKLPEFLRVRPPTFSSTTNPMEVNDWLHAIEKKLNLLQCNDLEKVAFATHQLQGPASAWWDNHMATRPPGTEVTWAEFCRSFRKAQVPDGVVAQKKREFRALHQGNRTVTEYLHEFNRLARYAPEDVRTDAEKQEKFLAGLDDELTNQLISGDYADFERLVDKAIRQDQRNXMERKRKAAQFRSNQGSHQRPRFTPGQQGGPTTLIVRQHRPFSASNFHQGASGSQNHHGGQPNRSAAPLPPMAPAQSAPSAQAKKETGTKPGSCFNCGELGHFADKCPKPRRVGPRFVQARVNHASAEEAQAAPEVVLGTFPVNSVPATVLFDSGATHSFISKKFVGMYGLRKKELSTPMKVHTPGNSSTSVSYSPSVLIEIQRSPFLANLILLESKDLDVILGMDWLTKFKGVIDCANHTVTLTNEKGETVVYKSPVSPKQGISLNQIKVENPVTTGEKSSRKLDDIPIVCEYPEVFPKDLTTMPPKREIEFRIDLAPGTAPIYKRPYRMTANELAEVKKQVDEXLQKGYIRPSTSPWGAPVIFVEKKDKTKRMCVDYRVLNEVTIKNKYPLPRIDDLFDQLKGAKVFSKIDLRSGYHXLRIREEDIPKTAFTTRYGLYECTVMSFGLTNTPAFFMNLMNKVFMEFLDKFVVVFIDDILIYSKSEEEHEQHLRLVLEKLKEHRLYAKFSKCDFWLSEVKFLGHVITAQGVAVDPSNVESVTKWTPPKTVSQIQSFLGLAGYYRRFIENFSRIARPMTXLLKKDEFKWTAECDKSFEELKKKLVSAPVLILPDQMKDFQVCCDASRHGLGCVLMQEGRVVAYALRQLHPHEGNYPTHDLELAAVVHALKIWRHYLIGNHCEVYTDHKSLKYIFTQPDLNLXQRRWLELIKDYDMSIHYHPGKANVVADALSRKSYCNALCIEGMCEELQQELEHLNVGVVEHGFVAALEARPTLVDQVRAVNDLEIAELKKNMRVGKARDFLEDEHGTIWLAERLCVPDDKELKDLILTEAHQTHYSIHPGSIKMYQDLKEKFWWVSMRREIAEFIALCDVCQXVKAEHQRPAGLLQPLQIPEWKWEEIGMDFITGLPRTSSGHDSIWVVVDRLTKVAHFIPVHTTYTGKRLAELYLSRIMCLHGVPKKIVSDRGSQFTSKFXQKLQEELGTRLNFSTAYHPQTDGQTERVNQILEDMLRACALDFGGAWDKSLPYAEFSYNNSYQASLQMAPFEALYGRKCRTPLFWDQTGEFGTEVLREAEEKVRTIRERLRIAQSRQKNYADNRRRELTFETGDYVYLRVTPLRGVHRFQTKGKLAPRFVGPYKILERRGEVAYQLELPSNMIGIHDVFHVSQLKKCLRVPEEQANSEHIDIQEDLTYVERPLRILKTSERRTRNKVTRFCRVQWSHHSEEEATWEREDELKAAHPHLFASSSESRGRDSV

SEQ ID NO: 18723 - protein, 1185 aa, Oryza sativa
  unsure (1)..(1185): unsure at all Xaa locations
  Clone ID: TF_OSC100217j.C1.p1.np
MADHPPNHRGEAMDDFVAELARMTLVVGYPNVPEYSTVLPLSGEFPHRVRPEVHGYVGTCLANMVVEASGGTADHTCQEAAXLMMARLRKRHNYIFCNTAYRFHPRRASGDDVSTFRPTAGENDTTFGHMCAVMRGMDRMHSDLRKASKALNDGKLVRIIALKDEIARLKKENAQLKGLPIPGGVRIRNTPRKSTTAPVRIQLAPRNPPPPAPPAAPPVPPAVSEVPVSAPTSALSFAPASAVRGPASGNEVPVSAPTSALSFAPASAVRGPASGNGGCFLQMVYTRNGSRTTGEGSNGEERTDGVHPNSNSGNGPPPLPKNLTLAQVMAHQTQMMAAMMQQMHQRMQQQAEQQQQQFGPPRPQSKLPEFLRVRPPTFSSTTNPMEANDWLHAIEKKLNLLQYNDQEKVAFATHQLQGPASAWWDNHMATRPLGTEVTWAEFCRSFRKAQVPDGVVAQKKREFRALHQGNRTVIKYLHEFNRLARYAPEDVRTDAEKQEKFLAGLDDELTNQLISGDYADFEKLVDKAIRQEDQRNKMDRKRKAAQFRSNQGSHPXPRVTSGQQSGPTTMIVRQHRPFNSSNFHHGTSGSQNHHGGQPNRSAAPRPPMAPAQSAPSAQVKKETGTKPGSCFNCGELGHFADKCPKPRRAGPRFVXARVNHASAEEAQAAPEVVLGTFSVNSVPATVLFDSGATHSFISKKFVGMHGLRKEELSTPMRVHTPGNSSTSVSYSPSVLIEIQRSPFLANLILLESKDLDVILGMDWLTKFKRVIDCANRTVTLTNEKGETVVYKSPASPKQRISLNQIEVEEPVTTEQKSSPKLEDIPIVCEYPEVFPEDLTTMPPKREFEFRIDLAPGTAPIYKRPXRMAANELAEVKKQVDEQLQKGYTRPSTSPWGAPVIFVEKKDKAKRMCVDYRALNEVTIKNKYPLPRIDDLFNQLKGAKVFSKIDLRSGYHXLRIREEDIPKTAFTTRYGLYECMVMSFGLTNAPAFFMNLMNKVFMEFLDKFVVVFIDDILIYSKSEEEHEQHLRLVLEKLKEHQLYAKFSKFDFWLLEVKFLGHVITAQGVAVDPSNVESVTKWTPPKTVSXIRSFLGLAGYYRRFIENFSSIARPMTQLLKKDEKFKWTAEFDKSFEELKKKLVSAPVLILPDQRKDFQVYCDASRHGLGCVLVQEARVSSSVQQPRR

SEQ ID NO: 18724 - protein, 1571 aa, Oryza sativa
  Clone ID: TF_OSC101121j.C1.p1.fg
MGCKMAGHPPNHRGEGMINFVAELARMTLVVGYPNAPEYTTIPPLSGELPHRVRLEVHGYVGTCLANMVVEASGGSTDHACQEAAYLMMARLRERHNYIFHDTAYRFHPRRASGDDISTFRPTAGENDTTFSHMCAVMRGLDRMHSDLHKATKALNDGKLMRIVTLKDEIARLKRENAQLKGLPAPGGVRIRTTPARRRRHPCASSLRPGTHLHQQLPQHLQFRPQFLQLQLQLPRPLSPSLQHQPPEVQPVAPEVGCLLLPVAAAISVAAAPVAHSQAAARLTCQAPGVAQRYRMVYTRNGSRATGEGSNGEERTDGAHPHSDSGNGPPPLPENPTLAQVMAHQTQMMAAMMQQMQQQHQQMHQRMLQHAEQQHQQFGPPPPQSKLPEFLRVRPPTFSSTTNPMEANDWLHAIEKKLNLLQCNDQEKVAFATHQLQGPASAWWDNHMATRPPDGVVAQKKREFRALHQGNRTVTEYLHEFNRLARYAPEDVRTDAEKQEKFMAGLDDELTNQLISGDYADFERLVDKAIRQEDQRNKMDRKRKAAQFRAPQGSHQRPRFTPGQQGGPTTMIVRQYRPFNPSNFPQGASGSQNHHGGQPNRGAAPRPPMAPAQSGPPAQAKKETGAKPGSCFNCGELGHFADKCPKPRRAGPRFIQARVNHASAEEAQAAPEVVLDLDVILGMDWLTKFKGVIDCANHTVTLTNEKGETVVYKSLVSPKQGVSLNQIETEIPVDTVEKNLRKLEYIPIVCEYPEVFPEDLTTMPPKREIEFRIDLAPGTAPIYKRPYRMAANELAEVKKQVDEQLQKGYIRPSTSPWGAPVIFVEKKDKTKRMCVDYCALNEVTIKNKYPLLRIDDLFDQLKGAEVFSKIDLRSGYHQLRIQEEDIPKTAFTTRYGLYECTVMSFGLTNAPAFFMNLMNKVFMEFLDKFVVVFIDDILIYSKSEEEHEQHLRLVLEKLKEHQLYAKFSKCDFWLTEVKFLGHVITAQGVAVDPSNLLKKDEKFKWTAECDKSIEELKKKLVSAPVLILPDQMKDFQVYCDASRHGLGCVLMQEGRVVAYASRQLRPHEGNYPTHDLELAAVVHALKIWRHYLIGNRCEVYTDHKSLKYIFTQPDLNLRQRRWLELIKDYDMSIHYHPGKANVVADALSRKSYCTALCIEGMCEELRQEFEHLNVGIVEHGFVAALEARPTLVDQVRAAQVNDSEIAELKKNMRVGKARDFHEDEHGTIWLGERLCVPDDKELKDLILTEAHQTQYSIHPGSTKMYQDLKEKFWWAEHQRPAGLLQPLQIPEWKWEEIGMDIITGLPRTSSGHDSIWVVVDRLTKVAHFIPVHTTYTGKRLAELYLSRIMCLHGVPKKIVSDRGSQFTSKFWQKLQEKLGTRLNFSTAYHPQTDGQTERVNQILEDMLRACALDFGGAWDKNLPYAEFSYNNSYQASLQMAPFEALYGRKCRTPLFWDQTGERQLFGTEVLAEAEEKVRIIRERLRIAQSRQKSYADNRRRKLTFEAGDYVYLRVTPLRGVHRFQTKGKLAPRFVGPYKILERRGEVAYQLELPSNMIGIHDVFHVSQLKKC

SEQ ID NO: 18725 - protein, 1473 aa, Oryza sativa
  Clone ID: TF_OSC102114j.C1.p1.fg
MSTTAPVRIQLAPRNPPPPAAPAAPPVPPAVPAAPAPAPAPVHMSAPASALSFAPASAARGPASGNGGCLFGMVYTRNGSRATGEGSNGEERTEGVHPNSNSGNVPPPLPENPTLAQVMAHQTQMMAAMMQQMQQQHQQMYQRMLQHAEQQHQQFGPPPPQSKLPEFLRVRPPTFSSTTNPMEANDWLHAIEKKLNLLQCNDQEKVAFTTHQLQGPASAWWDNHMATRPPGTEVTWAEFCRSFRKAQVPDGVVAQKKREFRALHQGNRTVTEYLHEFNRLARYAPEDVRTDAEKQERFMAGLDDELTNQLISGDYADFERLVDKAIRQEDQRNKMDRKRKAAQFRAPQGSHQRPRFAPGQQGGPTTMIVRQYRPFHPSNFPQGASGSQNHHGGQPNRGAAPRPPMAPAQSGPSAQARKETGAKPGSCFNCGELGHFADKCPKPRRAGPRFIQARVNHASAEEAQAAPEVVLGTFPVNSIPTTVLFDSGATHSFISKKFVGMHGLIREELSTPMRLTKFKGVIDCVNRTVTLTNEKGETVVYKSPNSPKQGVSLNQIEAEIPVVTMEKNLRKLEDIPIVYEYPEVFPEDLTTMPPKREIEFRINLAPGTAPIYKRPYRMAANELAEVKKQVDEQLQKGYIRPSTSPWGAPVIFVEKKDKTKRMCVDYRALNEVTIKNKYPLPRIDDLFDQLKGAKVFSKIDLRSAYHQLIIREEDIPKTAFTTRKCDFWLTEVKFLGHVITAQGVAVDPSNVESVTKWTPPKTVSQIQSFLGLAGYYRRFIENFSRIARPMTQLLKKDEKFKWTAECDKSFEELKKKLVSAPVLILPDQMKDFQVYCDASRHGLGCVLMQEGRVVAYASRQLRPHEGNYPTHDLELAAVVHALKIWRHYLIGNRCEVYTDHKNLKYIFTQPDLNLRQRRWLELIKDYNMSIHYHPGKANVVADALSRKSHCTALCIEGMCEELRQDFEHLNMGIVEYGFVAALEARPTLVDKVRVAQVNDSEIAELKKNMRVGKARDFHEDEHGTIWLGERLCVPDDKELKDLILTEAHQTQYSIHPGSTKMYQDLKEKFWWVSMRREIAEFVALCDVCQRVKAEHQRPAGLLQPLQIPEWKWEEIGMDFIIGLPWTSSGHDSIWIVMDRLTKVAHFIPVHTTYTGKRLAELYLSRIMCLHRVPKKIVSNRGSQFTSKFWQKLQEELGTRLNFSTAYHPQTDGQTERVNQILEDILRACALDFGGAWDKSLPYAEFSYNNSYQASLQMAPFEALYGRKCRTPLFWDQTGERQLFGTEVLAEAEEKVRIIKERLRIAQSRQKSYADNRRRELTFEAGDYVYLRVTPLRGVHRFQTKGKLVPRFVGPYKILERRGEVAYQLELPSNMIGIHDVFHVSQLKKCLRVPEEQADSEHIDFQEDLTYVEKPVHILDTSERRTRNKVTRFCRVQWSHHSEEEATWEREDELKAAHPHLFASSSESRGQDSV

SEQ ID NO: 18726 - protein, 1495 aa, Oryza sativa
  Clone ID: TF_OSC102349j.C1.p22.fg
MVYTRNGSRATGEGSNGEERTDGAHPHSDSGNGPPPLPENPTLAHVMAHQTQMMAAMMQQMQQHQQMHQRMLQHAEQQHQQFGPPPPQSKLPEFLRVRPPTFSSTTNHMEANDWLHAIEKKLNLLQCNDQEKVAFATHQLQGPASAWWDNHMATRPPGTEVTWAEFCRSFRKAQVPDGVVAQKKREFRALHQGNGTVTEYLHEFNRLARYAPEDVHTDAEKQEKFMAGLDDELTNQLISGDYADFERLVDKAIRQEDQRNKMDRKRKAAQFRAPQGSHQRPRFASGQQGGPTTMIVRQYRPFNPSNFPQGARGSQNHHGGQPSRGAAPRPPTAPAQSGPSAQAKKETGTKPGSCFNCGELGHFADKCPKPRRAGTRFIQARVNHASAEEAQAAPEVVLGTFPVNSIPATVLFDSGATHSFISKKFVEMHGLIREELSTPMRVHTPGNSSTSVQFSPSITIEIQGSPFLANLILLESKDLDVILGMDWLTKFKGVIDCANRTVTLTNEKGETVVYESPDAPKRGVSLNQIEAEIPVDTVEKNLRKLEDIPIVCEYPEVFPEDLTTIAPKREIEFRIDLAPGTAPIYKRPYRMAANELAEVKKQKKDKTKRMCVDYRALNEVTIKNKYPLPRIDDLFDQLKGAKVFSKIDLRSSYHQLRIREEDIPKTAFTTRYGLYECTVMSFGLTNAPAFFMNLMNKVFMKFLDKFVVVFIDDILIYSKSKEEHEQHLRLVLEKLKEHQLYAKFSKCDFWLTEVKFLGHVITAQGVAVDPSNVESVTKWTPPKTVSQIRSFLGLAGYYRRFIENFSRIARPMTQLLKKDEKFKWTVECDKSFEELKKKLVSAPVLILPDQMKDFQVYCDASRHGLGCVLMQEGKVVAYASRQLRPHEGNYPTHDLELAAVVHALKIWRHYLIGNRCKVYTDHKSLKYIFTQPDLNLRQRRWLELIKDYDMSIHYHPGKANVVADALSRKSYCTALCIESMCEELRQEFEHLNVGIVEHGFVAALEARPMLVDQVRAAQVNDSEIAELKKNMRVGKARDFHEDEHGTIWLGERLCVPDDKELKDLILTEAHQAQYSIHPGSTKMYQDLKEKFWWVSMSKEIAEFVALCDVCQRVKAEHQRPAGLLQPLQIPEWKWEEIGMDFITGLPRTSSGHDSIWVVVDRLTKVAHFIPVHTTYTGKRLAELYLSRIMCLHGVPKKIVSDRGSQFTSKFWQKLQEELGTRLNFSTAYHPQTDGQTERVNQILEDMLRACALDFGGAWDKSLPYTEFSYNNSYQASLQVAPFEALYGRKCRTPLFWEQTGERQLFGTEVLAEAEEKVRTIRERLRIAQSRQKSYADNRRRELIFEAGDYVYLRVTPLWGVHRFQTKGKLVPRFVGPYKILERRGEVAYQLELPSNMIGIHDVFHVSQLKKCLRVPEEQADSEHIDIQEDLTYVEKPVRILDTSERRTRNKVTKFCRIQWSHHSKEEATWEREDELKAAHLHLFTSSSESRGRDSV

SEQ ID NO: 18727 - protein, 1133 aa, Oryza sativa
  Clone ID: TF_OSC11733j.C1.p1.gm
MVYTRNGSRTAGEGSNGEERIDGVHPNSDSGNGPPLLPENPTLAQSKLPEFLHVRPPTFSSTTNPMEANDWLHAIEKKLNLLQCNDQEKVAFATHQLQGPASAWWDNHMATRPPGTEVTWAEFCRNFRKAQVPDGVVAQKKREFQALHQGNRTVTEYLHEFNRLARYASEDVRTDAEKQEKFLAGLDDELTNQLISGGYADFEKLVDKAIHQEDQCNKMDRKRKAAQFRSNQGSHPRPRFTPRQQSGPTTMIVRQHRPFNSSSFHQGASGSQNHHGGQPNRRAAPRPPITPAQSAPSAQAKKETGTKPGSCFNCGELGHFADKCPKPRRVGPRFVQARDNHASAEEARAAPEVVLVTLTNEKGETVVYMSPVSPKQRISLNQIEVENPVTTEQKGLQKLEDIPIVCEYPEVFLEDLTTMPPKRELEFRIDLAPGTAPIYKKPYRMATNKLAQVKKQVDEQLQKGYIRPSTLPWGAPVIFVEKKDKTKRMCVDYRALNEVTIKNKYPLPRIDDLFDQLKGAKVFSKIDLRSGYHQLRIREEDIPKTAFTTRYGLYECTVMSFRLTNAPAFFMNLMNKVFMEFLDKFVVEHQLYAKFSKCDFWLLEVKFLGHVITAQCVAIDPSNVESVTKWTPPKTVSQIRSFLGLAAECDQSFEKLKKKLVTAPVLILPDQTKDFQVYYDASRHGLGCVLMQEGRVVAYASRQLRPHEGNYPTHDLELAAVVHALKIWRHYLIGNRCEVYTDHKSLKKSYCNALCTEGMCKELQQELEHLNLGLVEYGYVAVLEARPTLVDQVRAAQVNDPEIAELKKNMRVGKAQDFHEDEHGTIWFGERLCVPDDKELKDLILTEAHQTQYSIHPGSTKMYQDLKEKFCAYHIYGEEIGRAVPDKDHVSAWGDYMYLRVTPLRGVHRFQTKGKLAPRFVGPYKILERRGEVAYQLELPSNMIGIHDVFHVSQLKKCLRVLEEQADSEHIDIQEDLTYVEKPVRILETSERRTRNKVTRFCRADAQPSRPTGRGPAEPAASLLSPGVADRWGPPIGPIPFLQPAPTRSTTTAAPTTTATPSLFFPISSSPPEPSNALAPSPFFLTTTPPFRSSVADTPSRADNAVAFAVVRATPVTPFSLDPAAGTQLRAGH

SEQ ID NO: 18728 - protein, 1230 aa, Oryza sativa
  Clone ID: TF_OSC12096j.C1.p12.fg
MEANDWLHAIEKKLNLLQCNDQEKVAFATHQLQGPASAWWDNHMATRPPGTEVTWAEFCRSFRKAQVPDGVVAQKKRKFRALHQGNRTVTEYLHEFNRLARYASEDVRTDAEKQEKFMAGLDDELTNQLISGDYADFERLVDKAICQEDQRNKMDRKRKAAQFRSNQGNHQRPRFAPGQQGGPTTMIVRQYRPFNSSNFHQGASGSQNHHGGQPNRGAAPRPPVAPAQSGPSAQAKKETGTKPGSCFNCGELGHFADKCPKPRRAGPRFVQARVNHASAEEAQAEPKVVLGTFPVNSIPAIVLFDSGATHSFISKKFVGMHGLRKEELNTPMRVHTPGNSSTSVSFSPSVLIEIQRSPFLANLILPESKDLDVILGMDWLTKIKGVIDCANRTVTLTNEKGETVVYKSLVSPKQGVSLNQIEAEIPVVTKEKNPRKLEEIPIVCEYPEVFPEDLTTMPPKREIEFRIDLAPGTAPIYKRPYRMAANELAEVKKQVDEQLQKGYIRPSTSPWGAPVIFVEKKDKTKRMCVDYRALNEFVVVFIDDILIYSKSEEEHEQHLRLVLEKLKEHQLYAKFSKCDFWLTEVKLLGHVITAQGVAVDPSNVELVTKWTPLKTVSQIRSFLGLADERLPSLLRCIPPRTWMCPNARGQSGCVCSRQLRPHEGNYPTHDLELAAVVHALKIWRHYLIGNRCEVYTDHKSLKYIFTQPDLNLRQRRWLELIKDYDMSIHYHPGKANMVADTLSRKSYCTALCIEGMCEELRQEFEHLNVGIVEHGFVATLDARPTLVDQVRAAQELKDLILTEAHQTQYSIHPGSTKMYQDLKEKFWWVSMRREIAEFVALCDVCQRVKAEHQRLAGLLQPLQIPEWKWEEIGMDFITGLPRTSSGHDSIWVVVDRLTKVSHFIPVHTTYTGKRLVELYLSRIMCLHGVPKKIVTDRGSQFTSKFWQKLQEELGTRLNFSTAYHPQTDGQTKRVNQILEDMLRASALDFGGAWDKSLPYAEFSYNNSYQASLQMAPFKALYDRKCRTPLFWDQIGEHQLFGTEVLAEAEEKVRTIRERLRIAQSRQKSYADNRRRELTFEAGDYVYLRVTPLRRVHRFQTKGKLAPRFVGPYKILERRGEVAYQLELPSNMIGIHDVFHVSQLKKCLRVPKEQADSEHIDIQEDLTYVEKPVHILDTSKRRTRNKVTRFCRVQWSHHSEEEATWEREDELKAAHPHLFTSSSESRGRDSV

SEQ ID NO: 18729 - protein, 640 aa, Oryza sativa
  Clone ID: TF_OSC12096j.C1.p15.gm
MVYTRNGSRTTGEGTNDEERTDGMHQRMLQHAEQQHQQFGPPPPQSKLPEFLRVRPPTFSSTTNPMEANDWLHAIEKKLNLLQCNDQEKVAFATHQLQGPASAWWDNHMATRPPGTEVTWAEFCRSFRKAQVPDGVVAQKKRKFRALHQGNRTVTEYLHEFNRLARYASEDVRTDAEKQEKFMAGLDDELTNQLISGDYADFERLVDKAICQEDQRNKMDRKRKAAQFRSNQGNHQRPRFAPGQQGGPTTMIVRQYRPFNSSNFHQGASGSQNHHGGQPNRGAAPRPPVAPAQSGPSAQAKKETGTKPGSCFNCGELGHFADKCPKPRRAGPRMAANELAEVKKQVDEQLQKGYIRPSTSPWGAPVIFVEKKDKTKRMCVDYRALNEEHQLYAKFSKCDFWLTEVKLLGHVITAQGYYRRFIENFSRIARPMTQLLKKDEKFKWTVECDKSFEELKKKLVSAPVLILPDQMKDFQLRPHEGNYPTHDLELAAVVHALKIWRHYLIGNRCEVYTDHKSLKYIFTQPDLNLRQRRWLELIKDYDMSIHYHPGKANMVADTLSRKSYCTALCIEGMCEELRQEFEHLNVGIVEHGFVATLDARPTLVDQVRAAQVNDPEIAELKKNMRVGKARDFHEDEHGTI

SEQ ID NO: 18730 - protein, 1347 aa, Oryza sativa
  Clone ID: TF_OSC12919j.C1.p2.gm
MVYTRTGNRTTGEGSNGEERVDGVHPNSDSGNGPPPLPENPTLAQVMAHQTQMMAAMMQQMQQQHQQMHQRMMQHAEQQHQQFGPPPPQSKLPEFLRVRPPTFSSTTNPMEANDWLHAIEKKLNLLQCNDQEKVAFATHQLQGPASAWWDNHMATRPPGTEVTWAEFCRSFRKAQVPDGVVAQKKREFRALHQGNRTVTEYLHEFNRLARYAPEDVRTDAEKQEKFMAGLDDELTNQLISGDYADFERLVDKAIRQENQRNKMDRKRKAAQFRAPQESHQRSRFTPGQQGGPTTMIVRQHRPFNPSNFHQGSSGSQNHHGSQPNRGTAPRPPMAPAQSGQPAQAKKETGAKPGSCFNCGELGHFADKCPKPRRAGPRFIQARVNHASAEEAQAAPEVVLVTLTNEKGETVVYKSLVSPKKGASLNQIETEIPVDAEEKNLRKLEDIPIVCEYPEVFPEDLTTMPPKREIEFRIDLAPGTAPIYKRPYRMAANELAEVKKQVDEQLQKGYIRPSTSPWGAPVIFVEKKDKTKRMCVDYRALNEVTIKNKYPLPRIDDLFDQLKGAKVFSKIDLRSGYHQLRIREEDIPKTAFTTRYGLYECTVMSFGLTNAPAFFMNLMNKVFMEFLDKFVVVFIDDILIYSKSEEEHEQHLRLVLEKLKEHQLYAKFSKCDFWLTEVKFLGHVITAQGVAVDPSNVESVTKWTPPKTVSQIRSFLGLAGYYRRFIENFSRIARPMTQLLKKDEKFKWTAECDKSFEELKRKLVSAPVLILPDQTKDFQVYCDASRHGLGCVLMQEGRVVAYASRQLRPHEGNYPTHDLELAAVVHALKIWRHYLIGNRCEVYTDHKSLKYIFTQPDLNLRQRRWLELIKDYDMSIHYHPGKANVVADALSRKSYCTALCIEGMCEELRQELEHLNMGIVEHGFVAALEARPTLVDQVRAAQVNDPEIAELKKNMRVGKARDFLEDEHGTIWMGERLCVPDDKELKDLILTEAHQTQYSIHPGSTKMYQDLKEKFWWVSMRREIAEFVALCDVCQRVKAEHQRPAGLLQPLQIPEWKWEEIGMDFITGLPRTSSGHDSIWEELGTRLNFSTAYHPQTDGQTERVNQILEDMLRACALDFGGAWDKSLPYAEFSYNNSYQASLQMAPFEALYGRKCRTPLFWDQTGERQLFGTEVLAGAEEKVRIIRERLRIAQSRQKSYADNRRRELTFEAGDYVYLRVTPLRGVHRFQTKGKLAPRFVGPYRILERRGEVAYQLELPSNMIGIHDVFHVSQLKKCLRVPEEQADSEHIDIQEDLTYVEKPEVPELVPPSSSSSVGRRRRPLSPPLPAAGRSPSVAALRRCRMRAAAV

SEQ ID NO: 18731 - protein, 1113 aa, Oryza sativa
  Clone ID: TF_OSC13101j.C1.p3.fg
MAIRPPGMEVTWAEFCRSFRKAQVPDGVVAQKKREFRALHQGNRTVTEYLHEFNRLARYAPEDVRTDAEKQEKFLAGLDDELTNQLISGGYTDFERLVDKAIRQEDQRNKMDRKRKVAQFWSNQGSHQRPRFTPGQQGGPTTMIVRQHRPFNASNFHQGASSSQNHHGGQPNRGAAPRPPMQPAQSAPSAQAKKETGAKPGSCFNCGELGHFADKCPKPKRAGPSFSPSVLIEIQRSPFLANLILLESKDLDVILGMDWLTKFKGVIDCANRTVTLTNEKGETVVYKSLVSPKQGVSLNQIEVEIPVVTEERNSRKLEEIPIVCEYPEVFPEDLTTKPPKREIEFRIDLAPGTAPIYKRPYRMAANELAEVKKQVDEQLQKRYIRPSTSPWGAPVIFVEKKDKTKRMCVDYRALNEVTIKNKYPLPRIDDLFDQLKGAKLRIREEDIPKTAFTTRYGLYECTVMSFGLTNAPVFFMNLMNKVFMEFLDKFVAVFIDDILIYSKSEEEHEQHLRLVLEKLKEHQLYAKFSKCDFWLSEVKFLGHVITAQGVAVDPANVESVTKWTPPKTVSQIRSFLGLQGYYRRFIENFSRIARPMTQLLKKDEKFKWIAECDKNFEELKKKLVSAPVLVLPNQMKDFQVYCDASRHGLEWNYPTHDLELAAVVHALKIWRHYLIGNRCEVYTDHKSLKYIFTQPDLNLRQRRWLELIKDYDMSIHYHPGKANVVADALSRKSYCNALCIEGMCEELQQELERLKVGIVEHGFVAALEARPTLVDQVRAAQVNDPEIAELKKNMRVGKARDFLEDEHGTIWMGERLCVPDDKELKDLILTEAHQTQYSIHPGSTKMYQDLKEKFWWDSMRREIAEFIALCDVCQRVKAEHQRPAGLLQPLQIPEWKWEEIGMDFIAGLPQTSSGHDSIWVVVDRLTKVAHFIPVHTTYTGKKLAELYLGRIMCLHGVPRKIISDRGSQFTSKFWQKLQKELGTRLNFSTAYHLRTDGQTERVNQILEDMLRACALDFGGAWDKSLPYAEFSYNNSYQVSLQMAPFEALYGRKCRTPLFWDQTGERQLFGTEVLTEAEEKVRTIRERLRIAQSRQKSYTDNRRRELTFEAGDYV

SEQ ID NO: 18732 - protein, 1779 aa, Oryza sativa
  unsure (1)..(1779): unsure at all Xaa locations
  Clone ID: TF_OSC13598j.C1.p1.np
MAGHPPNHRGEGMIDFVAELARMTLVVGYPNAPEYTTIPPLSGELPHRVRLEVHGYVGTCLANMAVEASGGTADHACQEAAYLMMARLRERHDYIFHDTAYRYHPRRAHGDGVSSFRPTAGENDTTFGHMCAVMRGLDRMHSDLHKATKALNDGKLMRIVALKDEIARLKKENAQLKGLPAPGGVRIRTTPRKRTTAPVRIQLAPRNPPPAAAAPAVPPAPAPAPAPAPAPAPAFTLSFAPASAARGPASGTGGCPLQMVYTRTGSRATGEGSNGEERADGVHPNSESGNGPPPLPENPTLAQVMAHQTQMMAAMMQQMQQQHQQMHQRMMQHAEQQHQQFGPPPPQSKLPEFLRVRLPTFSSTTNPMEANDWLHAIEKKLNLLQCNDQEKVAFATHQLQGPASAWWDNHMATRPPGTEVTWAEFCRSFRKAQVPDGVVAQKKREFRALHQGNRTVTEYLHEFNRLARYAPEDVRTDAEKQEKFMAGLDDELTNQLISGDYVDFERLVDKAIRQEDQRNKMDRKRKAAQFRAPQGSHQRPRFTPGQQGGPTTMIVRQHRPFNPSNFHQGTSGSQNHHGSQPNRGTAPRPPMAPAQSGQPAQAKKETGAKPGSCFNCGELGHFADKCPKPRRAGPRFIQARVNHASAEEAQAAPEVVLGTFPVNSIPATVLFDSGATHSFISKKFVGMHGLIREELSTPMRVHTPGNSSTSVQFSPSITIEIQRSPFLANLILLESKDLDVILGMDWLTKFKGVIDCASRTVTLTNEKGETVVYKSLVSPKKGVSLNQIETEIPVDTVEKNLRKLEDIPIVCEYPEVFPEDLTTMPPKREIEFRIDLAPGTAPIYKRPYRMAANELAEVKKQVDEQLQKGYIRPSTSPWGAPVIFVEKKDKTKRMCVDYRALNEVTIKNKYPLPRIDDLFDQLKGAKVFSKIDLRSGYHQLRIREEDIPKTAFTTRYGLYECTVMSFGLTNAPAFFMNLMNKVFMEFLDKFVVVFIDDILIYSKSGEEHEQHLRLVLEKLKEHQLYAKFSKCDFWLTEVKFLGHVITTQGVAVDPSNVESVTKWTPPKTVSQIRSFLGLAGYYRRFIENFSRIARPMTQLLKKDEKFKWTAECDKSFEELKKKLVSAPVLILPDPTKDFQVYCDASRHGLGCVLMQEGRVVAYASRQLRPHEGNYPTHDLELAAVVHALKIWRHYLIGNRCEVYTDHKSLKYIFTQPDLNLRQRRWLELIKDYDMSIHYHPGKANVVADALSRKSYCTALCIEGMCEELRQEFEHLNVGIVEHGFVAALEARPTLVDQVRAAQVNDPEIAELKKNMRVGKARDFHEDEHGTIWMGERLCVPDDKELKDLILTEAHHTQYSIHPGSTKMYQDLKEKFWWVSMRREIAEFVALCDVCQRVKAEHQRPAGLLQPLQIPEWKWEEIGMDFITGLPRTSSGHDSIWVVVDRLTKVAHFIPVHTTYTGKRLAELYLARIMCLHGVPRKIVSDRGSQFTSKFWQKLQEELGTRLNFSTAYHPQTDGQTERVNQILEDMLRACALDFGGAWDKSLPYAEFSYNNSYQASLQMAPFEALYGRKCRTPLFWDQTGERQLFGTEVLAEAEEKVRIIRERLRIAQSRQKSYADNRRRELIFEAGDYVYLRVTPLRGVHRFQTKGXLAPRFVGPYKILERRGEVAYQLELPSNMIGIHDVFHVSQLKKCLRVPEEQADSEHIDIQEDLTYVEKPVRILDTSERRTRNKVTRFCRVQWSHHSEEEATWEREDELKAAHPHLFTSSSESRGRDSV

SEQ ID NO: 18733 - protein, 622 aa, Oryza sativa
  Clone ID: TF_OSC1567j.C1.p2.fg
MAVEASGGTADHACQEAAYLMMARLRERHDYIFHDTAYRYHPRRAHGDGVSSFRPTAGENDTTFGHMCAVMRGLDQMHSDLHKATKALNDGKLMRIVALKDEIARLKKENAQLKGLPAPGGVRIRTTPRCLFGMVYTRTGNRTTGEGSNGEERADGVHPNSDSGNGPPPLPENPTLAQVMAHQTQMMAAMMQQMQQQHQQMHQRMMQHAEQQHQQFGPPPPQSKLPEFLRVRPPTFSSTTNTMEANDWLHAIEKKLNLLQCNDQEKVAFATHQLQGPASAWWDNHMATRPPGTEVTWAEFCRSFRKAQVPDGVVAQKKREFRALHQGSRTVTEYLHEFNRLARYAPEDVRTDAEKQEKFMAGLDDELTNQLISGDYADFERLVDKAIRQEDQRNKMDRKRKAAQFRAHQGSHQRPRFTPGQQGGPTTMIVRQHRPFNPSNFHQGSSGSQNHHGSQPNRGTAPRPPMAPAQSGQPAQAKKETGAKPGSCFNCGELGHFADKCPKPRRAGPRFIQARVNHASAEEAQAAPEVVLGTFPVNSIPATVLFDSGATHSFISKKFVGMHGLIREELSTPMRVHTPGNSSTSVQFSPSITIEIQRSPGFAEFSGVIIRKRKRPGKGKMS

SEQ ID NO: 18734 - protein, 662 aa, Oryza sativa
  Clone ID: TF_OSC16992j.C1.p1.gm
MVYTRNGTRTTSEGSNGEERADGVHPNSDSGNGPPPFPENLTLAQVMAHQTQMMAAMMQQMQQQHQQMHQRMLQHAEQQHQQFGPPPPQSKLPEFLRVRPPTFSSTTNPMEANDWLHAIEKKLNLLQCNDQEKVAFATHQLQGPASAWWDNHVATRPPGTEVTWAEFCRSFRKAQVPDGVVAQKKRGFRALHQGNRTVTEYLHEFNRLARYAPEDVCTDAEKQEKFLAGLDDELTNQLISGDYADFERLVDKAIRQEDQRNKMDRKRKAAQFRSNQGNHQRPRFTLGQQGGPTTMIVRQHRTFKSSNFHQGASGSQNHHGGQPNHGAAPHPPVAPAQSGPSAQAKETGAKPGSCFNCGELGHFADKCPKPRRAGSKFVQARVNHASAKEAQAAPEVVLANELAEVKKQVDEQLQKGYIRPSTSPWGAPVIFVEKKDKTKRMCVDYRALNEVTIKNKYPLPRIDDLFDQLKGAKVFSKIDLRSGYHQLRIREEDIPKTAFTTRYGLHECTVMSFGLTNAPAFFMNLMNKVFMEFLDKFVVVFIDDILIYSKSEEEHEQHLRLVLEKLKEHQLYAKFSKCDFWLTEGMAVDPSNVESVTKWTPPKTVSQIRSFLRLAAECDKSFEELKKKLVSAPVLILPDQMKDFQDRFAPASSPEKDDFART

SEQ ID NO: 18735 - protein, 672 aa, Oryza sativa
  Clone ID: TF_OSC16992j.C1.p2.gm
MVYTRNGTRTTSEGSNGEERADGVHPNSDSGNGPPPFPENLTLAQVMAHQTQMMAAMMQQMQQQHQQMHQRMLQHAEQQHQQFGPPPPQSKLPEFLRVRPPTFSSTTNPMEANDWLHAIEKKLNLLQCNDQEKVAFATHQLQGPASAWWDNHVATRPPGTEVTWAEFCRSFRKAQVPDGVVAQKKRGFRALHQGNRTVTEYLHEFNRLARYAPEDVCTDAEKQEKFLAGLDDELTNQLISGDYADFERLVDKAIRQEDQRNKMDRKRKAAQFRSNQGNHQRPRFTLGQQGGPTTMIVRQHRTFKSSNFHQGASGSQNHHGGQPNHGAAPHPPVAPAQSGPSAQAKETGAKPGSCFNCGELGHFADKCPKPRRAGSKFVQARVNHASAKEAQAAPEVVLANELAEVKKQVDEQLQKGYIRPSTSPWGAPVIFVEKKDKTKRMCVDYRALNEVTIKNKYPLPRIDDLFDQLKGAKVFSKIDLRSGYHQLRIREEDIPKTAFTTRYGLHECTVMSFGLTNAPAFFMNLMNKVFMEFLDKFVVVFIDDILIYSKSEEEHEQHLRLVLEKLKEHQLYAKFSKCDFWLTEGMAVDPSNVESVTKWTPPKTVSQIRSFLRLAAECDKSFEELKKKLVSAPVLILPDQMKDFQVYCDASRHGLGGSCFEDLEALSDWQPL

SEQ ID NO: 18736 - protein, 1777 aa, Oryza sativa
  Clone ID: TF_OSC18057j.C1.p2.fg
MAGHPPNHRGEGMIDFVAELARMTLVVGYPNAPEYTTIPPLSGELPHRVSLEVHGYVGTCLANMAVEASGGTADHACQEAAYLMMARLRERHNYIFHDTAYRFHPRRANGDDVSSFRPTAGENDTTFGHMCAVMRGLDRMHSDLHKATKALNDGKLMRIVALKDEIARLKRENAQLKGLPAPGGVRIRTTPRKTMTAPVRIQLAPRNPPPAAAPAAPPVPPAVPAAPAPAPASALSFAPASAARGPASGTGGCLFGMVYTRTGTRTIGEGSNGEERADGVHPSSDSGNGLPPLPENPTLAQVMAHQTQMMAAMMQQMQQQHQQMHQRMMQHAEQQHQQFGPPPPQSKLPEFLRVRPPTFSSTTNPMEANDWLHAIEKKLNLLQCNDQEKVAFATHQLQGPASAWWDNHMATRPPGTEVTWAEFCRSFRKAQVPDGVVAQKKREFRALHQGNRTVTEYLHEFNRLARYAPEDVRTDAEKQEKFMAGLDDELTNQLISGDYADFERLVDKAIRQEDQRNKMDRKRKAAQFRAPQGSRQRPRFTPGQQGGPTTMIVRQYRPFNPSNFPQGASGSQNHHGGQSNRGAAPRPPMAPAQSGPPAQAKKETGAKTGSCFNCGELGHFADKCPKPRRAGPRFIQARVNHASAEEAQAAPEVVLGTFPVNSIPATVLFDSGATHSFISKKFVGRYGLRKEELSTPMRVHTPGNSSTSVSFSPSVLIEIQRSPFLANLILLESKDLDVILGMDWLTKFKGVIDCANRTVTLTNEKGETVAYKSLVSPKQGVSLNQIEAEIPVDTVEKNLRKMEYIPIVCEYPEVFPEDLTTMPPKREIEFRIDLAPGTAPIYKRPYRMAANELAEVKKQVDEQLQKGYIRPSTSPWGAPVIFVEKKDKTKRMCVDYRALNEVTIKNKYPLPRIDDLFDQLKGAKVFSKIDLRSGYHQLRIREEDIPKTAFTTRYGLYECTVMSFGPTNAPAFFMNLMNKVFMEFLDKFVVVFIDDILIYSKSEEEHEQHLRLVLEKLKEHQLYAKFSKCDFWLTEVKFLGHVITAQGVAVDPSNVESVTKWIPPKTVSQIRSFLGLAGYYRRFIENFSRIARPMTQLLKKDEKFKWTAECDKSFEELKKKLVSAPVLILPDQMKDFQVYCDASRHGLGCVLMQEGRVVAYASRQLRPHEGNYPTHDLELAAVVHALKIWRHYLIGNRCEVYTDHKSLKYIFTQPDLNLRQRRWLELIKDYDMSIHYHPGKANVVADALSRKSYCTALCIEGMCEELRQEFEHLNVGIVEHGFVAALEARPTLVDQVRVAQVNDSEIAELKKNMRVGKARDFHEDEHGTIWLGERLCVPDDKELKDLILTEAHQTQYSIHPGSTKMYQDLKEKFWWVSMRREIAEFVALCDVCQRVKAEHQRPAGLLQPLQIPEWKWEEIGIYFITGLPRTSSGHDSIWVVVDRLTKVAHFIPVHTTYTGKRLAELYLSRIMCLHGVPKKIVSDRGSQFTSKFWQKLQEEMGTRLNFSTAYHPQTDGQTERVNQILEDMLRACALDFGGAWDKSLPYAEFSYNNNYQASLQMAPFEALYGRKCRTPLFWDQTGERQLFGTEVLAEAEEKVRIIRERLRIAQSRQKSYADNRRRELTFEVGDYVYLRVTPLRGVHRFQTKGKLAPRFVGPYKILERRGEVAYQLELPSNMIGIHDVFHVSQLKKCLRVPEEQADSEHIDIQEDLTYVEKPVRILDTSERRTRNKVTRFCRVQWSHHSEEEATWEREDELKAAHPHLFTSSSESRGRDSV

SEQ ID NO: 18737 - protein, 1308 aa, Oryza sativa
  Clone ID: TF_OSC18656j.C1.p6.gm
MVYTRTGNRTTGEGSNGEERADGVHPNSDSGNGPPPLPENPTLAQVMAHQTQMMAAMMQQMQQQHQQMHQRMMQHAEQQHQQFGPPPPQSKLPEFLRVRPPTFSSTTNPMEANDWLHAIEKKLNLLQCNDQEKVAFATHQLQGPASAWWDNHMATRPPGTEVTWAEFCRSFRKAQVPDGVVAQKKREFRALHQGNRTVTEYLHEFNRLARYAPEDVRTDAEKQEKFMAGLDDELTNQLISGDYADFERLVDKAIRQEDQRNKMDRKRKAAQFRSNQGSQHRPRFTPGQQGGPTTMIVRQHRPFNSSNFHQGTSGSQNHQGGQPNRGAAPRPPMAPAQSGQPAQAKKETGAKPGSCFNCGELGHFADKCPKPRRAGPRFIQARVNHASAEEAQAAPEVVLVTLTNEKGETVVYKSPDSPKQGVSLNQIETEIPVDTVEKNLRKLEDIPIVCEYPEVFPEDLTTMPPKREIEFRIDLAPGTAPIYKRPYRMAANELAEVKKQVDEQLQKGYVRPSTSPWGAPVIFVEKKDKTKRMCVDYRALNEVTIKNKYPLPRIDDLFDQLKGAKVFSKIDLRSGYHQLRIREEDIPKTAFTTRYGLYECTVMSFRLTNAPAFFMNLMNKVFMEFLDKFVVVFIDDILIYSKSGEEHEQHLRLVLEKLKEHQLYAKFSKCDFWLTEVKFLGHVITAQGVAVDPSNVESVTKWTPPKTVSQIRSFLGLAGYYRRFIENFSRIARPMTQLLKKDEKFKWTAECDKSFEELKKKLVSAPVLILPDPTKDFQVYCDASRHGLGCVLMQEGRVVAYASRQLRPHEGNYPTHDLELAAVVHALKIWRHYLIGNRCEVYTDHKSLKYIFTQPDLNLRQRRWLELIKDYDMSIHYHPGKANVVADALSRKSYCTALCIEGMCEELRQEFEHLNVGIVEHGFVAALEARPTLVDQVRAAQVNDPEIAELKKNMRVGKARDFFEDEHGTIWMGERLCVPDDKELKDLILTEAHQTQYSIHPGSTKMYQDLKEKFWWVSMRREIAEFVALCDVCQRVKAEHQRPAGLLQPLQIPEWKWEEIGMDFITGLPRTSSGHDSIWVVVDRLTKEELGTRLNFSTAYHPQTDGQTERVNQILEDMLRACALDFGGAWDKSLPYAEFSYNNSYQASLQMAPFEALYGRKCRTPLFWDQTGERQLFGTEVLAEAEEKVRTIRERLRIAQSRQKSYADNRRRELTFEAGDYVYLRVTPLRGVHRFQTKGKLAPRFVGPYKILERRGEVAYQLELPSNMIGIHDVFHVSQLKKCLRVPEEQADSEHIDIQEDLTYVEKP

SEQ ID NO: 18738 - protein, 1360 aa, Oryza sativa
  Clone ID: TF_OSC18884j.C1.p4.gm
MVYTRNGTRTTGEGSNGEERTDGVHPNSDSGNGPPPLPENPTLAQVMAHQTQMMTAMMQQMQQQHQQMYQRMQQQAEQHQQQFGPPPPQSKLPEFLRVRPPTFSSTTNPMKANDWLHAIEKKLNLLQCNDQEKVAFATHQLQGPASAWWDNHMTTRPPGTEVTWAEFCRNFRKAQVLDGVVAQKKREFRALHQGNRTVTEYLHEFDRLARYAPEDVRTDAKKQEKFLAGLDDELTNQLISGDYADFERLVDKAIRQEDQHNKMDRKRKAAQFRSNQASHQRPRFIPRQQGEPTTMIVRQHRPFNSSNFHQGASGSQNHRGGQPNRSATPRPPMAPAQSAPSVQAKKETGAKPGSCFNCGELGHFADKCPKPRRAGPRFVQARVNHASTEEAQAAPEVVLVTLINEKGETVVYKSLVSPKQGVSLNQIEVEIPVVTEEKNSRKLEEIPIVCEYPEVFPEDLTTMPPKREIEFRIDLAPGTAPIYKRPYRMAANELAEVKKQVDEQLQKGYIRPSTSPWGAPVIFVEKKDKTKRMCVDYRALNEVTIKNKYPLPRIDDLFDQLKGAKVFSKIDLRSGYHQLRIREEDIPKTAFTTQYGLYECTVMSFGLTNAPAFFMNLMNKVFMEFLDKFVVVFIDDILIYSKLEEEHEQHLRLVLEKLKEHQLYAKFSKCDFWLSEVKFLGHIITAQGVAVDSSNVESVTKWTPPKTVSQIRSFLGLAGYYRRFIENFSRIARPMTQLLKKDEKFKWTAECDKSFEELKKKLVSAPVLILPDQMKDFQVYCDASRHGLGCVLMQEGRVVAYASRQLRPHEGNYPTHDLELAVVVHALKIWRHYLIGNRCEVYTDHKSLKYIFTQPDLNLRQRRWLELIKDYDMSIHYHPGKANVVADALSRKSYCNALCTEDMCEELQQELERLNVGIVEHRFVAALEARPTLVDQFRAAQVNDPEIVELKKNMRVGKARDFLEDEHRTIWMGERLCVPDDKELKDLILTEAHQTQYSIHPGSTKMYQDLKEKFWWVSMRREIAEFVALCDVCQRVKAEHQRPVGLFQPLQIPKWKWEEIGMDFITGLPRTSSGSVKGKLPKPGLTDIIDDNVLPIDPEKFTPDQKQKFEAMMQQARDQYLSSFMQTRKGMLVQKYKLKLVADNPGTGSSKDGEVKQAPDGSAQPSNKGATSGSIGNQGDNPQEVHGAPGDSICRTHDSTNSASINALTCYIGHGCSSSRSSRRHQFSRLYSRSNNRSRSQLSKHHQFSRWYGRSNNRSCSQFSKHHQRSSISNQSSKHRQGNAFSRSNGLRYDSRSFSRFSTWGQPMHRLDLQHMGGNLRSSSPPHRAVAAVGFAWSRSTQSAPPPSRSVAGARIPSHS

SEQ ID NO: 18739 - protein, 1827 aa, Oryza sativa
  Clone ID: TF_OSC19176j.C1.p1.fg
MEKPKSPLNPFSLHMFFAIGFVPGKWGSVLVVQGKNLGRSFKMAGHPPNHRGEGMIDFVAELARMTLVVGYPDAPEYTTIPPLSGELPYRVRLEVHGYVGTCLANMAVEASGGTADHACQEAAYLMMARLRERHDYIFHDTAYRYHPRRAHGDGVSSFRPTAGENDTTFGHMCAVMRGLDRMHSDLHKATKALNDGKLMRIVALKDEIARLKKENAQLKGLPAPGGVRIRTTPRKRTTAPVRIQLAPRNPPPPAAPAAPPVPPAAPAVPAVPPAPAPAPTPAFTLSFAPASAARGSASGTGGCLFGMVYTRTGSRATGEGSNGEERADGVHPNGDSGNGPPPLPENPTLAQVMAHQTQMMAAMMQQMQQQHQQMHQRMMQHAEQQHQQFGPPPPQSKLPEFLRVRPPTFSSTTNPMEANDWLHAIEKKLNLLQCNDQEKVAFATHQLQGPASAWWDNHMATRPPGTEVTWAEFCRSFRKAQVPDGVVAQKKREFRALHQGNMTVTEYLHEFNRLARYAPEDVRTDAEKQEKFMAGLDDELTNQLISGDYADFERLVDKAIRQEDQRNKMDRKRKAAQFRSNQGSQHRPRFTPGQQGGPTTMIVRQHRPFNSSNFHQGTSGSQNHQGGQPNRGAAPRPPMAPAQSAQPAQAKKETGAKPGSCFNCGELGHFADKCPKPRRAGPRFIQARVNHASAEEAQAAPEVVLGTFPVNSIPATVLFDSGATHSFISKKFVGMYGLRKDELSTPMRVRTPGNSSTSVSFSPSVLIEIQRSPFLANLILLESKDLDVILGMDWLTKFKGVIDCASRTVTLTNEKGETVVYKSPDSPKQGVSLNQIETEIPVDTVGKNLRKLEDIPIVCEYPEVFPEDLTTMPPKREIEFRIDLAPGTAPIYKRPYRMAANELAEVKKQVDEQLQKGYIRPSTSPWGAPVIFVEKKDKTKRMCVDYRALNEVTIKNKYPLPRIDDLFDQLKGAKVFSKIDLRSGYHQLRIREEDIPKTAFTTRYGLYECTVMSFGLTNAPAFFMNLMNKVFIEFLDKFVVVFIDDILIYSKSEEEHEQHLRLVLEKLKEHQLYAKFSKCDFWLTEVKFLGHVITAQGVAVDPSNVESVTKWTPPKTVSQIRSFLGLASYYRRFIENFSRIARPMTQLLKKDEKFKWTAECDKSFEELKRKLVSAPVLILPDQTKDFQVYCDASRHGLGCVLMQEGRVVAYASRQLRPHEGNYPTHDLELAAVVHALKIWRHYLIGNRCEVYTDHKSLKYIFTQPDLNLRQRRWLELIKDYDMSIHYHPGKANVVADALSRKSYCTALCIEGMCEELRQEFEHLNMGIVEHGFVAALEARPTLVDQVRAAQVNDPEIAELKKNMRVGKARDFHEDEHGTIWMGERLCVPDDKELKDLILTEAHQTQYSIHPGSTKMYQDLKEKFWWVSMRREIAEFVALCDVCQRVKAEHQRPAGLLQPLQIPEWKWEEIGMDFITGLPRTSSGHDSIWVVVDRLTKVAHFIPVHTTYTGKRLAELYLARIMCLHGVPKKIVSDRGSQFTSKFWQKLQEEMGTRLNFSTAYHPQTDGQTERVNQILEDMLRACALDFGGAWDKSLPYAEFSYNNSYQASLQMAPFEALYGRKCRTPLFWDQTGERQLFGTEVLAEAEEKVRIIRERLRIAQSRQKSYADNRRRELTFEAGDYVYLRVTPLRGVHRFQTKGKLAPRFVGPYKILERRGEVAYQLELPSTMIGIHDVFHVSQLKKCLRVPEEQADSEHIDIQEDLTYVEKPVHILDTSERRTRNKVTRFCRVQWSHHSEEEATWEREDELKAAHPYLFTSSTESRGRDSV

SEQ ID NO: 18740 - protein, 822 aa, Oryza sativa
  Clone ID: TF_OSC20350j.C1.p1.gm
GNRTMTEYLHEFNRLARYAPEDVRTDAEKQEKFMAGLDDELTNQLISGDYADFERLVDKAIRQEDQRNKMDRKRKAAQFRAPQGSHQRPRFASGQQGGPTTMIVRQYRPFNPSNFPQGARGSQNHHGGQPSSGAAPRPPTASAQSGPSAQAKKETGTKPGSCFNCGELGHFADKCPKPRRAGPRFIQARVNHASAEEAQAAPEVVLAEIPVDTVEKNLRELEDIPIVCEYPEVFPEDLTTMPPKREIEFRIDLAPGTAPIYKRPYRMAANELAEVKKQVDEQLQKGYIRPSTSPWGAPVIFVEKKDKTKRMCVDYRALNEVTIKNKYPLPRIDDLFDQLKGAKVFSKIDLRSGYHQLRIREEDIPKTAFTTRYGLYECTVMSFGLTNAPAFFMNLMNKVFMEFLDKFVVVFIDDILIYSKSKEEHEQHLRLVLEKLKEHQLYAKFSKCDFWLTEVKFLGHVITAQGVAVDPSNVESVTKWTPPKTVSQIRSFLGLAGYYRRFIENFSRIARPMTQLLKKDEKFKWTVECDKSFEELKKKLVSAPVLILPDQMKDFQVYCDASRHGLGCVLMQEGRVVAYASRLLRPHEGNYPTHDLELAAVVHALKIWRHYLIGNRCKVYTDHKSLKYIFTQPDLNLRQRRWLELIKDYDMSIHYHPGKANVVADALSRKSYCTALCIEGMCEELRQEFEHLNVGIVEHGFVAALEAWPTLVDQVRAAQVNDSEIAELKKNMRVGKARDFHEDEHGTIWLGERLCVPDDKELKDLILTEAHQTQYSIHPGSTKMYQDLKEKFWWVSMRREIAEFVALCDVCQRVKAEHQRPA

SEQ ID NO: 18741 - protein, 1461 aa, Oryza sativa
  Clone ID: TF_OSC25185j.C1.p3.fg
MVYTRNGSRATGEGSNGEERADGVHPSSDSGNGPPPLPENPTLAQVMAHQTQMMAAMMQQMQQQHQQMHQRMMQHVEQQHQQFGPPPPQSKLPEFLRVRPPTFSSTTNPMEANDWLHAIEKKLNRLQCNDQEKVAFATHQLQGPASAWWDNHMATRPPGTEVTWAEFCRSFWKAQVPDGVVAQKKREFRALHQGNRTVTEYLHEFNRLARYAPEDVRTDAEKQEKFMAGLDDELTNQLISGDYADFERLVDKAIRQEDQRNKMDRKRKAAQFRAPQGSHQRPRFAPGQQGGPTTMIVRQHRPFNPSNFPQGASGSQNHHGGQSNRGAASRPPMAPAQSGPPAQAKKETGAKPGSCFNCGELGHFADKCPKPRRAGPRFIQARVNHASAEEAQAAPEVVLGTFPVNSIPATVLFDSGATHSFISKKFVGMHLLIREELSTPMRVHTPGNSSTSVQFSPSITIEIQRSPFLANLILLESKDLDVILGMDWLTKFKGVIDCANRTVTLINEKGETVVYKSLVSPKKGVSLNQIEAEIPVDTVEKNSRKLEDIPIVCEYPEVFPEDLTTMPPKREIEFRIDLAPGTAPIYKRPYRMAANELAEVKKQVDEQLQKGYIRPSTSPLGAPVIFVEKKDKTKRMCVDYHALNEVTIKNKYPLPRIDDLFDQLKGAKVFSKIDLRSGYHQLRIREEDIPKTAFTTRYGLYECTVMSFGLTNAPAFFMNLMNKVFMEFLDKFVVVFIDDILIYSKSEEKHEQHFRLVLEKLREHQLYAKFSKCDFWLTEVKFLGHVITAQGYYRRFIENFSRIARPMTQLLKKDEKFKWTAECDKSFEELKKKLVSAPVLILPDPMKDFQVYCDASRHGLGCVLMQEGRVVAYASRQLRPHEGNYPTHDLELAAVVHALKIWRHYLIGNRCEVYTDHKSLKYIFTQPDLNLRQRRWLELIKDYDMSIHYHPGKANVVADALSRKSYCTALCIEGIRSGGTAYAQANDSEIAELKKNMSVGKARDFHEDEHGTIWLGERLCVPDDKELKDLILTEAHQTQYSIHPGSTKMYQDLKEKFWWVSMRREIAEFVALCDVCQRVKAEHQRPAGLLQPLQIPEWKWEEIGMDFITGLPRTSSGHESIWVVVDRLTKVAHFIPVHTTYTGKRLAELYLSRIMCLHGVPKKIVSDRGSQFTSKFWQKLQEELGTRLNFSTAYHPQTDGQTERVNQILEDMLRACALDFGGAWDKSLPYAEFSYNNSYQASLQMAPFEALYGRKCRTPLFWDQTGERQLFGTEVLAEAEEKVRIIRERLRIAQSRQKSYADNRRRELTFEAGDYVYLRVTPLRGVHWFQTKGKLAPRFVGLYKILERRGEVAYQLELPSNMIGTHDVFHVSQLKKCLRVPEEQADSEHIDIQEDLTYVEKPVRILDTSERRTRNKVTRFCRVQWSHHSEEEATWEREDELKAAHPHLFSSSSESRGRDSV

SEQ ID NO: 18742 - protein, 1724 aa, Oryza sativa
  Clone ID: TF_OSC25593j.C1.p1.fg
MSLQRVGALLLGAQSCLPVPGVPAVGGIGSVLLSMARMGWKLCHVFRLYTVVMAGHPPNHRGEGMIDFVAELARMTLVVGYPNAPEYTTIPPLSGELPHRVRLEVHGYVGTCLANMAVEASGGTADHACQEAAYLMMARLRERHNYIFHDTAYRFHPRRAHGDDVSSFRPTAGENDTTFGHMCTVMRGLDRMHSDLHKATKALNDGKLMRIVALKDEIARLKKENAQLKGLPAPGGVRIRTTPRKRTTAPVRIQLAPRNPVPTAAPAAPPVPPAAPAVPAAPAPAPAFDLSFALASAARGPASGTGGCLFGMVYTRTGNRTTGEGSNGEERVDGVHPNSDSGNGPPPLPENPTLAQVMAHQTQMMAAMMQQMQQQHQQMHQRMMQHAEQQHQQFGPPPPQSKLPEFLREKVAFATHQLQGPASAWWDNHMATRPPGTEVTWAEFCRSFRKAQVPDGVVAQKKREFRALHQGNRTVTEYLHEFNRLARYAPEDVRTDAEKQEKFMAGLDDELTNQLISGDYADFERLVDKAIRQEDQRNKMDRKRKAAQFRAPQGSHQRPRFTPGQQGGPTTMIVRQHRPFNSSNFHQGSSGSQNHHGGQPNRGAAPRPPMAPAQSGPPAQAKKETGAKPGSCFNCGELGHFADKCPKPRRAGPRFIQARVNHASAEEAQTAPEVVLVLFDSGATHSFISKKFVGRYGLRKEELSTPMRVHTPRNSSTSVSFSPSVLIEIQRSPFLANLILLESKDLDVILGMDWLTKFKGVIDCANRTVTLTNEKGETVVYKSPDSPKQGVSLNQIEAEIPVDTVEKNLRKLEDIPIVCEYPEVFPEDLTTMPPKREIEFRIDLAPGTAPIYKRPYRMAANELAEVKKQVDEQLQKGYIRPSTSPWGAPVIFVEKKDKTKRMCVDYRALNEVTIKNKYPLPRIDDLFDQLKGARVFSKIDLRSGYHQLRIREEDIPKTAFTTRYGLYECTVMSFGLTNAPAFFMNLMNKVFMEFLDKFIVVFIDDILIYSKSEEEHEQHLRLVLEKLKEHQLYAKFSKCDFWLTEVKFLGHVITAQGVAVDPSNVESVTKWTPPKTVSQIRSFLGLAGYYRRFIENFSRIARPMTQLLKKDEKFKWTAECDKSFEELKKKLVSAPVLILPDPTKDFQVYCDASRHGLGCVLMQEGRVVAYASRQLRPHEGNYPTHDLELAAVVHALKIWRHYLIGNRCEVYTDHKNYDMSIHYHPGKANVVADALSRKSYCTALCTEGMCEELRQEFEHLNVGIVEHGFVAALEARPTLVDQVRAAQVNDSEIVELKKNMRVGKARDFHEDEHGTIRMGERLCVPDDKELKDLILTEAHQTQYSIHPGSTKMYQDLKEKFWWVSMRREIAEFVALCDVCQRVKAEHQRPAGLLQPLQIPEWKWEEIGMDFITGLPRTSSGHDSIWVVVDRLTKVAHFIPVHTTYTGKRLAELYLARIMCLHGVPKKIVSNRGSQFTSKFWQILQEELGTRLNFSTAYHPQTDGQTERVNQILEDMLRACALDFGGAWDKSLPYAEFSYNNSYQASLQMAPFEALYGRKCRTPLFWDQTGERQLFGIEVLAEAEQKVRIIRERLRIAQSRQKSYADNRRRELTFEAGDYVYLRVTPLRGVHRFQTKGKLAPRFVGPYKILERRGEVAYQLELPSNMIGIHDVFHVSQLKKCLRVPEEQADSEHIDIQEDLTYVEKPVRILDTSERRTRNKVTRFC

SEQ ID NO: 18743 - protein, 441 aa, Oryza sativa
  Clone ID: TF_OSC26672j.C1.p1.fg
MVYTRNGTRTTGEGSNGEERTDGVHPNSDSDNSPPPLPENPTLAQVMAHQTQMMAAMMQQMQQQHQQMHQRMQQHAEQHHQQFGPPPPQSKLPEFLRVRPPTFSSTTNPMEANDWVHAIEKKLNLLQCNDQEKVAFATHQLQGPASARWDNHMATRPPGTEVTWAKFCRSFRKAQKQEKFLAGLDDELTNQLISGDYADFERLVDKAIRQEDQRNKMDRKRKAAQFRSSQGNHQRPRFTPGQQGGPTTMIVRQHRPFNSSNFHQGASGSQNHHGGQPHRGVAPRPLVAPAQSAPPAQAKKETRTKPGSCFNCGELGHFADKCPKPRRAGPRFVQARVNHASAEEAQAAPEVVLGTFPVNSIPATVLFDSGATHSFISKKFVGMNGLRKEELSTPMRVHTPGNSSTSVNFSPSVLIEIQISPFLANLILLNSKDLDVILGMD

SEQ ID NO: 18744 - protein, 460 aa, Oryza sativa
  Clone ID: TF_OSC26672j.C1.p4.gm
MVYTRNGTRTTGEGSNGEERTDGVHPNSDSDNSPPPLPENPTLAQVMAHQTQMMAAMMQQMQQQHQQMHQRMQQHAEQHHQQFGPPPPQSKLPEFLRVRPPTFSSTTNPMEANDWVHAIEKKLNLLQCNDQEKVAFATHQLQGPAKAQVPDGVVAQKKREFRALHQSNRTEKFLAGLDDELTNQLISGDYADFERLVDKAIRQEDQRNKMDRKRKAAQFRSSQGNHQRPRFTPGQQGGPTTMIVRQHRPFNSSNFHQGASGSQNHHGGQPHRGVAPRPLVAPAQSAPPAQAKKETRTKPGSCFNCGELGHFADKCPKPRRAGPRFVQARVNHASAEEAQAAPEVVLGGAHLSDPSPTSRPRRRAGNRRRAHASASSGPRSSPHRTVAADGFARPNSTPSAPPPSRSVAGTRIPSHSGELYPYRRLRPWIPAAVLVRRLPSSSRGSPSPFDVVFLRAGHPR

SEQ ID NO: 18745 - protein, 1798 aa, Oryza sativa
  Clone ID: TF_OSC26865j.C1.p1.fg
MAGHPPNHRGEGMIDFVAELARMTLVVGYPDAPEYTTIPPLSGELPHRVRLEVHGYVGTCLANMAVEASGGTADHACQEAAYLMMARLRERHNYIFHDTAYRYHPSRAHGDGVSSFRPTAGENDTTFGHMCAVMRGLDRMHSDLHKATKALNDGKLMRIVALKDEIARLKKENAQLKGLPAPGGVRIRTTPRKTTKAPVRIQLAPRNPPPAAAPAAPPVPPAAPAAPVPAAPAPAPAFVLSFAPASAVRGPASGIGGWLPATPSGSRDRSSSGSQTGSSETYLPGSRSRSEGPGCLFGMVNTRTGNRTTGEGSNGEERVDGMHPNGDPGNGPPPLPENPTLAQVMAHQTQMMAAMMQQMQQQHQQMHQRMMQYAEQQHQQFGPPPPQSKLPEFLRVRPPTFSSTTNPMEANDWLHAIEKKLNLLQCNDQEKVAFATHQLQGPASAWWDNHMATRPPGTEVTWAEFCRSFRKAQVPDGVVAQKKREFRALHQGNRTVTEYLHEFNRLARYAPEDVRTDAEKQEKFMAGLDDELTNQLISGDYADFERLVDKAIRQEDQRNKMDRKRKAAQFRAHQGSHQRPRFTPGQQGGPTTMIVRQHRPFNPSNFHQGTSGSQNHHGGQPNRGAAPRPPMAPAQSGQPTQAKKETGAKPGSCFNCGELGHFADKCPKPRRAGPRFIQARVNHASAEEAQAAPEVVLGTFPVNSIPATVLFDSGATHSFISKKFVGMHGLIREELSTPMRVHTPGNSSTSVQFSPSITIEIQRSPFLANLILLDSKGLDVILGMDWLTKFKGVIDCANRTVTLTNEKGETVVYKSLVSPRKGVSLNQIETEIPVDTVEKNSRKLDDIPIVCEYPEVFPEDLTTMPPKREIEFRIDLAPGTAPIYKRPYRMAANELAEVKKQVDEQLQKGYIRPSTSPWGAPVIFVEKKDKTKRMCVDYRALNEVTIKNKYPLPRIDDLFDQLKGAKVFSKIDLRSGYHQLRIREEDIPKTAFTTRYGLYECTVMSFGLTNAPAFFMNLMNKVFMEFLDKFVVVFIDDILIYSKSEEEHEQHLRLVLEKLKEHQLYAKFSKCDFWLTEVKFLGHVITAQGVAVDPSNVESVTKWTPPKTVSQIRSFLGLAGYYRRFIENFSRIARPMTQLLKKDEKFKWTAECDKSFEELKKKLVSAPVLILPDQMKDFQVYCDASRHGLGCVLMQEGRVVAYASRQLRPHEGNYPTHDLELAAVVHALKIWRHYLIGNRCEVYTDHKSLKYIFTQPDLNLRQRRWLELIKDYDMSIHYHPGKANVVADALSRKSYCTALCTEGMCEELRQEFEHLNIGIVEHGFVAALEARPTLVDQVRAAQVNDPEIAELKKNMRVGKARDFLEDEHGTIWMGERLCVPDDKELKDLILTEAHQTQYSIHPGSTKMYQDLKEKFWWVSMRREIAEFVALCDVCQRVKAEHQRPAGLLQPLQIPEWKWEEIGMDFITGLPRTSSGHDSIWVVVDRLTKVAHFIPVHTTYTGKRLAELYLARIMCLHGVPRKIVSDRGSQFTSKFWQKLQEELGTRLNFSTAYHPQTDGQTERVNQILEDMLRACALDFGGAWDKSLPYAEFSYNNSYQASLQMAPFEALYGRKCRTPLFWDQTGERQLFGTEVLAEAEEKVRIIRERLRIAQSRQKSYADNRRRELTFEAGDYVYLRVTPLRGVHRFQTKGKLAPRFVGPYKILERRGEVAYQLELPSNMIGIHDVFHVSQLKKCLRVPEEQADSEHIDIQEDLTYVEKPVRILDTSERRTRNKVTRFCRVQWSHHPKRKQPGKGKMS

SEQ ID NO: 18746 - protein, 1158 aa, Oryza sativa
  Clone ID: TF_OSC26925j.C1.p1.fg
MAPAQSGPSVQAKKETGAKPGSCFNCGELGHFADKCPKPRRAGPRFVQARVNHASAEEAQAAPEVVLGTFPVNSIPATVLFDSGATHSFISKKFVGMHGLRKEELSTPMRVHTPGNSSTLVSFSPSVLIEIQRSPFLANLILLESKDLDVILGMDWLTKFKGVIDCANRTVTLTNEKGEAVVYKSLVSPKQGVSLNQIEAEIPVDTVEKNLRKLEDIPIVCEYPEVFPEDLTTMPPKREIEFRIDLAPGTAPIYKRPYRMAANELAEVKKQVDEQLQKGYIRPSTSPWGAPVIFVEKKDKTKRMCVDYRALNEVTIKNKYPLPRIDDLFDQLKGAKVFSKIDLRSGYHQLRIREEDIPKTAFTTRYGLYECTVMSFGLTNAPAFFMNLMNKVFMEFLDKFVVVFIDDILIYSKSEEEHEQHLRLVLEKLKEHQLYAKFSKCDFWLTEVKFLGHVITAQGYYRRFIENFSRIARPMTQLLKKDEKFKWTAECGKSFEELKKKLVSAPVLILPDQMKDFQVYCDASRHGLGCVLMQEGRVVAYASRQLRPHEGNYPTHDLELAAVVHALKIWRHYLIGNRCEVYTDHKSLKYIFTQPDLNLRQRRWLELIKDYDMSIHYHPGEANVVADALSRKSYCTALCIEGMCEELRQEFEHLNVGIVEHRFVAALEARPTLVDQVRAAQVNDAEIAELKKNMRVGKARNFLEDEHGTIWLGERLCVPDDKELKDLILTEAHQTQYSIHPGSTKMYQDLKEKFWLVSMRREIAEFVALYDVCQRVKAGHQRPAGLLQPLQIPEWKWEEIGMDFITGLPRTSSGHDSIWVVVDRLTKVAHFIPVHTTYTGKRLVELYLSRIMCLHGVPKKIVSDRGSQFTSKFWQKLQEELGTHLNFSTAYHPQTDGQTERVNQILEDMLRACALDFGGAWDKNLPYAEFSYNNSYQASLQMAPFEALYGRKCRTPLFWDQTGERQLFGTEVLTEAEEKVRIIRERLRIAQSRQKSYADNRRRELTFEAGDYVYLRVTPLRGVHRFQTKGKLAPCFVGPYKILERRGEVAYQLELPSNMIGIHDVFHVSQLKKCLRVLEEQADSEHIDIQEDLTYVEKPVRILDTSERRTRNKVTRFCRVQWSHHSEEEATWEREDELKAAHPHLFASSSESRGRDSV

SEQ ID NO: 18747 - protein, 569 aa, Oryza sativa
  Clone ID: TF_OSC27102j.C1.p1.gm
MAHQTQMMAAMMQHQHQQMHQRMLQHAEQQHQQFGPPPPQSKLPEFLRVRPPTFSSTTNPMEANDWLHAIEKKLNLLQCNDQEKVAFATHQLQGPASAWWDNHMATRPPGNRTVTEYLHEFNRLARYAPENVRTDAQKQEKFMAEIHATKMDRKKKAAQFRAPQGSHQRPRFAPRQQGGPTTMIVGQHRPFNPSNFPQGASGSQNHHGGQSNRGAAPRPPMAPAQSGPPAQAKKETGAKPGSCFNCGELGHFADKCPKPRRAGPRFIQARVNHASAEEAQAAPEVVLVTLTNEKGETVVYKSLVSPKQGVSLNQIEAEIPVDTVEKNLRKLEDIPIVCEMAANELAEVKKQVDEQLQKGYIRPSTSPWGAPVIFVEKKDKTKRMCVDYRALNEVTIKNKYPLPRIDDLFDQLKGAKVFSKIDLRSGYHQLRIREEDIPKTAFTTRYGLYECTVMSFGLTNAPAFFMNLMNKVLMEFLDKFVVVFIDDILIYSTSEEEHEQHLRLVLEKLKEHQLYAKFSKCDFWLTEVKFLGHVITAQGVAVDPSNVESVTKWTPPKTVSQIRSFLGLA

SEQ ID NO: 18748 - protein, 874 aa, Oryza sativa
  Clone ID: TF_OSC27726j.C1.p2.gm
MVYTRNGTRTTGEGSNGEERTDGVHPNSDSDNSPPPLPENPTLAQVMAHQTQMMAAMMQQMQQQHQQMHQRMQQHAEQHHQQFGPPPPQSKLPEFLRVRPPTFSSTTNPMEANDWVHAIEKKLNLLQCNDQEKVAFATHQLQGPAKAQVPDGVVAQKKREFRALHQSNRTEKFLAGLDDELTNQLISGDYADFERLVDKAIRQEDQRNKMDRKRKAAQFRSSQGNHQRPRFTPGQQGGPTTMIVRQHRPFNSSNFHQGASGSQNHHGGQPHRGVAPRPLVAPAQSAPPAQAKKETRTKPGSCFNCGELGHFADKCPKPRRAGPRFVQARVNHASAEEAQAAPEVVLEVKKQVDEQLQKWCIRTSTSPWGAPVIFVEKKDKTKRMCVDYRALNEVTIKNKYPLPRIDDLFDQLKGAKEHELYAKFSKCDFWLTEVKFLGHVITAQGVAVDPSNVESVTKWTPPKTVSQIRSFLGLAGYYRRFIENFSRIARPMTQLLKKDEKFKWTAECDKSFEELKKKLVSAPVLILPDQMKDFQVYCDASRHGLGWKANVVADALSRKSYCTALCIEGMCEELQQLFERLNVGIVEQGFVAALETRPTLVDQVRAAQVNDPEIAELKKNMRVGKARDFLEDEHGTIWMGERLCVPDDKELKDMILTEAHQTQYSIHPGSTKMYQDLKEKLWWVSMRREIVEFVALCDVCQRVKAEHQRPAGLLQPLKIPEWKWEEIGMDFITRLPRTSSEVLAEAEEKVITIRERLRIAQSRQKSYADNRRRELTFEAGDYANSEHIDIQEDLTYVEKPIRILKTSERRTRNKVTRVVATPHRRRRRVREAELHPVRPSSVEGIPKLVRRLPSSSRGSPSPFDVVFLRAGHPR

SEQ ID NO: 18749 - protein, 1777 aa, Oryza sativa
  unsure (1)..(1777): unsure at all Xaa locations
  Clone ID: TF_OSC27726j.C1.p2.np
MAEHPPNHRGEGMDDFVAELARMTLVVGYPNAPEYTTVPPLSGELPHRVRLEVHGYVGTCLANMVVEASGGTADHACQEAAYLMMARVRERHNYIFHDTAYRIHPRRASGSDVSSFRPTAGKNDTTFVHMCAVMRGMDRMHSDLHKASKALNDGKLVRIIALKDEIARLKRENAQLKGLPTPRGVRIRTTPRKSTTAPMRIQLAPRYPPPSAAPAAPPAPPAAPAAPAPVPVSAPASALSFAPASAVRGPASGNGGCFLXMVYTRNGTRTTGEGSNGEERTDGVHPNSDSDNSPPPLPENPTLAQVMAHQTQMMAAMMQQMQQQHQQMHQRMQQHAEQHHQQFGPPPPQSKLPEFLRVRPPTFSSTTNPMEANDWVHAIEKKLNLLQCNDQEKVAFATHQLQGPASARWDNHMATRPPGTEVTWAKFCRSFRKAQVPDGVVAQKKREFRALHQSNRTVTEYLHEFNRLARYAPEDVRTDAXKQEKFLAGLDDELTNQLISGDYADFERLVDKAIRQEDQRNKMDRKRKAAQFRSSQGNHQRPRFTPGQQGGPTTMIVRQHRPFNSSNFHQGASGSQNHHGGQPHRGVAPRPLVAPAQSAPPAQAKKETRTKPGSCFNCGELGHFADKCPKPRRAGPRFVQARVNHASAEEAQAAPEVVLGTFPVNSIPATVLFDSGATHSFISKKFVGMNGLRKEELSTPMRVHTPGNSSTSVNFSPSVLIEIQISPFLANLILLNSKDLDVILGMDXLTKFKGVIDCANRTVALTNEKGETVVFKSLVSPKQGVSLNXIEAEIPVVTVEKNSRKLDEIPIAGEYPKVFPEDLTTMPPKREIEFWIDLAPGTTPIYKRPXRMAANELAEVKKQVDEQLQKWCIRTSTSPWGAPVIFVEKKDKTKRMCVDYRALNEVTIKNKYPLPRIDDLFDQLKGAKVFSKIDLRSGYHXLRIREEDIPKTTFTTRYGLYECTVMSFGLTNAPAFFMNLMNKVFMEFLDKFVVVFIDDILIYSKSEEEHEQHLRLVLEKLKEHELYAKFSKCDFWLTEVKFLGHVITAQGVAVDPSNVESVTKWTPPKTVSQIRSFLGLAGYYRRFIENFSRIARPMTQLLKKDEKFKWTAECDKSFEELKKKLVSAPVLILPDQMKDFQVYCDASRHGLGCVLMQEGRVVAYASRQLRPHEGNYPTHDLQLAAVVHALNIXRHYLIGNRCEVYTDHKSLKYIFTQPDLNLRQRRXLELIKDYDMSIHYHPGKANVVADALSRKSYCTALCIEGMCEELQQLFERLNVGIVEQGFVAALETRPTLVDQVRAAQVNDPEIAELKKNMRVGKARDFLEDEHGTIWMGERLCVPDDKELKDMILTEAHQTQYSIHPGSTKMYQDLKEKLWWVSMRREIVEFVALCDVCQRVKAEHQRPAGLLQPLKIPEWKWEEIGMDFITRLPRTSSGHDSIWVVVDRLTKVAHFIPVHTTYTGKKLAELYLARIMCLHGVPKKIVSDRGSQFTSKFWQKLQEELGTRLNFSTANHPXTDGQTERVSQILEDMLRACALDFGGAWDKSLPYAEFSYNNSYQASLQMAPFEALYGRKCRTPLFWDQTGERQLFGTEVLAEAEEKVITIRERLRIAQSRQKSYADNRRRELTFEAGDYVYLRVTPLRGVHRFQTKGKLAPRFVGPYKILERRGEVAYQLELPSNMIGIHDVFHVSQLKKCLRVPEEQANSEHIDIQEDLTYVEKPIRILKTSERRTRNKVTRFCRVQWSHHSEEEATWKREDELKVAHPHLFANSSESRG

SEQ ID NO: 18750 - protein, 1128 aa, Oryza sativa
  Clone ID: TF_OSC29445j.C1.p1.fg
MIVRQHRPFNPSNFHQGTSGSQNHHGGQPNRGAAPRPPMAPAQSGQPAQAKKETGAKPGSCFNCGELGHFADKCPKPRRAGPRFIQARVNHASAEEAQAAPEVVLGTFPVNSIPATVLFDSGATHSFISKKFVGMHGLIREELSTPMRVHTPGNSSTSVQFSPSITIEIQRSPFLANLILLESKDLDVILGMDWLTKFKGVIDCANRTVTLTNEKGETVEPLQSIRDRIEWRLNELAEVKKQVDEQLQKGYIRPSTSPWGAPVIFVDKKDKTKRMCVDYRALNEVTIKNKYPLPRIDDLFDQLKGAKVFYKIDLRSGYHHLRIREEDIPKTAFTTRYGLYECTVMSFGLTNAPAFFMNLMNKVFMEFLDKFVVVFIDDILIYSKSEEEHEQHLRLPQGVAVDPSNVESVTKWTPPKTVSQIRSFLGLAGYYRRFIENFSRIARPMTQLLKKDEKFKWTAECDKNFEELKRKLVSAPVLILPDQTKDFQVYCDASRHGLGCVLMQEGRVVAYASRQLRPHEGNYPTHDLELAAVVHALKIWRHYLIGNRCEVYTDHKSLKYIFTQPDLNLRQRRWLELIKDYDMSIHYHPGKANVVADALSRKSYCTALCIEDMCEELRQELEHLNMGIVEHGFVAALEARPTLVDQVRAAQVNDPEIAELKKNMRVGKARDFLEDEHGTIWMGERLCVPDDKELKDLILTEAHQTQYSIHPGSTKMYQDLKEKFWWVSMRREIAEFVALCDVCQRVKAEHQRPAGLLQPLQIPEWKWEEIGMDFITGLPRTSSGHDSIWVVVDRLTKVAHFIPVHTTYTGKRLAELYLARIMCLHGVPKKIVSDRGSQFTSKFWQKLQEELGTRLNFSTAYHPQTDGQTERVNQILEDMLRACALDFGGAWDKSLPYAEFSYNNSYQASLQMAPFEALYGRKCRTPLFWDQTGERQLFGTEVLAEAEEKVRIIRERLRIAQSRQKSYADNRRRELTFEAGDYVYLRVTPLRGVHRFQTKGKLAPRFVGPYKILERRGEVAYQLELPSNMIGIHDVFHVSQLKKCLRVPEEQADSEHIDIQEDLTYVEKPVRILDTSERRTRNKVTRFCRVQWSHHSEEEATWEREDELKAAHPHLFTSSSESRGRDSV

SEQ ID NO: 18751 - protein, 1064 aa, Oryza sativa
  Clone ID: TF_OSC30155j.C1.p4.gm
MVYTRTGSRATGEGSNGEERADGVHPNGDSGNGPPPLPENPTLAQVMAHQTQMMAAMMQQMQQQHQQMHQRMMQHAEQQHQQFGPPPPQSKLPEFLRVRPPTFSSTTNPMEANDWLHAIEKKLNLLQCNDQEKVAFATHQLQEFCRSFRKAQVPDGVVAQKKREFRALHQGNRTVTEYLHEFNRLARYAPEDVRTDAEKQEKFMAGLDDELTNQLISGDYADFERLVDKAIRQEDQRNKMDRKRKAAQFRSNQGSQHRPRFTPGQQGGPTTMIVRQHRPFHSSNFHQGASGSQNHQGGQPNRGAAPRPPMAPAQSAQPAQAKKETGAKPGSCFNCGELGHFADKCPKPRRAGLRFIQARVNHASAEEAQAAPEVVLVTLTNEKGETVVYKSLVSPKKGASLNQIETEIPVDTEEKNLRKLEDIPIVCEYPEVFPEDLTTMPPKREIEFRIDLAPGTAPIYKRPYRMAANELAEVKKQVDEQLQKGYIRPSTSPWGAPVIFVEKKDKTKRMCVDYRALNEVTIKNKYPLPRIDDLFDQLKGAKVFSKIDLRSGYHQLRIREEDIPKTAFTTRYGLYECTVMSFGLTNAPAFFMNLMNKVFMEFLDKFVVVFIDDILIYSKSEEEHEQHLRLVLEKLKEHQLYAKFSKCDFWLTEVKFLGHVITAQGVAVDPSNVESVTKWTPPKTVSQIRSFLGLAGYYRRFIENFSRIARPMTQLLKKDEKFKWTAECDKSFEELKRKLVSAPVLILPDQTKDFQVYCDASRHGLGCVLMQEGRVVAYASRQLRPHEGNYPTHDLELAAVVHALKIWRHYLIGNRCEVYTDHKSLKYIFTQPDLNLRQRRWLELIKDYDMSIHYHPGKANVVADALSRKSYCTALCIEGMCEELRQEFEHLNVGIVEHGFVAALEARPTLVDQVRAAQVNDPEIAELKKNMRVGKARDFHEDEHGTIWMGERLCVPDDKELKDLILTEAHQTQYSIHPGSTKMYQDLKEKFWWVSMRREIAEFVALCDVCQRVKAEHQRPAGLLQPLQIPEWKWEEIGMDFITGLPRTSSGHDSIWVVVDRLTK

SEQ ID NO: 18752 - protein, 1777 aa, Oryza sativa
  unsure (1)..(1777): unsure at all Xaa locations
  Clone ID: TF_OSC32699j.C1.p2.np
MAGHPPNHRGEGMIDFVAELARMTLVVGYPDAPEYTTIPPLSGELPHRVRLEVHGYVGTCLANMAVEASGGTADHACQEAAYLMMARLRERHNYIFHGTAYRYHPSRAHGDGVSSFRPTAGENDTTFGHMCAVMRGLDRMHSDLHKATKALNDGKLMRIVALKDEIARLKKENAQLKGLPAPGGVRIRTTPRKRTTAPVRIQLAPRNPPPPAAPAAAPAPPAVPAAPAPAPAFTLSFAPASAARGSASGTGGWLFQMVYTRTGNRTTGEGSNGEERVDGVHPNGDPGNGPPPPPENPTLAQVMAHQTQMMAAMMQQMQQQHQQMHQRMMQYAEQQHQQFGPPPPQSKLPEFLRVRPPTFSSTTNPMEANDWLHAIEKKLNLLQCNDQEKVAFATHQLQGPASAWWDNHMATRPPGTEVTWAEFCRSFRKAQVPDGVVAQKKREFRALHQGNRTVTEYLHEFNRLARYAPEDVRTDAEKQEKFMAGLDDELTNQLISGDYADFERLVDKAIRQEDQRNKMDRKRKAAQFRSNQGSQHRPRFTPGQQGGPTTMIVRQHRPFHSGNFHQGASGSQNHQGGQPNRGAAPRPPMAPAQSAQPAQAKKETGAKPGSCFNCGELGHFADKCPKPRRAGPRFIQARVNHASAEEAQAAPEVVLGTFPVNSIPATVLFDSGATHSFISKKFVGVHGLIREELSTPMRVHTPGNSSSSVQFSPSITIEIQGSPFLANLILLESKDLDVILGMDWLTKFKGVIDCANRTVTLTNEKGETVVYKSLVSPKKGASLNQIETEIPVDTEEKNLRKLEDIPIVCEYPEVFPEDLTTMPPKREIEFRIDLAPGTAPIYKRPYRMAANELAEVKKQVDEQLQKGYIRPSTSPWGAPVIFVEKKDKTKRMCVDYRALNEVTIKNKYPLPRIDDLFDQLKGAKVFSKIDLRSGYHQLRIREEDIPKTAFTTRYGLYECTVMSFGLTNAPAFFMNLMNKVFMEFLDKFVVVFIDDILIYSKSEEEHEQHLRLVLEKLKEHQLYAKFSKCDFWLTEVKFLGHVITAQGVAVDPSNVESVTKWTPPKTVSQIRSFLGLAGYYRRFIENFSRIARPMTQLLKKDEKFKWTAECDKSFEELKRKLVSAPVLILPDQTKDFQVYCDASRHGLGCVLMQEGRVVAYASRQLRPHEGNYPTHDLELAAVVHALKIWRHYLIGNRCEVYTDHKSLKYIFTQPDLNLRQRRWLELIKDYDMSIHYHPGKANVVADALSRKSYCTALCIEGMCEELRQELEHLNMGIVEHGFVAALEARPTLVDQVRAAQVNDPEIAELKKNMRVGKARDFLEDEHGTIWMGERLCVPDDKELKDLILTEAHQTQYSIHPGSTKMYQDLKEKFWWVSMRREIAEFVALCDVCQRVKAEHQRPAGLLQPLQIPEWKWEEIGMDFITGLPRTSSGHDSIWVVVDRLTKVAHFIPVHTTYTGKRLAELYLARIMCLHGVPKKIVSDRGSQFTSKFWQKLQEELGTRLNFSTAYHPQTDGQTERVNQILEDMLRACALDFGGAWDKSLPYAEFSYNNSYXASLQMAPFEALYGRKCRTPLFWDQTGERQLFGTEVLAEAEEKVRIIRERLRIAQSRQKSYADNRRRELTFEAGDYVYLRVTPLRGVHRFQTKGKLAPRFVGPYKILERRGEVAYQLELPSNMIGIHDVFHVSQLKKCLRVPEEQADSEHIDIQEDLTYVEKPVRILDTSERRTRNKVTRFCRVQWSHHSEEEATWEREDELKAAHPYLFTSSSESRGRDSV

SEQ ID NO: 18753 - protein, 1568 aa, Oryza sativa
  Clone ID: TF_OSC32884j.C1.p1.fg
MRGLDRMHSDLHKATKALNDGKLMRIVALKDEIARLKKENAQLKGLPAPGGVRIRTTPRKTTTAPVRIQLAPRNPPPAATPAAPPVPPAVPAAPAPAPESALSFAPASAARGPASGTGGCLFGMVYTRTGSRATGEGSNGEERANGVHPSSDSGNGPPPLPENPTLAQVMAHQTQMMAAMMQQMQQQHQQMHQRMMQHAEQQHQQFGPPPPQSKLPEFLRVRPPTFSSTTNPMEANDWLHAIEKKLNLLQCNDQEKVAFATHQLQGPASAWWDNHMATRPPGTEVTWVEFCRSFRKAQVPDGVMAQKKREFRALHQGNRTVTEYLHEFNRLARYATENVRTDAEKQEKFMAGLDDELTNQLISGDYADFEWLVDKAIRQEDQRNKMDRKRKAAQFRAPQGSHQRPRFTPGQQGGPTTMIVRQHRPFNSSNFHQGSSGSQNHHGGQPNRGAAPRPPMAPAQSGPPAQAKKETGAKPGSCFNCGELGHFADKCPKPRRAGPRFIQARVNHASAEEAQTAPEVVLGTFPVNSIPATVLFDSGATHSFISKKFVGMYGLRKEELSTPMRVHTPGNSSTSVSFSPSVLIEIQRLPFLANLILLESKYLDVILGMDWLTKFKGVIDCANRTVTLTNEKGETVVYKSLAPPKQGVSLNQIEMEVPVVTEEKNLKKLEDIPIVSEYPEVFPEDLTTIPPKREIEFRIDLAPGTAPIYKRPYRMAANELAEVKKQVDEQLQKGYIRPSTSPWGAPVIFVEKKDKTKRMCVDYRALNELRIREEDIPKTAFTTRYGLYECTVMSFGLTNAPAFFMNLMNKVFMEFLDKFVVVFIDDILIYSKSEEEHEQHLRLVLEKLKEHQLYAKFNKCDFWLTEVKFLGHVITAQGVAVDPSNVESVTKWTPPKTVSQIRSFLGLAGYYRRFIENFSRIARPMTQLLKKDEKFKWTAECDKSFEELKKKLVSAPVLILPDPTKDFQVYCDASRHGLGCVLMQEGRVVAYASRQLRPHEGNYPTHDLELAAVVHALKIWRHYLIGNRCEIYTDHKSLKYIFTQPDLNLRQRRWLELIKDYDMSIHYHPGKANVVADALSRKSYCTALCIEGMCEELRQEFGHLNVGIVEHRFVAALEARPTLVDQVRAAQVNDPEIAELKKNMRVGKARDFLEDEHGTIWMVERLCVPDDKELKDLILTEAHQTQYSIHPGSTKMYQDLKEKFWWVSMRREIAEFVALCDVCQRVKAEHQRPAGGSLYTSAYHLYGKRLAELYLARIMCLHGVPKKIVSDRGSQFTSKFWQKLQEELGTRLNFSTAYHPQTDGQTERVNLILEDMLRACALDFGGAWDKSLPYAEFSYNNSYQASLQMAPFEALYGRKLYTAICALFWDQTGERQLFGTEVLAEVEEKVRIIRERLRIAQSRQKSYADNRRRELTFEEGDYVYLRVTPLRGVHHFQTKGKLAPRFVGPYKILERRGEVAYQLELPSNMIGIHDVFHVSQLKKCLRVPEEQVDSEHIDIQEDLTYVEKPVRILDTSERRTRNKVTRFCRVQWNHHSEEEATWEREDELKAAHPHLFTSSSESRGRDSV

SEQ ID NO: 18754 - protein, 1719 aa, Oryza sativa
  Clone ID: TF_OSC34305j.C1.p1.fg
MAVEASGGTADHACQEAAYLMMARLRERHNYIFHDTAYRYHPSRANGDGVSSFRPTAGENDTTFGHMCAVMRGLDRMHSDLHKATKALNDGKLMRIVALKDEIARLKKENAQLKGLPAPGGVRIRTTPRKTTTAPVRIQLAPRNPPPAAAPAAPPVPPAVPAAPAPAPAPAPASALSFAPASAARGPASGTGGWLSATPSGSRDLSSSSSSGSQSGSGETYLPGSRSRSEGPGCLFGSDDGRYHVPMMVYTRTGNRTTGEGSNGEERVDGVHPNSDSGNGPPPLPENPTLAQVMAHQTQMMAAMMQQMQQQHQQMHQRMMQHVEQQHQHFGPPPPQSKLPEFLGVRPPTFSSTTNPMEANDWLHAIEKKLNLLQCNDQEKVAFATHQLQGPASAWWDNHMATRPPGTEVTWAEFCRSFRKAQVPDGVVAQKKREFRALHQGNRTVTEYLHEFNRLTRYAPEDVRTDAEKQEKFMAGLDDELTNQLISGYYADFERLVDKAIRQEDQRNKMDRKRKAAQFRAHQGSHQRPRFTPGQQGGPTTMIVRQHRPFNPSNFYQGTSDSQNHHGGQPNRGAAPRPPVASAQSGQPAQAKKETEAKPGSCFNCGELGHFADKCPKPRRAGPRFIQARVNHASAEEAQAAPEVVLGTFPVNSIPATVLFDSGATHSFISKKFVGMHGLIREELSTPMRVHTPGNSSTSVQFSPSITIEIQRSPVLANLILLESKDLDVILGMDWLTKFKGVIDCANRTVTLTNEKGETVVYKSLVSPKKGVSLNQIETEIPVDTVEKNLRKLDDIPIVCEYPEVFPEDLTTMPPKREIEFRIDLAPGTAPIYKRPYRMAANELTEVKKQVDEQLQKGYIRPSTSPWGAPVIFVEKKDKTKRMCVDYRALNEVTIKNKYPLPRIDDLFDQLKGAKVFSKIDLRSGYHQLRIREEDIPKTAFTTRYGLYECTVMSFGLTNAPAFFMNLMNKVFIEFLDKFVVVFIDDILIYSKSEEEHEQHLRLVLEKLKEHQLYAKFSKCDFWLTEVKFLGHVITAQGVAVDPSNVESVTKWTPPKTVSQIRSFLGLAGYYRRFIGNFSRIARPMTQLLKKDEKFKWTAECDKSFEELKKKLVSAPVLILPDQMKDFQVYCDASRHGLGCVLMQEGRVVAYASRQLRPHEGNYPTHDLELAAVVHALKIWRHYLIGNRCEVYTDHKSLKYIFTQPDLNFRQRRWLELIKDYDMSIHYHPGKANVVADALSRKSYCTALCIESMCEELRQEFEHLNIGIVEHGFVAALEARPTLVDQVRAAQVNDPEIAELKKNMRVGKARDFLKDEHGTIWMGERLCVPDDKELKDLILTEAHQTQYSIHPGSTKMYQDLKEKFWWVSMRREIAEFVALCDVCQRVKAEHQRPTVHTTYTGKRLAELYLSRIMCLHGVLKKIVSDRGSQFTSKFWQKLQEELGTRLNFSTAYHPQTDGQTERVNQILEDMLRACALDFGGAWDKSLPYAEFSYNNSYQASLQMAPFEALYGRKCRTPLFWDQTGERQLFGTEVLAEAEEKVRIIRERLRIAQSRQKSYADNRRRELTFEAGDHVYLRVTPLRGVHRFQTKGKLAPRFVGPYKILERRGEVAYQLELPSNMIGIHDVFHVSQLKKCLRVPEEQADSEHIDIQEDLTYVEKPVRILDTSERRTRNKVTRFCRVQWSHHSEEEATWEREDELKAAHPHLFTSSSESRGRDSV

SEQ ID NO: 18755 - protein, 1084 aa, Oryza sativa
  Clone ID: TF_OSC34569j.C1.p1.gm
MVYTRTGNRTTGEGSNGEERADGVHPNSDSGNGPPPLPENPTLAQVMAHQTQMMAAMMQQMQQQHQQMHQRMMQHAEQQHQQFGPPPPQSKLPEFLRVRPPTFSSTTNPMEANDWLHAIEKKLNLLQCNDQEKVAFATHQLQGPASAWWDNHMATRPPGTEVTWAEFCRSFRKAQVPDGVVAQKKREFRELHQGNRTVTEYLHEFNRLARYAPEDVRTDAEKQEKFMAGLDDELTNQLISGDYADFERLVDKAIRQEDQRNKMDRKRKAAQFRAHQGSHQRLRFTPGQQGGPTTMIVRQHRPFNPSNFHQGSSGSQNHHGSQPNRGTAPRPPMAPAQSGPPAQAKKETGAKPGSCFNCGELGHFADKCPKPRRAGPRFIQARVNHASAEEAQAAPEVVLVTLTNEKGETVVYKSLVSPKKGASLNQIETEIPVDIEEKNLRKLEDIPIVCEYPEVFPEDLTTMPPKREIEFRIDLAPGTAPIYKRPYRMAANELAEVKKQVDEQLQKGYIRPSTSPWGAPVIFVEKKDKTKRMCVDYRALNEVTIKNKYPLPRIDDLFDQLKGAKVFSKIDLRSGYHQLRTREEDIPKTAFTTRYGLYECTVMSFGLTNAPAFFMNLMNKVFMEFLDKFVVVFIDDILIYSKSEEEHEQHLRLVLEKLKEHQLYAKFSKCDFWLTEVKFLGHVITAQGVAVDPSNVESVTKWTPPKTVSQIRSFLGLAGYYRRFIENFSRIARPMTQLLKKDEKFKWTAECDKSFEELKRKLVSAPVLILPDQTKDFQVYCDASRHGLGCVLMQEGRVVAYASRQLRPHEGNYPTHDLELAAVVHALKIWRHYLIGNRCEVYTDHKSLKYIFTQPDLNLRQRRWLELIKDYDMSIHYHPGKANVVADALSRKSYCTALCIEGMCEELRQEFEHLNVGIVEHGFVAALEARPTLVDQVRAAQVNDPEIAELKKNMRVGKARDFLEDEHGTIWMGERLCVPDDKELKDLILTEAHQTQYSIHPGSTKMYQDLKEKFWWVSMRREIAEFVALCDVCQRVKAEHQRPAGGGPTLSDPGFPPSRRSPLAASHPALPDAVAGGLRFLPGH

SEQ ID NO: 18756 - protein, 1785 aa, Oryza sativa
  Clone ID: TF_OSC400177j.C1.p45.fg
MAGHPPNHRGEGMIDFVAELARMTLVVGYPDAPEYTTIPPLSGELPHRVRLEVHGYVGTCLANMAVEASGGTADHACQEAAYLMMARLRERHDYIFHDTAYRYHPRRAHGDGVSSFRPTAGENDTTFGHMCAVMRGLDRMHSDLHKATKALNDGKLMRIVALKDEIARLKKENAQLKGLPAPGGVRIRTTPRKRTTAPVRIQLAPRNPPPPAAPAAPPVPPAAPAVPAVPPAPAPAPAPAFTLSFAPASAARGPASGTGGCLFGMVYTRTGNRTTGEGSNGEERVDGVHPNSDSGNGPPPLPENPTLAQVMAHQTQMMAAMMQQMQQQHQQMHQRMMQHAEQQHQQFGPPPPQSKLPEFLRVRPPTFSSTTNPMEANDWLHAIEKKLNLLQCNDQEKVAFATHQLQGPASAWWDNHMATRPPGTEVTWAEFCRSFRKAQVPDGVVAQKKREFRALHQGNRTVTEYLHEFNRLARYAPEDVRTDAEKQEKFMAGLDDELTNQLISGDYADFERLVDKAIRQENQRNKMDRKRKAAQFRAPQESHQRSRFTPGQQGGPTTMIVRQHRPFNPSNFHQGSSGSQNHHGSQPNRGTAPRPPMAPAQSGQPAQAKKETGAKPGSCFNCGELGHFADKCPKPRRAGPRFIQARVNHASAEEAQAAPEVVLGTFPVNSIPATVLFDSGATHSFISKKFVGMHGLIREELSTPMRVHTPGNSSTSVQFSPSITIEIQRSPFLANLILLESKDLDVILGMDWLTKFKGVIDCANRTVTLTNEKGETVVYKSLVSPKKGASLNQIETEIPVDAEEKNLRKLEDIPIVCEYPEVFPEDLTTMPPKREIEFRIDLAPGTAPIYKRPYRMAANELAEVKKQVDEQLQKGYIRPSTSPWGAPVIFVEKKDKTKRMCVDYRALNEVTIKNKYPLPRIDDLFDQLKGAKVFSKIDLRSGYHQLRIREEDIPKTAFTTRYGLYECTVMSFGLTNAPAFFMNLMNKVFMEFLDKFVVVFIDDILIYSKSEEEHEQHLRLVLEKLKEHQLYAKFSKCDFWLTEVKFLGHVITAQGVAVDPSNVESVTKWTPPKTVSQIRSFLGLAGYYRRFIENFSRIARPMTQLLKKDEKFKWTAECDKSFEELKRKLVSAPVLILPDQTKDFQVYCDASRHGLGCVLMQEGRVVAYASRQLRPHEGNYPTHDLELAAVVHALKIWRHYLIGNRCEVYTDHKSLKYIFTQPDLNLRQRRWLELIKDYDMSIHYHPGKANVVADALSRKSYCTALCIEGMCEELRQELEHLNMGIVEHGFVAALEARPTLVDQVRAAQVNDPEIAELKKNMRVGKARDFLEDEHGTIWMGERLCVPDDKELKDLILTEAHQTQYSIHPGSTKMYQDLKEKFWWVSMRREIAEFVALCDVCQRVKAEHQRPAGLLQPLQIPEWKWEEIGMDFITGLPRTSSGHDSIWVVVDRLTKVAHFIPVHTTYTGKRLAELYLARIMCLHGVPKKIVSDRGSQFTSKFWQKLQEELGTRLNFSTAYHPQTDGQTERVNQILEDMLRACALDFGGAWDKSLPYAEFSYNNSYQASLQMAPFEALYGRKCRTPLFWDQTGERQLFGTEVLAGAEEKVRIIRERLRIAQSRQKSYADNRRRELTFEAGDYVYLRVTPLRGVHRFQTKGKLAPRFVGPYRILERRGEVAYQLELPSNMIGIHDVFHVSQLKKCLRVPEEQADSEHIDIQEDLTYVEKPVRILDTSERRTRNKVTRFCRVQWSHHSEEEATWEREDELKAAHPYLFTSSSESRGRDSV

SEQ ID NO: 18757 - protein, 1521 aa, Oryza sativa
  Clone ID: TF_OSC400177j.C1.p63.fg
MVYTRTGNRTTGEGSNGEERADGVHPNSDSGNGPPPLPENPTLAQVMAHQTQMMAAMMQQMQQQHQQMHQRMMQHAEQQHQQFDPPPPQSKLPEFLRVRPPTFSSTTNPMEANDWLHAIEKKLNLLQCNDQEKVAFATHQLQGPASAWWDNHMATRPPGTEVTWAEFCRSFRKAQVPDGVVAQKKREFRALHQGNRTVTEYLHEFNRLARYAPEDVRTDAEKQEKFMAGLDDELTNQLISGDYADFERLVDKAIRQEDQRNKMDRKRKAAQFRSNQGSQHRPRLTPGQQGGPTTMIVRQHRPFNSSNFHQGTSGSQNHHGSQPNRGTAPRPPMAPAQSGQPAQAKKETGAKPGSCFNCGELGHFADKCPKPRRAGPRFIQARVNHASAEEAQAAPEVVLGTFPVNSIPATVLFDSGATHSFISKKFVGMHGLIREELSTPMRVHTPGNSSTSVQFSPSITIEIQRSPFLANLILLESKDLDVILGMDWLTKFKGVIDCANRTVTLTNEKGETVVYKSLVSPKKGASLNQIETEIPVDAEEKNLRKLEDIPIVCEYPEVFPEDLTTMPPKREIEFRIDLAPGTAPIYKRPYRMAANELAEVKKQVDEQLQKGYIRPSTSPWGAPVIFVEKKDKTKRMCVDYRALNEVTIKNKYPLPRIDDLFDQLKGAKVFSKIDLRSGYHQLRIREEDIPKTAFTTRYGLYECTVMSFGLTNTPAFFMNLMNKVFMEFLDKFVVVFIDDILIYSKSEEEHEQHLRLVLEKLKEHQLYAKFSKCDFWLMEVKFLGHVITAQGVAVDPSNVESVTKWTPPKTVSQIRSFLGLAGYYRRFIENFSRIARPMTQLLKKDEKFKWTAGCDKSFEELKRKLVSAPVLILPDQTKDFQVYCDASRHGLGCVLMQEGRVVAYASRQLRPHEGNYPTHDLELAAVVHALKIWRHYLIGNRCEVYTDHKSLKYIFTQPDLNLRQRRWLELIKDYDMSIHYHPGKANVVADALSRKSYCTALCIEGMCKELRQELEHLNMGIVEHGFVAALEARPTLVDQVRAAQVNDPEIAELKKNMRVGKARDFLEDEHGTIWMGERLCVPDDKELKDLILTEAHQTQYSIHPGSTKMYQDLKEKFWWVSMRREIAEFVALCDVCQRVKAEHQRPAGLLQPLQIPEWKWEEIGMDFITGLPRTSSGHDSIWVVVDRLTKVAHLIPVHTTYTGKRLAELYLARIMCLHGVPKKIVSDRGSQFTSKFWQKLQEELGTRLNFSTAYHPQTDGQTERVNQILEDMLRACALDFGGAWDKSLPYAEFSYNNSYQASLQMAPFEALYGRKCRTPLFWDQTGERQLFGTEVLAEAEEKVRIIRERLRIAQSRQKSYADNRRRELTFEAGDYVYLRVTPLRGVHRFQTKGKLAPRFVGPYKILERRGEVAYQLELPSNMIGIHDVFHVSQLKKCLRVPEEQADSEHIDIQEDLTYVEKPVRILGTSERRTRNKVTRFCRVQWSHHSEEEATWEREDELKAAHPYLFTSSSESRGRDSA

SEQ ID NO: 18758 - protein, 1138 aa, Oryza sativa
  Clone ID: TF_OSC400432j.C1.p20.fg
MEANDWLHDIEKKLNLLQCNDQEKVAFATHQLQGPASAWWDNHMATRPPGTEVTWAEFCRSFRKAQVPDGVVAQKKREFRALHQGNRTVTEYLHEFNRLARYAPEDVRTDAEKQKKFMAGLDDELTNQLISGDYADFERLVDKAIRQEDQRNKMDRKRKAAQFRSNQGNHQRPRFAPGQQGGPTTMIVRQYRPFNPSNFHQGASGSQNHHGGQPNRGAAPRLPVAPAQSGPSAQAKKETGTKPGSCFNCGELGHFADKCPKPRCAGPRFVQARVSHASAEEAQAAPEVVLGTFPVNSIPATVLFDSGATHSFISKKFVGMHGLRKEELNTPMRVHTPGNSSTSVSFSPSVLIEIQRSPFLANLILLESKDLDVILGMDWLTKFKGVINCANRIVTLTNEKGETAVYKSLVSPKQGVALNQMEAEIPVVTEEKNPRKLEEIPIVCEYPEVFPEDLTTMPPKREIEFRIDLAPGTAPIYKRPYRMAANELAEVKKQVDEQLQKGYIRPSTSPWGAPVIFVEKKDKTKRMCVDYRALNEVTIKNKYPLPRIDDLFDQLKGAKVFSKIDMRSGYHQLRIREEDISKTAFTTRYGLYECTVMSFGLTNAPAFFMNLMNKVFMEFLDKFVVVFIDDILIYPKSEEEHEQHLHLVLEKLKEHQLYAKFSKCDFWLTEVKFLGHVITAQVQQTEPQTKPYPLDMWKYGSALQQRPELNPYSTRAQGVAVDPSNVESVTKWTPPKTVSQIRSFLGLVGYYRRFIENFSRIARPMTQLLKKDEKFKWTAECDKSFEELKKKLVSAPVLILPDQMKDFQVYCDASRHGLGCVLMQEGRVVAYASRQLRPHEGNYPTHDLELAAVVHALKIRRHYLIGNRCEVYMDHKSLKYIFTQPDLNLRQRRWLELIKDYDMSIHYHPEKANVVADALSRKSYCTALGIEGMCEELRQELERLNVGIVEHGFVAALEARPTLADQVRAAQVNDPEIAELKKNMRVRKARDFHEDEHGTIWLGERLCVPDDKELKDLILTEAHQTQYSIHPGSTKMYQDLKEKFWWVSMRREIAEFVALCDVCQRVKAEHQRPVGLLQPLQIPEWKWEEIGMDFITGLPRTSSGHDSISVVNVTPTVLKRVCIPIRLCRGVILSSGRL

SEQ ID NO: 18759 - protein, 1243 aa, Oryza sativa
  Clone ID: TF_OSC400477j.C1.p32.fg
MVYTRNGSRATGEGSNGEERTEGVHPNSNSDNGPPPLPENPTLAQVMAHQTQMMAAMMQQMQQQHQQMHQRMLQHAEQQHQQFGPPPPQSKLPEFLRVRPPTFSSTTNPMEANDWLHAIEKKLNLLQCNDQEKVAFATHQLQGPASAWWDNHMATRPPGTEVTWAEFCHSFRKAQVPDGVVAQKKREFRALHQGNRTVTEYLHEFNHLARYAPEDVRTDAEKQEKFLAGLDDELTNQLISGDYADFERLVDKTIRQEDQRNKMDRKRKAAQFRAPQGSHQRPRFAPEQQGGPTTMIVRQYRPFNPSNFPQGASGSQNHHGGQPNRGAAPLPPMAPAQSGPSAQAKEETGAKPGSCFNCGELGHFADKCPKPRRAGPRFIQARVNHASAKEAQAAPEVVLGTFPVNSIPATVLFDSGATHSFISKKFVGMHGLIREELSTPMRVHTPGNSSTSVQFSPSITIEIQRSPFLANLILLESKDLDVILGMDWLTKFKGVIDCSNRTVTLTNEKGETVVYKSPDSPKQGISLNQIEAEIPVDTVEKNLRKLEDIPIVCEYPEMFPEDLTTMPPKREIEFRIDLAPGIAPIYKRPYRMAANELAEVKKQVDEQLQKGAKVFSKIDLRSGYHQLRIREEDIPKTAFTTRYGLYECTVMSFGLTNAPAFFMNLMNKVFMEFLDKFVVVFIDDILIYSKSEEEHEQHLRLVLEKLKEHQLYAKFTSGYYRRFIENFSRIARPMTQLLKKDEKFKWTAECDKSFEELKKKLVSALVLILPDQMKHFQVYCDACRHGLGCVLMQEGRVVAYVSRQLRPHEGNYPTHDLELAAVVHALKIWRHYLIGNRCEVYTDHKSLKYIFTQPDLNLRQRRWLELIKDYDISIHYHPGKANVVADALSRKSYCTALCIEGMCEELRQEFEHLNVGIVEHGFVAALEARPTLVDQVRAAQVNDSEIAELKKNMRVGKARDFHEDEHGIIWLGERLCVPDDKELKDLILTEAHQTQYSIHPGSTKMYQDLKEKFWWVSMTREIAEFVALCDVCQRVKAEHQRPAVHTTYTGKRLAELYLSRIMCLHGVPKKIVSDRGSQFTSKFWQKLQEELGTRLNFSTAYHPQTDGQTERVNQIWEDMLRACALDFGGAWDKNLPYAEFSYNNNYQASLQMAPFEALYGRKCHTPLFWDQTGERQLFGTEVLAEAEEKVRIIRERLRIAQSRQKSYADNPRRELTFEAGDYVYLHVTPLEFRRRNSHPLALR

SEQ ID NO: 18760 - protein, 1380 aa, Oryza sativa
  Clone ID: TF_OSC400498j.C1.p21.fg
MEANDWLHAIEKKLNLLQCNDQEKVAFATHQLQGPASAWWDNHMATRPPGTEVTWVEFCRSFRKAQVPDGVVAQKKREFRALHQGNRTVTEYLHEFNRLARYAPEDVRTDAEKQEKFMAGLDDELTNQLISGDYADFERLVDKAIRQEDQRNKMDRKRKAAQFRAHQGSHQRPRFTPGQQGGPTTMIVRQYRPFNPSNFPQGASGSQNHHGGQPNRGAAPRPPMAPAQSGPSAQAKKKTGAKPGSCFNCGELGHFADKCPKPRRAGPRFIQARVNHVSAEEAQTAPEVVLGTFPVNSIPATILFDSGATHSFISKKFVGMHGLIREELSTPMRVHTPGNSSTSVQFSPSITIEIQRSPFLANLILLESKDLDVILGMDWLTKFKGVIDCANRTVTLTNEKGETVVYKSPDSPKRGVSFNQIEAEIPVDTVEKNLRKLEDIPIVCEYPEVFPEDLTTMPPKREIEFRIDLAPGTAPIYKRPYRMAANELAEVKKQVDEQLQKGYIRPSTSPWGAPVIFVEKKDKTKRMCVDYRALNEVTIKNKYPLPRIDDLFDQLKGAKVFYKIDLRSGYLQLRIREEDIPKTAFTTRYGLYECTVMSFGLTNAPAFFMNLMNKVFMEFLDKFVVVFIDDILIYSKTEEEHEQHLRLVLEKLKEHQLYAKFSKCDFWLTEVKFLGHVITAQGVAVDPSNVESVTKWTPPKTVSQIRSFLGLAGYYRRFIENFSRIARPMTQLLKKDEKFKWTAECNKSFEELKKKLVSAPVLILPDQMKDFQVYCDASRHGLGCVLMQEGRVRHYLIGNRCEVYTDHKSLKYIFTQPDLNLRPRRWLELIKDYDMSIHYHPGKANVVADALSRKSYRTALCIEGMCEELWQEFEHLNVGIVEHGFVAALEARPTLVDQVRAAQVNDSEMAELKKNMRVGKARDFHEDEHGTIWLGERLCVPDDKELKDLILTEAHQTQYSIHPGSTEMYQDLKEKFWWVSMRREIAEFVALCDVCQRVKAEHQRPAGLLQPLQIPEWKWEEIGMDFITGLPRTSSGHDSIWVVVDRLTKVAHFIPVHTTYTGKRLAELYLSRIMCLHGVPKKIVSDRGSQFTSKFWQKLQEELGTRLNFSTAYHPQTDGQTERVNQILEDMLRACALDFGGAWDKNLPYAEFSYNNSYQASLQMAPFEALYGRKCRTPLFWDQTGERQLFGTEVLTEAEEKVRIIRERLRIAQSRQKSYADNRRRELTFEAGDYVYLRVTPLRGVHRFQTKGKLAPRFVGPYKILERRGEVAYQLELPSNMIGIHDVFHVSQLKKCLRVPEEQADSEHIDIQEDLTYVEKPVCILDTSERRTRKKVTRFCRVQWSHHSEEEATWEREDELKAAHPHLFASSSESRGRDSV

SEQ ID NO: 18761 - protein, 1773 aa, Oryza sativa
  unsure (1)..(1773): unsure at all Xaa locations
  Clone ID: TF_OSC400558j.C1.p1.np
MAGHPPNHRGEGMIDFVAELARMTLVVGYLNAPEYTTIPPLSGELPHRVRLEVHGYVGTCLANMAVEASGGTADHACQEAAYLMMARLRERHDYIFHDTAYRYHPRRAHGDGVSSFRPTAGENDTTFGHMCAVMRGLDRMHSDLHKATKALNDGKLMRIVALKDEIARLKKENAQLKGLPAPGGVRIRTMPRKTTTAPVRIQLAPRNPPPAAAPAAPSVPPAVPAAPVPAPAFTLSFAPASAARGSANGTGGCSLQMVYTRTGNRTTGEGSNGEERADGVHPNSDSGNGPPPLPENPTLAQVMAHQTQMMAAMMQQMQQQHQQMHQRMMQHAEQQHQQFGPPPPQSKLPEFLRVRPPTFSSTTNPMEANDWLHAIEKKLNLLQCNDQEKVAFATHQLQGPVSAWWDNHMATRPPGTEVTWAEFCRSFRKAQVPDGVVAQKKREFRALHQGNRTVTEYLHEFNRLARYAPEDVRTDAEKQEKFMAGLDDELTNQLISGDYADFERLVDKAIRQEDQRNKMDRKRKAAQFRAHQGSHQRPRFTPGQQGGPTTMIVRQHRPFNPSNFHQGTSGSQNYHGSQPNRGTAPRPPMAPAQSGQPAQAKKETGAKPGSCFNCGELGHFADKCPKPRRAGPRFIQARVNHASAEEAQTAPEVVLGTFPVNSIPATVLFDSGATHSFISKKFVGRYGLRKEELSTPMRVHTPGNSSTSVSFSPSVLIEIQRSPFLANLILLESKDLDVILGMDWLTKFKGVIDCASRTVTLTNEKGETVVYKSLVSPKKGVSLNQIETEIPVDTVEKNLRKLEDIPIVCEYPEVFPEDLTTMPPKREIEFRIDLAPGTAPIYKRPYRMAANELAEVKKQVDEQLQKGYIRPSTSPWGAPVIFVEKKDKTKRMCVDYRALNEVTIKNKYPLPRIDDLFDQLKGAKVFSKIDLRSGYHQLRIREEDIPKTAFTTRYGLYECTVMSFGLTNAPAFFMNLMNKVFMEFLDKFVVVFIDDILIYSKSEEEHEQHLRLVLEKLKEHQLYAKFSKCDFWLTEVKFLGHVITAQGVAVDPSNVESVTKWTPPKTVSQIRSFLGLAGYYRRFIENFSRIARPMTQLLKKDEKFKWTAECDKSFEELKKKLVSAPVLILPDQMKDFQVYCDASRHGLGCVLMQEGRVVAYASRQLRPHEGNYPTHDLELAAVVHALKIWRHYLIGNRCEVYTDHKSLKYIFTQPDLNLRQRRWLELIKDYDMSIHYHPGKANVVADALSRKSYCTALCIEGMCEELRQEFEHLNMGIVEHGFVAALEARPTLVDQVRAAQVNDPEIAELKKNMRVGKARDFHEDEHGTIWMGERLCVPDDKELKDLILTEAHQTQYSIHPGSTKMYQDLKEKFWWVSMRREIAEFVALCDVCQXVKAEHQRPAGLLQPLQIPEWKWEEIGMDFITGLPRTSSGHDSIWVVVDRLTKVAHFIPVHTTYTGKRLAELYLARIMCLHGVPRKIVSDRGSQFTSKFWQKLQEELGTRLNFSTAYHPQTDGQTERVNQILEDMLRACALDFGGAWDKSLPYAEFSYNNSYQASLQMAPFEALYGRKCRTPLFWDQTGERQLFGTEVLAEAEEKVRIIRERLRIAQSRQKSYADNRRRELTFEAGDYMYLRVTPLRGVHRFQTKGKLAPRFVGPYKILERRGEVAYQLELPSNMIGIHDVFHVSQLKKCLRVPEEQADSEHIDIQEDLTYVEKPVRILDTSERRTRNKVTRFCRVQWSHHSEEEATWEREDELKAAHPHLFTSSSESRG

SEQ ID NO: 18762 - protein, 1306 aa, Oryza sativa
  Clone ID: TF_OSC400560j.C1.p2.gm
MVYTRTGNRTTGEGSNGEERADGVHPNSDSGNGPPPLPENPTLAQVMAHQTQMMAAMMQQMQQQHQQMHQRMMQHAEQQHQQFGPPPPQSKLPEFLRVRPPTFSSTTNPMEANDWLHAIEKKLNLLQCNDQEKVAFATHQLQGPASAWWDNHMATRPPGTEVTWAEFCRSFRKAQVPDGVVAQKKREFRALHQGNRTVTEYLHEFNRLARYAPEDVRTDAEKQEKFMAGLDDELTNQLISGDYADFERLVDKAIRQEDQRNKMDRKRKAAQFRAHQGSHQRPRFTPGQQGGPTTMIVRQHRPFNPSNFHQGTSGSQNYHGSQPNRGTAPRPPMAPAQSGQPAQAKKETGAKPGSCFNCGELGHFADKCPKPRRAGPRFIQARVNHASAEEAQTAPEVVLVTLTNEKGETVVYKSLVSPKKGVSLNQIETEIPVDTVEKNLRKLEDIPIVCEYPEVFPEDLTTMPPKREIEFRIDLAPGTAPIYKRPYRMAANELAEVKKQVDEQLQKGYIRPSTSPWGAPVIFVEKKDKTKRMCVDYRALNEVTIKNKYPLPRIDDLFDQLKGAKVFSKIDLRSGYHQLRIREEDIPKTAFTTRYGLYECTVMSFGLTNAPAFFMNLMNKVFMEFLDKFVVVFIDDILIYSKSEEEHEQHLRLVLEKLKEHQLYAKFSKCDFWLTEVKFLGHVITAQGVAVDPSNVESVTKWTPPKTVSQIRSFLGLAGYYRRFIENFSRIARPMTQLLKKDEKFKWTAECDKSFEELKKKLVSAPVLILPDQMKDFQVYCDASRHGLGCVLMQEGRVVAYASRQLRPHEGNYPTHDLELAAVVHALKIWRHYLIGNRCEVYTDHKSLKYIFTQPDLNLRQRRWLELIKDYDMSIHYHPGKANVVADALSRKSYCTALCIEGMCEELRQEFEHLNMGIVEHGFVAALEARPTLVDQVRAAQVNDPEIAELKKNMRVGKARDFHEDEHGTIWMGERLCVPDDKELKDLILTEAHQTQYSIHPGSTKMYQDLKEKFWWVSMRREIAEFVALCDEELGTRLNFSTAYHPQTDGQTERVNQILEDMLRACALDFGGAWDKSLPYAEFSYNNSYQASLQMAPFEALYGRKCRTPLFWDQTGERQLFGTEVLAEAEEKVRIIRERLRIAQSRQKSYADNRRRELTFEAGDYVYLRVTPLRGVHRFQTKGKLAPRFVGPYKILERRGEVAYQLELPSNMIGIHDVFHVSQLKKCLRVPEEQADSEHIDIQEDLTYVEKPAEAQPGSRPPASLPPGVADRGTHLSDPSPTSRLSRSRRRTRNGRRAHASASPGP

SEQ ID NO: 18763 - protein, 1360 aa, Oryza sativa
  Clone ID: TF_OSC400574j.C1.p2.gm
MVYTRTGNRTAGEGSNGEERADGVHPNGDSGNGPPPLPENPTLAQVMAHQTQMMAAMMQQMQQQHQQMHQRMMQHAEQQHEQFGPPPPQSKLPEFLRVRPPTFSSTTNPMEANDWLHAIEKKLNLLQCNDQEKVAFATHQLQGPASAWWDNHMATRPPGTEVTWAEFCRSFRKAQVPDGVVAQKKREFRALHQGNRTVTEYLHEFNRLARYAPEDVRTDAEKQEKFMAGLDDELTNQLISGDYADFERLVDKAIRQEDQRNKMDRKRKAAQFRSNQGSQHRPRFTPGQQGGPTTMIVRQHRPFNPSNFHQGTSGSQNHHGGQPNRGAAPRPPMAPAQSGQPAQAKKETGAKPGSCFNCGELGHFADKCPKPRRAGPRFIQARVNHASAEEAQAAPEVVLVTLTNEKGETVVYKSLASPKKGASLNQIETEIPVDAEEKNLRKLEDIPIVCEYPEVFPEDLTTMPPKREIEFRIDLAPGTAPIYKRPYRMAANELAEVKKQVDEQLQKGYIRPSTSPWGAPVIFVEKKDKTKRMCVDYRALNEVTIKNKYPLPRIDDLFDQLKGAKVFSKIDLRSGYHQLRIREEDIPKTAFTTRYGLYECTVMSFGLTNAPAFFMNLMNKVFMEFLDKFVVVFIDDILIYSKSEEEHEQHLRLVLEKLKEHQLYAKFSKCDFWLTEVKFLGHVITAQGVAVDPSNVESVTKWTPPKTVSQIRSFLGLAGYYRRFIENFSRIARPMTQLLKKDEKFKWTAECDKSFEELKRKLVSAPVLILPDQTKDFQVYCDASRHGLGCVLMQEGRVVAYASRQLRPHEGNYPTHDLELAAVVHALKIWRHYLIGNRCEVYTDHKSLKYIFTQPDLNLRQRRWLELIKDYDMSIHYHPGKANVVADALSRKSYCTALCIEGMCEELRHEFEHLNMGIVEHGFVAALEARPTLVDQVRAAQVNDPEIAELKKNMRVGKARDFHEDEHGTIWMGERLCVPDDKELKDLILTEAHQTQYSIHPGSTKMYQDLKEKFWWVSMRREIAEFVALCDVCQRVKAEHQRPAGLLQPLQIPEWKWEEIGMDFITGLPRTSSGHDSIWVVVDRLTKEELGTRLNFSTAYHPQTDGQTERVNQILEDMLIACALDFGGAWDKSLPYAEFSYNNSYQASLQMAPFEALYGRKCRTPLFWDQTGERQLFGTEVLAEAEEKVRIIRERLRIAQSRQKSYADNRRRELTFEAGDYVYLRVTPLRGVHRFQTKGKLAPRFVGPYKILERRGEVAYQLELPSNMIGIHDVFHVSQLKKCLRVPEEQADSEHIDIQEDLTYVEKPVRILDTSERRTRNKARVGVMERGGPCDGLCRFRIHLGTRGDCPSPAGDGGET

SEQ ID NO: 18764 - protein, 1728 aa, Oryza sativa
  Clone ID: TF_OSC400596j.C1.p9.fg
MEKPKSPLNPFSLHMFFAIGFVPGKWGSVLVVQGKNLGRSFKMAGHPPNHRGEGMIDFVAELARMTLVVGYPDAPEYTTIPPLSGELPYRVRLEVHGYVGTCLANMAVEASGGTADHACQEAAYLMMARLRERHDYIFHDTAYRYHPRRAHGDGVSSFRPTAGENDTTFGHMCAVMRGLDRMHSDLHKATKALNDGKLMRIVALKDEVARLKKENAQLKGLPAPGGVRIRTTPRKRTTAPVRIQLAPRNPPPPAAPAAAPVPPAVPAAPAPAPAFTLSFAPASAARGSASGTGGCLFGGQSAMVYTRTGSRATGEGSNGEERADGVHPNGDSGNGPPPLPENPTLAQVMAHQTQMMAAMMQQMQQQHQQMHQRMMQHAEQQHQQFGPPPPQSKLPEFLRVRPPTFSSTTNPMEANDWLHAIEKKLNLLQCNDQEKVAFATHQLQGPASAWWDNHMATRPPGTEVTWAEFCRSFRKAQVPDGVVAQKKREFRALHQGNRTVTEYLHEFNRLARYAPEDVRTDAEKQEKFMAGLDDELTNQLISGDYADFERLVDKAIRQEDQRNKMDRKRKAAQFRSNQGSQHRPRFTPGQQGGPTTMIVRQHRPFNSSNFHQGTSGSQNHQGGQPNRGAAPRPSVAPAQSGQPAQAKKETGAKPGSCFNCGELGHFADKCPKPRRAGPRFIQARVNHASAEEAQAAPEVVLGTFPVNSIPATVLFDSGATHSFISKKFVGMYGLRKEELSTPMRVRTPGNSSTSVSFSPSVLIEIQRSPFLANLILLESKDLDVILGMDWLTKFKGVIDCANRTVTLTNEKGETVVYKSLVSPKKGASLNQIETEIPVDTVGKNLRKLEDIPIVCEYPEVFPENLTTMPPKREIEFRIDLAPGTAPIYKRPYRMAANELAEVKKQVDEQLQKGYIRPSTSPWGAPVIFVEKKDKTKRMCVDYRALNEVTIKNKYPLPRIDELFDQLKGAKVFSKIDLRSGYHQLRIREEDIPKTAFTTRYGLYECTVMSFGLTNAPAFFMNLMNKVFMKFLDKFVVVFIDDILIYSKSEEEHEQHLRLVLEKLKEHQLYAKFSKCDFWLTEVKFLGHVITAQGVAVDPSNVESVTKWTPPKTVSQIRSFLGLAGYYRRFIENFSRIARPMTQLLKKDEKFKWTAECDKSFEELKKKLVSAPVLILPDPTKDFQVYCDASRHGLGCVLMQEGRVVAYASRQLRPHEGNYPTHDLELAAVVHALKIWRHYLIGNRCEVYTDHKSLKYIFTQPDLNLRQRRWLELIKDYDMSIHYHPGKANVVADALSRKSYCTALCIEGMCEELRQEFEHLNMGIVEHGFVAALEARPTLVDQVRAAQVNDPEIAELKKNMRVGKARDFLEDEHGTIWMGERLCVPDDKELKDLILTEAHQTQYSIHPGSTKMYQDLKEKFWWVSMRREIAEFVALCDVCQRVKAEHQRPAGLLQPLQIPEWKWEEIGMDFITGLPRTSSGHDSIWVVVDRLTKVAHFIPVHTTYTGKRLAELYLARIMCLHGVPKKIVSDRGSQFTSKFWQKLQEEMGTRLNFSTAYHPQTDGQTERVNQILEDMLRACALDFGGAWDKSLPYAEFSYNNSYQASLQMAPFEALYGRKCRTPLFWDQTGERQLFGTEVLAEAEEKVRIIRERLRIAQSRQKSYADNRRRELTFEARDYVYLRVTPLRGVHRFQTKGKLAPRFVGPYKILERRGEVAYQLELPSTMIGIP

SEQ ID NO: 18765 - protein, 1819 aa, Oryza sativa
  unsure (1)..(1819): unsure at all Xaa locations
  Clone ID: TF_OSC400679j.C1.p10.np
MAGHPPNHHGEGMIDFVAELARMTLVVGYPNAPEYTTVPPLSGELPHRVRLEVHGYVGTCLANMVVEASGGTADHACQEAAYLMMARLRECHNYIFHDTAYRFHPRRASGDDVSTFRPIAGENDTTFDHMCAVMRGMDRMHLDLHKTSKALNDGKLMRIVVLKDEIARLKRENAQLKGLPAPGGVRIHTTPRKSTTAPVRIQLAPRNPPPPAVPAAPPVPPAAPAVPAAPAPAPAHVPVSAPASALSFAPATAVRGPASGNGGWLPATPSGSRDRSSSGSELGSGETYLPGSRSRSEGRGMVYTRTGTRTTGEGSNGEERADGVHPNSDSGNGPPPLPKNPTLAQVMAHQTQMMAAMMQQMQQQHQQMHQRMLHHAEQQHQQFGPPPPQSKLPEFLRIRPPTFSSTTNPMEANDWLHAIEKKPNLLQCNDQEKVAFATHQLQGPASAWWDNHMATRPPGTEVTWAEFCRSFRKAQVPDGVVAQKKREFRALHQGNRTVTEYLHFNRLAXYAPEDVRTDAEKQEKFLAGLDDELTNQLISGDYADFERLVDKAIRQEDQRNKMERKRKAAQFRSNQGSHQRPRFTPGQQGRPTTLIVRQHRPFNASNFHQGASGCQNHHGGQPNRSAAPCPPMALAQSATSAQAKKETGTKPGSCFNCGELGHFADKCPKPRRAGPRFVXACVNHASAEEAQAAPEVVLGTFPVNSIPAIVLFDSGATRSFISKKFVGMHGLRKEELNTPMRVHTPGNSSTSVSFSPSVLIEIQRSPFLANLILLESKDLDVILGMDWLTKFKGVIDCVNRTVTLTNEKGETVVYKSLVSPKQGVSLNQIEAEIPVVTEEKNSRKLEEIPIVCEYPEVFPEDLTTMPPKREIEFRIDLAPGTAPIYKRPYRMAANELVEVKKQVDEQLQKGYIXPSTSHWGAPVIFVEKKDKTKRMCVDYRALNEVTIKNKYPLPRIDDLFDQLKGAKVFSKIDLRSGYHQLRIREEDIPKMAFTTRYGLYECTVMSFGLTNAPAFFMNLMNKVFMEFLDKFVVVFINDILIYSKSEKEHEQHLRLVLXKLKELQLYAKFSKCDFWLTEVKFLGHVITAQGVAIDPSNVESVTKWTPPKTVSQIXSFLGLAGYYRRFIENFSRIARPMTXLLKKDEKFKWTAECDKSFEEFKKKLVSAPVLILPDQMKDFQVYCDASRHGLGCVLMQEGRVVAYASRQLRLHEGNYPTHDLELAAVVHALKIWRYYLIGNRCEVYTDHKSLKYIFTQPDLNLQQRRWLELIKDYDMSIHYHPGKANVVADALSRKSYCTALCIEGMCEELQXEFEHLNVGIVEHGFVAALEARPTLVDQVRAAQVNDPEIAELKKNMVGKARDFLEDEHGTNWMGERLCVPDDKELKDMILTEAHQTQCSIHPGSTKMYQDLKEKFWWASMRREIAEFVALCDVCQRVKVEHQRPAGLLQPLQIPEWKWEEIGMDCITGLPRTSSGHDSIWVVVDRLTKVAHFIPVHTTYTGKKLAELYLARIMCLHGVPKKIVSDRESQFTSKFWQKLQEELGTRLNFSTAYHPQTDGQTEXVNQILEDMLRACALDFGGAWDKSLPYAEFSYNNSYQASLQMVPFEALYCRKCRTPLFWDQTGERQLFGTEVLAEAEEKVRTIRERLRIALSRQKSYTDNRRRELTFEAGDYVYLRVTPLRGVHRFQTKGKLAPRFVGLYKILERRGEVAYQLELPSNMIGIHDVFHVSQLKKCLRVPEEQADSEHIDIQEDLTYVEKPVRILDTSERRTRNKVTRFCRVQWSHHSEEEATWEREDELKAAHPHLFASSSESQGRDSV

SEQ ID NO: 18766 - protein, 1344 aa, Oryza sativa
  Clone ID: TF_OSC400686j.C1.p8.gm
MVYTRNGSRTTGEGSNGEERTDGVHPNSDSGNGPPPLPENPTLAQVMAHQTQMMAAMMQQQHQQMHQRMQQQAEQHQQQFGPPPPQSKLPEFLRVRPPTFSSTTNPMEANDWLNAIEKKLNLLQCNDQEKVAFATHQLQGPASAWWDNLMATRPPGTEVTWAEFCRSFRKAQVPDGVVAQKKREFRALHQGNRTVTEYLHEFNRLARYAPEDVHTNAEKQEKFLAGLDDELTNQLISGDYADFERLVDKAIRQEDQRTKMDRKRKAAQFRSNQGSHQRPRFTPGQQGGPTTMIVRQHRPFNSSSFHQGASGSQNHHGGQPNHSAAPRPPMAPVQSAPSAQAKKETGTKPGSCFNCGELGHFADKCPKPRRAGPRFIQARVNHASAEEAQAAPEVVLVTLTNKKGETVVYKSLVSPKQGVSLNQIEVEIPVVTEGKSSRKLEDIPIVCEYPKVFPEDLTTMPPKREIEFRIDLAPGTAPIYKTPYRMAANELAEVKKQVDEQLQKGYIRPSTSPWGAPVIFVEKKDKTKRMCVDYRALNEVTIKNKYPLPRIDDLFDQLKGAKVFSKIDLRSGYHQLRIQEEDIPKTAFTTRYGLYECTVMSFGLTNAPAFFMNLMNKVFMEFLDKFVVVFIDDIPIYSKSEEEHEQHLRLVLKKLKEHQLYAKFSKCDFWLSEVKFLGHVITAQDVAVDPSNVESVTKWTPPNTVSQIRSFLGLAGYYRRFIENFSRIARPMTQLLKKDEKFKWTAECDKSFEELKKKLVSAPVLILPDQMKDFQVYCNASRHGFGCVLMQEGRVVAYASRQLRPHEGNYPTHDLELAAVVHALKIWRHYLIGNRCEVYTDHKSLKYIFTQPDLNLQQRRWLELIKDYDMSIHYHPGKANVVADALSRKSYCNALCTEGMCKELQQKLEHLNLGLVEYGYMAALEARPTLVDQVRAAQVNDPEITELKKNMRVGKARDFHEDEHGTIWLEERLCVPDDKELKDMILTEAHQTQYSIHPGSTKMYQDLKEKFWWVSMRREIAEFVTLCDVCQRVKAEHQRPADLLQPLQILEWKWEEIGMDFITGLPRTSSGHDSIWASLQMAPFEALYGWKCRTPLFWDQTGERQLFGTEVLTEAEEKVRTIRERLRIAQSRQKSYADNRRRELTFEAGDNVYLRVTPLRGADSEHIDIQEDLTYMEKPVRILETSERRTRNKVSPSRVRTSASPVFAASLVFRRRSSPPPPVRTPSPFLSFPIPRAPSVLAAPLLRLCASAFVPSAAASSHGRPAGFEAEPSPAATPCAVRSARGRSGPSVLWTGGGPPAWSRSTVDRPLCAADPWGPRAGAPSLSPCATDMRAPHVGAARSL

SEQ ID NO: 18767 - protein, 1810 aa, Oryza sativa
  unsure (1)..(1810): unsure at all Xaa locations
  Clone ID: TF_OSC400722j.C1.p48.np
MAGHPPNHRGEGMIDFVAELARMTLVVGYPDAPEYTTIPPLSGELPHRVRLEVHGYVGTCLANMAVEASGGTADHACQEAAYLMMARLRERHNYIFHDTAYRYHPSRANGDGVSSFRPTAGENDTTFGHMCAVMRGLDRMHSDLHKATKALNDGKLMRIVALKDEIARLKKENAQLKGLPAPGGVRIRTTPRKTTTAPVRIQLAPRNPPPAAAPAAPPVLPAVPAAPAPAPAPAPASALSFAPASAARGPASGTGGWLSATPSGSSDRSSSGSQSGSGETYLPGSRSRSEGPGMVYTRTGNRTTGEGSNGEERVDGVHPNSDSGNGPPPLPENPTLAQVMAHQTQMMAAMMQQMQQQHQQMHQRMMQHVEQQHQHFGPPPPQSKLPEFLGVRPPTFSSTTNPMEANDWLHAIEKKLNLLQCNDQEKVAFATHQLQGPASAWWDNHMATRPPGTEVTWAEFCRSFRAQVPDGVVAQKKREFRALHQGNRTVTEYLHEFNRLTRYAPXDVRTDPDKQEKFMAGLDDELTNQLISGYYADFRLVDKAIRQEDQRNKMDRKRKAAQFRAHQGSHQRPRFTPGQQGGPTTMIVRQHRPFNPSNFYQGTSDSQNHHGGQPNRGAAPRPPVASAQSGQPAQAKKETEAKPGSCFNCGELGHFADKCPKPRRAGPRFIQARVNHASAEEAQAAPEVVLGTFPVNSIPATVLFDSGATHSFISKKFVGMHGLIREELSTPMRVHTPGNSSTSVQFSPSITIEIQRSPVLANLILLESKDLDVILGMDWLTKFKGVIDCANRTVTLTNEKGETVVYKSLVSPKKGVSLNQIETEIPVDTVEKNLRKLDDIPIVCEYPEVFPEDLTTMPPKREIEFRIDLAPGTAPIYKRPYRMAANELTEVKKQVDEQLQKGYIRPSTSPWGAPVIFVEKKDKTKRMCVDYRALNEVTIKNKYPLPRIDDLFDQLKGAKVFSKIDLRSGYHQLRIREEDIPKTAFTTRYGLYECTVMSFGLTNAPAFFMNLMNKVFIEFLDKFVVVFIDDILIYSKEEEHEQHLRLVLEKLKEHQLYAKFSKCDFWLTEVKFLGHVITAQGVAVDPSNVESVTKWTPPKTVSQIRSFLGLAGYYRRFIGNFSRIARPMTQLLKKDEKFKWTAECDKSFEELKKKLVSAPVLILPDQMKDFQVYCDASRHGLGCVLMQEGRVVAYASRQLRPHEGNYPTHDLELAAVVHALKIWRHYLIGNRCEVYTDHKSLKYIFTQPDLNFRQRRWLELIKDYDMSIHYHPGKANVVADALSRKSYCTALCIESMCEELRQEFEHLNIGIVEHGFVAALEARPTLVDQRAAQVNDPEIAELKKNMRVGKARDFLKDEHGTIWMGERLCVPDDKELKDLILTEAHQTQYSIHPGSTKMYQDLKEKFWWVSMRREIAEFVALCDVCQRVKAEHQRPTGLLQPLQIPEWKWEEIGMDFITGLPRTSSGHDSIXVVVDRLTKVAHFIPVHTTYTGKRLAELYLSRIMCLHGVLKKIVSDRGSQFTSKFWQKLQEELGTRLNFSTAYHPQTDGQTERVNQILEDMLRACALDFGGAWDKSLPYAEFSYNNSYQASLQMAPFEALYGRKCRTPLFWDQTGERQLFGTEVLAEAEEKVRIIRERLRIAQSRQKSYADNRRRELTFEAGDHVYLRVTPLRGVHRFQTKGKLAPRFVGPYKILERRGEVAYQLELPSNMIGIHDVFHVSQLKKCLRVPEEQADSEHIDIQEDLTYVEKPVRILDTSERRTRNKVTRFCRVQWSHHSEEEATWEREDELKAAHPHLFTSSSESRGRDSV

SEQ ID NO: 18768 - protein, 1011 aa, Oryza sativa
  Clone ID: TF_OSC400772j.C1.p95.fg
MEANDWLHAIEKKLNLLQCNDQEKVAFATHQLQGPASAWWDNHMATRPPGTEVTWEEFCRSFRKAQGNRTVTEYLHEFNHLARYAPEDVRTDAEKQEKFLAGLDDELTNQLISGDYADFERLVDKAIRQDDQRNKMDRKRKAAQFRAPQGSHQRPRFAPGQQGGPTTMIVRQYRPFNPSNFPQGASGSQNHHGGQPNRGAAPRPPTAPAQSGPSAQAKRETGAKPGSCFNCGELGHFADKCPKPRRAGPRFIQARVNHASAEEAQAAPEVVLGTFPVNSIPATILFDSGATHSFISKKFVGMHGLRKEELSTPMRVHTSGNSSTSVSFSPSVLIEIQRSPFLANLILLESKDLDVILGMDWLTKFKGVIDCANRTVTLTNEKGETAVYKSPDSPKQGVSLNQIEAEIPVDTVKKNLRKLEDIPIVCEYPEVFPEDLTTMPPKREIEFRIDLAPGTAPIYKRPYRMAANELAEVKKQVDEQLQKGYIRPSTSPWGAPVIFVEKKDKTKRMCVDYRALNEVTIKNKYPLPRIDDLFDQLKGAKVFSKIDLRSGYHQLRIREEDIPKTAFTTRYGLYECTVMSFGLTNAPAFFMNLMNKVFMEFLDKFVVVFIDDILIYSKSEEEHEQHLRLVLEKLKEHQLYAKFSKCDFWLTEVKFLGHVITAQGVAVDPSNVESVTKWIPPKTVSQIRSFLGLAGYYRRFIENFSRIARPMTQLLKKDEKFKWTAECDKSFEELKKKLVSAPVLILPDQMKDFQVYCDASRHGLGCVLMQEGRVVAYASRQLRPHEGNYPTHDLELAAVVHALKIWRHYLIGNRCEVYTDHKSLKYIFTQPDLNLRQRRWLELIKDYDMSIHYHPGKANVVADALSRKSYCTALCIEGMCEELRQEFEHLNVGIVEHGFVAALEARPTLVDQVRAVQVNDSEIAELKKNMRVGKTRDFHEDEHGTIWLGERLCVPDDKELKDLILTEAHQTQYSIHPGSTKMYQDLKEKFWWVSMRREKLNSSHSAMFVNE

SEQ ID NO: 18769 - protein, 1664 aa, Oryza sativa
  Clone ID: TF_OSC400773j.C1.p38.fg
MDEVGRRWTFSRANEGYTGCGPAIFPVATDLHKATKALNDGKLMRIVALKDEVARLKKENAQLKGLPAPGGVRIRTTPRKRTTAPVRIQLAPRNPPPPAAPAAAPVPPAVPAAPAPAPAFTLSFAPASAARGSASGTGGCLFGMVYTRTGSRATGEGSNGEERADGVHPNGDSGNGPPPLPENPTLAQVMAHQTQMMAAMMQQMQQQHQQMHQRMMQHAEQQHQQFGPPPPQSKLPEFLRVRPPTFSSTTNPMEVNDWLHAIEKKLNLLQCNDQEKVAFATHQLQGPASAWWDNHMATRPPGTEVTWAEFCRSFRKAQVPDGVVAQKKREFRALHQGNRTVTEYLHEFNRLARYAPEDVRTDAEKQEKFMAGLDDELTNQLISGDYADFERLVDKAIRQEDQRNKMDRKRKAAQFRSNQGSQHRPRFTPGQQGGPTTMIVRQHRPFNSSNFHQGTSGSQNHQGGQPNRGAAPRPPMAPAQSAQPAQAKKETGAKPGSCFNCGELGHFADKCPKPRRAGPRFIQARVNHASAEEAQAAPEVVLGTFPVNSIPATVLFDSGATHSFISKKFVGMYGLRKEELSTPMRVRTPGNSSTSVSFSPSVLIEIQRSPFLANLILLESKDLDVILGMDWLTKFKGVIDCASRTVTLTNEKGETVVYKSPGSPKQGVSLNQIETEIPVDTVGKNLRKLEDIPIVCEYPEVFPEDLTTMPPKREIEFRIDLAPGTAPIYKRPYRMAANELAEVKKQVDEQLQKGYIRPSTSPWGAPVIFVEKKDKTKRMCVDYRALNEVTIKNKYPLPRIDDLFDQLKGAKVFSKIDLRSGYHQLRIREEDIPKTAFTTRYGLYECTVMSFGLTNAPAFFMNLMNKVFMEFLDKFVVVFIDDILIYSKSEEEHEQHLRLVLEKLKEHQLYAKFSKCDFWLTEVKFLGHVITAQGVAVDPSNVESVTKWTPPKTVSQIRSFLGLAGYYRRFIENFSRIARPMTQLLKKDEKFKWTAECDKSFEELKKKLVSAPVLILPDPTKDFQVYCDASRHGLGCVLMQEGRVVAYASRQLRPHEGNYPTHDLELAAVVHALKIWRHYLIGNRCEVYTDHKSLKYIFTQPDLNLRQRRWLELIKDYDLSVHYHPGKANVVADALSRKSYCTALCIEGMCEELRQEFEHLNMGIVEHGFVAALEARPTLVDQVRAAQVNDPEIAELKKNMRVGKARDFHEDEHGTIWMGERLCVPDDKELKDLILTEAHQTQYSIHPGSTKMYQDLKEKFWWVSMRREIAEFVALCDVCQRVKAEHQRPAGLLQPLQIPEWKWEEIGMDFITGLPRTSSGHDSIWVVVDRLTKVAHFIPVHTTYTGKRLAELYLARIMCLHGVPKKIVSDRGSQFTSKFWQKLQEEMGTRLNFSTAYHPQTDGQTERVNQILEDMLRACALDFGGAWDKSLPYAEFSYNNSYQASLQMAPFEALYGRKCRTPLFWDQTGERQLFGTEVLAEAEEKVRIIRERLRIAQSRQKSYADNRRRELTFEAGDYVYLRVTPLRGVHRFQTKGKLAPRFVGPYKILERRGEVAYQLELPSTMIGIHDVFHVSQLKKCLRVPEEQANSEHIDIQEDLTYVEKPVRILDTSERRTRNKVTRFCRVQWSHHSEEEATWEREDELKAAHPYLFTSSTESRGRDSV

SEQ ID NO: 18770 - protein, 1416 aa, Oryza sativa
  Clone ID: TF_OSC400775j.C1.p53.fg
MVYTRNGSRATGEGSNGEERTDGAHPHSDSGNGPPPLPENPTLAQVMAHQTQMMAAMMQQMQQQHQQMHQRMLQHAEQQHQQFGPPPPQSKLPEFLRVRPPTFSSTTNPMEANDWLHAIEKKLNLLQCNDQEKVAFATHQLQGPALAWWDNHMATRPPGTEVTWAEFCRSFRKAQVPDGVVAQKKREFRALHQGNRTVTEYLHKFNRLARYAPEDVRTDAEKQEKFMAGLDDELTNQLISGDYADFERLVDKAIRQEDQRNKMDRKRKAAQFRAPQGSHQRPRFTPGQQGGPTTMIVRQHRPFNPSNFPQGASGSQNHHGGQSNRGAAPRPPMAPAQSGPPAQAKKETGAKPGSCFNCGELGHFADKCPKPRRAGPRFIQARVNHASAEEAQAAPEVVLGTFLVNSIPSTVLFDSGAMHSFISKKFVGMHGLIREELSTPMRVHTPGNSSTSVQFSPSITIEIQRSPFLANLILLESKDLDVILGMDWLTKFKGVIDCVNRTVTLTNEKGETVVYKSPDSPKQGVSLNQIETEIPVDTVEKNLRKLEDIPIVCEYPEVFPEDLTTMPPKREIEFRIDLAPGTAPIYKRPYRMAANELAEVKKQVDEQLQKGYIRPSTSPWGAPVIFVEKKDKTKRMCVDYRALNEVTIKNKYPLPRIDDLFDQLKGAKVFSKIDLRSGYHQLRIREEDIPKTAFTTWYGLYECTVMSFGLTNAPAFFMNLMNKVFMEFLDKFVVVFIDDILIYSKSEEEHEQHLRLVLEKLKEHQLYAKFSKCDFWLTEVKFLGHVITTQGVAVDPSNVESVTKWTPPKTVSQIRSFLGLAGYYRRFIENFSRIARPMTQLLKKDEKFKWTAECDKSFEELKKKLVSAPVLILPDQMKDFQVYCDASRHGLGYVLMQEGRVVAYALRQLRPHEGNYPTHDLELAAVARPTLVDQVRAAQVNDSEIAELKKNMRVGKARDFHEDEHGTIWLGERLCVPDDKELKDLILTEAHQTQYSIHPGSTKMYQDLKEKFWWVSMRREIAEFVALCDVCQRVKAEHQRPAGLLQPLQIPEWKWEEIGMDFITGLPRTSSGHDSIWVVVDRLTKVAHFILVHTTYTGKRLAELYLSRIMCLHGVPKKIVSDRGSQFTSKFWQKLQEELGTRLNFSTAYHPQTDGQTERVNQILEDMLRACALDFGGAWDKSLPYAEFSYNNSYQASLQKAPFEALYGRKCRTPLFWDQTGERQLFGTEVLAEAEEKVRIIRERLRIAQSRQKSYADNRRRELTFEAGDYVYLRVTPLRGVHRFQMKGKLAPRFVGPYKILERRGEVAYQLELPSNMIGIHDVFHVSQLKKCLRVPEEQADSEHIDIQEDLTYVEKPVRILDTSERRTRNKVTRFCRVQWSHHSEEEATWEREDELKAAHPHLFTSSSESRGRYSV

SEQ ID NO: 18771 - protein, 1411 aa, Oryza sativa
  Clone ID: TF_OSC400798j.C1.p32.fg
MAQGKMIGLAGKLRRVSAKTEKPNWQISSTERINTKIGTPPSYSSIGVDMWPMEFSETTINKIVGLTHAAFVRSLLEPCASLRRSPGFLMSLPTPRVSHSPPCHRWRLPSPRRGRHGGRGQVVVHRVVREVTTSSVVYPTLTRTNYQDWVLVMRVNMQAQGLWGAVEPEGDDLVDYRQDRQALTAILRAVPAEMLATLAVKETVQEAWEAIKTRRIGVQHVREANAQQLRREFGDIIFKDGETVDDFSMRIGVLANNLRTLGDNITDAEVVQKLLQVVPEHLQQIAISIETLLDVNELSLEEVTGSLRSVEQRKQRKAVAASSRVDAYGCLLFTEEEWLAKFRKAASLQDAAHSSSGGNSDRQGQGRGNKDDGASKETQPKPANLGGRNPGNCKNCGKRGHWAKDCRSKPKAQQAYVAQEEDDEPALLLAKVELDPPRPRVVAPANPVSPPSAPRTPSPTSELAVVKAKVFTQLDDGGEHYPATWILDTGATNYMTGSRSAFAELDTAVSGTVKFGDGSVVHIEGHGTVLFSCRSREHRGITGIYYIPWLTVNIVSLGQLDHSGSNLDIDRPVCLAARSAEPAWRWHARYGHLNFPALRKLVQQEMVRGLPLLQQVTQVCDGCLLGKQRRAAFPAQSKYCTNEHLVLVHGDLCRPIEPATPAGNRYFLLLVDDMSRYMWLTLIRSKDEAANAIKHFQARAVVETGRKLHALRTDRGGEFTSIEFGEYYANLGVGRKLTVPYSPQQNGVVERRNQTIVATARSMMKAKGVPGRFWGEAMSTTVFLLNRSPKKSLDNQTPYEAWYGQRPAVHFLRTFGCMGHVKITKPGLKKLNDRSVPMVLLGYEEGSKAYRLYDPDSILDADTDDDVVPRYRLVDNLLGDASLPRQTPQVLEQLELYAVSADEPASLAEAEADPNWRGAMQDELDAIVDNDTWSLTDLPHGHRAIGLKWVYKLKRDEQGAIVRYKARLAAKGYVQRQGGGLRRGLHTCRPAGIDWQVHHMDVKSAFLNGKLLEEVYVSQPPGFVDDNHKNKVYRLHKALYGLRQAPRAWNAKLDSSLLSFGFHRSSSEHGVYTRTRGGRRLTVGVYVNDLIITGDHDDEIRSFKGEMMKLFKMSDLGHSDTTSASRLPWTVMGSRWGKLHMPARFLRGQDSRTTIPVRLPWRHSLLGDSFWPRCTGHFKKAVVYSDSDLAGDLDEQKSTSGQIFFVNGGPVTWQSSKQKVVALSSCEAEYIAVAAATCQSVWLAWLLAEVMGDEVAAPLLKVDNQSTISLIKNPVHHDRSKHIDVKYHYIRECAEKKLIEVMSVGTAEQLGDIFTKSLGRTRFQELRSKIESVGVVRCMLQCRDRENFLFPNASVLIPVPGKAGTEPQTKPYPLDMWKYGSALQQRPEDRSLYGRGATIKTMHPEPSLKPF

SEQ ID NO: 18772 - protein, 1449 aa, Oryza sativa
  Clone ID: TF_OSC400800j.C1.p73.fg
MSLPTPRVSHSPPRRRWRSPSPRRGRHGGRGQVVVERVVREATTSSVVYPTLTRTNYQDWALVMRVNMQAQCLWGAVEPEGDDLVDYRQDQQALAAILRAVPAEMLATLAVKETAQEAWEAIKTRRIGVQRVREANAQQLRREFGDILFKDDETVDDFSMRIGGLANNLRTLGDNITEAEVVQKLLQVVPEHLQQIAISIETLLDVNELSLEEVTGRLRSVEQRKQCKTAAASSRVDANGRLLFTEEEWLAKFRKAASLQDAAHSSSGNGDRRGRGRGKKDDGAPKEAQPKPANPGGRNPGNCKNCGKRGHWAKDCRSKPKAQQAYVAQEEDEEPALLLAKVQLDPPRPRVAAPTNVVSPPSAPRAPSPIGELAVVEAKVFAQLDDGGEHDPAMWILDTGATNHMTGSRSAFAELDTAVTGTVRFGDGSVVRIEGRVTVLFSCRFGEHRGIAGVYYIPRLTANIVSLGQLDRSGSKVLIHHGILHVWDPRGHLLVRVRRSDDCLYTIKLDIDRPVCLAARSAEPAWRWHARYGHLNFPALRKLAQQEMVRGLPLLQQVTQVCDGCLLGKQRRAAFPTQSKYRADEHLELVHGDLCGPIEPATPAGNRYFLLLVDDMSRYMWLTMIRSKDEAANAIKHFQARAEVESGRKLRALRMDRGSEFTSIEFGEYCANLGVGRQLTAPYSPQQNGVVERRNQTIVATARSMMKAKGVPGRFWGEAMSTAVFLLNRSPTKSLDNQTPYEAWYGQWPAVHFLRTFGCVGHVKITKPGLKKLDDRSAPMVLLGYEQGSKAYRLYDPVSERVHVSRDVVFDEDIAWDWGPVTPDGAPQLEPFTVEQVVTTTIGTAPASSPTPPSPPSPAPSAPTTPAPPSPPSPEAVEFVTPPTQDSILDADADDDVVPRYRLVDNLLGNASPPGHAPRVLEQLELHVVSADEPASLAEAEADPSWRGAMQDELNAIVDNDTWSLTDLPHGHRAIGLKWVYKLKRDEQGAIVRYKARLVAKGYVQRQGVDFDEVFALVARLESVRLLLAVAAHQGWQVHHMDVKSAFLNGELLEEVYVSQPPGFVDDNHKNKVYRLHKALYGLRQAPRAWNAKLDSSLLSLGFHRSSSEHGVYTRTRGGRRLMVGVYVDDLIITGDHDDEIRSFKGEMMKLFKMSDLGALRYYLGIEVTQDSDGITLGQAAYAGKILEKAGLKDCNPCQTPMEVRLKLRKGSDFPLVDATLYRSLVGSLRYLVNTRPDLAFSVGYVSRFMESPREDHLAAVRRILRYVAGTRCWGIRFGPGARCALPMLVGYSDSDLAGDPDERKSTSGQIFFINGGPVTWQSSKQKVVALSSCEAEYIAAAAATCQGVWLARLLAEVLGDEITAPLLKVDNQSTISLIKNPVHHDRSKHIDVKYHYIRECAEKKLIEMMFVGTAEQLGDIFTKSLGRTRFQELRSKIGVCSLDKSSQT

SEQ ID NO: 18773 - protein, 1561 aa, Oryza sativa
  Clone ID: TF_OSC400992j.C1.p25.fg
MAAASRARRWSLAGKTALVTGGTKGIGRAIVEELAGFGVRVHTCSRHDADLQDCLRRWNAAGEGGGAAALVTGSVCDVSVRGDREALVAAARAALGGRLDMLVNNAGQVVVGPAAETAPEEYARLMATNLESCFHLAQLAHHLLRDAAAGGGAAASVVNISSTAAFYAAPHLAVYSATKGGMNQLTRCLAAEWARDGVRVNAVAPGATRTDICDTSGVALGEKTRRRLADAGAMDRVPIRRIGEPEEVAAAVVFLCMPAASYITGQAQGLWGAVEPEGDDLVDYRQDRQALAAILRAVPAEMLATLAVKETAQEAWEAIKTRRIGVQRVREANAQQLAENSVISSSRTVVPEHLQQIAISIETLLDVNELSLEEVTGRLRSVEQRKQRKTAAASSRVDANGRLLFTEEEWLAKFRKAASLQDAAHSSGGNGDRRGRGRGKKDDGAPKEAQPKPANPGGRNLGNCKNCGKRGHWAKDCRSKPKAQQAYVAQEEDEEPALLLAKVQLDPPRPRVAAPTNVVSPPSAPRALSPMGELAVVEAKVFAQLDGGGEHDPAMWILDTGATNHMTGSRSAFAELDTAVTGTVRFGDGSVVRIEGRGTILFSCRFGEHRGIAGVYYIPRLTANIVSLGQLDRSGSKVLIHHGVLRVWDPRGHLLVRVRRSDDCLYTIKLDIDRPVCLAARSAEPAWRWHARYDHLNFPTLRKLAQQEMVRGLPLLQQVTQVCDGCLLRKQRRAAFPTQSKYRADEHLELVHGDLCGPIEPATPAGNRYFLLLVDDMSRYMWLTLIRSKDESANAIKHFQARAEVESGRKLRALRTDRGGEFTSIEFGEYCANLGVGRQLTAPYSPQQNGVVERRNQTIIATARSMMKAKGVPGRFWGEAMSTAVFLLNRSPTKSLDNQTPYEAWYGQRPAVHFLRTFGCVGHVKITKPGLKKLDDRSAPMVLLGYEQGSKAYRLYDPVSERVHVSRDVVFDEDAAWDWGPVVTTTIGTAPASSPTPPSPPSPAPSAPTTPAPPSPPSPEAVEFVTPPTQDSILDVDADDDVVPRYRLVDNLLGNASPPGHAPRVLEQLELHVVSANEPASLAEAEADPNWRGAMQDELNAIVDNDTWSLTDLPHGHRAIGLKWVYKLKRDEQGAIVRYKARLVAKGYVQRQGVDFDEVFAPVARLESVRLLLVVAVHQGWQVHHMDVKSAFLNGELLEEVYVSQPPGFVDDNHKNKVYRLHKALYGLRQAPRAWNAKFDSSLLSLGFHRSSSEHGVYTRTRGGRRLTVGVYVDDLIITGDHDDEIRSFKGEMMKLFKMSDLGALRYYLGIEVTQDSDGITLGQAAYASKILEKAGLKDCNPCQTPMELGWESALSRQHATRPGILCWVCQSLHGVTQGRPSCCRSTHTALCGARCALPMLVGYSESDLAGDPDERKSTSGQIFFINGGPVTWQSSKQKVVALSSCEAEYIAAAAATCQGVWLARLLAEVLGDEIATPLLKVDNQSTISLIKNPVHHDRSKHIDVKYHYIRECAEKKLIEMMFVGTAEQLGDIFTKSLGRTRFQELRSKIGVCSLDKSSQT

SEQ ID NO: 18774 - protein, 1731 aa, Oryza sativa
  Clone ID: TF_OSC401018j.C1.p15.fg
MGCKMAGHPPNHRGEGMIDFVAELARMTLVVGYPNAPEYTTIPPLSGELPHRVRLEVQGYVGTCLANMAVEASGGTADHACQEAAYLMMARLRERHNYIFHDTAYRYHPRRANGDGVSSFRPTAGENDTTFGHMCAVMRGLDRMHSDLHKATKALNDGKLMRIVALKDEIARLKKDNAQLKGLPAPGGVRIRTTPRKTTTAPVRIQLAPRNPPPAAAPAAPPVPPAVPAAQAPAPASALSFAPASAARGPASGTGGCLFGMVHTRTGSRATGEGSNGEERANGVHPSSDSGNGPPPLPENLTLAQVMAHQTQMMAAMMQQMQQQHQQMHQRMMQHAEQQHQQFGPPPPQSKLPEFLRVRPPTFSSTTNPIEANDWLHAIEKKLNLLQCNDQEKVAFATHQLQGPASAWWDNHMATRPPGTEVTWAEFCRSFRKAQVPDGVVAQKKREFRALHQGNRTVTEYLHEFNRLARYAPEDVRTDAEKQEKFMAGLDDELTNQLISGDYADFERLHRPFNSSNFHQGSSGSQNHHGGQPNRGAAPRPPMAPAQSGPPAQAKKETGAKPGSCFNCGELGHFADKCPKPRRAGPRFIQARVNHASAEEAQTAPEVVLGTFPVNSIPATVLFDSGATHSFISKKFVGMYGLRKEELSTPMRVHTPGNSSTSVSFSPSVLIEIQRLPFLANLILLESKDLDVILGMDWLTKFNGVIDCANRTVTLTNEKGETVVYKSLAPPKQGVSLNQIEMEVPVVTEEKNLKKLEDIPIVSEYPEVFPEDLTTMPPKREIEFRIDLAPGTAPIYKRPYRMAANELAEVKKQVDEQLQKGYIRPSTSPWGAPVIFVEKKDKTKRMCVDYRALNEVTIKNKYPLPRIDDLFDQLKGAKVFSKIDLRSGYHQLRIREEDIPKTAFTTRYGLYECTVMSFGLTNAPAFFMNLMNKVFMEFLDKFVVVFIDDILIYSKSEEEDEQHLHLVLEKLKEHQLYAKFNKCDFWLTEVKFLGHVITAQGVAVDPSNVESVTKWTPPKTVSQIRSFLGLAGYYRRFIENFSRIARPMTQLLKKDEKFKWTAECDKSFEELKKKLVSAPVLILPDPTKDFQVYCDASRHGLGCVLMQEGRVVAYASRQLRPHEGNYPTHDLELAAVVHALKIWRHYLIGNRCEIYTDHKSLKYIFTQPDLNLRQRRWLELIKDYDMSIHYHPGKANVVADALSRKSYCTALCIEGMCEELRQEFGHLNVGIVEHGFVAALEARPTLVDQVRAAQVNDPEIAELKKNMRVGKARDFLEDEHGTIWMGERLCVPDDKELKDLILTEAHQTQYSIHPGSTKMYQDLKEKFWWVSMRREIAEFVALCDVCQRVKAEHQRPAGLLQPLQIPEWKWEEIGMDFITGLPRTSSGHDSIWVVVDRLTKVAHFIPVHTTYTGKRLVELYLARIMCLHGVPKKIVSDRGSQFTSKFWQKLQEELGTRLNFSTAYHPQTDGQTERVNQILEDMLRACALDFGGAWDKSLPYAEFSYNNSYQASLQMAPFEALYGRKCRTPLFWDQTGERQLFGTEVLAEAEEKVIIIRERLRIAQSRQKSYADNRRRELTFEAGDYMYLRVTPLREVHRFQTKGKLAPRFVGPYKILERRGEVAYQLELPSNMIGIHDVFHVSQLKKCLRVPEEQADSEHIDIQEDLTYVEKPVRILDTSERRTRNKVTRFCRVQWNHHSEEEATWEREDELKAAHPHLFTSSSESRGRDSV

SEQ ID NO: 18775 - protein, 1705 aa, Oryza sativa
  Clone ID: TF_OSC401018j.C1.p31.fg
MGCKMAGHPPNHRGEGMIDFVAELARMTLVVGYPNAPEYTTIPPLSGELPHRVRLEVHGYVGTCLANMAVEASGGTADHACQEAAYLMMARLRERDNYIFHDTAYRYHPRRANGDGVSSFCPTAGENDTTFGHMCAVMRGLDRMHSDLHKATKALNDGKLMRIVALKDEIARLKKENAQLKGLPAPGGVRIRTTPRKTTTAPVRIQLAPRNPPPAATPAAPPVPPAVPAAPAPAPESALSFAPASAARGPASGTGGCLFGMVYTRTGSRATGEGSNGEERANGVHPSSDSGNGPPPLPENPTLAQVMAHQTQMMAAMMQQMQQQHQQMHQRMMQHAEQQHQQFGPPPPQSKLPEFLRVRPPTFSSTTNPMEANDWLHAIEKKLNLLQCNDQEKVAFATHQLQGPASAWWDNHMATRPPGTEVTWVEFCRSFRKAQVPDGVMAQKKREFRALHQGNRTVTEYLHEFNRLARYAPEDVRTDAEKQEKFMAGLDDELTNQLISGDYADFEWLVDKAIRQEDQRNKMDRKRKAAQFRAPQGSHQRPRFTPGQQGGPTTMIVRQHRPFNSSNFHQGSSGSQNHHGGQPNRGAAPRPPMAPAQSGPPAQAKKETGAKPGSCFNCGELGHFADKCPKPRRAGPRFIQARVNHASAEEAQTAPEVVLGTFPVNSIPATVLFDSGATHSFISKKFVGMYGLRKEELSTPMRVHTPGNSSTSVSFSPSVLIEIQRLPFLANLILLESKYLDVILGMDWLTKFKGVIDCANRTVTLTNEKGETVVYKSLAPPKQGVSLNQIEMEVPVVTEEKNLKKLEDIPIVSEYPEVFPEDLTTIPPKREIEFRIDLAPGTAPIYKRPYRMAANELAEVKKQVDEQLQKGYIRPSTSPWGAPVIFVEKKDKTKRMCVDYRALNELRIREEDIPKTAFTTRYGLYECTVMSFGLTNAPAFFMNLMNKVFMEFLDKFVVVFIDDILIYSKSEEEHEQHLRLVLEKLKEHQLYAKFNKCDFWLTEVKFLGHVITAQGVAVDPSNVESVTKWTPPKTVSQIRSFLGLAGYYRRFIENFSRIARPMTQLLKKDEKFKWTAECDKSFEELKKKLVSAPVLILPDPTKDFQVYCDASRHGLGCVLMQEGRVVAYASRQLRPHEGNYPTHDLELAAVVHALKIWRHYLIGNRCEIYTDHKSLKYIFTQPDLNLRQRRWLELIKDYDMSIHYHPGKANVVADALSRKSYCTALCIEGMCEELRQEFGHLNVGIVEHRFVAALEARPTLVDQVRAAQVNDPEIAELKKNMRVGKARDFLEDEHGTIWMVERLCVPDDKELKDLILTEAHQTQYSIHPGSTKMYQDLKEKFWWVSMRREIAEFVALCDVCQRVKAEHQRPAGGSLYTSAYHLYGKRLAELYLARIMCLHGVPKKIVSDRGSQFTSKFWQKLQEELGTRLNFSTAYHPQTDGQTERVNLILEDMLRACALDFGGAWDKSLPYAEFSYNNSYQASLQMAPFEALYGRKLYTAICALFWDQTGERQLFGTEVLAEVEEKVRIIRERLRIAQSRQKSYADNRRRELTFEEGDYVYLRVTPLRGVHHFQTKGKLAPRFVGPYKILERRGEVAYQLELPSNMIGIHDVFHVSQLKKCLRVPEEQVDSEHIDIQEDLTYVEKPVRILDTSERRTRNKVTRFCRVQWNHHSEEEATWEREDELKAAHPHLFTSSSESRGRDSV

SEQ ID NO: 18776 - protein, 1819 aa, Oryza sativa
  Clone ID: TF_OSC401051j.C1.p55.fg
MAGHPPNHRGEGMIDFVAELARMTLVVGYPDAPEYTTIPPLSGELPHRVRLEVHGYVGTCLANMAVEASGGTADHACQEAAYLMMARLRERHNYIFHDTAYRYHPSRAHGDGVSSFRPTAGENDTTFGHMCAVMRGLDRMHSDLHKATKALNDGKLMRIVALKDEIARLKKENAQLKGLPAPGGVRIRTTPRKTTKAPVRIQLAPRNPPPAAAPAAPPVPPAAPAAPVPAAPAPAPAFVLSFAPASAVRGPASGIGGWLPATPSGSRDRSSSGSQTGSSETYLPGSRSRSEGPGCLFGMVNTRTGNRTTGEGSNGEERVDGMHPNGDPGNGPPPLPENPTLAQVMAHQTQMMAAMMQQMQQQHQQMHQRMMQYAEQQHQQFGPPPPQSKLPEFLRVRPPTFSSTTNPMEANDWLHAIEKKLNLLQCNDQEKVAFATHQLQGPASAWWDNHMATRPPGTEVTWAEFCRSFRKAQVPDGVVAQKKREFRALHQGNRTVTEYLHEFNRLARYAPEDVRTDAEKQEKFMAGLDDELTNQLISGDYADFERLVDKAIRQEDQRNKMDRKRKAAQFRAHQGSHQRPRFTPGQQGGPTTMIVRQHRPFNPSNFHQGTSGSQNHHGGQPNRGAAPRPPMAPAQSGQPTQAKKETGAKPGSCFNCGELGHFADKCPKPRRAGPRFIQARVNHASAEEAQAAPEVVLGTFPVNSIPATVLFDSGATHSFISKKFVGMHGLIREELSTPMRVHTPGNSSTSVQFSPSITIEIQRSPFLANLILLDSKGLDVILGMDWLTKFKGVIDCANRTVTLTNEKGETVVYKSLVSPRKGVSLNQIETEIPVDTVEKNSRKLDDIPIVCEYPEVFPEDLTTMPPKREIEFRIDLAPGTAPIYKRPYRMAANELAEVKKQVDEQLQKGYIRPSTSPWGAPVIFVEKKDKTKRMCVDYRALNEVTIKNKYPLPRIDDLFDQLKGAKVFSKIDLRSGYHQLRIREEDIPKTAFTTRYGLYECTVMSFGLTNAPAFFMNLMNKVFMEFLDKFVVVFIDDILIYSKSEEEHEQHLRLVLEKLKEHQLYAKFSKCDFWLTEVKFLGHVITAQGVAVDPSNVESVTKWTPPKTVSQIRSFLGLAGYYRRFIENFSRIARPMTQLLKKDEKFKWTAECDKSFEELKKKLVSAPVLILPDQMKDFQVYCDASRHGLGCVLMQEGRVVAYASRQLRPHEGNYPTHDLELAAVVHALKIWRHYLIGNRCEVYTDHKSLKYIFTQPDLNLRQRRWLELIKDYDMSIHYHPGKANVVADALSRKSYCTALCTEGMCEELRQEFEHLNIGIVEHGFVAALEARPTLVDQVRAAQVNDPEIAELKKNMRVGKARDFLEDEHGTIWMGERLCVPDDKELKDLILTEAHQTQYSIHPGSTKMYQDLKEKFWWVSMRREIAEFVALCDVCQRVKAEHQRPAGLLQPLQIPEWKWEEIGMDFITGLPRTSSGHDSIWVVVDRLTKVAHFIPVHTTYTGKRLAELYLARIMCLHGVPRKIVSDRGSQFTSKFWQKLQEELGTRLNFSTAYHPQTDGQTERVNQILEDMLRACALDFGGAWDKSLPYAEFSYNNSYQASLQMAPFEALYGRKCRTPLFWDQTGERQLFGTEVLAEAEEKVRIIRERLRIAQSRQKSYADNRRRELTFEAGDYVYLRVTPLRGVHRFQTKGKLAPRFVGPYKILERRGEVAYQLELPSNMIGIHDVFHVSQLKKCLRVPEEQADSEHIDIQEDLTYVEKPVRILDTSERRTRNKVTRFCRVQWSHHSEEEATWEREDELKAAHPHLFTSSSESRGRDSV

SEQ ID NO: 18777 - protein, 1425 aa, Oryza sativa
  Clone ID: TF_OSC401054j.C1.p28.fg
MVYTRNGSRATGEGSNGEERTEGVHPNSNSGNGPPPLPENPTLAQVMAHQTQMMAAMMQQMQQQHQQMHQRMLQHAEQQHQQFGPPPPQSKLPEFLLVRPPTFSSTTNPMEANDWLHAIEKKLNLLQCNDQEKVAFATHQLQGPASAWWDNHMATRPPGTEVTWAEFCRSFKKAQVPDGVVAQKKREFRALHQGNRTVTEYLHEFNRLARYAPEDVRTDAEKQEKFLAGLDDELTNQLISGDYADFERLVDKAIRQEDQRNKMDRKSNFPQGASGSQNHHGGQPNRGAAPRPPMAPAQSGPSAQAKKETGAKPGSCFNCGELGHFADKCPKPRRAGPRFIQARVNHASAEEAQAAPEVVLGTFPVNSIPATILFDSGATHSFISKKFVGMHGLRKEELSTPMRVHTPGNSSTSVSFSPSVLIEIQRSPFLANLILLESKDLDVILGMDWLTKFKGVIDCANRTVTLTNEKGETVVYKSPDSPKQGVSLNQIEAEIPVDTVEKNLRKLEDIPIVCEYPEVFPEDLTTMPPKREIEFRIDLAPGTAPIYKRPYRMAANELAEVKKQVDEQLQKGYIRLSTSPWGAPVIFVEKKDKTKRMCVDYRALNEVTIKNKYPLPRIDDLFDQLKGAKVFSKIDLRSGYHQLRIREEDIPKTAFTTRYGLYECTVMSFGLTNAPAFFMNLMNKVFMEFLDKFVVVFIDDILIYSKSEEEHEQHLRLVLEKLKEHQLYAKFSKCDFWLTEVKFLGHVITAQGVAVDPSNVESVTKWTPPKTVSQIRSFLGLAGYYRRFIENFSRIARPMTQLLKKDEKFKWTAECDKSFEELKKKLVSAPVLILPDQMKDFQVYCDASRHGLGCVLMQEGRVVAYASRQLRPHEGNYPTHDLELAAVVHALKIWRHYLIGNRCEVYTDHKSLKYIFTQPDLNLRQRRWLELIKDYDMSIHYHPGKANVVADALSRKSYCTALCIEGMCEELRQELEHLNVGIVEHGFVAALEARPTLVDQVRAAQVNDSEIAELKKNMRVGKARDFHEDEHGTIWLGERLCVPDDKELKDLILTEAHQTQYSIHPGSTKMYQDLKEKFWWVSMRREIAEFVVLCDVCQRVKAEHQRPAGLLQPLQIQEWKWEEIGMDFITGLPRTSSGHDSIWVVVDRLTKVAHFIPVHTTYTGKRLAELYLSRIMCLHGVPKKIVSDRGSQFTSKFWQKLQEELGTRLNFSTAYHSQIDEFSYNNSYQASLQMAPFEALYGRKCRTPLFWDQTDERQLFGTEVLAEAEEKVRIIRERLRIAQSRQKSYADNRRRELTFEAGDYVYLRVTPLRGEVAYQLELPSNMIGIHDVFHVSQLKKCLRVPEEQADSEHIDIQEDLTYVEKPVRILDTSERRTRNKVTRFCRVQWSHHSEEEATWEREDELKAAHPHLFASSSESRGRDSV

SEQ ID NO: 18778 - protein, 1773 aa, Oryza sativa
  Clone ID: TF_OSC401054j.C1.p42.fg
MAGHPPNHRGEGMIDFVAELARMTLVVGYPNAPEYTTIPPLSGELPHRVHLEVHGYVGTCLANMAVEASGGTADHACQEAAYLMMARIRERHDYIFHDTAYRYHPRRAHGDGVSSFRPTAGENDTTFGHMCAVMSGLDRMHSDLHKATKALNDGKLMRIVALKDEIARLKKENAQLKGLPAPGGVRIRTTPRKTTTAPVRIQLAPRNPPPAAAPAAPSVPPAVPAAPVPAPAFTLSFAPASAARGPASGTGGCLFGMVYTRTGNRTTGEGSNGEERVDGVHPNSDSGNGPPPLPENPTLAQVMAHQTQMMAAMMQQMQQQHQQMHQRMMQHAEQQHQQFGPPPPQSKLPEFLRVRPPTFSSTTNPMEANDWLHAIEKKLNLLQCNDQEKVAFATHQLQGPASAWWDNHMATRPPGTEVTWAEFCRSFRKAQVPDGVVAQKKREFRALHQGNRTVTEYLHEFNRLARYAPEDVRTDAEKQEKFMAGLDDELTNQLISGDYADFERLVDKAIRQEDQRNKIDRKRKAAQFRAPQGSHQRPRFTPGQQGGPTTMIVRQHRPFNPSNFHQGTSGSQNHHGGQPNRGAAPRPSVAPAQSGQPAQAKKETGAKPGSCFNCGELGHFADKCPKPRRAGPRFIQARVNHASAEEAQTAPEVVLGTFPVNSIPATVLFDSGATHSFISKKFVGRYGLRKEELSTPMRVHTPGNSSTSVSFSPSVLIEIQRSPFLANLILLESKDLDVILGMDWLTKFKGVIDCANRTVTLTNEKGETVVYKSLVSPKKGVSLNQIETEIPVDTVEKNLRKLEDIPIVCEYPEVFPEDLTTMPPKREIEFRIDLAPGTAPIYKRPYRMAANELAEVKKQVDEQLQKGYIRPSTSPWGAPVIFVEKKDKTKRMCVDYRALNEVTIKNKYPLPRIDDLFDQLKGAKVFSKIDLRSGYHQLRIREEDIPKTAFTTRYGLYECTVMSFGLTNAPAFFMNLMNKVFMEFLDKFVVVFIDDILIYSKSEEEHEQHLRLVLEKLKEHQLYAKFSKCDFWLTEVKFLGHVITAQGVAVDPSNVESVTKWTPPKTVSQIRSFLGLAGYYRRFIENFSRIARPMTQLLKKDEKFKWTAECDKSFEELKKKLVSTPVLILPDQMKDFQVYCDASRHGLGCVLMQEGRVVAYASRQLRPHEGNYPTHDLELAAVVHALKIWRHYLIGNRCEVYTDHKSLKYIFTQPDLNLRQRRWLELIKDYDMSIHYHPGKANVVADALSRKSYCTALCIEGMCEELRQEFEHLNMGIVEHGFVAALEARPTLVDQVRAAQVNDSEIAELKKNMRVGKAREFHEDEHGTIWMGERLCVPDDKELKDLILTEAHQTQYSIHPGSTKMYQDLKEKFWWVSMRREIAEFVALCDVCQRVKAEHQRPAGLLQPLQIPEWKWEEIGMDFITGLPRTSSGHDSIWVVVDRLTKVAHFIPVHTTYTGKRLAELYLSRIMCLHGVPKKIVSDRGSQFTSKFWQKLQEELGTRLNFSTAYHPQTDGQTERVNQILEDMLRACALDFGGAWDKSLPYAEFSYNNSYQASLQMAPFEALYGRKCRTPLFWDQTGERQLFGTEVLAEAEEKVRIIRERLRIAQSRQKSYVDNRRRELTFEAGDYVYLRVTPLRGVHRFQTKGKLAPRFVGPYKILERRGEVAYQLELPSNMIGIHDVFHVSQLKKCLRVPEEQADSEHIDIQEDLTYVEKPVRILDTSERRTRNKVTRFCRVQWSHHSEEEATWEREDELKAAHPHLFTSSSESRG

SEQ ID NO: 18779 - protein, 1714 aa, Oryza sativa
  Clone ID: TF_OSC401054j.C1.p59.fg
MAVEASGGTADHACQEAAYLMMARIRERHDYIFHDTAYRYHPRRAHGDGVSSFRPTAGENDTTFGHMCAVIRGLDRMHSDLHKATKALNDGKLMRIVALKDEIARLKKENAQLKGLPAPGGVRIRTTPRKTTTAPVRIQLAPRNPPPPAAPAAPSVPPAVPAAPAPAPAFTLSFAPASAARGSASGTGGCLFGMVYTRNGSRATGEGSNGEERADGVHPNSDSGNGPPPLPENPTLAQVMAHQTQMIAAMMQQMQQQHQQMHQRMMQHAEQQHQQFGPPPPQSKLPEFLRVRPPTFSSTTNPMEANDWLHAIEKKLNLLQCNDQEKVAFATHQLQGPASAWWDNHMATRPPGTEVTWAEFCRSFRKAQVPDGVVAQKKREFRALHQGNRTVTEYLHEFNRLARYAPEDVRTDAEKQEKFMAGLDDELTNQLISGDYADFERLVDKAIRQEDQRNKMDRKRKAAQFRAHQGSHQRPRFTPGQQGGPTTMIVRQHRPFNPSNFHQGTSGSQNHHGSQPNRGAAPRPSVAPAQSGQPAQAKKETGAKPGSCFNCGELGHFADKCPKPRRAGPRFIQARVNHASAEEAQAAPEVVLGTFPVNSIPATVLFDSGATHSFISKKFVGMHGLIREELSTPMRVHTPGNSSTSVQFSPSITIEIQRSPFLANLILLESKDLDVILGMDWLTKFKGVIDCASRTVTLTNEKGETVVYKSLVSPKKGVSLNQIETEIPVDTVEKNLRKLEDIPIVCEYPEVFPEDLTTMPPKREIEFRIDLAPGTAPIYKRPYRMAANELAEVKKQVDEQLQKGYIRPSTSPWGAPVIFVEKKDKTKRMCVDYRALNEVTIKNKYPLPRIDDLFDQLKGAKVFSKIDLRSGYHQLRIREEDIPKTAFTTRYGLYECTVMSFGLTNAPAFFMNLMNKVFMEFLDKFVVVFIDDILIYSKSEEEHEQHLRLVLEKLKEHQLYAKFSKCDFWLTEVKFLGHVITAQGVAVDPSNVESVTKWTPPKTVSQIRSFLGLAGYYRRFIENFSRIARPMTQLLKKDEKFKWTAECDKSFEELKKKLVSAPVLILPDPTKDFQVYCDASRHGLGCVLMQEGRVVAYASRQLRPHEGNYPTHDLELAAVVHALKIWRHYLIGNRCEVYTDHKSLKYIFTQPDLNLRQRRWLELIKDYDMSIHYHPGKANVVADALSRKSYCTALCVEGMCEELRQEFEHLNVGIVEHGFVAALEARPTLVDQVRAAQVNDSEIAELKKNMRVGKARDFHEDEHGTIWMGERLCVPNDKELKDLILTEAHQTQYSIHPGSTKMYQDLKEKFWWVSMRREIAEFVALCDVCQRVKAEHQRPAGLLQPLQIPEWKWEEIGMDFITGLPRTSLGHDSIWVVVDRLTKVAHFIPVHTTYTGKRLAELYLARIMCLHGVPKKIVSDRGSQFTSKFWQKLQEELGTRLNFSTAYHPQTDGQTERVNQILEDMLRACALDFGGAWDKSLPYAEFSYNNSYQASLQMAPFEALYGRKCRTPLFWDQTGERQLFGTEVLAEAEEKVRIIRERLRIAQSRQKSYADNRRRELTFEAGDYVYLRVTPLRGVHRFQTKGKLAPRFVGPYKILERRGEVAYQLELPSNMIGIHDVFHVSQLKKCLRVPEEQADSEHIDIQEDLTYVEKPVRILDTSERRTRNKVTRFCRVQWSHHSEEEATWEREDELKAAHPHLFTSSSESRGRDSV

SEQ ID NO: 18780 - protein, 1785 aa, Oryza sativa
  Clone ID: TF_OSC401061j.C1.p25.fg
MAGHPPNHRGEGMIDFVAELARMTLVVGYPNAPEYTTIPPLSGELPHRVRLEVHGYVGTCLANMAVEASGGTADHACQEAAYLMMARLRERHDYIFHDTAYRYHPRRAHGDGVSSFRPTAGENDTTFGHMCAVMRGLDRMHSDLHKATKALNDGKLMRIVALKDEIARLKKENAQLKGLPVPGGVRIRTTPRKRTTAPVRIQLAPRNPPPPAAPAAPPVPPAAPAVPAVPPAPAPAPAPAFTLSFAPASAARGPASGTGGCLFGMVYTRTGNRTTGEGSNGEERADGVHPNGDSGNGPPPLPENPTLAQVMAHQTQMMAAMMQQMQQQHQQMHQRMMQHAEQQHQQFGPPPPQSKLPEFLRVRPPTFSSTTNPMEANDWLHAIEKKLNLLQCNDQEKVAFATHQLQGPASAWWDNHMATRPPGTEVTWAEFCRSFRKAQVPDGVVAQKKREFRALHQGNRTVTEYLHEFNRLARYAPEDVRTDAEKQEKFMAGLDDELTNQLISGDYADFERLVDKAIRQEDQRNKMDRKRKAAQFRSNQGSQHRPRFTPGQQGGPTTMIVRQHRPFNPSNFHQGTSGSQNHHGSQPNRGTAPRPSVAPAQSGQPAQAKKETGAKPGSCFNCGELGHFADKCPKPRRAGPRFIQARVNHASAEEAQAAPEVVLGTFPVNSIPATVLFDSGATHSFISKKFVGMHGLIREELSTPMRVHTPGNSSTSVQFSPSITIEIQRSPFLANLILLESKDLDVILGMDWLTKFKGVIDCASRTVTLTNEKGETVVYKSLVSPKKGVSLNQIETEIPVDTVEKNLRKLEDIPIVCEYPEVFPEDLTTMPPKREIEFRIDLAPGTAPIYKRPYRMAANELAEVKKQVDEQLQKGYIRPSTSPWGAPVIFVEKKDKTKRMCVDYRALNEVTIKNKYPLPRIDDLFDQLKGAKVFSKIDLRSGYHQLRIREEDIPKTAFTTRYGLYECTVMSFGLTNAPAFFMNLMNKVFMEFLDKFVVVFIDDILIYSKSEEEHEQHLRLVLEKLKEHQLYAKFSKCDFWLTEVKFLGHVITAQGVAVDPSNVESVTKWTPPKTVSQIRSFLGLAGYYRRFIENFSRIARPMTQLLKKDEKFKWTAECDKSFEELKKKLVSAPVLILPDQMKDFQVYCDASRHGLGCVLMQEGRVVAYASRQLRPHEGNYPTHDLELAAVVHALKIWRHYLIGNRCEVYTDHKSLKYIFTQPDLNLRQRRWLELIKDYDMSIHYHPGKANVVADALSRKSYCTALCIEGLCEKLRQEFEHLNVGIVEHGFVAALEARPTLVDQVRAAQVNDSEIAELKKNMRVGKARDFHEDEHGTIWMGERLCVPDDKELKDLILTEAHQTQYSIHPGSTKMYQDLKEKFWWVSMRREIAEFVALCDVCQRVKAEHQRPAGLLQPLQIPEWKWEEIGMDFITGLPRTSSGHDSIWVVVDRLTKVAHFIPVHTTYTGKRLAELYLARIMCLHGVPKKIVSDRGSQFTSKFWQKLQEEMGTRLNFSTAYHPQTDGQTERVNQILEDMLRACALDFGGAWDKSLPYAEFSYNNSYQASLQMAPFEALYGRKCRTPLFWDQTGERQLFGTEVLAEAEEKVRIIRERLRIAQSRQKSYADNRRRELTFEAGDYVYLRVTPLRGVHRFQTKGKLAPRFVGPYKILERRGEVAYQLELPSNMIGIHDVFHVSQLKKCLRVPEEQADSEHIDIQEDLTYVEKPVRILDASERRTRNKVTRFCRVQWSHHSEEEATWEREDELKAAHPHLFTSSSESRGRDSV

SEQ ID NO: 18781 - protein, 353 aa, Oryza sativa
  Clone ID: TF_OSC401097j.C1.p3.fg
MSEVGSQDEFVKTNTDGSEKGEYSGGNRPVMSRIGKMAPTGRDGSDSTCERFQSTVTDLVKMDVEVDDEDKAIVLLCSLPESYEHVVTTLTYGKETIKTKDITSALLARDQMRKNKEGETSQAEGLLVKEDHAGHKVKKNKKKKMVQCFRCDELGHISRECPTLKGKAKANAATSSNDSDSDGCDLLTMSSAQSKDAEVWILDLASLFHVTPRKEWFSSYKSGECGFVYLGDDTSYPAVGVGEVKIKLEDGGLKRNLISLGTLHEEGLIFHGNRNRKTIEIMKGKMTVMTGEKVESHLYKLQGCTVAGGVQEEAVAGIGIVFVAAGLAQTRRAACGEAAKKTTQVWKTGGSAW

SEQ ID NO: 18782 - protein, 1649 aa, Oryza sativa
  Clone ID: TF_OSC401127j.C1.p10.fg
MAGHPPNHRGEGMIDFVAELARMTLVVGYPNAPEYTTIPPLSGELPHRVRLEVHGYVGTCLANMAVEASGGTADHACQEAAYLMMARLRERHNYIFHDTAYRYHPRRANGDGVSSFRPTAGENDTTFGHMCAVMRGLDRMHSDLHKATKALNDGKLMRIVALKDEIARLKKENAQLKGLPAPGGVRIRTTPRKTTTAPVRIQLAPRKPPPPAAPAAPPVPPAVPAAPVPAPAFTLSFAPASAARGPASGTGGCLFGMVYTRNGSRATGEGSNGEERADGVHPNSDSGNGPPPLPENPTLAQVMAHQTQMMAAMMQQMQQQHQQMHQRMMQHAEQQHQQFGPPPPQSKLPEFLRVRPPTFSSTTNPMEANDWLHAIEKKLNLLQCNDQEKVAFATHQLQGPASAWWDNHMATRPPGTEVTWAEFCRSFRKAQVPDGVVAQKKREFRALHQGNRTVTEYLHEFNRLARYAPEDVRTDAEKQEKFMAGLDDELTNQLISGDYADFERLVDKAIRQEDQRNKMDRKRKAAQFRAPQGSHQRPRFTPGQQGGPTTMIIRQHRPFNPSNFHQGTSGSQNHHGGQPNRGAAPRPSVAPAQSGQPAQAKKETGAKPGSCFNCGELGHFADKCPKPRRAGPRFIQARVNHASAEEAQAAPEVVLGTFPVNSIPATVLFDSGATHSFISKKFVGRSPFLANLILLESKDLDVILGMDWLTKFKGVIDCASRTVTLTNEKGETVVYKSLVSPKKGVSLNQIETEIPVDTVEKNLRKLEDIPIVCEYPEVFPEDLTTMPPKREIEFRIDLAPGTAPIYKRPYRMAANELAEVKKQVDEQLQKGYIRPSTSPWGAPVIFVEKKDKTKRMCVDYRALNEVTIKNKYPLPRIDDLFDQLKGAKVFSKIDLRSGYHQLRIREEDIPKTAFTTRYGLYECTVMSFGLTNAPAFFMNLMNKVFMEFLDKFVVVFIDDILIYSKSEEEHEQHLRLVLEKLKEHQLYAKFSKCDFWLTEVKFLGHVITAQGVAVDPSNVESVTKWTPPKTVSQIRSFLGLAGYYRRFIENFSRIARPMTQLLKKDEKFKWTAECDKSFEELKKKLVSAPVLILPDPTKDFQVYCDASRHGLGCVLMQEGRVVAYASRQLRPHEGNYPTHDLELAAVVHALKIWRHYLIGNRCEVYTDHKSLKYIFTQPDLNLRQRRWLELIKDYDMSIHYHPGKANVVADALSRKSYCTALCIEGMCEELRQEFEHLNMGIVEHGFVAALEARPTLVDQVRAAQVNDSEIAELKKNMRVGKARDFHEDEHGTIWMGERLCVPDDKESKDLILTEAHQTQYSIHPGSTKMYQDLKEKFWWVSMRREIAEFVALCDVCQRVKAEHQRPAGLLQPLQIPEWKWEEIGMDFITGLPRTSSGHDSIWVVVDRLTKLVDKSLPYAEFSYNNSYQASLQMAPFEALYGRKCRTPLFWDQTGERQLFGTEVLAEAEEKVRIIRERLRIAQSRQKSYADNRRRELTFEAGDYVYLRVTPLRGVHRFQTKGKLAPRFVGPYKILERRGEVAYQLELPSNMIGIHDVFHVSQLKKCLRVPEEQADSEHIDIQEDLTYVEKPVRILDTSERRTRNKVTRFCRVQWSHHSEEEATWEREDELKAAHPHLFTSSSESRGRDSV

SEQ ID NO: 18783 - protein, 1114 aa, Oryza sativa
  Clone ID: TF_OSC401161j.C1.p52.gm
MVYTRTGNRTAGEGSNGEERADGVHPNSDSGNGPPPLPENPTLAQVMAHQTQMMAAMMQQMQQQHQQMHQRMMQHAEQQHQQFGPPPPQSKLLEFLRVRPPTFSSTTNPMEANDWLHAIEKKLNLLQCNDQEKVAFATHQLQGPASAWWDNHMATRPPGAEVTWAEFCRSFRKAQVPDGVVAQKKREFRVLHQGNRTVTEYLHEFNRLARYAPEDVRTDAEKQEKFMAGLDDELTNQLISGDYADFERLVDKAIRQEDQRNKMDRKRKAAQFRSNQGSQHRPRFTPGQQGGPTTMIVRQHRPFHSSNFHQGASGSPNHQGGQPNRGAAPRPPMAPAQPAPSAQAKKETGTKPGSCFNCGELGHFADKCPKPRRAGPRFIQARVNHASAEEAQAAPEIETEIPVDTVEKSLRKLEDIPIVCEYPEVFPEDLTTMPPKREIEFRIDLAPGTAAIYKRPYRMAANELAEVKKQVDEQLQKGYIRPSTSPWGAPVIFVEKKDKTKRMCVDYRALNEVTIKNKYPLPRIDDLFDQLKGAKVFSKIDLRSGYHQLRIREEDIPKTAFTTRYGLYECTVMSFGLTNAPAFFMNLMNKVFMEFLDKFVVVFIDDILIYSKSEEEHEQHLRLVLEKLKEHQLYAKFSKCDFWLTEVKFLGHVITAQGVAVDPSNVESVTKWTPPKTVSQIRSFLGLAGYYRRFIENFSRIARPMTQLLKKDEKFKWTAECDKSFEELKKKLVSAPVLILPDQMKDFQVYCDASRHGLGCVLMQEGRVVAYASRQLRPHEGNYPTHDLELAAVVHALKIWRHYLIGNRCEEFEHLNVGIVEHGFVAALEARPTLVDQVRAAQVNDPEIAELKKNMRVGKARDFLEDEHGTIWMGERLCVPDDKELKDLILTEAHQTQYSIHPGSTKIASKASRLTPTSSNPGMEMGGNWNGLYNRTAPDIIGSRFNLEVLAEAEEKVRIIRERLRIAQSRQKSYADNRRRELTFEAGDYVYLRVTPLRGVHRFQTKGKLAPRFVGPYKILERRGEVAYQLELPSNMIGIHDVFHVSQLKKCLRVPEEQADSEHIDIQEDLTYVEKPARVGVMERGGPCDGLYRFRIHLGTRGDCPLPAGDGGET

SEQ ID NO: 18784 - protein, 992 aa, Oryza sativa
  Clone ID: TF_OSC401171j.C1.p7.np
MAGHPPNHRREGMIDFVAELARMTLVVGYPNAPEYTTIPPLSGELPHRVRLEVHGYVGTCLANMAVEASGGTADHACQEAAYLMMARLRERHNYIFHDTAYRYHPRRANGDGVSSFRPTAGENDTTFGHMCAVMRGLDRMHSDLHKATKALNDGKLMRIVALKDEIARLKRENAHLKGLPAPGGVRIRTTPRKTTTTPVRIQLAPRNPPPAAAPAAPPVPPVVPAAPAPAPASALSFAPASAARGPASGTGGWLSATPSGSRDRSSSGSQSGSGETYLPGSRSRSEGPGMVYTRTGNRTTGEGSNGEERADGVHPNSDSGNGPPPLPENPTLAQVMAHQTQMMAAMMQQMQQQHQQMHQRMMQHVEQQHQHFGPPPPQSKLPEFLHVRPPTFSSTTNPMKANDWLHAIEKKLNLLQCNDQEKVAFATHQLQGPASAWWDNHMATRPPGTEVTWAEFCRSFRKAQVLDGVVAQKKREFRALHQGNRTVTEYLHEFNRLARYAPEDVRTDAEKREKFMAGLDDELTNQLISGDYADFERLVDKAIRQEDQRNKMDRKRKAAQFRAHQGSHQRPRFTPGQQGGPTTMIVRQHRPFNPSNFPQGANGSQNHHGGQPNRGAAPRPPMAPAQSGPSAQAKKETGAKPGSCFNCGELGHFADKCPKPRRAGPRFIQARVNHASAEEAQAAPEVVLGTFPVNSIAATVLFDSDATHSFISKKFVGMYGLRKEELSTPMRVHTPGNSSTSVSFSPSVLIEIQRSPFLANLILLESKDLDVILGMDWLTKFKGVIDCANRTVTLTNEKGETVVYKSLASPKQGVSLNQIETEIPVDTVEKNLRKLEDIPIVCEYPEVFPEDLTTMPPKREIEFRIDLAPGTAPIYKRPYRMAANELAEVKKQVDEQLQKGYIRPSTSPWGAPVIFVEKKDKTKRMCVDYRALNEVTIKNKYPLPRIDDLFDQLKGAKVFSKIDLRSGYHQLRIREEAITATGFHTGHGKASH

SEQ ID NO: 18785 - protein, 1823 aa, Oryza sativa
  Clone ID: TF_OSC401197j.C1.p33.fg
MERPKSPLNPFHCICSLQLDFVPGKWGSVLVVQGKNLGRSFKMAGHPPNHRGEGMIDFVAELARMTLVVGYPDAPEYTTIPPLSGELPHRVRLEVHGYVGTCLANMAVEASGGTADHACQEAAYLMMARLRERHDYIFHDTAYRYHPRRAHGDGVSSFRPTAGENDTTFGHMCAVMRGLDRMHSDLHKATKALNDGKLMRIVALKDEVARLKKENAQLKGLPAPGGVRIRTTPRKRTTAPVRIQLAPRNPPPPAAPAAPSVLPAVPAAPASAPAPAPAFTLSFAPASAARGSASGTGGCLFGMVYTRTGSRATGEGSNGEERADGVHPNGDSGNGPPPLPENPTLAQVMAHQTQMMAAMMQQMQQQHQQMHQRMMQHAEQQHQQFGPPPPQSKLPEFLRVRPPTFSSTTNPMEANDWLHAIEKKLNLLQCNDQEKVAFATHQLQGPASAWWDNHMATRPPGTEVTWAEFCRSFRKAQVPDGVVAQKKREFRALHQGNRTVTEYLHEFNRLARYAPEDVRTDAEKQEKFMAGLDDELTNQLISGDYADFERLVDKAIRQEDQRNKMDRKRKAAQFRSNQGSQHRPRFTPGQQGGPTTMIVRQHRPFNPSNFHQGTSGSQNHHGGQPNRGAAPRPPMAPAQSGQPAQAKKETGAKPGSCFNCGELGHFADKCPKPRRAGPRFIQARVNHASAEEAQAAPEVVLGTFPVNSIPATVLFDSGATHSFISKKFVGMHGLIREELSTPMRVHTPGNSSTSVQFSPSITIEIQRSPFLANLILLESKDLDVILGMDWLTKFKGVIDCASRTVTLTNEKGETVVYKSLVSPKKGASLNQIETEIPVDTEEKNLRKLEDIPIVCEYPEVFPEDLTTMPPKREIEFRIDLAPGTAPIYKRPYRMAANELAEVKKQVDEQLQKGYIRPSTSPWGAPVIFVEKKDKTKRMCVDYRALNEVTIKNKYPLPRIDDLFDQLKGAKVFSKIDLRSGYHQLRIREEDIPKTAFTTRYGLYECTVMSFGLTNAPAFFMNLMNKVFMEFLDKFVVVFIDDILIYSKSEEEHEQHLRLVLEKLKEHQLYAKFSKCDFWLTEVKFLGHVITAQGVAVDPSNVESVTKWTPPKTVSQIRSFLGLAGYYRRFIENFSRIARPMTQLLKKDEKFKWTAECDKSFEELKRKLVSAPVLILPDQTKDFQVYCDASRHGLGCVLMQEGRVVAYASRQLRPHEGNYPTHDLELAAVVHALKIWRHYLIGNRCEVYTDHKSLKYIFTQPDLNLRQRRWLELIKDYDMSIHYHPGKANVVADALSRKSYCTALCIEGMCEELRQEFEHLNVGIVEHGFVAALEARPTLVDQVRAAQVNDPEIAELKKNMRVGKARDFLEDEHGTIWMGERLCVPDDKELKDLILTEAHQTPYSIHPGSTKMYQDLKEKFWWVSMRREIAEFVALCNVCQRVKAEHQRPAGLLQPLQIPEWKWEEIGMDFITGLPRTSSGHDSIWVVVDRLTKVAHFIPVHTTYTGKRLAELYLARIMCLHGVPKKIVSDRGSQFTSKFWQKLQEELGTRLNFSTAYHPQTDGQTERVNQILEDMLRACALDFGGAWDKSLPYAEFSYNNSYQASLQMAPFEALYGRKCRTPLFWDQTGERQLFGTEVLAEAEEKVRIIRERLRIAQSRQKSYADNRRRELTFEAGDYVYLRVTPLRGVHRFQTKGKLAPRFVGPYKILERRGEVAYQLELPSNMIGIHDVFHVSQLKKCLRVPEEQADSEHIDIQEDLTYVEKPVRILDTSERRTRNKVTRFCRVQWSHHSEEEATWEREDELKAAHPHLFTSSSESRGRDSV

SEQ ID NO: 18786 - protein, 1192 aa, Oryza sativa
  Clone ID: TF_OSC401235j.C1.p16.fg
MGCKMAGHPPNHRGEGMIDFVAELARMTLVVGYPNAPEYTTIPPLSGELPHRVRLEVHGYVGTCLANMVVEAAGGTADHACQEAAYLMMARLRERHNYIFHDTAYRFHPRRASNDDVSSFRPTAGENDTTFGHMCAVMRGLDRMHSDLHKATKALNDGKLMRIVALKDEITRLKRENAQLKGLPAPGGVWIRTTPRKTTTAPVRIQLAPRNPPPSAAPAAPPVPPTVPAAPAPAPASALSFAPASAARGPASGTGGCLFGMVYTRNGSRATGEGSNGEERTDGAHPHSDSGNGPPPLPENPTLAQVMAHQTQMMAAMMQQMQQQHQQMHQRMMQHVEQQHQHFGPPPPQSKLPEFLRVRPPTFSSTTNPMEANDWLHAIEKKLNLLQCNDQEKVAFATHQLQGPASAWWDNHMATRPPGTEVTWAEFCRSFRKAQVPDGVVAQKKREFRALHQGNRTVTEYLHEFNRLTRYAPEDVRTDAEKQEKFMAGLDDELTNQLISGDYADFERLVDKAIRQEDQRNKMDRKRKATQFRAPQGSHQRPRFTPGQQGGPTTMIVRQYRPFNPSNFPQGSSGSQNHHGGQSNRGAAPRPPMAPAQSGPSAQAKKETGAKPGSCFNCGELGHFADKCPKPRRAGPRFIQARVNHASAEEAQAAPEVVLGTFPVNSIPAIVLFDSGATHSFISKKFVGMHGLIREKLSTPMRVHTPGNSSTSVQFSPSITIEIQRSPFLANLILLESKDLDVILGMDWLTKFKGVIDCANRTVTLTNEKGKTVVYKSPDSPKQGVSLNQIEAEIPVDTVEKNLRKLEDIPIVSEYPEVFPEDLTTMPPKREIEFRIDLAPGTAPIYKRPYRMAANELAEVKKQVDEQLQKGYIRPSTSPWGAPVIFVEKKDKTKRMCVDYRALNEVTIKNKYPLPRIDDLFDQLKGAKVFSKIDLRSGYHQLRIREEDIPKTAFTTRYGLYECTVMSFGLTNAPAFFMNLMNKVFMEFLDKFVVVFIDDILIYSKSEEEHEQHLRLVLEKLKEHQLYAKFSKCDFWMTEVKFLGHVITAQGVAVDPSNVESVTKWTPPKTVSQIRSFLGLAGYYRRFIENFSRIARPMTQLLKKDEKFKWTAECDKSFEELKKKLVSALVLILPDQMKDFQVYCDASRHGLGCVLMQEGRVVAYASRQLRPHEGNYPTHDLELAAVVHALKI

SEQ ID NO: 18787 - protein, 1656 aa, Oryza sativa
  Clone ID: TF_OSC401325j.C1.p17.fg
MSGQTGNGKDGDKGGTFPYDYLSTSISYVSTYSGKAPYFNGTDYAASKHKMKMHLKSINPLIWRIVEKGYVLQNPEEPTKEDDENEHKNAQAANAILSALSGSEFNRVDGIESAKVIWDTLRNLHEGTDSVRESKVEILKGQFERKIVNEIKGLGSKDMTDEVVVKKMVRAITPRNSTLVTIIRERPDYKTLTPHDLLGRILAHNMLEQESKEVIQYINQTSTTSIKKEDLALKAKEEEEESRKSKSKAEIDDEEMALFVKKFGKFMKQSGFFKGSSSKHSSNKSSGRRSARVCYVCKEPGHFITDCPHIKDCLHFKEDKKKLEKKEKHKHSKHDRYGQAHLGMIFGSDSESSSSDEEGVATFAVKPSSPPRLFNYSSDEDAPICLMAKEPKVPSPLKSFNVDLVSDLEEDVEDEVMDDELFKSIAKESIPHLSELLRRIENQYATLERQEELLIREKERSHELKSELAKEREKNEALVRLYKQTKESHANLEVANAQLQERVDDLDKAYLSLEEKFETLKNSVSFPSEASCSKIVPSNEPCVRCKDIDIETCATNSTSLSALQKQNEKLMGLLHNGLLKCHMGSKALKEYLGYQRDNFNHEGLGYVPPPKGRVDKSVMIKKPQCLSNFVKAKCILPNDNASHCFDASYVLRKNASGRVVAKYVGPRGKNISIKRVLWVPKALVTNMRGPKQEYVSGGRSWVIDSGCTNHMTGEESMFSSLDPNGTSQENIIFGDDGKGKASPCWYEESSQTSKARHILGLTNIQFEKDRVCSACQAGKQIGAHHPVKNVMTTTRPLELLHMDLFGPIAYLSIGGNKYGLVIVDDFSCFTWVFFLHDKSETQAIFKKFARRAQNEFDLKIKNIRSDNVKEFKNTCIESFLDEEGIKHEFSAPYSPQQNGVAERKNRTLIEIARTMLDEYKTSDRFWAEAVNTVCHDINRLYLHRLLKKTPYELLTGNKPNVSYFRVFGSKCYILNKKARSSKFAPKVDGGFLLGYGSNECAYRVFNKTSGIVEIAPDVTFDETNGSQVEQVDSHVLGEEEDPREAIKRLALGDVRPREPQQGASSSTQVEPPTSTQANDPSTSSLDQGEEGEQVPPSSINLAHPRIHQSIQRDHPTDNILGDINKGVSTRSHIANFCEHYSFVSSLEPLRVEEALNDPDWVMAMQEELNNFTRNEVWTLVERSRQNVIGTKWIFRNKQDEAGVVIRNKARLVAQGFTQIEGLDFGETFAPVARLESIRILLTFATNLNFKLYQMDVKSAFLNGLINELVYVEQPPGFKDPKYPNHVYKLHKALYELKQAPRAWYECLRNFLVKNGFEIGKADSTLFTKRHDNDIFVCQIYVDDIIFGSTNKSFSEEFSRMMTKRFEMSMMGELKFFLGLQIKQLKEGTFICQTKYLKDMLKKFGMENAKPIHTPMPSNGHLDLNEQGKDVDQKVYRSIIGSLLYLCASRPDIMLSVCMCARFQAAPKECHLVAVKRILRYLVHTPNLGLWYPKGARFDLIGYADADYAGCKVDRKSTSGTCQFLGRSLVSWSSKKQNSVALSTAEAEYISTGSCCAQLIWMKQTLRDYGLNVSKIPLLCDNESAIKIANNPVQHSRTKHIDIRHHFLRDHSTRGDIDIQHVRIDKQLADIFTKPLDEARFCELRSELNILDSRNVA

SEQ ID NO: 18788 - protein, 1398 aa, Oryza sativa
  unsure (1)..(1398): unsure at all Xaa locations
  Clone ID: TF_OSC401394j.C1.p1.np
IAGHPPNHHGEGMIDFVAELARMTLVVGYPNAPEYTTVPPLSGELPHRVRLEVHGYVGTCLANMVVEASGDTADHACQEAAYLMMAKLRERHNYIFHDTAYRFHPRRASGDDVSTFRPTAGDNDTTFGHMCAVMRGLDRMHSDLHKASKALNDGKLMRIVTLKDKIARLKRENAQLKGLPAPGGVRIRTTPRKSTTTPVCIQLAPRNPPPSAAPAAPPVPPTAPAVPAAPAPAPALVPVSAPASALSFAPALAVRVPASGNGGWLPATPSGSRDRSSSGSEPGSGETYLPGSRSRSEGPGLFLQMVYTRNGSRTTGEGSNGEERADGVHPNSDSGNGPPPLPENPTLAQVMAHQTQMMAAMMQQMQHQHQQMHQRMLQHAEQQHQQFGPPPSQSKLPEFLRVRPPTFSSTTNPMEANDWLHAIEKKLNLLQCNDQEKVAFATHQLQGPASAWWDNHMATRPPGTEVTWAEFCRSFRKAXVPDGVVAQKKREFQALHQGNRTVTEYLHEFHRLARYAPEDVRTDAEKQEKFMAGLDDELTNQLISGDYADFERLVDKAIRQEDQQNKMDGKRKAAQFRSNQGNHQRLRFAPGQQGGPTTMIICQYRPFNSSNFHQGASGSQNHHGGQPNRGAAPRPPVAPAQSGPSAQAKKETGTKPGSCFNCGELGHFADKCPKPRRAGPRIVQARVNHASAEEAQAAPEVVLGTFLVSSIPATVLFDSGATHSFISKKFVGMHGLRKEELNTPMRVHTLGNSSTSVSFSPSVLIEIQRSPFLANLILLESKDLDVILGMDWLTKFKGVIDCANRTVTLTNKKGETVVYKSLVSPKQRVSLNQIEAEIPVVTEEKNPRKLEEIPIVCEYPEVFPEDLTTMPPKREIEFRIDLAPGTAPIYKRPYRMAANELAEVKKQVDEQLQKGYIRPSTLPXGAPVIFVEKKDKTKRVDYRALNEVTIKNKYPLPRIDDLFDQLKGAKVFSKIDLRSGYHQLRIREEDIPKTAFTTRYGLYECTVMSFGLTNAPAFFMNLINKVFMEFLDKFVVVFIDDILIYSKSEEEHEQHLRLVLEELKEHQLYAKFSKCDFWLSEVKFLGHVITAQGVAVDPSNVESVTKWTPPKTSQIRSFLELAGYXRRFIENFSRIARPMTQLLKKDEKFKWTAECDKSFEELKKKLVSAPVLILPDQMKDFQVYCDASRHGLGCVLMQEGRVVAYASRQLCPHEGNYPTHDLELAAVVHALKIWRHYLIGNRCEVYTDHKSLKYIFTQPDLNLRQQKWLELIKDYDMSIHYHQGKANVVADALSRKSYYTALCIEGMCEELRQEFEHLNVAIVEHGFVAVLEARPTLVDQVRAAQVNDPEIAELKKNMRVGKARDFHEDEHGTIWLGLVACLLSDSALCLKXLTLPYS

SEQ ID NO: 18789 - protein, 1157 aa, Oryza sativa
  Clone ID: TF_OSC401435j.C1.p23.gm
MVYTRNGSRATGEGNNGEERTEGVHPNSNSGNGPPPLPENPTLAQVMAHQTQMMAAMMQQMQQQHQQMHQRMLQHAEQQHQLFGPPPPQSKLPEFLRVRPPTFSSTTNPMEANDWLHAIEKKLNLLQCNDQEKVAFATHQLQGPASAWWDNHMATRPPGTEGNMTVTEYLHEFNRLARYAPEDVRTDAEKQEKFLAGLDDELTNQLISGDYANFERLVDKAIRQEDQRNKMDRKRKAAQFRAPQGSHQRPRFAPGQQGGPTTMIVRQYRPFNPSNFPQGASGSQNHHGGQPNRGAAPRPPTAPAQSGLSAQAKKETGAKPGSCFNCGELGHFADKCPKPRRAGPRFIQARVNHASAEEAQAAPEVVLVTLTNEKGETVVYKSPDSPKQGVSLNQIEAEIPVVTVEKNLRKLEDIPIVCEYPEVFPEDLTTMPPKREIEFRIDLAPGTAPIYKRPYRMAANELAEVKKQVDEQLQKGYIRPSTSPWGAPVIFVEKKDKTKRMCVDYRALNEVTIKNKYPLPRIDDLFDQLKGAKVFSKIDLRSGYHQLRIREEDIPKTAFTTRYGLYECTVMSFGLTNAPAFFMNLMNKVFMEFLDKFVVVFIDDILIYSKSEEEHEQHLRLVLEKLKEHQLYAKFSKCDFWLTEVKFLGHVITAQGVAVDPSNVESVTKWTPPKTMSQIRSFLGLAGYYRRFIENFSRIARPMTQLLKKDEKFKWTAECDKSFEELKKKLVSAPVLILPDQMKDFQVYCDASRHGLGCVLMQEGRVVAYASRQLRPHEGNYPTHDLELAAVVHALKIWRHYLIGNRCEVYTDHKSLKYIFTQPDLNLRQRRWLELIKDYDMNIHYHPGKANVVADALSRKSYCTALCIEGMCEKLQQELERLNVGIVEHGFVAALEARPTLVDQVRAAQVNDAEIAELKKNMRVGKARDFLEDEHGTIWLGERLCVPDDKELKDLILTEAHQTQYSIHPGSTKMERLRIAQSRQKSYADNRRRELTFEAGDYVPRPSQAAPSSLSRATDRWGPFAGAAPRLDDVVLATRCHHRWPSDRVAAAALRAPCPRRCRWCRADGCRLPLAAPRRCSRVRRFRPRELSPAVAAGGRAAARRRLASRLCAVLCPSRAAPGSLIGLGRSGPSVPVDRRWTASVVPVHGGPAPLCR

SEQ ID NO: 18790 - protein, 1745 aa, Oryza sativa
  unsure (1)..(1745): unsure at all Xaa locations
  Clone ID: TF_OSC401567j.C1.p10.np
MAGHPPNHRGEGMIDFVAELARMTLVVGYPNAPEYTTVPPLSGELPHRVRLEVHGYVGTCLANMVVEASGGTADHACQEAAYLMMARLRERHNYIFHDTAYRFHPRRASGDDVSTFRPTAGENDTTFGHMCAVMRGLDRMHSDLHKASKALNDGKLMRIVALKDEIARLKRDNAQLKGLPAPGGVRIRTTPHKTTTAPVRIQLAPKNPPPSAAPAAPPVPLAAPVVPAAPVPAPAPASALSFAPASAARGPASGNGGWLSATPSGSCDRRSSGSELGSGETYLPGSRSRSEGPGLFLQMVYTRNGSRATGEGSNGEERTEGVHPNSNSGNGPPPLPENPTLAQVMAHQTXMMAAMMQQMQQQHQQMHQRMLQHAEQQHQXFGPPPPQSKLLEFLRVRPPTFSSTTNPMEANDWLHAIEKKLNLLQCNDQEKVAFATHQLQGPASAWWDNHMATRPPGTEVTWEEFCRSFRKAQVADGVVAQKKREFRALHXGNRTVTEYLHEFNHLARYAPEDVRTDAEKQEKFLAGLDDELTNQLISGDYADFERLVDKAIRQDDQRNKMDRKRKAAQFRAPQGSHQRPRFAPGQQGGPTTMIVRQYRPFNPSNFPQGASGSQNHHGGQPNRGAAPRPPTAPAQSGPSAQAKRETGAKPGSCFNCGELGHFADKCPKPRRAGPRFIQARVNHASAEEAQAAPEVVLGTFPVNSIPATILFDSGATHSFISKKFVGMHGLRKEELSTPMRVHTSGNSSTSVSFSPSVLIEIQRSPFLANLILLESKDLDVILGMDWLTKFKGVIDCANRTVTLTNEKGETAVYKSPDSPKQGVSLNQIEAEIPVDTVKKNLRKLEDIPIVCEYPEVFPEDLTTMPPKREIEFRIDLAPGTAPIYKRPYRMAANELAEVKKQVDEQLQKGYIRPSTSPWGAPVIFVEKKDKTKRMCVDYRALNEVTIKNKYPLPRIDDLFDQLKGAKVFSKIDLRSGYHQLRIREEDIPKTAFTTRYGLYECTVMSFGLTNAPAFFMNLMNKVFMEFLDKFVVVFIDDILIYSKSEEEHEQHLRLVLEKLKEHQLYAKFSKCDFWLTEVKFLGHVITAQGVAVDPSNVESVTKWIPPKTVSQIRSFLGLAGYYRRFIENFSRIARPMTQLLKKDEKFKWTAECDKSFEELKKKLVSAPVLILPDQMKDFQVYCDASRHGLGCVLMQEGRVVAYASRQLRPHEGNYPTHDLELAAVVHALKIWRHYLIGNRCEVYTDHKSLKYIFTQPDLNLRQRRWLELIKDYDMSIHYHPGKANVVADALSRKSYCTALCIEGMCEELRQEFEHLNVGIVEHGFVAALEARPTLVDQVRAVQVNDSEIAELKKNMRVGKTRDFHEDEHGTIWLGERLCVPDDKELKDLILTEAHQTQYSIHPGSTKMYQDLKEKFWWVSMRREAEFVALCDVCQRVKAEHQRPAGLLQPLQIPEWKWEEIGMDFIIALPRTSSGHDSIWVVVDRLTKVAHFIPVHTTYTGKRLAELYLSRIMCLHGVPKKIVSDRGSQFTSKFWQKLQEELGTRLNFSTAYHPQTDGQTERVNQILEDMLRACALDFGGAWDKNLPYAEFSYNNSYQASLQMAPFEALYGRKCRTPLFWDQTGKRQLFGTEVLAEAEEKVRIIRERLRIAQSXQKSYADNRRRELTFEAGDYVYLRVTPLRGVHRFQTKGKLAPRFVGPYKILERRGEVAYQLELPSNMIGIHDVFHVSQLFSKLRVDKYQQDFI

SEQ ID NO: 18791 - protein, 1536 aa, Oryza sativa
  Clone ID: TF_OSC401630j.C1.p1.fg
MAGHPPNHRGEGMIDFVAELARMTLVVGYPNAPEYTTIPLLSGELPHRVRLEVHGYVGTCLANMAVEASGGTADHACQEAAYLMMARLRERHNYIFHDTAYRYHPRRANGDGVSSFRPTAGENDTTFGHMCAVMRGLDRMHSDLHKATKALNDGKLMRIVALKDEIARLKKENAQLKGLPAPEGVRIRTTPRKTTTAPVRIQLAPRNPPPAAAPAAPPVPPAVPAAPVPAPAFTLSFAPASAARGPASGTGGCLFGMVYTRTGSRATGEGSNGEERTDGVHPNSDSGNGPPPLPENPTLAQVMAHQTQMMAAMMQQMQQQHQQMHQRMMQHAEQQHQQFGPPPPQSKLPEFLRVRPPTFSSTTNPMEANDWLHAIEKKLNLLQCNDQEKVAFATHQLQGPASAWWDNHMATRPPGTEVTWAEFCRSFRKAQVPDGVVAQKKREFRALHQGNRTVTEYLHEFNRLARYAPEDVRTDAEKQEKFMAGLDDELTNQLISGDYADFERLVDKAIRQEDQRNKMDRKRKAAQFRAHQGSHQRPRFTPGQQGGPTTMIVRQHRPFNPSNFHQGTSGSQNHHGGQPNRGAAPRPSVAPAQSGQPAQAKKETGAKPGSCFNCGELGHFADKCPKPRRAGPRFIQARVNHASAQEAQTAPEVVLGTFPVNSIPATVLFDSGATHSFISKKFVGMHGLIREELSTPMRVHTPGNSSTSVQFSPSITIEIQRSPFLANLILLESKDLDVILGMDWLTKFKGVIDCASRTVTLTNEKGETVVYKSLVSPKKGVSLNQIETEIPVDTVEKNLRKLEDIPIVCEYPEVFPEDLTTMPPKREIEFRIDLAPGTAPIYKRPYRMAANELAEVKKQVDEQLQKGYIRPSTSPWGAPVIFVEKKDKTKRMCVDYRALNEVTIKNKYPFPRIDDLFDQLKGTKVFSKIDLRSGYHQLKNPERGYSEDGLHHSFVVVFIDDILIYSKSEEEHEQHLRLVLEKLKEHQLYAKFSKCDFWLTEVKFLGHVITAQGVAVDPSNVESVTKWTPPKTVSQIRSFLGLAGYYRRFIENFSRIARPMTQLLKKDEKFKWTAECDKSFEELKKKLVSAPVLILPDQMKDFQVYCDASRHGLGCVLMQEGRVVAYASRQLRPHEGNYPTHDLELAAVVHALKIWRHYLIGNRCEVYTDHKSLKYIFTQPDLNLRQRRWLELIKDYDMSIHYHPGKANVVADALSRKSYCTALCIEGMCEELRQEFEHLNMGIVEHGFVAALEARPTLVDQVRAAQVNDPEIAELKKNMRVGKARDFFEDEHGTIWMGERLCVPDDKELKDLILTEAHQTQYSIHPGSTKMYQDLKERFWWVSMRREIAEFVALCDVCQRVKAEHQRPAGLLQPLQIPEWKWKEIGMDFITGLPRTSSGHDSIWVVVDRLTKVAHFILVHTTYTGKRLAELYLARIMCLHGVPMKILSDRGSQFTSKFWQKLQEELGTRLNFSTAYHPQTDGQTERVHQFLEDMLRACALDYDGAWDKRLPYAEFSYNNSYQANLQMALCRVPNRL

SEQ ID NO: 18792 - protein, 1220 aa, Oryza sativa
  Clone ID: TF_OSC401655j.C1.p2.fg
MVYTRNGTRTTGEGSNGEERTDGVHPNSDSGNGPPPLPENPTLAQVMAHQTQMMTAMMQQMQQQHQQMYQRMQQQAEQHQQQFGPPPPQSKLPEFLRVRPPTFSSTTNPMKANDWLHAIEKKLNLLQCNDQEKVAFATHQLQGPASAWWDNHMTTRPPGTEVTWAEFCRNFRKAQVLDGVVAQKKREFRALHQGNRTVTEYLHEFDRLARYAPEDVRTDAKKQEKFLAGLDDELTNQLISGDYADFERLVDKAIRQEDQHNKMDRKRKAAQFRSNQASHQRPRFIPRQQGEPTTMIVRQHRPFNSSNFHQGASGSQNHRGGQPNRSATPRPPMAPAQSAPSVQAKKETGAKPGSCFNCGELGHFADKCPKPRRAGPRFVQARVNHASTEEAQAAPEVVLGTFPVNSIPATVLFDSGAMHSFIYKKFVGMHGLIREELSTPMRVHTPGNSSTSVQFSPSVTIEIQRSPFLANLILLESKDLDVILGMDWLTKFKGVIDCANCTVTLINEKGETVVYKSLVSPKQGVSLNQIEVEIPVVTEEKNSRKLEEIPIVCEYPEVFPEDLTTMPPKREIEFRIDLAPGTAPIYKRPYRMAANELAEVKKQVDEQLQKGYIRPSTSPWGAPVIFVEKKDKTKRMCVDYRALNEVTIKNKYPLPRIDDLFDQLKGAKVFSKIDLRSGYHQLRIREEDIPKTAFTTQYGLYECTVMSFGLTNAPAFFMNLMNKVFMEFLDKFVVVFIDDILIYSKLEEEHEQHLRLVLEKLKEHQLYAKFSKCDFWLSEVKFLGHIITAQGVAVDSSNVESVTKWTPPKTVSQIRSFLGLAGYYRRFIENFSRIARPMTQLLKKDEKFKWTAECDKSFEELKKKLVSAPVLILPDQMKDFQVYCDASRHGLGCVLMQEGRVVAYASRQLRPHEGNYPTHDLELAVVVHALKIWRHYLIGNRCEVYTDHKSLKYIFTQPDLNLRQRRWLELIKDYDMSIHYHPGKANVVADALSRKSYCNALCTEDMCEELQQELERLNVGIVEHRFVAALEARPTLVDQFRAAQVNDPEIVELKKNMRVGKARDFLEDEHRTIWMGERLCVPDDKELKDLILTEAHQTQYSIHPGSTKMYQDLKEKFWWVSMRREIAEFVALCDVCQRVKAEHQRPVGLFQPLQIPKWKWEEIGMDFITGLPRTSSGHDSIWVVVDRLTKVAHFIPVHTTYTGKKLAELCLARIEFDLLR

SEQ ID NO: 18793 - protein, 3350 aa, Oryza sativa
  Clone ID: TF_OSC401894j.C1.p32.fg
MGSKMAGHPPNHRGEGMIDFVAELARMTLVVGYPNAPEYTTIPQLSGELPHRVRLEVHGYVGTCLANMVVEASGGTADHACQEAAYLMMARLRERHNYIFHDTAYRFHPRRANGDDVSSFRPTAGENDTTFGHMCAVMRGLDRMHSDLHKATKALNDGKLMRIVALKDEIARLKRENAQLKGLPAPGGVRIRTTPRKTTTAPVRIQLAPRNPPPSAAPAAPPVPPAAPAVPAAPAPASALSFAPASAARGPASGNGGCLFGMVYTRNGSRATGEGSNGEERADGVHPSSDSGNGPPPLPENPTLAQVMAHQTQMMAAMMQQMQQQHQQMHQRMMQHVEQQHQQFGPPPPQSKLPEFLREKVAFATHQLQGPASAWWDNHMATRPPGTEVTWAEFCRSFRKAQVPDGVVAQKKREFRALHQGNRTVTEYLHEFNRLARYAPEDVRTDAEKQEKFMAGLDDELTNQLISGDYADFERLVDKAIRQEDQRNKMDRKRKAAQFRAPQGSHQRPRFAPGQQGGPTTMIVRQHRPFNPSNFPQGASGSQNHHGGQSNRGAASRPPMAPAQSGQPAQAKKEIGAKPGSCFNCGELGHFADKCPKPRSAGPRFIQARVNHASAEEAQAAPEVVLGTFPVNSIPATVLFDSGATHSFISKKFVGMHGFIREELSTPMRVHTPGNSSTSVQFSPSITIEIQRSPFLANLILLESKDLDVILGMDWLTKFKGVIDCANRTVTLTNEKGETVVYKSPDSPKQGVSLNQIEAEIPVDTVERNLRKLEDIPIVSEYPEVFPEDLTTMPPKREIEFRIDLAPGTAPIYKRPYRMAANELAEVKKQVDEQLQKGYIRPSTSPWGAPVIFVEKKDKTKRMCVDYRALNEVTIKNKYPLTRIDDLFDQLKGAKVFSKIDLRSGYHQLRIREEDIPKTAFTTRYGLYECTVMSFGLTNAPAFFMNLMNKVFMEFLDKFVEVFIDDILIYSKSEEEHEQHLRLVLEKLREHQLYAKFSKCDFWLTEVKFLGHVITAQGVAVDPSNVESVTKWTPPKTVSQIRSFLGLAGYYRRFIENFSRIARPMTQLLKKDEKFKWTAECDKSFEELKKKLVSAPVLILPDPMKDFQVYCDASRHGLGCVLMQEGRVVAYASRQLRPHEGNYPTHDLELATVVHALKIWRHYLIGNRCEVYTDHKSLKYIFTQPDLNLRQRRWLELIKDYDMSIHYHPGKANVVADALSRKSYCTALCIEGMCEELRQEFEHLNVGIVELGFVAALEARPTLVDQVRAAQANDSEIAELKKNMRVGKARDFHEDEHGTIWLGERLCVPDDKELKDLILTEAHQTQYSIHPGSTKMYQDLKERFWWVSMRREIAEFVALCDVCQRVKAEHQRPAGLLQPLQIPEWKWEEIGMDFITGLPRTSSGHDSIWVVVDRLTKVAHFIPVHTTYTGKRLAELYLSRIMCLHGVPKKIVSDRGSQFTSKFWQKLQEELGTRLNFSTAYHPQTDGQTERVNQILEDMLRACALDFGGAWDKSLPYAEFSYNNSYQASLQMAPFEALYGRKCRTPLFWDQTGKRQLFGTEVLAEAEEKVRIIRERLRIAQSRQKSYADNRRKELTFEAGDYVYLRVTPLRGVHRFQTKGKLAPRFVGPYKILERRGEVAYQLELPSNMIGIRDVFHVSQLKKCLRVPEEQADSEHIDIQGDLTYVEKPWVVLSLALLFPTSEFEFGSDEGVTTIIEKYDGSVNPAEFLQIYTTGIEAAGGDDRVMANFFPMALKGQARGWLMNLPPASVHSWEDLCQQFTTNFQGIYPRPDEEADLHAVQRRDDESLRSYIQRFCQVRNTIPCIPAHAVIYAFRGGVRHNRMLEKIASKEPQTTAQLFELADRVARKEEAWTWNSSGSGVAAPAAPGSAARSGRRDRRRKKGSARSDDESHVLAVEGASRAPRKGRPASNKKKEAGAPSRERPTGKWCTVHNTSLHDLADCRAVKSLAERTRKWEEEKRQERREGKTPAAPAGNRRGEAKQKATAEDIDDGDDDLGFQEPEATVATVDGGACAHASRRSLKAMKRELLAAAPTHEATWRARWSEVALSFDQTDHPPCVARGGQIAMPLGHIDLPVTFGGSANFCTERVDFDVADLSLPYNAVLGRPALVKFMAAVHYAYLQMKMPGPGGPITVHGDLKVTLACMEQRADHLAAAYKPAGGDERLSTSVPAAPRQRMVTCDEVSVKEEDALVSLLRANTDVFAWRPADMPEVPREVIEHRLAVQLGARPVRQKVRRQAPERQAFIREEVARLLEAGFIREVIHPEWLANPVVVPKANGKLRMCIDYTDLNKACPKDPYPLPRIDQIVDSTAGCDLLCFLDAYSSYHQIRMAREDEEKTAFITPIGTYCYTTMPFGLKNAGPTFQRTTRISLGSQIGRNVEAYVDDLVVKTRNQETLLSDLAETFKSLRSARIKLNPDKCVFGVPAGKLLGFLVSARGIEANPEKIRAIERMHPPSMLRDVQCVTGCMAALSRFISRLGEKALPLFKLLKRSGPFTWTEEAERAFTQLKAYLSSPPVLVAPEPDEPLLLYLAATPQVVSAALVVERDKDNPHSAHPHPVSTRPGREQGGEAPEPNGGPGPRRPELALRLLVRRCQVVGTEAECAPCGLSDEERPGDAAPGEEDRPRRKMQRPVYFVSEALRDAKTRYPQAQKMLYAILMASRKLRHYFQAHRVTVVTSYPLGQILHNREGTGRVVRWAIELSEFDLRFEPRHAIKSQALADFVAEWTPAPEPVSAPKASSGPSQLPHTAYWGAGAGVTLTSPSGDVLRYLVRLDFRATNNMAEYEGLLAGLRVAAGLGIRRLLVFGDSQLVVNQVCKEYQCSDPQMDAYVRQVRRMERHFDGIELRHVPRRDNTVADELSRLASSRAQTPPGAFEERLAQPSARPDPLGETDAPERPPRPVGVQASGPEGSAPSSPRLIAWITEIQAYLADKTLPEDREGSERVRRISKRYVLVEGTLYRRAANGVLLKCIPREQGVELLADIHEGECGAHSVSRTLVGKAFRQGFYWPTALNDAVDLVRRCRACQFHARQTHQPTQALQTIPLSWPFAVWGLDILGPFRRAPGGFEYLYVAVDKFTKWPEAYPVIKIDKHSALKFIRGITARFGVPNRIITDNGTQFTSELFGDYCEDMGIKLCFASPAHPRSNGQVERANAEILKGLKTKTFNILKKHGDSWIEELPAVLWANRTTPSRATGETPFFLVYGAEAVLPSELTLRSPRVTMYCEADQDQLRRDDLDYLEERRRRAALRAARYQQSLRRYHQRHVRARSLCVDDLVLRRVQTRAGLSKLSPMWEGPYRVIGVPQPGSVRLATGDGTELPNPWNIEHLRRFYP

SEQ ID NO: 18794 - protein, 1565 aa, Oryza sativa
  Clone ID: TF_OSC401978j.C1.p63.fg
MAEHPPNHRGEGMDDFVAELARMTLVVGYPNAPEYTTVPPLSGELPHRVRLEVHGYVGTCLANMVVEASGATADHACQEAAYLMMARLRERHNYIFHNTVYRFHPRRANDSDVSSFRPTAGENDTTFSHASKALNDGKLMRIVALKDEIARLKRENAQLKGLPAPGGVQIRTTPRKSTTAPVRIQLAPRNPPPSAAPAAPPVPPAAPAVPTAPAPAPAPVPVSAPASALSFAPASAVRGPASGNGGWLPATPSGSRDRSSSSSSGIEPGSGETYLPGSRSRSEDLMVYTRTGTRTTGEGSNGEERADGVHPNSDSGNGPPPLPENPTLAQVMAHQTQMMAAMMQQMQQQHQQMHQRMLQHAEQQHRQFGPPPPQSKLPEFLRVRPPTFSSTTNPMEANDWLHAIEKKLNLLQCNDQEKVAFATHQLQGPASAWWDNHMATRPPGTEVTWAEFCRSFRKAQVPDGVVAQKKREFRALHQGNRTVTEYLHEFNRLARYAPEDVRTDAEKQEKFMAGLDDELTNQLISGDYADFERLVDKAIRQEDQRNKMDRKRKAAQFRSNQGNHQRPRFTPGQQGGPTTMIVRQHRPFNSSNFHQGASGSQNHHGGQPNRGAAPRPPVAPAQSGPSAQAKETEAKPGSCFNCGELGHFADKCPKPRRAGPRKEELSTPMRVHTPGNSSTSVNFSPSVLIEIQRSPFLANLILLESKDLDVILGMDWLTKFKGVIDCANRTVTLTNEKGETVVYKSLVSPKQGVSLNQIEMEIPVVTEEKNSRKLEEIPIVCEYPEVFPEDLTTMPPKRKIEFRIDLAPGTAPIYKRPYRMAANELAEVKKQVDEQLQKGYIRPSTSPWGAPVIFVEKKDKTKRMCVDYRALNEVTIKNKYHLPRIDDLFDQLKGAKLRIREEDIPKTAFTTRYGLYECTVMSFGLTNAPAFFMNLMNKVFMEFLDKFVVVFIDDILIYSKSEEEHEQHLRLVLEKLKEHQLYAKFSKCDFWLTEVKFLGHVITAQGVAVDPSNVESVTKWTPPKTVSQIRSFLGLAGYYRRFIENFSRIARPMTQLLKKDEKFKWTAECDKSFEELKKKLVSAPEGRVVAYASRQLRPHEGNYPTHDLELAAVVHALKIWGHYLIGNRCEVYTDHKSLKYIFTQPDLNLRQRRWLELIKDYDMSIHYHPGKANVVADALSRKSYCTALCIEGMCEELRQEFEHLNVGIVEHGFVAALEARPTLVDQVRAAQINDPEIAELKKNMRVGKARDFLEDEHGTIWMGERLCVPDDKELKDLILTEAHQTQYSIHPGSTKMYQDLKEKFWWVSMRREIAEFVALCDVCQRVKAEHQRPAGLLQPLQIPEWKLHTTYTGKRLAELYLARIMCLHGVPKKIVSDRGSQFTSKFWQKLQKELGTRLNFSTAYHPQTDGQTERVNQILEDMLRACALDFGGAWDNSLPYAEFSYNNSYQASLQMAPFEALYGRKCRTPLFWDQTGERQLFGTEVLTEAEEKVRTIRERLRIAQSRQKSYADNRRRKLTFEAGDYVYLRVTPLRGVHRFQTKGKLAPRFVGPYKILERRGKLLIS

SEQ ID NO: 18795 - protein, 1429 aa, Oryza sativa
  Clone ID: TF_OSC402030j.C1.p1.np
MVNTRASGSGNNNNEGNPTLAQVLAQQTQLMNMMIQQMQNQLNQGNNNAPPPQNKLTDFLRVRPPTFSSTTNPVEAGDWLHAVEKKLELLQCTDQEKVVFASHQLQGPASEWWDHFRMNRAEGQPITWEEFTEGFKKTHIPVGVVALKKREFRAQEKFLEGLKDELSVTLISHDYVDFQQLVDKAIRLEDKKNRMDNRKRKMIVFQEAQGSSQRQRITFNPSNFPQGASGSQNHHGGQSNRGAAPRPPMAPAQSGPPAQAKKETGAKPGSCFNCGELGHFADKCPKPRPGQGLSARVNHASAEEAQAAPEVVLGTFSINSIPATVLFDSGATHSFISKKFVGMHGLIREELSTPMRVHTPGNSSTSVQFSPSITIEIQRSPFLANLILLESKDLDVILGMDWLTKFKGVIDCANRTVTLTNEKGETVVYKSLVSPKQGVSLNQMKLEDIPIVCEYPEVFLEDKLEDIPIVCEYPEVFLEDLTTMPPKRERFRIDLAPGTAPIYKRPYRMAANELAEVKKQVDEQLQKGYIRPSTSPWGAPVIFVEKKDKTKRMCVDYRALNEVTIKNKYPLPRIDDLFDQLKGAKVFSKIDLRSGYHQLRIREEDIPKTAFTTRYGLYECTVMSFGLTNAPAFFMNLMNKVLMEFLDKFVVVFIDDILIYSTSEEEHEQHLRLVLEKLKEHQLYAKFSKCDFWLTEVKFLGHVITAQGVAVDPSNVESVTKWTPPKTVSQIRSFLGLAGYFKWTTECDKSFEELKFKWTTECDKSFEELKKKLVSAPVLILPDQMKDFQVYCDASRHGLGCVLMQEGIVVAYASRQLRPHEGNYPTHDLELAAVVHALKIWRHYLIGNRCEVYTDHKSLKYIFTQPDLNLRQRRWLELIKDYDMSIHYHPGKANVVADALSRKSYCTALCIEGMCEELWQEFEHLNVGIVEHGFVAALEARPTLVDQVRAAQVNDSEIAELKKNMRVGKARDFHEDEHGTIWLGERLCVPDDKELKDLILTEAHQTQYSIHPGSTKMYQDLKEKFWWVSMRREIAEFVALCDVCQRVKAEHQRPAGLLQPLQILEWKWEEIGMDFITGLPRTSSGHDSIWVVVDRLTKVAHFIPVHTTYTGKRLAELYLSRIMCLHGVPKKIVSDRGSQFTSKFWQKLQEELGTRLNFSTAYHPQTDGQTERVNQILEDMLRACALDFGGAWDKSLPYAEFSYNNSYQASLQMAPFEALYGRKCRTPLFWDQTGERQLFGTEVLAEAEEKVRIIRERLRIAQSRQKSYADNRRRELTFEAGDYVYLRVTPLRGVHRFQTKGKLAPRFVGPYKILERRGEVAYQLELPSNMIGIHDVFHVSQLKKCLRVPEEQADSKHIDIQEDLTYVEKPIRILDTSERRTRNKVNRFCRVQWSHHSEEEATWEREDELKAAHPHLFTSSSESRGRDSV

SEQ ID NO: 18796 - protein, 589 aa, Oryza sativa
  Clone ID: TF_OSC402030j.C1.p4.fg
MVVEASGGTADHACQEAAYLMMARLRERHNYIFHDMAYRFHPRRASGDDVSTFRPTTGQNDTTFGHMCAVMSGLDRMHSDLHKATKALNDGKLMRIVALMDEIARLKRENAQLKGLPAPGGVRIRTTPRKTTTAPVRIQLAPRNPPPSAAPAAPPVPPAVPAAPAPAPASALSFAPASAARGPASGNGGCLLGMVYTRNGSRATGEGSNGEERTDGAHPHSDSGNGPPPLPENPTLVQVMAHQTQMMAAMMQHQHQQMHQRMLQHAEQQHQQFGPPPPQSKLPEFLRVRPPTFSSTTNPMEANDWLHAIEKKLNLLQCNDQEKVAFATHQLQGPASAWWDNHMATRPPGTEVTWVEFCRSFRKAQVPDGVVAQKKREFRALHQGNRTVTEYLHEFNRLARYAPEDVRTDAEKQEKFMAGLDDELTNQLISGDYADVERLVDKAIRQEDQRNKMDRKRKAAQFRAPQGSHQRPRFAPRQQGGPTTMIVRQHRPFNPSNFPQGASGSQNHHGGQSNRGAAPRPPMAPAQSGPPAQAKKETGAKPGSCFNCGELGHFADKCPKPRRAGPRFIQARVNHASAEEAQAAPEVVL

SEQ ID NO: 18797 - protein, 1267 aa, Oryza sativa
  Clone ID: TF_OSC404489j.C1.p1.fg
MVYTRTGTRTTGEGSNGEERADGVHPSSDSGNGPPPLPENPTLAQVMAHQTQMMAAMMQQMQQQHQQMHQRMMQHAEQQHQQFGPPPPQSKLPEFLRVRPPTFSSTTNPMEANDWLHAIEKKLNLLQCNDQEKVAFATHQLQGPASAWWDNHMATRPPGTEVTWAEFCRSFRKAQVPDGVVAQKKREFRALHQGNRTVTEYLHEFNRLARYAPEDVRTDAEKQEKFMAGLDDELTNQLISGDYADFERLVDKAIRQEDQRNKMDRKRKAAQFRAPQGSHQRPRFTPGQQGGPTTMIVRQHRPFNPSNFPQGASGSQNHHGGQSNRGAAPRPPMAPAQSSPPAQAKKETGAKPGSCFNCGELGHFADKCPKPRRAGPRFIQARVNHASAEEAQAAPEVVLGTFPVNSIPATVLFDSGATHSFISKKFVGMYGLRKEELSTPMRVHTPGNSSTSVSFSPSVLIEIQRSPFLANLILLESKDLDVILGMDWLTKFKGVIDCANRTVTLTNEKGETVVYKSPDSPKQGVSLNQIEAEIPVDTVEKNLKKLEDIPIASEYPEVFPEDLTTMPPKREIEFRIDLAPGTAPIYKRPYRMAVNELAEVKKQVDEQLQKGYIRPSTSPWGAPVIFVEKRDKTKRMCVDYRALNEVTIKNKYPLPRIDDLFDQLKGAKVFSKIDMRSGYHQLRIREEDIPKTAFTTRYGLYECTVMSFGLTNAPAFFMNLMNKVFMEFLDKFVVVFIDDILIYSKSEEEHEQHLRLVLEKLKEHQLYAKFSKCDFWLTEVKFLGHVITAQGVAVDPSNVESVTKWTPPKTVSQIRSFLGLAGYYRRFIENFSRIARPMTQLLKKDEKFKWTAECDKSFEELKKKLVSAPVLILPDQMKDFQVYCDASRHGLGCVLMQEGRVVASGSYFEDLEARPTLVDQVRAAQVNDSEIAELKKNMRVGKARDFHEDEHGTIWLGERLCVPDDKELKDLILTEAHQTQYSIHPGSTKMYQDLKEKFLWVSMRREIAEFVALCDVCQRVKAEHQRPAAWDKSLPYAEFSYNNSYQASLQMAPFEALYGRKCRTPLFWDQTGERQLFGTEVLAEAEEKVRIIRERLRIAQSRQKSYADNRRRELTFEAGDYVYLRVTPLRGVHRFQTKGKLVPRFVGPYKILERRGEVAYQLELPSNMIGIHDVFHVSQLKKCLRVPEEQADSEHIDIQEDLTYVEKPVRILDTSERRTRNKVTRFCRVQWSHHSEEEATWEREDELKAAHPHLFTSTSESRGRDSV

SEQ ID NO: 18798 - protein, 1717 aa, Oryza sativa
  Clone ID: TF_OSC404956j.C1.p1.np
MAGHPPNHRGEGMIDFVAELARMTLVVGYPNAPEYTTIPPLSGELPHRVRLEVHGYVGTCLANMAVEASGGTADHACQEAAYLMMARLRERHDYIFHDTAYRYHPCRANGDGVSSFRPTAGENDTTFGHMCAVVRGLDRMHSDLHKATKALNDGKLMGIVALKDEIARLKKENAQLKGLPVPGGVRIRTTPRKTTTAPVRIQLAPRNPPPAAAPAAPPVPPAVPAAPVPAPAFTLSFAPASAARGPASGTGGCSLQMVYTRNGSRATGEGSNGEERADGVHPNSDSGNGPPPLPENPTLAQVMAHQTQMMAAMMQQMQQQHQQMHQRMMQHAEQQHQQFGPPPPQSKLPEFLRVRPPTFSSTTNPMEANDWLHAIEKKLNLLQCNDQEKVAFATHQLQGPASAWWDNHMATRPPGTEVTWAEFCRSFRKAQVPDGVVAQKKREFRALHQGNRTVTEYLHEFNRLARYAPEDVRTDAEKQEKFMAGLDDELTNQLISGDYADFERLVDKAIRQEDQRNKMDRKRKAAQFRAHQGSHQRPRFTPGQQGGPTTMIVRQHRPFNPSNFHQGTSGSQNHHGGQPNRGAAPRPSVAPAQSGQPAQAKKETGAKPGSCFNCGELGHFADKCPKPRRAGPRFIQARVNHASAEEAQTAPEVVLGTFPVNSIPATVLFDSGATHSFISKKFVRMHGLIREELSTPMRVHTPGNSSTSVQFSPSITIEIQRSPFLANLILLESKDLDVILGMDWLTKFKGVIDCASRTVTLTNEKGETVVYKSLVSPKKGVSLNQIETEIPVDTVEKNLRKLEDIPIVCEYPEVFPEDLTTMPPKREIEFRIDLAPGTAPIYKRPYRMAVNELAEVKKQVDEQLQKGYIRPSTSPWGAPVIFVEKKDKTKRMCVDYRALNEVTIKNKYPLPRIDDLFDQLKGAKVFSKIDLRSGYHQLRIREEDIPKTAFTTRYGLYECTVMSFGLTNAPAFFMNLMNKVFMEFLDKFVVVFIDDILIYSESEEEHEQHLRLVLEKLKEHQLYAKFSKCDFWLTEVKFLGHVITAQGVAVDPSNVESVTKWTPPKTVSQIRSFLGLAGYYRRFIENFSRIARPMTQLLKKDEKFKWTAECDKSFEELKKKLVSAPVLILPDQMKDFQVYCDASRHGLGCVLMQEGRVVAYASRQLRPHEGNYPTHDLELAAMVHALKIWRHYLIGNRCEVYTDHKSLKYIFTQPDLNLRQRRWLELIKDYDMSIHYHPGKANVVADALSRKSYCTALCIEGMCEELRQEFEHLNMGIVEHGFVAALEARPTLVDQVRAAQVNDPEIAELKKNMRVGKARDFHEDEHGTIWMGERLCVPDDKELKDLILTEAHQTQYSIHPGSTKMYQDLKERFWWVSMRREIAEFVALCDVCQRVKAEHQRPAGLLQPLQIPEWKWEEIGMDFITGLPRTSSGHDSIWVVVDRLTKVAHFIPVHTTYTGKRLAELYLARIMCLHGVPRKIVSDRGSQFTSKFWQKLQEELGTRLNFSTAYHPQTDGQTERVNQILEDMLRACALDFGGAWDKSLPYAEFSYNNSYQASLQMAPFEALYGRKCRTPLFWDQTGERQLFGTEVLAEAEEKVRIIRERLRIAQSRQKSYADNRRRELTFEAGDYVYLRVTPLRGVHRFQTKGKLAPRFVGPYKILERRGEVAYQLELPSNMGDIRDVFHVSQLKKCLMVPEGQADSEHIGDRARIRIMVK

SEQ ID NO: 18799 - protein, 1785 aa, Oryza sativa
  Clone ID: TF_OSC407404j.C1.p8.fg
MEKPKSPLNPFSLHMFFAIGFVPGKWGSVLVVQGKNLGRSFKMAGHPPNHRGEGMIDFVAELARMTLVVGYPDAPEYTTIPPLSGELPYRVRLEVHGYVGTCLANMAVEASGGTADHACQEAAYLMMARLRERHDYIFHDTAYRYHPRRAHGDGVSSFRPTAGENDTTFGHMCAVMRGLDRMHSDLHKATKALNDGKLMRIVALKDEVARLKKENAQLKGLPAPGGVRIRTTPRKRTTAPVRIQLAPRNPPPPAAPAAAPVPPAVPAAPAPAPAFTLSFAPASAARGSASGTGGCLFGMVYTRTGSRATGEGSNGEERADGVHPNGDSGNADASEDDAARRTAAPAVGPPPPQSKLPEFLRVRPPTFSSTTNPMEANDWLHAIEKKLNLLQCNDQEKVAFATHQLQGPASAWWDNHMATRPPGTEVTWAEFCRSFRKAQVPDGVVAQKKREFRALHQGNRTVTEYLHEFNRLARYAPEDVRTDAEKQEKFMAGLDDELTNQLISGDYADFERLVDKAIRQEDQRNKMDRKRKAAQFRSNQGSQHRPRFTPGQQGGPTTMIVRQHRPFNSSNFHQGTSGSQNHQGGQPNRGAAPRPPMAPAQSAQPAQAKKETGAKPGSCFNCGELGHFADKCPKPRRAGPRFIQARVNHASAEEAQAAPEVVLGTFPVNSIPATVLFDSGATHSFISKKFVGMYGLRKEELSTPMRVRTPGNSSTSVSFSPSVLIEIQRSPFLANLILLESKDLDVILGMDWLTKFKGVIDCANRTVTLTNEKGETVVYKSLVSPKKGASLNQIETEIPVDTVGKNLRKLEDIPIVCEYPEVFPENLTTMPPKREIEFRIDLAPGTAPIYKRPYRMAANELAEVKKQVDEQLQKGYIRPSTSPWGAPVIFVEKKDKTKRMCVDYRALNEVTIKNKYPLPRIDDLFDQLKGAKVFSKIDLRSGYHQLRIREEDIPKTAFTTRYGLYECTVMSFGLTNAPAFFMNLMNKVFMKFLDKFVVVFIDDILIYSKSEEEHEQHLRLVLEKLKEHQLYAKFSKCDFWLTEVKFLGHVITAQGVAVDPSNVESVTKWTPPKTVSQIRSFLGLAGYYRRFIENFSRIARPMTQLLKKDEKFKWTAECDKSFEELKKKLVSAPVLILPDPTKDFQVYCNASRHGLGCVLMQEGRVVAYASRQLRPHEGNYPTHDLELAAVVHALKIWRHYLIGNRCEVYTDHKSLKYIFTQPDLNLRQRRWLELIKDYDMSIHYHPGKANVVADALSRKSYCTALCIEGMCEELRQEFEHLNMGIVEHGFVAALEARPTLVDQVRAAQVNDPEIAELKKNMRVGKARDFLEDEHGTIWMGERLCVPDDKELKDLILTEAHQTQYSIHPGSTKMYQDLKEKFWWVSMRREIAEFVALCDVCQRVKAEHQRPAGLLQPLQIPEWKWEEIGMDFITGLPRTSSGHDSIWVVVDRLTKVAHFIPVHTTYTGKRLAELYLARIMCLHGVPKKIVSDRGSQFTSKFWQKLQEEMGTRLNFSTAYHPQTDGQTERVNQILEDMLRACALDFGGAWDKSLPYAEFSYNNSYQASLQMAPFEALYGRKCRTPLFWDQTGERQLFGTEVLAEAEEKVRIIRERLRIAQSRQKSYADNRRRELTFEAGDYVYLRVTPLRGVHRFQTKGKLAPRFVGPYKILERRGEVAYQLELPSTMIGIHDVFHVSQLKKCLRVPEEQANSEHIDIQEDLTYVEKPVRILDTSERRTRNKVTRFCRVQWSHHSEEEATWEREDELKAAHPYLFTSSTESRGRDSV

SEQ ID NO: 18800 - protein, 1676 aa, Oryza sativa
  Clone ID: TF_OSC407849j.C1.p7.fg
MGCKMAGHPPNHHGEGMIDFVAELARMTLVVGYPNAPEYTTIPPLSGELPHRVRLEVHDYVAGENDTTFGHMCAVMRGLDRMHSDLHKATKALNDGKLMRIVALKDEIARLKRENAQLKGLPAPGGVRIRTTPRKTTTAPVRIQLAPRNPPPSAAPAAPPVPPVVPAAPAPAPASALSFAPASAARGPASGTGGCFFGMVYTRNGSRATGEGSNGEERTDGAHPHSDSGNGPPPLPENPTLAQVMAHQTQMMAAMMQQMQQQHQQMHQRMLQHAEQQHQQFGPPPPQSKLPEFLRVRPPTFSSTTNPMEANDWLHAIEKKLNLLQCNDQEKVAFATHQLQGPASAWWDNHMTTRPPGIEVTWAEFCRSFRKAQVPDGVVAQKKREFRALHQGNRTVTEYLHEFNRLARYAPEDVRTDAEKQEKFMAGLDDELTNQLISGDYADFERLVDKAIRQEDQRNKMDRKRKAAQFRAPQGSHQRSRFAPGQQGGPTTMIVRQHRPFNPSNFPQGTSGSQNHHGGQSNRGAAPRPPMAPAQSGPPAQAKKETGAKPGSCFNCGELGHFADKCPKPRRAGPRFIQARVNHASAEEAQAAPEVILGTFPINSIPAIVLFDSGATHYFISKKFVGMQGLIREELSTPMRVHTPGNSSTSVQFSPSITIEIQRSPFLANLILLESKDLDVILGMDWLTKFKGVIDCANRTVTLTNEKGETVVYKSPDSPKQGVSLNQIETEIPVDTVEKNLRKLEDIPIVCEYPEVFPEDLTTMPPKREIEFRIDLAPGTAPIYKRPYRMAANELAEVKKQVDEQLQKGYIRPSTSPWGAPVIFVEKKDKTKRMCVDYRALNEVTIKNKYPLPQIDDLFDQLKGAKVFSKIDLRSGYHQLRIREEDIPKTAFTTRYGLYECTVISFRLTNAPAFFMNLMNKVFMEFLDKFVVVFIDDILIYSKSEEEHEQHLRLVLEKLKEHQLYAKFSKCDFWLTEVKFLGHVITAQGVVVDPSNVESVTKWTPPKTVSQIRSFLGLAGYYRRFIENFSRIARPMTQLLKKDEKFKWTAECDKSFEELKKKLVSAPVLILPDQMKDFKVYCDASRHGLGCVLMQEGRVVAYASRQLRPHEGNYPTHDLELAAVVHALKIWRHYLIGNRCEVYTDHKSLKYIFTQPDLNLRQRRWLELIKDYDMSIHYHPGKANVVADALSRKSYCTALCIEGMCEELRQEFEHLNMGIVEHGFVAALEARPTLVDQVRAAQVNDSEIAELKKNMRVGKARDFHEDEHGTIWLGERLCVPDDKELKDLILTEAHQTQYSIHPGSTKMYQDLKEKFWWVSMRREIAEFVALCDVCQRVKAEHQRPAGLLQPLQIPEWKWEEIGMDFITGLPRTSSGHDSIWVVVDRLTKVAHFIPVHTTYTGKRLAELYLSRIMCLHGVPKKIVSDRGSQFTSKFWQKLQEELGTRLNFSTAYHPQTDGQTERVNQIMEDMLRACAVDFGGAWDKSLPYAEFSYNNSYQASLQMAPFEALYGQKCRTPLFWDQTGERQLFGTEVLAEAEEKVRIIRERLRIAQSRQKSYADNRRRELTFEAGDYVYLRVTPLRGVHRFQTKGKLAPCFVGPYKILERRGEVAYQLELPSNMIGIHDVFHVSQLKKCLRVPEEQADSEHIDIQEDLTYVEKPVRILDTSERRTRNKVT

SEQ ID NO: 18801 - protein, 1381 aa, Oryza sativa
  Clone ID: TF_OSC409054j.C1.p4.gm
MVYTRTGNRTTGEGSNGEERADGVHPNSDSGNGPPPLPENPTLAQVMAHQTQMMAAMMQQMQQQHQQMHQRMMQYAEQQHQQFGPPPPQSKLPEFLRVRPPTFSSTTNPMEANDWLHAIEKKLNLLQCNDQEKVAFATHQLQGPASAWWDNHMATRPPGTEVTWAEFCRSFRKAQVPDGVVAQKKREFRALHQGNRTVTEYLHEFNRLARYAPEDVRTDAEKQEKFMAGLDDELTNQLISGDYADFERLVDKAIRQEDQRNKMDRKRKAAQFRSNQGSQHRPRFTPGQQGGPTTMIVRQHRPFHSGNFHQGASGSQNHQGGQPNRGAAPRPPMAPAQSAQPAQAKKETGAKPGSCFNCGELGHFADKCPKPRRAGPRFIQARVNHASVEEAQAAPEVVLVTLTNEKGETVVYKSLVSPKKGASLNQIETEIPVDTEEKNLRKLEDIPIVCEYPEVFPEDLTTMPPKREIEFRIDLAPGTAPIYKRPYRMAANELAEVKKQVDEQLQKGYIRPSTSPWGAPVIFVEKKDKTKRMCVDYRALNEVTIKNKYPLPRIDDLFDQLKGAKVFSKIDLRSGYHQLRIREEDIPKTAFTTRYGLYECTVMSFGLTNAPAFFMNLMNKVFMEFLDKFVVVFIDNILIYSKSEEEHEQHLRLVLEKLKEHQLYAKFSKCDFWLTEVKFLGHVITAQGVAVDPSNVESVTKWTPPKTVSQIRSFLGLAGYYRRFIGNFSRIARPMTQLLKKDEKFKWTAECDKSFEELKRKLVSAPVLILPDQTKDFQVYCDASRHGLGCVLMQEGRVVAYASRQLRPHEGNYPTHDLELAAVVHALKIWRHYLIGNRCEVYTDHKSLKYIFTQPDLNLRQRRWLELIKDYDMSIHYHPGKANVVADALSRKSYCTALCIEGMCEELRQELEHLNMGIVEHGFVAALEARPTLVDQVRAAQVNDPEIAELKKNMRVGKARDFHEDEHGTIWMGERLCVPDDKELKDLILTEAHQTQYSIHPGSTKMYQDLKEKFWWVSMRREIAEFVALCDVCQRVKAEHQRPAGLLQPLQIPEWKWEEIGMDFITGLPRTSSGHDSIWVVVDRLTKEELGTRLNFSTAYHPQTDGQTERVNQILEDMLRACALDFGGAWDKSLPYAEFSYNNSYQASLQMAPFEALYGRKCRTPLFWDQTGERQLFGTEVLAEAEEKVRIIRERLRIAQSRQKSYADNRRRELTFEAGDYVYLRVTPLRGVHRFQTKGKLAPRFVGPYKILERRGEVAYQLELPSNMIGIHDVFHVSQLKKCLRVPEEQADSEHIDIQEDLTYVEKPAEAQPDSRPPARLLSGSPTDSDLSDAPVYFEIVAEARVGVMERGGPCDGLCRFRIHLGTRGDCPSPAGDGGET

SEQ ID NO: 18802 - protein, 1628 aa, Oryza sativa
  Clone ID: TF_OSC409192j.C1.p1.fg
MGCKMAGHPPNHRGEGMIDFVAELASMTLVVGYPNAPEYTTIPPLSGELPHRVRLEVHGYVGTCLANMVVKASGGSADHACQEAAYLMMARLQERHNYIFHDTAYRFHPRRASNDDVSTFRPTAGKNDTTFGHMCAVMRGLDRMHSDLHQATKALNDGKLMRIVALKDEIARLKRENAQLKGLPAPGGVRIRTTPRKTTTAPVRASLRPGTHLHQQLPQHLQFRPQFLQLQLQLPRPLSPSLQHQPPEVQPVAPEMVYTRNGSRATGEGSNGEERTDGAHPHSDSGNGPPPLPENPTLAQVMAHQTQMMAAMMQQMQQQHQQMHQRMLQHAEQQHQQFGPPPPQSKLPEFLREKVAFATHQLQGPASAWWDNHMATRPPGTEVTWAEFCRSFRKAQVPDGVVAQKKREFRALHQGNRTVTEYLHEFNRLARYAPEDVRTDAEKQEKFMVGLDDELTKQLISGDYADFERLVDKAIRQEDQRNKMDRKRKAAQFRAPQGSHQRPRFAPGQQGGPTTMIVRQYRPFNPSNFPQGASGSQNHHGGQPNRGAAPRPPMAPAQSGPPAQAKKETGAKPGSCFNCGELGHFADKCPKPRRAGPRFIQARVNHASAEEAQAAPEVVLGTFPVNSIPATVLFDSGATHSFISKKFVGMYGLRKEELSTPMRVHTPGNRSTSVSFSPSVLIEIQRSPFLANLILLESKDLDVILGMDWLTKFKGVIDCANHTVTLTNEKGETVVYKSLVSPKQGVSLNQIEAEIPVDTVEKNLRKLEDIPIVCEYPEVFPEDLTTMPPKREIEFRIDLAPGTAPIYKRPYRMAANELAEVKKQVDEQLQKGYIRPKKDKTKRMCVDYRALNEVTIKNKYPLPRIDDLFDQLKGAKVFSKIDLRSGYHQLRIREEDIPKTAFTTRYGLYECTVMSFGLTNAPAFFMNLMNKVFMEFLDKFVVVFIDDILIYSKSEEEHEQHLRLVLEKLKEHQLYAKFSKCDLWLTEVKFLGHVITAQGVAVDPSNVESVTKWTLPKIVSQIRSFLGLAGYYRRFIENFSRIARPMTQLLKKDEKFKWTAECDKSFEELKKKLVSAPVLILPDQMKDFQVYCDASRHGLGCVLMQEGRVVAYASRQLRPHEGNYPTHDLELAAVVHALKIWRHYLIGNRCEVYTDHKNYDMSIHYHPGKANVVADALSRKSYCTALCIKSMCEELRQEFEHLNVGIVEHGFVAALEARPTLVDQVRAAQVNDSEIAELKKNMRVGKARDFHEDEHGTIWLGERLCVPDDKELKDLILTEAHQTQYSIHPGSTKMYQDLKEKFWWVSMRREIAEFVALCDVCQRVKAEHQRPAGLLQSLQIPEWKWEEIGMDFITGLPRTSSGHDSIWIVVDRLTKVAHFIPVHTTYTGKRLAELYLSRIMCLHGVPKKIVSDRGSQFTSKFWQKLQEELGTRLNFSTAYHPQTDGQTERVNQILEDMLRACALDFGGAWDKSLPYAEFSYNNSYQASLQMAPFEALYGRKCRTPLFWDQIGERQLFGTEVLAEAEEKVRIIRERLRIAQSRQKSYADNRRRELTFEAGDYMYLRVTPLRGVHRFQTKGKLAPRFVGPYKILERRGEVAYQLELPSNMIGIHDVFHVSQLKKCLRVPEE

SEQ ID NO: 18803 - protein, 1142 aa, Oryza sativa
  Clone ID: TF_OSC409799j.C1.p20.fg
MVYTRNGSRATGEGSNGEERTDGVHPNSNSGNGPPPLPENPTLAQVRAHQGSHQRPRFTPGQQGGPTTMIVRQYRPFNPSNFPQGASGSQNHHGGQPNRGAAPRPPVAPAQSGPSAQAKKETGTKPGSCFNCGELGHFADKCPKPRCAGPRFVQARVNHASVEEAQAAPEVVLGTFPVNSIPATVLFDSGATHSFISKKFVGMHGLRKEELSTPMRVHTPGNSSTSVSFSPSVLIEIQRSPFLANLILLESKDLDVILGMDWLTKFKGVIDCANRTVTLTNEKGETVVYKSLVSPKQGVSLNQIEAEIPVDTVEKNLRKLEDIPIVCEYPEVFPEDLTTMPPKREIEFRIDLAPGTAPIYKRPYRMAANELAKVKKQVDEQLQKGYIRPSTSPWGAPVIFVEKKDKTKRMCVDYRALNEVTIKNKYPLPRIDDLFDQLKGAKVFSKIDLRSGYHQLRIREEDIPKTAFTTRYGLYECTVISFGLTNAPAFFMNLMNKVFMEFLDKFVVVFIDDILIYSKSEEEHEQHLRLVLEKLKEHQLYAKFSKCDFWLTEVKFLGHVITAQGVAVDPSNVESVIKWTPPKTVSQIRSFLVLAGYYRRFIENFSRIARPMTQLLKKDEKFKWTAECDKSFEELKKKLVSAPVLILPDQMKDFQVYCDASRHGLGCVLMQQGRVVAYASWQLRPHEGNYPTHDLELAAVVHALKIWRHYLIGNRCEVYTDHKSLKYIFTQPDLNLRQRRWLELIKDYDMSIHYHPGKANVVADALSRKSYCTALCIEGMSALEARPTLVDQVRAAQVNDPEIAELKKNMRVGKARDFLEDEHGTIWLGERLCVPDDKELKNLILTEAHQTQYSIHPGSTKMYQDLKEKFWWVSMRREIAEFVALYDVCQRVKAEHQRPAGLLQPLQIPEWKWEEIRMDFITGLPRTSSGHDSIWVVVDRLTKDQTGERQLFGTEVLAEAEEKVRTIRERLRIAQSRQKSYADNRRRELTFEAGDYVYLRVTPLRGVHRFQTKGKLAPRFVGPYKILERRGEVAYQLELPSNMIGIHDVFHVSQLKKCLRVPEEQADSEHIDIQEDLTYVEKPVRILDTSERRTRNKVTRFCRVQWSHHSEEEATWEREDELKAAHPHLFASSSESRDRDSV

SEQ ID NO: 18804 - protein, 1486 aa, Oryza sativa
  Clone ID: TF_OSC411348j.C1.p4.fg
MVYTRTGSRATGEGSNGEERADGVHPNGDSGNGPPPLPENPTLAQVMAHQTQMMAAMMQQMQQQHQQMHQRMMQHAEQQHQQFGPPPPQSKLPEFLRVRPPTFSSTTNPMEANDWLHAIEKKLNLLQCNDQEKVAFATHQLQGPASAWWDNHMATRPPGTEVTWAEFCRSFRKAQVPDGVVAQKKREFRALHQGNRTVTEYLHEFNRLARYAPEDVRTDAEKQEKFMAGLDDELTNQLISGDYADFERLVDKAIRQEDQRNKMDRKRKAAQFRSNQGSQHRPRFTPGQQGGPTTMIVRQHRPFHSSNFHQGASGSQNHQGGQPNRGAAPRPPMAPAQSAQPAQAKKETGAKPGSCFNCGELGHFADKCPKPRRAGLRFIQARVNHASAEEAQAAPEVVLGTFPVNSIPATVLFDSGATHSFISKKFVGMYGLRKEELSTPMRVHTPGNSSTSVSFSPSVLIEIQRSPFLANLILLESKDLDVILGMDWLTKFKGVIDCANRTVTLTNEKGETVVYKSLVSPKKGASLNQIETEIPVDTEEKNLRKLEDIPIVCEYPEVFPEDLTTMPPKREIEFRIDLAPGTAPIYKRPYRMAANELAEVKKQVDEQLQKGYIRPSTSPWGAPVIFVEKKDKTKRMCVDYRALNEVTIKNKYPLPRIDDLFDQLKGAKVFSKIDLRSGYHQLRIREEDIPKTAFTTRYGLYECTVMSFGLTNAPAFFMNLMNKVFMEFLDKFVVVFIDDILIYSKSEEEHEQHLRLVLEKLKEHQLYAKFSKCDFWLTEVKFLGHVITAQGVAVDPSNVESVTKWTPPKTVSQIRSFLGLAGYYRRFIENFSRIARPMTQLLKKDEKFKWTAECDKSFEELKRKLVSAPVLILPDQTKDFQVYCDASRHGLGCVLMQEGRVVAYASRQLRPHEGNYPTHDLELAAVVHALKIWRHYLIGNRCEVYTDHKSLKYIFTQPDLNLRQRRWLELIKDYDMSIHYHPGKANVVADALSRKSYCTALCIEGMCEELRQEFEHLNVGIVEHGFVAALEARPTLVDQVRAAQVNDPEIAELKKNMRVGKARDFHEDEHGTIWMGERLCVPDDKELKDLILTEAHQTQYSIHPGSTKMYQDLKEKFWWVSMRREIAEFVALCDVCQRVKAEHQRPAGLLQPLQIPEWKWEEIGMDFITGLPRTSSGHDSIWVVVDRLTKVAHFIPVHTTYTGKRLAELYLARIMCLHGVPKKIVSDRGSQFTSKFWQKLQEEMGTRLNFSTAYHPQTDGQTDYQASLQMAPFEALYGRKCRTPLFWDQTGERQLFGTEVLAEAEEKVRIIRERLRIAQSRQKSYADNRRRELTFEAGDYVYLRVTPLRGVHRFQTKGKLAPRFVGPYKILERRGEVAYQLELPSTMIGIHDVFHVSQLKKCLRVPEEQANSEHIDIQEDLTYVEKPVRILDTSERRTRNKVTRFCRVQWSHHSEEEATWEREDELKAAHPYLFTSSTESRGRDSV

SEQ ID NO: 18805 - protein, 1283 aa, Oryza sativa
  Clone ID: TF_OSC4117j.C1.p2.fg
MPMTRRSPHIPRLLFLHELESESFDSAATTLEWVVLEAIMVLLLTLPVLDRLPVRDDLRGAERAEDDDVDGALLPLPADGHLLERVDWPDRDPPTADLHPRQTTQGERKRGELGKRRVSYVWFQVQGEPADAQPSTDASCALKEEEGGVAMGAGEELKEGGGKAQGLWGAVEPEGDDLVDYRQDRQALAAILRAVPAEMLATLAVKETAQEAWEAIKTRRIGVQRVREVNAQQLRREFGDILFKDGETVDDFSMRIGGLANNLRTLGDNITEAEVVQKLLQVVPEHLQQIAISIETLLDVNEVSLEEVTGRLRSVEQRKQRKTAAASSQVDANGRLLFTEEEWLAKFRKAASLQDAAHSSGGNGDHRGRGRGKKDGGAPKEAQPKPANPGGRNPGNCKNCGKRGHWAKDCRSKPKAQQAYVAQEEDEEPALLLAKVQLDPPRPRVAAPTNVVSPPSAPRAPSPMGELAVVEARVFAQLDDGGEHDPAMWILDTGATNHMTGSRSAFAELDTVVTGTVRFGDGSVVRIEGRGTVLFSCRFGEHRGIAGVYYIPRLMANIVSLGQLDRSGSKVLIHHGVLRVWDPRGHLLVRVRRSDDCLYTINLYIDRPVCLAARSAEPAWRWHARSKDEAANAIKHFQARAEVESGRKLRALRTDRGGEFTSIEFGEYCANLGVGRQLTAPYSPQQNGVVEHRNQTIVATARSMLKAKGVPGRFWGEAMSTAVFLLNRSPTKSLDNQTPYEAWYGQRPAMHFRRTFGCRGHVKITKPGLKKLDDRSAPMVLLGYVQGSKAYRLYDPLELHVVSADEPASLAEADPNWRGAMQDELNAIVDNDTWSLTDLPHGHRAIGLKWVYKLKRDEQGAIGVDFDEVFAPVARLESVRLLLAVAAHQGWQVHHMDVKSAFLNGELLEEVYVSQPLGFVDDNHKNKVYRLHKALYGLRQAPRAWNAKLDSSLLSLGFHRSSSEHGVYTRTRGGRRLTVGVYVDDLIITGDHDDEIRSFKGEMMKLFKMSDLGHSDTTSASRLPRTVMGSRWGKPHMPARFLRRQDSRTAIPVRLPWSLVGSLRYLVNTRPDLAFSVGYVSRFMESPREDHLAAVRRILRYVAGTRCWGIRFGPGARCALPMLVGYSDSDLAGDPDERKSTSGQIFFVNGGPITWQSSKQKVVALSSCEAEYIAAAAATCQGVWLARLLAEVLGDEIAAPLLKVDNQSTISLIKNPVHHDRSKHIDVKYHYIRECAEKKLIEMMFVGTAEQLGDIFTKSLGRTRFQELRLKIGVCSLDKSGQT

SEQ ID NO: 18806 - protein, 1709 aa, Oryza sativa
  Clone ID: TF_OSC412583j.C1.p1.fg
MAGHPPNHRGEGMIDFVAELARMTLVVGYPNAPEYTTIPPLSGELPHRVRLEVHGYVGTCLANMAVEASGGTADHACQEAAYLMMARLRERHDYIFHDTAYRYHPRRAHGDGVSSFRPTAGENDTTFGHMCAVMRGLDRMHSDLHKATKALNDGKLMRIVALKDEIARLKKENAQLKGLPAPGGVRIRTTPRKRTTAPVRIQLAPRNPPPAAAAPAVPPAPAPAPAPAPAFTLSFAPASAARGPASGTGGCLFGMVYTRTGNRTTGEGSNGEERADGVHPNSDSGNGPPPLPENPTLAQVMAHQTQMMAAMMQQMQQQHQQMHQRMMQHAEQQHQQFGPPPPQSKLPEFLRVRPPTFSSTTNPMEANDWLHAIEKKLNLLQCNDQEKVAFATHQLQGPASAWWDNHMATRPPGTEVTWAEFCRSFRKAQVPDGVVAQKKREFRALHQGNRTVTEYLHEFNRLARYAPEDVRTDAEKQEKFMAGLDDELTNQLISGDYADFERLVDKAIRQEDQRNKMDRKRKAAQFRAPQGSHQRPRLTPGQQGGPTTMIVRQHRPFNPSNFHQGTSGSQNHHGGQPNRGTAPRPPMAPAQSGQPAQAKKETGAKPGSCFNCGELGHFADKCPKPRRAGPRFIQARVNHASAEEAQAAPEVVLGTFPVNSIPATVLFDSGATHSFISKKFVGMHGLIREELSTPMRVHTPGNSSTSVQFSPSITIEIQRSPFLANLILLESKDLDVILGMDWLTKFKGVIDCASRTVTLTNEKGETVVYKSLVSPKKGVSLNQIETEIPVDTVEKNLRKLEDIPIVCEYPEVFPEDLTTMPPKREIEFRIDLAPGTAPIYKRPYRMAANEVAEVKKQVDEQLQKGYIRPSTSPWGAPVIFVEKKDKTKRMCVDYRALNEVTIKNKYPLPRIDDLFDQLKGARVFSKIDLRSGYHQLRIWEEDIPKTAFTTRYGLYECTVMSFGLTNAPAFFMNLMNKVFMEFLDKFVVVFIDDILIYSKSEEEHEQHLRLVLEKLKEHQLYAKFSKCDFWLTEVKFLGHVITAQGVAVDPSNVESVTKWTPPKTVSQIRSFLGLAGYYRRFIENFSRIARPMTQLLKKDEKFKWTAECDKSFEELKKKLVSAPVLILPDPTKDFQVYCDASRHGLGCVLMQEGRVVAYASRQLRPHEGNYPTHDLELAAVVHALKIWRHYLIGNRCEVYTDHKSLKYIFTQPDLNLRQRRWLELIKDYDMSIHYHPGKANVVADALSRKSYCTALCIEGMCEELRQEFEHLNVGIVEHGFVAALEARPTLVDQVRAAQVNDSEIAELKKNMRVGKARDFHEDEHGTIWMGERLCVPDDKELKDLILTEAHQTQYSIHPGSTKMYQDIKEKFWWVSMRREIAEFVALCDVCQRVKAEHQRPAGLLQPLQIPEWKWEEIGMDFITGLPRTSSGHDSIWVVVDRLTKVAHFIPVHTTYTGKRLAELYLARIMCLHGVPRKIVSDRGSQFTSKFWQKLQEELGTRLNFSTAYHPQTDGERQLFGTEVLTEAEEKVRIIRERLRIAQSRQKSYADNRRRELTFEAGDYVYLRVTPLRGVHRFQTKGKLAPRFVGPYKILERRGEVAYQLELPSNMIGIHDVFHVSQLKKCLRVPEEQADSEHIDIQEDLTYVEKPVRILDTSERRTRNKVTKFCRVQWSHHSEEEATWEREDELKAAHPHLFTSSSESRGRDSV

SEQ ID NO: 18807 - protein, 1815 aa, Oryza sativa
  unsure (1)..(1815): unsure at all Xaa locations
  Clone ID: TF_OSC413746j.C1.p1.np
MAGHPPNHRGEGMIDFVAELARMTLVVGYPNAPEYTTVPPLSGELPHRVRLEVHGYVGTCLANMVVEASGGTADHACXEAAYLMMARLRERHNYIFHDTAYRFHPLRASGDDVSTFRPTAGENDTTFGHMCAVMRGLDRMHSDLHKASKALNDGKLMRIVALKDEIARLKRENAQLKGLPAPGGVRIRTTPRKTTTAPVRIQLAPRNPPPSAAPAAPPIPPVAPVVPVAPAPAPAPTSALSFAPASAARGPASGNGGWLSATPNGSRDRSSSGSEPGSGETYLPGSRSRFEGPDLFLQMVYTRNGSRATGEGSNGEEHTDGVHPNSDSGNGPPPLPENPTLAQVMAHQTQMMAAMMQQMQQQHQXMHQRMLQHAEQQHQQFGPPPPQSKLPEFLRVRPPTFSSTTNPMEANDWLHAIEKKLNLLQCNDQEKVAFATHQLQGLASAWWDNHMATRPPGTEVTWAEFCRSFRKAQVPDGVVAQKKREFRALHQGNRTVTEYLHEFNRLARYAPEDVRTDAEKQEKFLAGLDDELTNQLISGDYADFERLVDKAIRQEDQRNKMDRKRKAAQFRAHQGSHQRPRFATGQQGGPTTMIVRQYRPFNPSNFPQGASGSQNHHGGQPNRGAAPRPPVAPAQSGPSAQAKKETGTKPGSCFNCGELGHFADKCPKPRRAGLRFVQARVNHASAEEAQAAPEVVLGTFPVNSIPATVLFDSGATHSFISKKFVGMHGLIREELSTPMRVHTPGNSSTSVQFSPSITIEIQRSPFLANLILLEFKDLDVILGMDWLTKFKGVIDCANRTVTLTNEKGETVVYKSPDSPKQGVSLNQIRRKPVVTVEKNLRKLEDIPIVCEYPEVFPEDLTTMPPKREIEFRIDLAPGTAPIYKRPYRMAANELAEVKKQVDEQLQKGYIRPSTSPWGAPVIFVEKKDKTKRMCVDYRALNEVTIKNKYPLPRIDDLFDQLKGAKVFSKIDLRSRYHQLRIREEDIPKTAFTTRYGLYECTVMSFGLTNAPTFFMNLMNKVFMEFLDKFVVVFIDDLLIYSKSEEEHEQHLRLVLEKLKEHQLYAKFSKCDFWLTEVKFLGHVITAQGVAVDPSNVESVTKWTPPKTVSQIXSFLGLAGYYSRFIENFSRIARPMKMKDEKFKWTAECDKSFEELKKKLVSAPVLILPDQMKDFQVYCDASRHGLGCVLMQEGRVVAYASRHLSPHEGNYPTHDLELAAVVHALKIWRHYLIGNRCEVYTDHKSLKYIFTQPDLNLRQRRWLELIKDYDMSIHYHPGKVNVVADALSRKSYCTTLCIEGMCEELRQEFEHLNVGIVEHGFIAALEARPTLVDQVRAGQVNDPEIAELKKNMRVEKARDFLEDEHGTIWLGERLCVLDDKELKDLILTEAHQTQYSIHPGSTKMYQDLKEKFWWVSMRREIAEFVALCDVCQRVKAEHQRPAGLLQPLQILEWKWEEIGMDFITGLPRTSSGHDSIXVVVDRLTKVAHFIPVHTTYTGKRLAELYLSRIICLHGVPKKIVSDRGSQFTSKFWQKLQEELGTRLNFSTAYHPQTNGQTERVNQILEDMLRACALDFGGAWDKSLPYAEFSYNNSYQASLQMVPFEALYGRKCRTPLFWDQAGERQLFGIEVLAEAEEKVRTIRERLRIAQSRQKSYADNRRRELTFEAGDYVYLLVTPLRGVHRFQTKGKLAPRFVGPYKILERRGEVAYQLELPSNMIGIHDVFHVSQLKKCLRVPEEQTDSEHIDIQEDLTYVEKPVRILDTSERRTRNKVTRFCRVQWSHHPEEEATWEREDELKAAHPHLFASSSESRGRDSV

SEQ ID NO: 18808 - protein, 1672 aa, Oryza sativa
  Clone ID: TF_OSC414115j.C1.p1.fg
MVVEASGGTADHACQEAAYLMMARLRERHNYIFHDMAYRFHPRRASGDDVSTFRPTTGQNDTTFGHMCAVMSGLDRMHSDLHKATKALNDGKLMRIVALMDEIARLKRENAQLKGLPAPGGVRIRTTPRKTTTAPVRIQLAPRNPPPSAAPAAPPVPPAVPAAPAPAPASALSFAPASAARGPASGNGGCLLGMVYTRNGSRATGEGSNGEERTDGAHPHSDSGNGPPPLPENPTLVQVMAHQTQMMAAMMQHQHQQMHQRMLQHAEQQHQQFGPPPPQSKLPEFLRVRPPTFSSTTNPMEANDWLHAIEKKLNLLQCNDQEKVAFATHQLQGPASAWWDNHMATRPPGTEVTWVEFCRSFRKAQVPDGVVAQKKREFRALHQGNRTVTEYLHEFNRLARYAPEDVRTDAEKQEKFMAGLDDELTNQLISGDYADVERLVDKAIRQEDQRNKMDRKRKAAQFRAPQGSHQRPRFAPRQQGGPTTMIVRQHRPFNPSNFPQGASGSQNHHGGQSNRGAAPRPPMAPAQSGPPAQAKKETGAKPGSCFNCGELGHFADKCPKPRRAGPRFIQARVNHASAEEAQAAPEVVLGTFSINSIPATVLFDSGATHSFISKKFVGMHGLIREELSTPMRVHTPGNSSTSVQFSPSITIEIQRSPFLANLILLESKDLDVILGMDWLTKFKGVIDCANRTVTLTNEKGETVVYKSLVSPKQGVSLNQIEAEIPVDTVEKNLRKLEDIPIVCEYPEVFLEDLTTMPPKREIDSGLTWHREPPQFTRDQKKDKTKRMCVDYRALNEVTIKNKYPLPRIDDLFDQLKGAKVFSKIDLRSGYHQLRIREEDIPKTAFTTRYGLYECTVMSFGLTNAPAFFMNLMNKVLMEFLDKFVVVFIDDILIYSTSEEEHEQHLRLVLEKLKEHQLYAKFSKCDFWLTEVKFLGHVITAQGVAVDPSNVESVTKWTPPKTVSQIRSFLGLAGYYRRFIENFSRIARPMTQLLKKDEKFKWTTECDKSFEELKKKLVSAPVLILPDQMKDFQVYCDASRHGLGCVLMQEGIVVAYASRQLRPHEGNYPTHDLELAAVVHALKIWRHYLIGNRCEVYTDHKSLKYIFTQPDLNLRQRRWLELIKDYDMSIHYHPGKANVVADALSRKSYCTALCIEGMCEELWQEFEHLNVGIVEHGFVAALEARPTLVDQVRAAQVNDSEIAELKKNMRVGKARDFHEDEHGTIWLGERLCVPDDKELKDLILTEAHQTQYSIHPGSTKMYQDLKEKFWWVSMRREIAEFVALCDVCQRVKAEHQRPAGLLQPLQILEWKWEEIGMDFITGLPRTSSGHDSIWVVVDRLTKVAHFIPVHTTYTGKRLAELYLSRIMCLHGVPKKIVSDRGSQFTSKFWQKLQEELGTRLNFSTAYHPQTDGQTERVNQILEDMLRACALDFGGAWDKSLPYAEFSYNNSYQASLQMAPFEALYGRKCRTPLFWDQTGERQLFGTEVLAEAEEKVRIIRERLRIAQSRQKSYADNRRRELTFEAGDYVYLRVTPLRGVHRFQTKGKLAPRFVGPYKILERRGEVAYQLELPSNMIGIHDVFHVSQLKKCLRVPEEQADSKHIDIQEDLTYVEKPIRILDTSERRTRNKVNRFCRVQWSHHSEEEATWEREDELKAAHPHLFTSSSESRGRDSV

SEQ ID NO: 18809 - protein, 541 aa, Oryza sativa
  Clone ID: TF_OSC414616j.C1.p3.fg
MAQLGRLCAVLCPSRAAPGRPIGLGRFGPSVPVDRWWTASVVPGFNTQNSLEIWVKFLGVTKWYQSQLDCRLSQMVKPCQTWRRNRQLHACPEVKSSLKLRAAKSEKQLVSMRDNFNGSGSRQFHGSTQLNSISFPRQPLKDQPQSQVMANQTQTVEELLRQMRHRSLKITAAKLPSDQREVSATCYDCGEQGHYIRNCPWKVFTRSPEKDEKQCPGSNQAPSQSTNKKDGTLQHSSGANRKGTDHVPKDYQRNSVLVMTKKEQGTTVQPFHQPMAVDDISHNPSALPPILAPVDANHGRSNVARDVHKSLLVPVSAAKVHNQKPAPQDQASRFCRNCRKPGHCFSDCPLPRAAKAVRRDSQVISTAHDPNRHLNVQPPPQRIIVKGTVRGRIVPPAIVSSLQHQRQQGKQCKENNSSLQLQRGSMLLHQHPQQVSSAPGRSTVVSSSNAPRIAPIRRPIDKPPLGNPASKKSHLLRQSRELLLHHRRPTSRATFPVRLQLVGTKGTSQSGLNDGSNNSSSQDLYFSGLKGSSNQQQSTMV

SEQ ID NO: 18810 - protein, 1802 aa, Oryza sativa
  Clone ID: TF_OSC416746j.C1.p17.fg
MAGHPPNHRGEGMIDFVAELARMTLVVGYPDAPEYTTIPPLSGELPHRVRLEVHGYVGTCLANMAVEASGGTADHACQEAAYLMMARLRERHNYIFHDTAYRYHPSRAHGDGVSSFRPTAGENDTTFGHMCAVMRGLDRMHSDLHKATKALNDGKLMRIVALKDEVARLKKENAQLKGLPAPGGVRIRTTPRKRTTAPVRIQLAPRNPPPPAAPAAAPAPPAVPAAPAPAPAFTLSFAPASAAGGSASGTGGWLSATPSGSGETDPSDSRSRSEGPGCLFGMVYTRTGNRATGEGSNGEERADGVHPNGDSGNGPPPLQENPTLAQVMAHQTQMMAAMMQQMQHQHQQMHQRMMQHAEQQHQQFGPPPPQSKLPEFLRVRPPTFSSTTNPMEANDWLHAIEKKLNLLQCNDQEKVAFATHQLQGPASAWWDNHMATRPPGTEVTWAEFCRSFRKAQVPDGVVAQKKREFRALHQGNRTVTEYLHEFNRLARYAPEDVRTDAEKQEKFMAGLDDELTNQLISGDYADFERLVDKAIRQEDQRNKMDRKRKAAQFRSNQGSQHRPRFTPGQQGGPTTMIVRQHRPFNSSNFHQGTSGSQNHHGSQPNRGAAPRPPMAPAQSGQPAQAKKETGAKPGSCFNCGELGHFADKCPKPRRAGPRFIQARVNHASAEEAQAAPEVVLGTFPVNSIPATVLFDSGATHSFISKKFVGMHGLIREELSTPMRVHTPGNSSTSVQFSPSITIEIQRSPFLANLILLDSKGLDVILGMDWLTKFKGVIDCANRTVTLTNEKGETVVYKSLVSPRKGVSLNQIETEIPVDTVEKNSRKLEDIPIVCEYPEVFPEDLTTMPPKREIEFRIDLAPGTAPIYKRPYRMAANELAEVKKQVDEQLQKGYIRPSTSPWGAPVIFVEKKDKTKRMCVDYRALNEVTIKNKYPLPRIDDLFDQLKGAKVFSKIDLRSGYHQLRIREEDIPKTAFTTRYGLYECTVMSFGLTNAPAFFMNLMNKVFMEFLDKFVVVFIDDILIYSKSEEEHEQHLRLVLEKLKEHQLYAKFSKCDFWLTEVKFLGHVITAQGVAVDPSNVESVTKWTPPKTVSQIRSFLGLAGYYRRFIENFSRIARPMTQLLKKDEKFKWTAECDKSFEELKKKLVSAPVLILPDPTKDFQVYCDASRHGLGCVLMQEGRVVAYASRQLRPHEGNYPTHDLELAAVVHALKIWRHYLIGNRCEVYTDHKSLKYIFTQPDLNLRQRRWLELIKDYDMSIHYHPGKANVVADALSRKSYCTALCIEGMCEELRQELEHLNVGIVEHGFVAALEARPTLVDQVRAAQVNDPEIAELKKNMRVGKARDFHEDEHGTIWMGERLCVPDDKELKDLILTEAHQTQYSIHPGSTKMYQDLKEKFWWVSMRREIAEFVALCDVCQRVKAEHQRPAGLLQPLQIPEWKWEEIGMDFITGLPRTSSGHDSIWVVVDRLTKVAHFIPVHTTYTGKRLAELYLARIMCLHGVPKKIVSDRGSQFTSKFWQKLQEELGTRLNFSTAYHPQTDGQTERVNQILEDMLRACALDFGGAWDKSLPYAEFSYNNSYQASLQMAPFEALYGRKCRTPLFWDQTGERQLFGTEVLAEAEEKVRIIRERLRIAQSRQKSYADNRRRELTFEAGDYVYLRVTPLRGVHRFQTKGKLAPRFVGPYKILERRGEVAYQLELPSNMIGIHDVFHVSQLKKCLRVPEEQADSEHIDIQEDLTYVEKPVRILDTSERRTRNKVTRFCRVQWSHHSEEEATWEREDELKAAHPHLFTSSSESRGRDSV

SEQ ID NO: 18811 - protein, 1664 aa, Oryza sativa
  Clone ID: TF_OSC418148j.C1.p15.fg
MATWGLASLTWRVEASGGTADHACQEAAYLMMARLRERHNYIFHDTAYRYHPSRANGDGVSSFRPTAGENDTTFGHMCAVMRGLDRMHSDLHKATKALNDGKLMRIVALKDEIARLKKENAQLKGLPAPGGVRIRTTPRKRTTAPVRIQLAPRNPPPPAAPAAPAVPAVPPAPAPAPAPAFTLSFAPASAARGPASGTGGWLSATPSGSDETDLSGSRSRSEGPGCLFGMVYTRTGNRTTGEGSNGEERADGVHPNSDSGNGPPPLPENPTLAQVMAHQTQMMAAMMQQMQQQHQQMHQRMMQHAEQQHQQFGPPPPQSKLPEFLRVRPPTFSSTTNPMEANDWLHAIEKKLNLLQCNDQEKVAFATHQLQGPASAWWDNHMATRPPGTEVTWAEFCRSFRKAQVPDGVVAQKKREFRALHQGNRTVTEYLHEFNRLARYAPEDVRTDAEKQEKFMAGLDDELTNQLISGDYADFERLVDKAIRQEDQRNKMDRKRKAAQFRAHQGSHQRPRFTPGQQGGPTTMIVRQHRPFNPSNFHQGSSGSQNHHGSQPNRGTAPRPPMAPAQSGQPAQAKKETGAKPGSCFNCGELGHFADKCPKPRRAGPRFIQARVNHASAEEAQAAPEVVLGTFPVNSIPATVLFDSGATHSFISKKFVGMHGLIREELSTPMRVHTPGNSSTSVQFSPSITIEIQRSPFLANLILLESKDLDVILGMDWLTKFKGVIDCANRTVTLTNEKGETVVYKSLVSPKKGASLNQIETKIPVDTEEKNLRKLEDIPIVCEYPEVFPEDLTTMPPKREIEFRIDLAPGTAPIYKRPYRMAANELAEVKKQVDEQLQKGYIRPSTSPWGAPVIFVEKKDKTKRMCVDYRALNEVTIKNKYPLPRIDDLFDQLKGAKVFSKIDLRSGYHQLRIREEDIPKTAFTTRYGLYECTVMSFGLTNAPAFFMNLMNKVFMEFLDKFVVVFIDDILIYSKSEEEHEQHLRLVLEKLKEHQLYAKFSKCDFWLTEVKFLGHVITAQTKDFQVYCDASRHGLGCVLMQEGRVVAYASRQLRPHEGNYPTHDLELAAVVHALKIWRHYLVGNRCEVYTDHKSLKYIFTQPDLNLRQRRWLELIKDYDMSIHYHPGKANVVADALSRKSYCTALCIEGMCEELRQELEHLNMGIVEHGFVAALEARPTLVDQVRAAQVNDPEIAELKKNMRVGKARDFLEDEHGTIWMGERLCVPDDKELKDLILTEAHQTQYSIHPGSTKMYQDLKEKFWWVSMRREIAEFVALCDVCQRVKAEHQRPAGLLQPLQIPEWKWEEIGMDFITGLPRTSSGHDSIWVVVDRLTKVAHFIPVHTTYTGKRLAELYLARIMCLHGVPKKIASDRGSQFTSKFWQKLQEELGTRLNFSTAYHPQTDGQTERVNQILEDMLRACALDFGGAWDKSLPYAEFSYNNSYQASLQMAPFEALYGRKCRTPLFWDQTGERQLFGTEVLAEAEEKVRIIRERLRIAQSRQKSYADNRRRELTFEAGDYVYLRVTPLRGVHRFQTKGKLAPRFVGPYKILERRGEVAYQLELPSNMIGIHDVFHVSQLKKCLRVPEEQADSEHIDIQEDLTYVEKPVRILDTSERRTRNKVTRFCRVQWSHHSEEEATWEREDELKAAHPHLFTSSSESRGRDSV

SEQ ID NO: 18812 - protein, 1777 aa, Oryza sativa
  Clone ID: TF_OSC420097j.C1.p7.fg
MAGHPPNHRGEGMIDFVAELARMTLVVGYPNAPEYTTIPPLSGELPHRVRLEVHGYVGTCLANMAVEASGGTADHACQEAAYLMMARIRERHDYIFHDTAYRYHPRRAHGDGVSSFRPTAGENDTTFGHMCAVMRGLDRMHSDLHKATKALNDGKLMRIVALKDEIARLKKENAQLKGLPAPGGVRIRTTPRKTTTAPVRIQLAPRNPPPPAAPAAPSVPPAVPAAPAPAPAFTLSFAPASAARGSASGTGGCLFGMVYTRNGSRATGEGSNGEERADGVHPNSDSGNGPPPLPENPTLAQVMAHQTQMMAAMMQQMQQQHQQMHQRMMQHAEQQHQQFGPPPPQSKLPEFLRVRPPTFSSTTNPMEANDWLHAIEKKLNLLQCNDQEKVAFATHQLQGPASAWWDNHMATRPPGTEVTWAEFCRSFRKAQVPDGVVAQKKREFRALHQGNRTVTEYLHEFNRLARYAPEDVRTDAEKQEKFMAGLDDELTNQLISGDYADFERLVDKAIRQEDQRNKMDRKRKAAQFRAHQGSHQRPRFTPGQQGGPTTMIVRQHRPFNPSNFHQGTSGSQNHHGSQPNRGAAPRPSVAPAQSGQPAQAKKETGAKPGSCFNCGELGHFADKCPKPRRAGPRFIQARVNHASAEEAQAAPEVVLGTFPVNSIPATVLFDSGATHSFISKKFVGMHGLIREELSTPMRVHTPGNSSTSVQFSPSITIEIQRSPFLANLILLESKDLDVILGMDWLTKFKGVIDCASRTVTLTNEKGETVVYKSLVSPKKGVSLNQIETEIPVDTVEKNLRKLEDIPIVCEYPEVFPEDLTTMPPKREIEFRIDLAPGTAPIYKRPYRMAANELAEVKKQVDEQLQKGYIRPSTSPWGAPVIFVEKKDKTKRMCVDYRALNEVTIKNKYPLPRIDDLFDQLKGAKVFSKIDLRSGYHQLRIREEDIPKTAFTTRYGLYECTVMSFGLTNAPAFFMNLMNKVFMEFLDKFVVVFIDDILIYSKSKEEHEQHLRLVLEKLKEHQLYAKFSKCDFWLTEVKFLGHVITAQGVAVDPSNVESVTKWTPPKTVSQIRSFLGLAGYYRRFIENFSRIARPMTQLLKKDEKFKWTAECDKSFEELKKKLVSAPVLILPDPTKDFQVYCDASRHGLGCVLMQEGRVVAYASRQLRPHEGNYPTHDLELAAVVHALKIWRHYLIGNRCEVYTDHKSLKYIFTQPDLNLRQRRWLELIKDYDMSIHYHPGKANVVADALSRKSYCTALCIEGMCEELRQEFEHLNMGIVEHGFVAALEARPTLVDQVRAAQVNDSEIAELKKNMRVGKARDFHEDEHGTIWMGERLCVPDDKELKDLILTEAHQTQYSIHPGSTKMYQDLKEKFWWVSMRREIAEFVALCDVCQRVKAEHQRPAGLLQPLQIPEWKWEEIGMDFITGLPRTSSGHDSIWVVVDRLTKVAHFIPVHTTYTGKRLAELYLSRIMCLHGVPKKIVSDRGSQFTSKFWQKLQEEMGTRLNFSTAYHPQTDGQTERVNQILEDMLRACALDFGGAWDKSLPYAEFSYNNSYQASLQMAPFEALYGRKCRTPLFWDQTGERQLFGTKVLAEAEEKVRIIRERLRIAQSRQKSYADNRRRELTFEAGDYVYLRVTPLRGVHRFQTKGKLAPRFVGPYKILERRGEVAYQLELPSNMIGIHDVFHVSQLKKCLRVPEEQADSEHIDIQEDLTYVEKPVRILDTSERRTRNKVTRFCRVQWSHHSEEEATWEREDELKAAHPHLFTSSSESRGRDSV

SEQ ID NO: 18813 - protein, 1513 aa, Oryza sativa
  unsure (1)..(1513): unsure at all Xaa locations
  Clone ID: TF_OSC4211j.C1.p3.np
RNGXRRTSGGDGPKARPGGPSPRSDSGNGPPPLPENPTLAQVMAHQTQMMAAMIQQMQQQHQQMHQRMMQHVEQQHQQFGPPPPQSKLPEFLRVRPPTFSSTTNPMEANDWLHAIEKKLNLLQCNDQEKVAFATHQLQGPASAWWDNHMATRPPGTEVTWAEFCRSLRKAQVPDGVVAQKKREFRALHQGNRTVTQYLHEFNRLARYAPEDVRTDAEKQEKFMAGLDDELTNQLISGDYADFERLVDKAIRQEDQRNKIDRKRKAAQFRAPQGSHQRPRFTPGQQGGPTTMIVRQHRPFNPSNFPQGTSGSQNHHGGQPNRGAAPRPSVAPAQSGQPAQAKKETGAKPGSCFNCGELGHFADKCPKPRRAGPRFIQARVNHASAEEAQTAPEVVLGTFPVNSIPATVLFDSGATHSFISKKFVGRYGLRKEELSTPMRVHTPGNSSTSVSFSPSVLIEIQRSPFLANLILLESKDLDVILGMDWLTKFKGVIDCANRTVTLTNEKGETVVYKSLVSPKKGVSLNQIETEIPVDTVEKNLRKLEDIPIVCEYPEVFPEDLTTMPPKREIEFRIDLAPGTAPIYKRPYRMAANELAEVKKQVDEQLQKGYIRPSTSPWGAPVIFVEKKDKTKRMCVDYRALNEVTIKNKYPLPRIDDLFDQLKGAKVFSKIDLRSGYHQLRIREEDIPKTAFTTRYGLYECTVMSFGLTNAPAFFMNLMNKVFMEFLDKFVVVFIDDILIYSKSEEEHEQHLRLVLEKLKEHQLYAKFSKCDFWLTEVKFLGHVITAQGVAVDPSNVESVTKWTPPKTVSQIRSFLGLAGYYRRFIENFSRIARPMTQLLKKDEKFKWTAECDKSFEELKKKLVSAPVLILPDPMKDFQVYCDASRHGLGCVLMQEDRVVAYASRQLRPHEGNYPTHDLELAAVVHALKIWRHYLIGNRCEVYTDHKSLKYIFTQPDLNLRQRRWLELIKDYDMSIHYHPGKANVVADALSRKSYCTALCIEGMCEELRQEFEHLNMGIVEHGFVAALEARPTLVDQVRAAQVNDSEIAELKKNMRVGKARDFHEDEHGTIWMGERLCVPDDKELKDLILTEAHQTQYSIHPGSTKMYQDLKEKFWWVSMRREIAEFVALCDVCQRVKAEHQRPAGLLQPLQIPEWKWEEIGMDFITGLPRTSSGHDLIWVVVDRLTKVAHFIPVHTTYTGKRLAELYLSRIMCLHGVPKKIVSDRGSQFTSKFWQKLQEELGTRLNFSTAYHPQTDGQTERVNQILEDMLRACALDFGGAWDKSLPYAEFSYNNSYQASLQMAPFEALYGRKCRTPLFWDQTGERQLFGTEVLAEAEEKVRIIRERLRIAQSRQKSYADNRRRELTFEAGDYVYLRVTPLRGVHRFQTKGKLAPRFVGPYKILERRGEVAYQLELPSNMIGIHDVFHVSQLKKCLRVPEEQADSKHIDIQEDLTYVEKPVRILDTSERRTRNKVTRFCRVQWSHHSEEEATWEREDELKAAHPHLFTSSSESRG

SEQ ID NO: 18814 - protein, 1315 aa, Oryza sativa
  unsure (1)..(1315): unsure at all Xaa locations
  Clone ID: TF_OSC5112j.C1.p1.np
MAEHPPNHRGEGMGDFVAELARMTLVVGYPNAPEYTTVPPLSGELPHRVRLEVHGYMGTCLAKMVVEASGGTADHACQEAAYLMMARLRERHNYIFHDTAYRFHPRRASGSDVSSFRPTAGENDTTFGHMCAVMRGMDRMHSDLHKASKALNDGKLVRIIALKDEIARLKRENAQLKGLPAPGGVRIRTTPRKSTTAPVRVQLAPRNPPPSAAPAAPAVPAAPPVPPAAPAVPAAPAPAPAPVPMSAPASALSFAPASAVRGPASGNGGCFLQMVYTRNGTRTTSEGSNGEERADGVHPNSDSGNGPPPFPENLTLAQVMAHQTQMMAAMMQQMQQQHQQMHQRMLQHAEQQHQQFGPPPPQSKLPEFLRVRPPTFSSTTNPMEANDWLHAIEKKLNLLQCNDQEKVAFATHQLQGPASAWWDNHVATRPPGTEVTWAEFCRSFRKAQVPDGVVAQKKRGFRALHQGNRTVTEYLHEFNRLARYAPEDVCTDAEKQEKFLAGLDDELTNQLISGDYADFERLVDKAIRQEDQRNKMDRKRKAAQFRSNQGNHQRPRFTLGQQGGPTTMIVRQHRTFKSSNFHQGASGSQNHHGGQPNHGAAPHPPVAPAQSGPSAQAKETGAKPGSCFNCGELGHFADKCPKPRRAGSKFVQARVNHASAKEAQAAPEVVLGTFPVNSIPATVLFDSGATHSFISKKFVRMHGLIREELSTPMRVHTPGNSSTSVQFSPSITIEIQRSPFLANIILLDSKDLDVILGMDWLTKFKGVIDCANRTVTLTNEKGETIVYKSLVSPKQGVSLNQIEAETPVVTEGMNSRKLEEIPIVCEYPEVFPKDLTTMPPKREIEFRIDLAPGTAPIYKRPYRMAANELAEVKKQVDEQLQKGYIRPSTSPWGAPVIFVEKKDKTKRMCVDYRALNEVTIKNKYPLPRIDDLFDQLKGAKVFSKIDLRSGYHQLRIREEDIPKTAFTTRYGLHECTVMSFGLTNAPAFFMNLMNKVFMEFLDKFVVVFIDDILIYSKSEEEHEQHLRLVLEKLKEHQLYAKFSKCDFWLTEVKFLGHVIIAQGMAVDPSNVEVIIAQGMAVDPSNVESVTKWTPPKTVSQIRSFLRLAGYYRQFIENFSRIARPMTQLLKKDEKFKWTAECDKSFEELKKKLVSAPVLILPDQMKDFQVYCDASRHGLGCVLMQEGRVVAYASRXSRPHEGNYPTHDLELAAVVHALKIWRHYLIGNRCEVYTDHKSLKYIFTQPDLNLRQRRWLELIKDYDMSIHYHPGKANVVADALSRKSYCTALCIEGMCEELQQEFKRLNVGIVEHGFIA

SEQ ID NO: 18815 - protein, 1825 aa, Oryza sativa
  Clone ID: TF_OSC5884j.C1.p1.fg
MERPKSPLNPFHCICSLQLDFVPGKWGSVLMVQGKNLGRSFKMAGHPPNHRGEGMIDFVAELARMTLVVGYPDAPEYTTIPPLSGELPHRVRLEVHGYVGTCLANMAVEASGGTADHACQEAAYLMMARLRERHDYIFHDTAYRYHPRRAHGDGVSSFRPTAGENDTTFGHMCAVMRGLDRMHSDLHKATKALNDGKLMRIVALKDEIARLKKENAQLKGLPAPGGVRIRTTPRKRTTAPVRIQLAPRNPPPPAAPAAPPVPPAAPAVPAVPPAPAPAPAFTLSFAPASAARGPASGTGGCLFGMVYTRTGNRTTGEGSNGEERVDGVHPNSDSGNGPPPLPENPTLAQVMAHQTQMMAAMMQQMQQQHQQMHQRMMQHAEQQHQQFGPPPPQSKLPEFLRVRPPTFSSTTNPMEANDWIHAIEKKLNLLQCNEQEKVAFATHQLQGPASAWWDNHMATRPPGTEVTWAEFCRSFRKAQVPDGVVAQKKREFRALHQGNRTVTEYLHEFNRLARYAPEDVRTDAEKQEKFMAGLDDELTNQLISGDYADFERLVDKAIRQEDQRNKMDRKRKAAQFRSNQGSQHRPRLTPGQQGGPTTMIVRQHRPFNPSNFHQGTSGSQNHHGSQPNRGTAPRPPMAPAQSGQPAQAKKETGAKPGSCFNCGELGHFADKCPKPRRAGPRFIQARVNHASAEEAQAAPEVVLGTFPVNSIPATVLFDSGATHSFISKKFVGMHGLIREELSTPMRVHTPGNSSTSVQFSPSITIEIQRSPFLANLILLESKDLDVILGMDWLTKFKGVIDCANRTVTLTNEKGETVVYKSLVSPKKGASLNQIETEIPMDAEEKNLRKLEDIPIVCEYPEVFPEDLTTMPPKREIEFRIDLAPGTAPIYKRPYRMAANELAEVKKQVDEQLQKGYIRPSTSPWGAPVIFVEKKDKTKRMCVDYRALNEVTIKNKYPLPRIDDLFDQLKGAKVFSKIDLRSGYHQLRIREEDIPKTAFTTRYGLYECTVMSFGLTNAPAFFMNLMNKVFMEFLDKFVVVFIDDILIYSKSEEEHEQHLRLVLEKLKEHQLYAKFSKCDFWLTEVKFLGHVITAQGVAVDPSNVESVTKWTPPKTVSQIRSFLGLAGYYRRFIENFSRIARPMTQLLKKDEKFKWTAECDKSFEELKRKLVSAPVLILPDQTKDFQVYCDASRHGLGCVLMQEGRVVAYASRQLRPHEGNYPTHDLELAAVVHALKIWRHYLIGNRCEVYTDHKSLKYIFTQPDLNLRQRRWLELIKDYDMSIHYHPGKANVVADALSRKSYCTALCIEGMCEELRQELEHLNMGIVEHGFVAALEARPTLVDQVRAAQVNDPEIAELKKNMRVGKARDFLEDEHGTIWMGERLCVPDDKELKDLILTEAHQTQYSIHPGSTKMYQDLKEKFWWVSMRREIAEFVALCDVCQRVKAEHQRPAGLLQPLQIPEWKWEEIGMDFITGLPRTSSGHDSIWVVVDRLTKVAHFIPVHTTYTGKRLAELYLARIMCLHGVPKKIVSDRGSQFTSKFWQKLQEELGTRLNFSTAYHPQTDGQTERVNQILEDMLRACALDFGGAWDKSLPYAEFSYNNSYQASLQMAPFEALYGRKCRTPLFWDQTGERQLFGTEVLAEAEEKVRIIRERLRVAQSRQKSYADNRRRELTFEVGDYVYLRVTPLRGVHRFQTKGKLAPRFVGPYKILERRGEVAYQLELPSNMIGIHDVFHVSQLKKCLRVPEEQADSEHIDIQEDLTYVEKPVRILDTSERRTRNKVTRFCRVQWSHHSEEEATWEREEELKAAHPYLFTSSSESRGRDSV

SEQ ID NO: 18816 - protein, 1784 aa, Oryza sativa
  unsure (1)..(1784): unsure at all Xaa locations
  Clone ID: TF_OSC6690j.C1.p2.np
MAGHPPNHRGEGMIDFVAELARMTLVVGYPNAPEYTTIPPLSGELPHRVRLEVHGYVGTCLANMAVEACGGTADHACQEAAYLMMARLRERHNYIFHDTAYRYHPRRANGDGVSSFRPTAGENDTTFGHMCAVMRGLDRMHSDLHKATKALNDGKLMRIVALKDEIARLKKENAQLKGLPAPGGVRIRTTPRKTTTAPVRIQLAPRNPPPPAAPAAPPVPPAAPAVPAAPAPAPAPAPAFALSFAPASAARGPASGTGGCSLQMVYTRTGSRATGEDSNGEERADGVHPSSDSGNGPPPLPENPTLAQVMAHQTQMMAAMMQQMQQQHQQMHQRMLQHAEQQHQQLGPPPPQSKLPEFLRVRPPTFSSTTNPMEANDWLHAIEKKLNLLQCNDQEKVAFATHQLQGPASAWWDNHMATRPPGTEVTWAEFCRSFRKAQVPDGVVAQKKREFRALHQGNRTVTEYLHEFNRLARYAPEDVRTDAEKQEKFMAGLDDELTNQLISGDYADFERLVDKAIRQEDQRNKMDRKRKAAQFRAHQGSHQRPRFTSGQQGGPTTMIVRQHRPFNPSNFPQGASGSQNHHGGQPNRGAAPRPPMAPAQSGQPAQAKKETGAKPGSCFNCGELGHFADKCPKPRRAGPRFIQARVNHASAEEAQAAPEVVLGTFPVNSIPATVLFDSGATHSFISKKFVGMHGLIREELSTPMRVHTPGNSSTSVQFSPSITIEIQRSLFLANLILLESKDLDVILGMDWLTKFKGVIDCANRTVTLTNEKRETVVYKSLVSPKKGVSLNQIETEIPVDTVEKNLRKLEDIPIICEYPEVFPEDLTTMPPKREIEFRIDLAPGTAPIYKRPYRMAANELAEVKKQVDEQLQKGYIRPSTSPWGAPVIFVEKKDKTKRMCVDYCALNEVTIKNKYPLPRIDDLFDQLKGARVFSKIDLRSGYHQLRIREEDIPKTAFTTRYGLYECTVMSFGLTNAPAFFMNLMNKVFMEFLDKFVVVFIDDILIYSKSEEEHEQHLRLVLEKLKEHQLYAKFSKCDFWLTEVKFLGHVITAQGVAVDPSNVESVTKWTPPKTVSQIRSFLGLAGYYRRFIENFSRIARPMTQLLKKDEKFKWTAECDKSFEELKQKLVSAPVLILPDPMKDFQVYCDASHHGLGCVLMQEGRVVAYASRQLRPHEGNYPTHDLELAAVVHALKIWRHYLIGNRCEVYTDHKSLKYIFTQPDLNLRQRRWLELIKDYDMSIHYHPGKANVVADALSRKSYCTALCVEGMCEELRQEFEHLNVGIVEHGFVAALEARPTLVDQVRAAQVNDPEIAELKKNMRVGKARDFLEDEHGTIWIGERLCVPDDKELKDLILTEAHXTQYSIHPGSTKMYQDLKEKFWWVSMRREIAEFVALCDVCQRVKAEHQRPAGLLQPLQIPEWKWEEIGMDFITGLPRTSSGHDSIWVVVDRLTKVAHFIPVHTTYTGKRLAELYLARIMCLHGVPKKIVSDRGSQFTSKFWQKLQEEMGTRLNFSTAYHPQTDGQTERVNQILEDMLRACALDFVGAWDKSLPYAEFSYNNSYQASLQMAPFEALYGRKCRTPLFWDQTGERQLFGTEVLAEAEEKVRIIRERLRIAQSRQKSYADNRRRELTFEAGDYVYLRVTPLRGVHHFQTKGKLAPRFVGPYKILERRGEVAYQLELPSNMIGIHDVFHVSQLKKCLRVPEEQADSEHIDIQEDLTYVEKPVRILDTSERRTRNKVTRFCRVQWSHHSEEEATWEREDELKAAHPHLFTSSSESRGRDSV

SEQ ID NO: 18817 - protein, 749 aa, Oryza sativa
  Clone ID: TF_OSC734j.C1.p3.gm
MVYTRNGSRATGEGSNGEERTDGVHPNSDSGNGPPPLPENPTLAQVMAHQTQMMAAMMQQMQHQHQQMHQRMLQHAEQQHQQFGPPPPQSKLPEFLRVRPPTFSSTTNPMEANDWLHAIEKKLNLLQCNDQEKVAFATHQLQGPASAWWDNHMATRPPGTEVTWAEFCRSFRKAQVPDGVVAQKKREFRALHQGNRTATVYLHEFNRLARYAPEDVRTDAEKQEKFMAGLDDELTNQLISGDYADFERLVDKAIRQEDQRNKMDRKRKAAQFRADQGSHQRPRFTPGQQGGPTTMIVRQHRPFNPSNFPQGASGSQNHHGGQSNRGAAPRPPMAPAQSGPPAQAKKETGAKPGSCFNCGELGHFADKCPKPRRAGPRFIQARVNHASAEEAQAAPEVVLVTLTNEKGETVVYKSPDSPKRGVSLNQIETEIPVDTVEKNLRKLEDIPIVCEYPEVFPEDLTTMPPKREIEFRIDLAPGTAPIYKRPYRMAANELAEVKKQVDEQLQKGYIRPSTSPWGAPVIFVEKKDKTKRMCVDYRALNEEEDIPKTAFTTRYRLYECTVMSFGLTNAPAFFMNLMNKVFMEFLDKFVVVFIDDILIYSKSEEEHEQHLRLVLEKLKEHQLYAKFSKCDFWLTEVKFLGHVITAQGVAVDPLNVESVTKWTPPKTVSQIRSFLGLAGYYRRFIENFSRIARPMTQLLKKDEKFKWTAECDKSFEELKKKLVSAPVLILPDQMKDFQVYCDASRHGLG

SEQ ID NO: 18818 - protein, 1635 aa, Oryza sativa
  Clone ID: TF_OSC900034j.C1.p16.fg
MGCKMAGHPPNHCGEGMIDFVAELARMTLVVGYPNAPEYTTVPPLSGELPHRVRLEVHGYVGTCLANMVVEASGGTADHACQEAAYLMMARLRERHNYIFHDTAYRFHPRRASGDDVSTFRPTAGENDTTFGHMCAVMRGLDRMHSDLHKATKALNDGKLMRIVALKDEIARLKRENAQLKGLPAPGGVRIRTTPRKTTTKPVRIQLAPRNPPPPAAPAVPAAPAPAPVHVLAPASALSFAPASAARGPASGNGGCLFGMVYTRNGSRATGEGSNGEERTEGVHPNSNSGNGPPPLPENPTLAQVMAHQTQMIAAMMQQMQQQHQQMHQRMLQHAEQQHQQFGPPPPQSKLPEFLRVRPPTFSSTTNPMEANDWLHAIEKKLNLLQCNDQEKVAFATHQLQGPASAWWDNHMATRPPGTEVTWEEFCRSFRKAQVPDGVVAQKKREFRALHQGNRTVTEYLHEFNGLARYAPEDVRTDAEKQEKFMAGLDDELTNQLISGDYADFERLMDRKRKAALFRAPQGSHQRPRFTPGQQGGPTTMIVRQYRPFNPSNFPQGASGSQNHHGGQPSRGAAPRPPVAPAQSGPPAQAKKETGAKPGSCFNCGELGHFADKCPKPRRAGPRFIQARVNHASAEEAQATPEVVLGTFPVNSIPATILFDSGATHSFISKKFVGMHGLRKEELSTPMRVHTPGNSSTSVSFSPSVLIEIQRSPFLANLILLESKDLDVILGMDWLTKFKGVIDCANRTVTLTNEKGETVVYKSPDSPKRGVSLNQIETKIPEDTVEKNLRKLEDIPIVCEYPEVFPEDLTTMPPKREIEFRIDLAPGTAPIYKRPYRMAANELAEVKKQVDEQLQKGYIRPSTSPWGAPIIFVEKKDKTKRMCVDYRALNEVTIKNKYPLPRIDDLFEFDQLKGAKVFSKIDLRSGYHQLRIREEDIPKTAFTTRYGLYECTVMSFGLTNAPAFFMNLMNKVFMEFLDKFVVVFIDDILIYSKSEEEHEQHLRLVLKKLKEHQLTPCSATQGVVVDLSNVESVTKWTPPKTVSQIRSFLGLAGYYRRFIENFSRIARPMTQLLKKDEKFKWTAECDKSFEELKKKLVSAPVLILPDQMKDFQVYCDASRHGLGCVLMQEGRVVAYASRQLRPHEGNYPTHDLELAAVVHVLKIWRHYLIGNRCEVYTDHKSLKYIFTQPDLNLRQRRWLELIKDYDMSIHYHPGKANVVADALSRKSYCTALCIEGMCEELRQEFEHLNVGIVEHGQSRVNDSEIAELKKNMRVGKARDFHEDEHGTIWLGERLCVPDDKELKDLILTEAHQTQYSIHPGSTKMYQDLKEKFWWVSMRREIAEFVALCDVCQRVKAEHQRPAGLLQPLQIPEWKWEEIGMDFITGLPRTSSGHDSIWVVVDRLTKVAHFIPVHTTYTGKSTAYHPQTDGQTERVNQILEDMLRACALDFGGAWDKSLPYAEFSYNNSYQASLQMAPFEALYGRKCRTPLFWDQTGERQLFGTEVLAEAEEKVRIIRERLRIAQSRQKSYADNRRRELTFEAGDYVYLRVTPLRGVHRFQNKGKLAPRFVGPYKILERRGEVAYQLELPSNMIGIHDVFHVSQLKKCLRVPEEQADSEHIDIQEGPNLRGEAGSYT

SEQ ID NO: 18819 - protein, 1351 aa, Oryza sativa
  Clone ID: TF_OSC900034j.C1.p26.fg
MVYTRTGTRTTGEGSNGEERADGVHPNSDSGNGPPPLPENPTLAQVMAHQTQMMAAMMQQMQQQHQQMHQRMLQHAEQQHQQFGPPPPQSKLPEFLRVRPPTFSSITNPMEANDWLHAIEKKLNLLQCNDQEKVAFATHQLQGPASAWWDNHMATRPLGTEVTWAEFCRSFRKAQVPDGVVAQKKREFRALHQGNRTVTEYLHEFNRLARYALEDVRTDAEKQEKFMAGLDDELTNQLISGDYADFERLVDKAIRQEDQRNKMDGKRKAAQLRSNQGWTYHHDRPQHRPFNSSNFHQGASGSQHHGGQPNRGAAPRPPMAPTQSAPSAQAKKETGTKPGSCFNCGELGHFADKCPKPRHTGPRFVQARVNHASAEEAQAAPEVVLGTFPVNSIPATVLFDSGATHSFISKKFVGVHGLIREELSTPMRVHTPGNSSTSVQFSPSITIEIQKSPFLANLILLDSKDLDVILGMDWLTKFKGVIDCANRTVTLTNEKGETVVYKSLVSPKQGVSLNQIEAEIPVVTKEKSSRKLEEIPIREIEFRIDLAPGTAPIYKRPYRMAANELAKVKKQVDEQLQKGYIRPSTSPWGAPVIFVEKKDKTKRMCVDYRALNEVTIKNKYPLPRIDDLFDQLKGAKVFSKIDLRSGYHQLRIREEDIPKTAFTTRYGLYECTVMSFGLTNAPAFFMNLMNKVFMEFLDKFVVVFIDDILIYSKSEEEHEHHLRLVLEKLKEHQLYAKFSKCDFWLTEVKFLGHVITAQGVAVDPSNMESVTKWTPPKTVSQIRSFLGLAGYYRRFIENFSRIARPMTQLLKKDEKFKWTAECDKSFEELKKKLVSAPVLILPNQMKDFQVYCDTSRHGLGCVLMQEGRVVAYASRQLRPHEGNYPTHDLELAAVVHALKIWRHYLIGNRCEVYTDHKSLKYIFTQPDLNLLQRRWLELIKDYDMSIHYHPGKANVVADALSRKSYCTALCIEGMCEELRQELEHLNVGIVEHGFVAALEARPTLVDQVRATQVNDPEIAELKKNMRVGKARDFLEDEHGTIWMGERLCVPDNKELKDLVLTEAHQTQYYIHPGSTKMYQDLKEKFWWTDGQTERVNQILEDMLRACALDFGGAWDRCLPYAEFSYNNSYQASLQMAPFEALYGRKCHTPLFWDQTGERQLFGTEVLTEAEEKVRTIRERLRIAQSRQKSYADNRRRELTFEAGDYVYLWVTPLRGVHRFQTKGKLAPCFVGPYKILERRGEVAYQLELPSNMIGIHDVFHVSQLKKCLRVLEEQADSEHIDIQEDLTYVEKLIRILDTSERRTRNKVTRFCRVQWSHHSEEEATWEREDELKAAHPHLFASSSESRGRDSV

SEQ ID NO: 18820 - protein, 889 aa, Oryza sativa
  Clone ID: TF_OSC900063j.C1.p16.fg
MEANDWLHAIEKKLNLLQCNDQEKVAFATHQLQGPASPWWDNHMATRPPGTEVTWAEFCRSFRKAQVPDGVVAQKKREFRALNQGNRTVTEYLHEFNRLARYAPEDVRTDAEKQEKFLAGLDDELTNQLISGDYADFERLVDKAIRQEDQRNKMDRKRKAAQFRAHQGSHQRPRFAPGQQGGPTTMIVLQYRPFNPSNFPQGASGSQIHHGGQPNRSAAPRPPVAPAQSGPSAQAKKETGTKPGSCFNCGELGHFADKCPKPRRAGPRFVQARVNHASAEEAQAAPEVVLGTFPVNSIPTTVLFDSGATHSFISKKFVGMYGLIREELSTPMRVHTPGNSSTLVQFSPSITIEIQRSPFLANLILLEFKDLDVILGMDWLTKFKGVIDCANRTVTLTNEKGETRPYRMAANELAEVKKQVDEQLQKGYIRPSTSPWGAPVIFVEKKDKTKRMCVDYRALNEVTIKNKYPLPRIDDLFDQLKGAKVFSKIDLRSGYHQLRIREEDIPKTTFTTRYGLYECTVMSFGLTNAPAFFMNLMNKVFMEFLDNFVVVFIDDILIYSKSEEEHEQHLRLVLEKLKEHQLYAKFSKCDFWLTEVKFLGHVITAQGVAVDPSNVESVTKWTPPKTVSQIRSFLGLAGYYRRFIENFSRIARPMTQLLKKDEKFKWTAECDKSFEELKKKLVSAPVLILPDQMKDFQVYCDASRHGLGCVLMQEGRVVAYASRQLRPHEGNYPTHDLELAAVVHALKIWRHYLIGNRCEVYTDHKSLKYIFTQPDLNLRQRRWLELIKDYDMSVHYHPGKANVVADALSRKSYCTALCIEGMCEKLQQEFKRLNVGIVEHGFVAALEARPTLVDQVRAAQVNDPEIAELKKNMRVGKARDFLEDEYGTI

SEQ ID NO: 18821 - protein, 1783 aa, Oryza sativa
  unsure (1)..(1783): unsure at all Xaa locations
  Clone ID: TF_OSC900133j.C1.p2.np
MAGHPPNHRGEGMIDFVAELARMTLVVGYPNAPEYTTIPPLSGELPHRVRLEVHGYVGTCLANMAVEACGGTADHACQEAAYLMMARLRERHNYIFHDTAYRYHPRRANGDGVSSFRPTAGENDTTFGHMCAVMRGLDRMHSDLHKATKALNDGKLMRIVALKDEIARLKKENAQLKGLPAPGGVRIRTTPRKTTTAPVRIQLAPRNPPPPAAPAAPPVPPAAPAVPAPAPAPAPAPAFALSFAPASAARGPASGTGGCSLQMVYTRTGSRATGEDSNGEERADGVHPSSDSGNGPPPLPENPTLAQVMAHQTQMMAAMMQQMQQQHQQMHQRMLQHAEQQHQQLGPPPPQSKLPEFLRVRPPTFSSTTNPMEANDWLHAIEKKLNLLQCNDQEKVAFATHQLQGPASAWWDNHMATRPPGTEVTWAEFCRSFRKAQVPDGVVAQKKREFRALHQGNRTVTEYLHEFNRLARYAPEDVRTDAEKQEKFMAGLDDELTNQLISGDYADFERLVDKAIRQEDQRNKMDRKRKAAQFRAHQGSHQRPRFTSGQQGGPTTMIVRQHRPFNPSNFPQGASGSQNHHGGQPNRGAAPRPPMAPAQSGQPAQAKKETGAKPGSCFNCGELGHFADKCPKPRRAGPRFIQARVNHASAEEAQAAPEVVLGTFPVNSIPATVLFDSGATHSFISKKFVGMHGLIREELSTPMRVHTPGNSSTSVQFSPSITIEIQRSLFLANLILLESKDLDVILGMDWLTKFKGVIDCANRTVTLTNEKRETVVYKSLVSPKKGVSLNQIETEIPVDTVEKNLRKLEDIPIICEYPEVFPEDLTTMPPKREIEFRIDLAPGTAPIYKRPYRMAANELAEVKKQVDEQLQKGYIRPSTSPWGAPVIFVEKKDKTKRMCVDYCALNEVTIKNKYPLPRIDDLFDQLKGARVFSKIDLRSGYHQLRIREEDIPKTAFTTRYGLYECTVMSFGLTNAPAFFMNLMNKVFMEFLDKFVVVFIDDILIYSKSEEEHEQHLRLVLEKLKEHQLYAKFSKCDFWLTEVKFLGHVITAQGVAVDPSNVESVTKWTPPKTVSQIRSFLGLAGYYRRFIENFSRIARPMTQLLKKDEKFKWTAECDKSFEELKQKLVSAPVLILPDPMKDFQVYCDASHHGLGCVLMQEGRVVAYASRQLRPHEGNYPTHDLELAAVVHALKIWRHYLIGNRCEVYTDHKSLKYIFTQPDLNLRQRRWLELIKDYDMSIHYHPGKANVVADALSRKSYCTALCVEGMCEELRQEFEHLNVGIVEHGFVAALEARPTLVDQVRAAQVNDPEIAELKKNMRVGKARDFLEDEHGTIWIGERLCVPDDKELKDLILTEAHXTQYSIHPGSTKMYQDLKEKFWWVSMRREIAEFVALCDVCQRVKAEHQRPAGLLQPLQIPEWKWEEIGMDFITGLPRTSSGHDSIWVVVDRLTKVAHFIPVHTTYTGKRLAELYLARIMCLHGVPKKIVSDRGSQFTSKFWQKLQEEMGTRLNFSTAYHPQTDGQTERVNQILEDMLRACALDFVGAWDKSLPYAEFSYNNSYQASLQMAPFEALYGRKCRTPLFWDQTGERQLFGTEVLAEAEEKVRIIRERLRIAQSRQKSYADNRRRELTFEAGDYVYLRVTPLRGVHHFQTKGKLAPRFVGPYKILERRGEVAYQLELPSNMIGIHDVFHVSQLKKCLRVPEEQADSEHIDIQEDLTYVEKPVRILDTSERRTRNKVTRFCRVQWSHHSEEEATWEREDELKAAHPHLFTSSSESRGRDSV

SEQ ID NO: 18822 - protein, 1570 aa, Oryza sativa
  Clone ID: TF_OSC900157j.C1.p2.fg
MAGHPPNHRGEGMIDFVAELACMTLVVGYPNAPEYTTIPPLSGELPHRVRLEVHGYVGTCLANMVVEASGGTADHACQEAAYLMMARLRERHNYIFHDTAYWFHPRRASSDDVSTFRPTAGENDTTFGHMCAVMRGLDRMHSDLHKATKALNDGKLMRIVALKRENAQLKGLPAPGGVRIRTTPRKTTTAPVRIQLAPRNPPPSAAPAAPPVPPAVPATPAPAPASALSFAPASAARGPARGNGGCLFGMVYTRNGSRATGEGSNSEERTEGVHPNSNSGNGPPPLPENPTLAQVMAHQTQMMAAMMQQMQQQHQQMHQRMLQHAEQQHQQFGPPPPQSKLPEFLRVRPPTFSSTTNPMEANDWLHAIEKKLNLLQCNDQEKVAFATHQLQGPASAWWDNHMATRPPGTEVTWAEFCRSFRKAQVLDGVVAQKKREFRALHQGNRTVTEYLHEFNRLARYAPEDVRTDAEKQEKFMAGLDDELTNQLISGDYADFERLVDKAIRQEDQRNKMDRKRKAAQFRVPQGSHQRPRFAPGQQGGPTTMIVRQYRPFNPSNFPQGAGGSQTHHRGQSNRGAAPRPPMAPAQSGPPAQAKKETGAKPGSCFNCGELGHFADKCPKPRRAEPRFIQARVNHASAEEAQAAPEVVLGMFPVNSIPATVLFDSGATHSFISKKFVGMHGLIREELSTPMRVHTPGNSSTSVQFSPSITIEIQRSPFLANLILLESKDLDVILGMDWLTKFKGVIDCANRTVTLTNEKGETVVYKSLVSPKQEVSLNQIEAEIPVDTVEKSLRKLEDIPIVCEYPEVFPEDLTTMPPKREIEFRIDLAPGTAPIYKRPYRMAANELAEVKKQVDEQLQKGYIRPSTSPWGAPVIFVEKKDKTKRMCVDYRALNEVTTKNKYPLPRIDDLFDQLKGAKVFSKIDLRSGYHQLRIREEDIPKTAFTTRYGLYECTVMSFGLTNAPAFFMNLMNKVFMEFLDKFVVVFIDDILIYSKSEEEHEQHLRLVLEKLKEHQLYAKFSKCDFWSTEVKFLGHVITAQGVAVDPSNVESVTKWTPPKTVSQIRSFLGLAGYYRRFIENFSRIARPMTQLLKKDEKFKWTAECDKSFEELKKKLVSAPVLILPDQMKDFQVYCDASRHGLGCVLMQEGRVVAYASRQLRPHEGNYPTHDLELAAVVHALKIWRHYLIGNRCEVYTDHKSLKYIFTQPDLNLRQRRWLELIKDYDMGIHYHPGKANVVADALSRKSYCTALCIEGMCEELRQEFEHLNVGIVEHGFVAALKAWPTLVDQVKAAQVNDSEIAELKKNMRVGKARDFHEDEHGTIWLGERLCVPDDKELKDLILTEAHQTQYSIHPGSTKMYQDLKEKFWWVSMRREIAEFVALCDVCQRVKAEHQRPAGLLQPLQIPEWKWEEIGMDFITGLPRTSSGHDSIWVVVDRLTKVAHFIPVHTTYTGKRLAELYLSRIMCLHGVPKKIVSDRGSQFTSKFWQKLQEELGTRLNFSTAYHPQTDGQTERVNQILEDMLRACALDFGGAWDKSLPYAEFSYNNSYQASLQMAPFEALYGRKCRTPLF

SEQ ID NO: 18823 - protein, 2526 aa, Oryza sativa
  Clone ID: TF_OSC900164j.C1.p3.fg
MADTRSSAEDETKRPTEEETGRDGEMGSEPNLEERLKRLNMHGEEETDLDFSEELEGLIKDVRWLALFRVYTTKPFSHSALLNAMRNAWSSAQDISFKVMDSNLFMVQFQCLGDWNRVMEGGPWIFRGAPVVLKEYDGFTNVFDYKLDKIPVWTRIHGVPDGLMKKRELAERVAKKVGEQPFTVIVDEGRINPVKYLRARVFLDLSEPLVRFVPITIKERILYPRARANWLEHGDRNTSFFQQFAARRRRRKKIKGLIDENGCFQTDEDRMSSIVYGYFQSLFSAEVTQIDGSSLLDVQRKVTGDMNFGLLAPYTAEEVKNALFSIGDLKAPGPDGLHAVFYKRFWDMLESDLVKEVLDAINTMKIPDGWNDTTVVMIPKVDKPDRVTQFRPISLCNVVYKIISKMLANRLKCLLPEIISDQQSAFVPGRLITDNVLVAYECLHTMKKKKGRKVQYRVNFNGVLTEVIKPSRGLRQGDPLSPYLFLLVAEGLSSMLQGAENRGDLVGIRMVYTRNGSRATGEGSNGEERADGVHPSSDSGNGPPPLPENPTLAQVMAHQTQMMAAMMQQMQQQHQQMHQRMMQHVEQQHQQFGPPPPQSKLPEFLRVRPPTFSSTTNPMEANDWLHAIEKKLNRLQCNDQEKVAFATHQLQGPASAWWDNHMATRPPGTEVTWAEFCRSFWKAQVPDGVVAQKKREFRALHQGNRTVTEYLHEFNRLARYAPEDVRTDAEKQEKFMAGLDDELTNQLISGDYADFERLVDKAIRQEDQRNKMDRKRKAAQFRAPQGSHQRPRFAPGQQGGPTTMIVRQHRPFNPSNFPQGASGSQNHHGGQSNRGAASRPPMAPAQSGPPAQAKKETGAKPGSCFNCGELGHFADKCPKPRRAGPRFIQARVNHASAEEAQAAPEVVLGTFPVNSIPATVLFDSDLDVILGMDWLTKFKGVIDCANRTVTLINEKGESVVYKSLVSPKKGVSLNQIEAEIPVDTVEKNSRKLEDIPIVCEYPEVFPEDLTTMPPKREIEFRIDLAPGTAPIYKRPYRMAANELAEVKKQVDEQLQKGYIRPSTSPLGAPVIFVEKKDKTKRMCVDYHALNEVTIKNKYPLPRIDDLFDQLKGAKVFSKIDLRSGYHQLRIREEDIPKTAFTTRYGLYECTVMSFGLTNAPAFFMNLMNKVFMEFLDKFVVVFIDDILIYSKSEEKHEQHFRLVLEKLREHQLYAKFSKCDFWLTEVKFLGHVITAQGYYRRFIENFSRIARPMTQLLKKDEKFKWTAECDKSFEELKKKLVSAPVLILPDPMKDFQVYCDASRHGLGCVLMQEGRVVAYASRQLRPHEGNYPTHDLELAAVVHALKIWRHYLIGNRCEVYTDHKSLKYIFTQPDLNLRQRRWLELIKDYDMSIHYHPGKANVVADALSRKSYCTALCIEGIRSGGTAYAQANDSEIAELKKNMSVGKARDFHEDEHGTIWLGERLCVPDDKELKDLILTEAHQTQYSIHPGSTKMYQDLKEKFWWVSMRREIAEFVALCDVCQRVKAEHQRPAGLLQPLQIPEWKWEEIGMDFITGLPRTSSGHESIWVVVDRLTKVNLERHGLVPVGTSSGRDSRPRIHKYRVVPSTLHQCLKFLDGSGTQQRIVGNLSPYTTQESHHADAKYYFPVDDSDQTLGRTTPAADLLIAPGRTPTPEIRRLITAGPLAGATGSSTRNRRNNARHHSFMSAQYENKPYTGAGMSGVVVPVEKDTALTSPTFTPLLLKAGTSSRTPTTQTSVARVPVDLQAPSSKEILLTRNVAMVQGRKLLDISNDAPTVITIRARNNSRRSGYHYEGRCQINSFIGKGWDQRSTKQANAAATGYIYASMITEQEGELEDPFMLDELKEEKQPTIDDLVEINLGTMDDPRPTFVSAALSAEEQESYRSFLMEYRDCFAWTYKEMPGLDPRVATHKLAIDPQFRPVKQPPRRLRPEFQDQVIAEVDRLITAGFIKESIVAELFKKFAKRAQNEFSCTLVKIRSDNGSEYKNTNIKDYCDDLGIKHELSATYSPQQNGVVERKNHTLVEMASYASNSKAYRVYNKNKGIVEETVDVQFDETNGSQEGHENLDDVGDEGLMRAMKNMSIGDVKPIEVEDKPSTSTQGEPSTSAAPSQAQVEVEEEKAQDPPMPPRIHTALSKNHPIDQVLGDISKGVQTRSHVVSICEHYSFVFCFEPKHIDEALYDPDWINAMHEELSNFVRNKVWTLVERPRDHNAIGTKWVFRSKQDENGLVVRNKISLVAQGFTQVEAIRIILAFASCFDIELFQIDVKSAFLNGEIAELVFVEQPPGFEDPKNPNHDFKTGKVDTTLFTNIIGDDFFVCQIYVDDIIFGSTNEVFCKEFGGDMMSREFEMSMIGKLSFFLELHIKQLKDGTFMSQTKYIKNQLKRFGLEDAKPIKTPMATNEHRDLDEGGKPIDLKLYRSMIGSLLYLTASRSDIMFNVCKCARFQAAPKECHLVAVKRILRYLKYSSIIGLRYPKELLAWAKEKRPSIRNAWMIEEVDWGPNKDIL

SEQ ID NO: 18824 - protein, 1814 aa, Oryza sativa
  unsure (1)..(1814): unsure at all Xaa locations
  Clone ID: TF_OSC900176j.C1.p9.np
MAGHPPNHRGEGMIDFVAELARMTLVVGYPDAPEYTTIPPLSGELPHRVRLEVHGYVGTCLANMAVEASGGTADHACQEAAYLMMARLRERHNYIFHDTAYRYHPSRANGDGVSSFRPTAGENDTTFGHMCAVMRGLDRMHSDLHKATKALNDGKLMRIVALKDEIARLKKENAQLKGLPAPGGVRIRTTPRKTTTAPVRIQLAPRNPPPAAAPAAPPVLPAVPAAPAPAPAPAPASALSFAPASAARGPASGTGGWLSATPSGSSDRSSSGSQSGSGETYLPGSRSRSEGPGMVYTRTGNRTTGEGSNGEERVDGVHPNSDSGNGPPPLPENPTLAQVMAHQTQMMAAMMQQMQQQHQQMHQRMMQHVEQQHQHFGPPPPQSKLPEFLGVRPPTFSSTTNPMEANDWLHAIEKKLNLLQCNDQEKVAFATHQLQGPASAWWDNHMATRPPGTEVTWAEFCRSFRKAQVPDGVVAQKKREFRALHQGNRTVTEYLHEFNRLTRYAPEDVRTDAEKQEKFMAGLDDELTNQLISGYYADFERLVDKAIRQEDQRNKMDRKRKAAQFRAHQGSHQRPRFTPGQQGGPTTMIVRQHRPFNPSNFYQGTSDSQNHHGGQPNRGAAPRPPVASAQSGQPAQAKKETEAKPGSCFNCGELGHFADKCPKPRRAGPRFIQARVNHASAEEAQAAPEVVLGTFPVNSIPATVLFDSGATHSFISKKFVGMHGLIREELSTPMRVHTPGNSSTSVQFSPSITIEIQRSPVLANLILLESKDLDVILGMDWLTKFKGVIDCANRTVTLTNEKGETVVYKSLVSPKKGVSLNQIETEIPVDTVEKNLRKLDDIPIVCEYPEVFPEDLTTMPPKREIEFRIDLAPGTAPIYKRPYRMAANELTEVKKQVDEQLQKGYIRPSTSPWGAPVIFVEKKDKTKRMCVDYRALNEVTIKNKYPLPRIDDLFDQLKGAKVFSKIDLRSGYHQLRIREEDIPKTAFTTRYGLYECTVMSFGLTNAPAFFMNLMNKVFIEFLDKFVVVFIDDILIYSKSEEEHEQHLRLVLEKLKEHQLYAKFSKCDFWLTEVKFLGHVITAQGVAVDPSNVESVTKWTPPKTVSQIRSFLGLAGYYRRFIGNFSRIARPMTQLLKKDEKFKWTAECDKSFEELKKKLVSAPVLILPDQMKDFQVYCDASRHGLGCVLMQEGRVVAYASRQLRPHEGNYPTHDLELAAVVHALKIWRHYLIGNRCEVYTDHKSLKYIFTQPDLNFRQRRWLELIKDYDMSIHYHPGKANVVADALSRKSYCTALCIESMCEELRQEFEHLNIGIVEHGFVAALEARPTLVDQVRAAQVNDPEIAELKKNMRVGKARDFLKDEHGTIWMGERLCVPDDKELKDLILTEAHQTQYSIHPGSTKMYQDLKEKFWWVSMRREIAEFVALCDVCQRVKAEHQRPTGLLQPLQIPEWKWEEIGMDFITGLPRTSSGHDSIXVVVDRLTKVAHFIPVHTTYTGKRLAELYLSRIMCLHGVLKKIVSDRGSQFTSKFWQKLQEELGTRLNFSTAYHPQTDGQTERVNQILEDMLRACALDFGGAWDKSLPYAEFSYNNSYQASLQMAPFEALYGRKCRTPLFWDQTGERQLFGTEVLAEAEEKVRIIRERLRIAQSRQKSYADNRRRELTFEAGDHVYLRVTPLRGVHRFQTKGKLAPRFVGPYKILERRGEVAYQLELPSNMIGIHDVFHVSQLKKCLRVPEEQADSEHIDIQEDLTYVEKPVRILDTSERRTRNKVTRFCRVQWSHHSEEEATWEREDELKAAHPHLFTSSSESRGRDSV

SEQ ID NO: 18825 - protein, 1779 aa, Oryza sativa
  Clone ID: TF_OSC900200j.C1.p17.fg
MAGHPPNHRGEGMIDFVAELARMTLVVGYPNAPEYTTIPPLSGELPHRVRLEVHGYVGTCLANMAVEASGGTADHACQEAAYLMMARLRERHDYIFHDTAYRYHPRRAHGDGVSSFRPTAGENDTTFGHMCAVMRGLDRMHSDLHKATKALNDGKLMRIVALKDEIARLKKENAQLKGLPAPGGVRIRTTPRKRTTAPVRIQLAPRNPPPAAAAPAVPPAPAPAPAPAPAPAPAFTLSFAPASAARGPASGTGGCLFGMVYTRTGSRATGEGSNGEERADGVHPNSESGNGPPPLPENPTLAQVMAHQTQMMAAMMQQMQQQHQQMHQRMMQHAEQQHQQFGPPPPQSKLPEFLRVRLPTFSSTTNPMEANDWLHAIEKKLNLLQCNDQEKVAFATHQLQGPASAWWDNHMATRPPGTEVTWAEFCRSFRKAQVPDGVVAQKKREFRALHQGNRTVTEYLHEFNRLARYAPEDVRTDAEKQEKFMAGLDDELTNQLISGDYVDFERLVDKAIRQEDQRNKMDRKRKAAQFRAPQGSHQRPRFTPGQQGGPTTMIVRQHRPFNPSNFHQGTSGSQNHHGSQPNRGTAPRPPMAPAQSGQPAQAKKETGAKPGSCFNCGELGHFADKCPKPRRAGPRFIQARVNHASAEEAQAAPEVVLGTFPVNSIPATVLFDSGATHSFISKKFVGMHGLIREELSTPMRVHTPGNSSTSVQFSPSITIEIQRSPFLANLILLESKDLDVILGMDWLTKFKGVIDCASRTVTLTNEKGETVVYKSLVSPKKGVSLNQIETEIPVDTVEKNLRKLEDIPIVCEYPEVFPEDLTTMPPKREIEFRIDLAPGTAPIYKRPYRMAANELAEVKKQVDEQLQKGYIRPSTSPWGAPVIFVEKKDKTKRMCVDYRALNEVTIKNKYPLPRIDDLFDQLKGAKVFSKIDLRSGYHQLRIREEDIPKTAFTTRYGLYECTVMSFGLTNAPAFFMNLMNKVFMEFLDKFVVVFIDDILIYSKSGEEHEQHLRLVLEKLKEHQLYAKFSKCDFWLTEVKFLGHVITTQGVAVDPSNVESVTKWTPPKTVSQIRSFLGLAGYYRRFIENFSRIARPMTQLLKKDEKFKWTAECDKSFEELKKKLVSAPVLILPDPTKDFQVYCDASRHGLGCVLMQEGRVVAYASRQLRPHEGNYPTHDLELAAVVHALKIWRHYLIGNRCEVYTDHKSLKYIFTQPDLNLRQRRWLELIKDYDMSIHYHPGKANVVADALSRKSYCTALCIEGMCEELRQEFEHLNVGIVEHGFVAALEARPTLVDQVRAAQVNDPEIAELKKNMRVGKARDFHEDEHGTIWMGERLCVPDDKELKDLILTEAHHTQYSIHPGSTKMYQDLKEKFWWVSMRREIAEFVALCDVCQRVKAEHQRPAGLLQPLQIPEWKWEEIGMDFITGLPRTSSGHDSIWVVVDRLTKVAHFIPVHTTYTGKRLAELYLARIMCLHGVPRKIVSDRGSQFTSKFWQKLQEELGTRLNFSTAYHPQTDGQTERVNQILEDMLRACALDFGGAWDKSLPYAEFSYNNSYQASLQMAPFEALYGRKCRTPLFWDQTGERQLFGTEVLAEAEEKVRIIRERLRIAQSRQKSYADNRRRELIFEAGDYVYLRVTPLRGVHRFQTKGKLAPRFVGPYKILERRGEVAYQLELPSNMIGIHDVFHVSQLKKCLRVPEEQADSEHIDIQEDLTYVEKPVRILDTSERRTRNKVTRFCRVQWSHHSEEEATWEREDELKAAHPHLFTSSSESRGRDSV

SEQ ID NO: 18826 - protein, 1704 aa, Oryza sativa
  Clone ID: TF_OSC900232j.C1.p8.fg
MTLVVGYPNAPEYTTVPPLSGELPHRVRLEVHGYVGTCLANMVVEASGGTVDHACQEAAYLMMARLRERHNYIFHDTAYRFHPCRASGDDVSTFRPTADENYTTFGHMCTVMRGLDRMHSDLHKASKALNDGKLMRIVALKDEIARLKRENAQLKGLPAPGGVRIRTTPRKTTTAPVRIQLAPRNPPPPAAPAAPPVPPAVPAAPAPAPAPVHMSAPASALSFAPASAARGPASGNGGCLFGMVYTRNGSRATGEGSNGEERTEGVHPNSNSGNVPPPLPENPTLAQVMAHQTQMMAAMMQQMQQQHQQMYQRMLQHAEQQHQQFGPPPPQSKLPEFLRVRPPTFSSTTNPMEANDWLHAIEKKLNLLQCNDQEKVAFTTHQLQGPASAWWDNHMATRPPGTEVTWAEFCRSFRKAQVPDGVVAQKKREFRALHQGNRTVTEYLHEFNRLARYAPEDVRTDAEKQERFMAGLDDELTNQLISGDYADFERLVDKAIRQEDQRNKMDRKRKAAQFRAPQGSHQRPRFAPGQQGGPTTMIVRQYRPFHPSNFPQGASGSQNHHGGQPNRGAAPRPPMAPAQSGPSAQARKETGAKPGSCFNCGELGHFADKCPKPRRAGPRFIQARVNHASAEEAQAAPEVVLGTFPVNSIPTTVLFDSGATHSFISKKFVGMHGLIREELSTPMRLTKFKGVIDCVNRTVTLTNEKGETVVYKSPNSPKQGVSLNQIEAEIPVVTMEKNLRKLEDIPIVYEYPEVFPEDLTTMPPKREIEFRINLAPGTAPIYKRPYRMAANELAEVKKQVDEQLQKGYIRPSTSPWGAPVIFVEKKDKTKRMCVDYRALNEVTIKNKYPLPRIDDLFDQLKGAKVFSKIDLRSAYHQLIIREEDIPKTAFTTRYGLYECTVMSFGLTNAPAFFMNLMNKVFMEFLDKLVVVFIDDILIYSKSEEEHEQHLRLFSKCDFWLTEVKFLGHVITAQGVAVDPSNVESVTKWTPPKTVSQIQSFLGLAGYYRRFIENFSRIARPMTQLLKKDEKFKWTAECDKSFEELKKKLVSAPVLILPDQMKDFQVYCDASRHGLGCVLMQEGRVVAYASRQLRPHEGNYPTHDLELAAVVHALKIWRHYLIGNRCEVYTDHKNLKYIFTQPDLNLRQRRWLELIKDYNMSIHYHPGKANVVADALSRKSHCTALCIEGMCEELRQDFEHLNMGIVEYGFVAALEARPTLVDKVRVAQVNDSEIAELKKNMRVGKARDFHEDEHGTIWLGERLCVPDDKELKDLILTEAHQTQYSIHPGSTKMYQDLKEKFWWVSMRREIAEFVALCDVCQRVKAEHQRPAGLLQPLQIPEWKWEEIGMDFIIGLPWTSSGHDSIWIVMDRLTKVAHFIPVHTTYTGKRLAELYLSRIMCLHRVPKKIVSNRGSQFTSKFWQKLQEELGTRLNFSTAYHPQTDGQTERVNQILEDILRACALDFGGAWDKSLPYAEFSYNNSYQASLQMAPFEALYGRKCRTPLFWDQTGERQLFGTEVLAEAEEKVRIIKERLRIAQSRQKSYADNRRRELTFEAGDYVYLRVTPLRGVHRFQTKGKLVPRFVGPYKILERRGEVAYQLELPSNMIGIHDVFHVSQLKKCLRVPEEQADSEHIDFQEDLTYVEKPVHILDTSERRTRNKVTRFCRVQWSHHSEEEATWEREDELKAAHPHLFASSSESRGQDSV

SEQ ID NO: 18827 - protein, 947 aa, Oryza sativa
  Clone ID: TF_OSC900293j.C1.p13.gm
MVYTRTGTRTIGEGSNGEERTDGVHPSSDSGNGPPPLPENPTLAQVMAHQTQMMAAMMQQMQQQHQQMHQRMMQHAEQQHQQFGPPPPQSKLPEFLRVRPPTFSSTTNPMEANDWLHAIEKKLNLLQCNDQEKVAFATHQLQGPASAWWDNHMATRPPGTEVTWAEFCRSFRKAQVPDGVVAQKKREFRALHQGNRTVTEYLHEFNRLARYAPEDVRTDAEKQEKFMAGLDDELTNQLISGDYADFERLVDKAIHQEDQRNKMDRKRKAAQFRAPQGSHQRPRFTPGQQGGPTTMIVRQYRPFNPSNFPQGASGSQNHHGGQPNRGAAPRPPMAPAQSGPSAQARKETGAKPGSCFNCGELGHFADKCPKPRRAGPRFIQARVNHASAEEAQAAPEVVLVTLTNEKGETVAYKSLVSPKQGVSLNQIEAEIPVDTVEKNLGKMEDIPIVCEYPEVFPEDLTTMPPKREIEFRIDLAPGTAPIYKRPYRMAANELAEVKKQVDEQLQKGYIRPSTSPWGAPVIFVEKKDKTKRMCVDYRALNEVTIKNKYPLPRIDDLFDQLKGAKVFSKIDLRSGYHQLRIREEDIPKTAFTTRYGLYECTVMSFGLTNAPAFFMNLMNKVFMEFLDKFVVVFIDDILIYSKSEEEHEQHLRLVLEKLKEHQLYAKFSKCDFWLTEVKFLGHVITAQGVAVDPSNVESVTKWTPPKTVSQIRSFLGLAVGQPDTPADPTPSRPPSPPAGPTRQRVKGIGPPWTGTTGWSTAGPREPTAQISPKPIGRLRRAVAGHGHSRGWPDRPQRAAARRRPDNRRRRRRNAALAREAAGKEEKEEGGGSPRGAATEGTAAEGGGGAPWVDDAEGRTAVDGEGEEADEVQHTTTKPTKVTASGDRGYGGDDCRPETVNGCGGSAVDDVRRGVGMPTAWVARRGGGASSDEVRLEATNGSAASGAR

SEQ ID NO: 18828 - protein, 2225 aa, Oryza sativa
  Clone ID: TF_OSC900327j.C1.p24.fg
MVEVLEEEEAVAFTPTPSGSGDSSESRGPRHHRRDSPTPPRHEPSRREDPTRSGGSALSPPLGEERPRRVGARRRLTYGDGGSPRGTLQAAGALLRHPPVNSEPETPVQRWLDDVANLVTTAQRQLAAGGRPAATGMSRTPVTLSSSARRRARQSAMASRRSTAPTSSGASGSRRRHDGLYGEQDAQINIERRRDERRAARMGEGSSSSRVPGSSSRGGPPPTLTPGGTGCRAFVASLQNVRWPLKFRPNLTEKEARLQGAQDHRRALQVGGQGGSEGGGVGNSPDTGAAAAATPESAPRSKRRDRRGKRKPGRSDDEGHVLAADGPARAPRKGKATSDKPSSTAPSGEGRSADKWCSVHNTYRHSLADCRSVKNLAERFRKADQEKRQGRREGKAPATSAGDQREEAKNKAPADDGGDSEDLDFQVPQGTVATLDGGAYAHTSRRGFKAMRRELLAAVPTHEVARKARWSEKMDRKRKVAQFRSNQGSHQRPRFTPGQQGGPTTLIVRQQRPFNANNFHQGASGSQNHHGGQPNRSAAPRPPMAPAQTAPSAQAKKETGTKPGSCFNCGELGHFADKCPKPRRAGPRFVQARVNHASAEEAQAAPEVVLGTFLVNSIPATVLFDSGATHSFISKKFVGMHGLIRGELSTPMRVHTPGNSSTSVQFSPSITIEIQRSPFLANLILLESKDLDVILGMDWLTKFKGVIDCANRTVTLTNEKGETVVYKSPISPKQGVSLNQIEVEIPVVTEEKNSRKLEEIPIVCEYPEVFPEDLTTMPPKREIEFRIDLALGTAPIYKRPYRMAANELAEVKKQGAPVIFVEKKDKTKRMCIDYRALNEVTIKNKYPLPRIDDLFDQLKGAKVFSKIDLLSGYHQLRIREEDIPKTAFTTRYGLYECTVMSFGLTNAPAFFMNLMNNVFMEFLDKFVVVFIDDILIYSKFEEEHELHLRLLLEKLKEHQLYAKFSKCDFWLSEVKFLGHVIAAQGVAVDPSNVESVTKWTPPKTVSQIRSFLGLVGYYRRFIENFSRIARPMTQLLKKDEKIKWTAECDKSFEELKKKLVSTPVLILPDQMKDFQVYCDASHHGLRCVLMQEGRVVAYASWQLRPHEGNYPTHDLELAVVARPTLVDQVRAAQANDPEIAKLKKNMRVGKARDFHEDEHGTIWLGERLCVPDDKELKDLILIEAHQTQYSIHPGSTKMYQDLKEKFWWVSMRREIAEFVALCDVCQRVKAEHQRPASLLQPLQIPEWKWEEIGMDFITGLPRTSSGHDSIWVVVDRLTKVAHFIPVHTTYTGKRLAELYFSRIMCLHGVPKKIVSDRGSQFTSKFWQKLQEELGTRLNFSTAYHPQTDGQTERVNQILEDMLRACALDFGGAWDKSLPRLRCAQGPGDEAPVVAADHWRDSETHVELPVTFGDSTNFRTERIDFDVADLNLPYNAVLGRPTLVKFMATNHYAYLQMKMPGPAVPITVFGDVKVALACAEQRADNLAVATEPQAPEATASRASKKRLTSANEESALVSFLRANSNVFTWKPSDMPGVPREVIEHCLAVRPDARPIRQKVRHQAPERQAFIREEVVRLLEADFICEVIHPEWLANPVVVPKANGKLRMCIDYTDLNKACPKDPFPLPCIDQIVDSTVGCDLLCFLDAYSGYHQIRMAREDEEKPTFITPVGTFCYTTMPFGLKNAGPTFQRMTRITLSNQIGRNVEAYVDDLVVQRPVYFVSEALRDAKTRYPQAQKMLYAVLMASRKLRHYFQAHRVSVVTSYPLGQILHNQEGTGRVVKWAIELAEFDLHFKPRHAIKSQVLANFIAEWTPVDEPVPPNVSFLPRDVKDPNADIHGGHWVMHFDGSLNLQGAGARVTLTSPSGDVLKYVIWLDFRATNNMAEYEGLLAGLRAVARMGIHRLLVLGDSQLVVNQVSKEYQCTDPQMDAYVREVRRMEHHIDRLELRHVPRRDNTVADELSRVASARAPLPPGTFEERLAQPSARPNPSRDPDDTPSAPTLGDSRPSGPEGVDPDPPHQVVWMTDIRAYLDGNTLPEDRAEAEKLARISKRYVLIEGTLYRRAANGILLKCVSREQGIELIADTHQDILGPFKTARGGYQHLYVAIDKFTKWPEAYPVVKIDKHSALKFIRGITSRFGVPNRIITDNGTQFTSELFDNYCDDMGIKLCFASPAHPRSNGQVERANAEILKGLKTKTYNVLKKHGDSWLEELPAVLWANRTTPSRATG

SEQ ID NO: 18829 - protein, 999 aa, Oryza sativa
  Clone ID: TF_OSC900370j.C1.p19.fg
MVYTRNGTRTTSEGSNGEERADGVHPNSDSGNGPPPFPENLTLAQVMAHQTQMMAAMMQQMQQQHQQMHQRMLQHAEQQHQQFGPPPPQSKLPEFLRVRPPTFSSTTNPMEANDWLHAIEKKLNLLQCNDQEKVAFATHQLQGPASAWWDNHVATRPPGTEVTWAEFCRSFRKAQVPDGVVAQKKRGFRALHQGNRTVTEYLHEFNRLARYAPEDVCTDAEKQEKFLAGLDDELTNQLISGDYADFERLVDKAIRQEDQRNKMDRKRKAAQFRSNQGNHQRPRFTLGQQGGPTTMIVRQHRTFKSSNFHQGASGSQNHHGGQPNHGAAPHPPVAPAQSGPSAQAKETGAKPGSCFNCGELGHFADKCPKPRRAGSKFVQARVNHASAKEAQAAPEVVLGTFPVNSIPATVLFDSGATHSFISKKFVRMHGLIREELSTPMRVHTPGNSSTSVQFSPSITIEIQRSPFLANIILLDSKDLDVILGMDWLTKFKGVIDCANRTVTLTNEKGETIVYKSLVSPKQGVSLNQIEAETPVVTEGMNSRKLEEIPIVCEYPEVFPKDLTTMPPKREIEFRIDLAPGTAPIYKRPYRMAANELAEVKKQVDEQLQKGYIRPSTSPWGAPVIFVEKKDKTKRMCVDYRALNEVTIKNKYPLPRIDDLFDQLKGAKVFSKIDLRSGYHQLRIREEDIPKTAFTTRYGLHECTVMSFGLTNAPAFFMNLMNKVFMEFLDKFVVVFIDDILIYSKSEEEHEQHLRLVLEKLKEHQLYAKFSKCDFWLTEVKFLGHVRLLGMAVDPSNVESVTKWTPPKTVSQIRSFLRLAGYYRQFIENFSRIARPMTQLLKKDEKFKWTAECDKSFEELKKKLVSAPVLILPDQMKDFQIWRHYLIGNRCEVYTDHKSLKYIFTQPDLNLRQRRWLELIKDYDMSIHYHPGKANVVADALSRKSYCTALCIEGMCEELQQEFKRLNVGIVEHGFIAVGGWHESLRPNLPKPMAKTTSQG

SEQ ID NO: 18830 - protein, 1605 aa, Oryza sativa
  Clone ID: TF_OSC900376j.C1.p14.fg
MAGHPPNHRGEGMIDFVAELARMTLVVGYPNAPEYTTIPPLSGELPHRVRLEVHGYVGTCLANMAVEASGGTADHACQEAAYLMMARLRERHDYIFHDTAYRYHPRRAHGDGVSSFRPTAGENDTTFGHMCAVMRGLDRMHSDLHKATKALNDGKLMRIVALKDEIARLKKENAQLKGLPAPGGVRIRTTPRKTTTAPVRIQLAPRNPPPPAAPAAPSVPPAVPAAPVPAPAFTLSFAPASAARGSASGTGGCLFGMVYTRTGNRTTGEGSNGEERVDGVHPNSDSGNGPPPLPENPTLAQVMAHQTQMMAAMMQQMQQQHQQMHQRMMQHAEQQHQQFGPPPPQSKLPEFLRVRPPTFSSTTNPMEANDWLHAIEKKLNLLQCNDQEKVAFATHQLQGPASAWWDNHMATRPPGTEVTWAEFCRSFRKAQVPDGVVAQKKREFRALHQGNRTVTEYLHEFNRLARYAPEDVRTDAEKQEKFMAGLDDELTNQLISGDYADFERLVDKAIRQEDQRNKMDRKRKAAQFRAPQGSHQRPRFTPGQQGGPTTMIVRQHRPFNPSNFHQGTSGSQNHHGSQPNRGTAPRPPMAPAQSGQPAQAKKETGAKPGSCFNCGELGHFADKCPKPRRAGPRFIQARVNHASAEEAQTAPEVVLGTFPVNLIPATVLFDSGATHSFISKKFVGRYGLRKEELSTPMRVHTPGNSSTSVSFSPSVLIEIQRSPFLANLILLESKDLDVILGMDWLTKFKGVIDCANRTVTLTNEKGETVVYKSLVSPKQGVSLNQVEMEVPVDTVEKNLRKLEDIPIVCEYPEVFPEDLTTMPPKREIEFRIDLAPGTAPIYKRPYRMAANELAEVKKQVDEQLQKGYIRPSTSPWGAPVIFVEKKDKTKRMCVDYRALNEVTIKNKYPLPRIDDLFDQLKGAKVFSKIDLRSGYHQLRIREEDIPKTAFTTRYGLYECTVMSFGLTNAPAFFMNLMNKVFMEFLDKFVVVFIDDILIYSKSEEEHEQHLRLVLEKLKEHQLYAKFSKCDFWLTEVKFLGHVITAQGVAVDPSNVESVTKWTPPKTVSQIRSFLGLAGYYRRFIENFSRIARPMTQLLKKDEKFKWTAECDKSFEELKKKLVSAPVLILPDQMKDFQVYCDASRHGLGCVLMQEGRVVAYASRQLRPHEGNYPTHDLELAAVVHALKIWRHYLIGNRCEVYTDHKSLKYIFTQPDLNLRQRRWLELIKDYDMSIHYHPGKANVVADALSRKSYCTALCIEGMCEELRQEFEHLNMGIVEHGFVAALEARPTLVDQVRAAQVNDSEIAELKKNMRVGKARDFHEDEHGTIWMGERLCVPDDKELKDLILTEAHQTQYSIHPGSTKMYQDLKEKFWWVSMRREIAEFVALCDVCQRVKAEHQRPAGLLQPLQIPEWKWEEIGMDFITGLPRTSSGHDSIWVVVDRLTKVAHFIPVHTTYTGKRLAELYLAKIMCLHGVPRKIVSDRGSQFTSKFWQKLQEELGTRLNFSTAYHPQTDGQTERVNQILEDMLRACALDFGGAWDKSLPYAEFSYNNSYQASLQMAPFEALYGRKCRTPLFWDQTGERQLFGTEVLAEAEEKVKSSGKG

SEQ ID NO: 18831 - protein, 1760 aa, Oryza sativa
  Clone ID: TF_OSC900391j.C1.p17.fg
MGCKMAGHPPNHRGEGMIDFVAELARMTLVVGYPNAPEYTTVPPLSGKLPHRVRLEVHGYVGTCLANMVVEASGGTADHACQEAAYLMMARLRERHNFIFHDTAYRFHPCRASGDDVSTFRSTAGENDTTFGHMCAMMRGLDRMHSDLHKASKALNDGKLMRIVALKDEIARLKKENAQLKGLPAPGGVRIRTTPRKTTTAPVRIQLAPRNPPPSAAPAAPPVPPAAPVVPAAPVPAPAPVHVSAPASALSFAPASAARGPASGNGGCLLGMVYTKNGSRATGEGSNGEERTNGVHPHSDSGNGPPPLPENPTLPQVMAHQTQMMASMMQQMQQQHQQMHQRMLQHAEQQHQQFGPPPPQSKLPEFLRVRPPTFSNTTNPMEANDWLHAIEKKLNLLQCNDQEKVAFATHQLQGPASAWWDNHMATRPPGTEVTWAEFCRSFRKAQVPDGVVAQKKREFRALHQGNRTVTEYLHEFNRLTRYAPEDVRTDAEKQEKFMAGLDDELTNQLISGDYVDFERLVDKAIRQEDQRNKMDRKRKAAQFRAHQGSHQRPHFTPGQQGGPTTMIVRQYRPFNPSNFPRAPVAVRTTMESGPSAQAKETGAKPGSCFNCGELGHFADKCPKPRRAGPRFIQARVNHVSAEEAQTAPEVVLGTFPVNSIPATVLFDSGATHSFISKKFVGMHGLIREELSTLMRVHTPGNSSTSVQFSPSITIEIQRSPFLANLILLESKDLDVILGMDWLTKFKGVIDCANRTVTLTNEKGETVVYKSPDSPKQGVSLNQIEAEIPVDTVEKKLRKLEDIPIVCEYPEVFPEDLTTMPPKREIEFRIDLAPGIAPIYKRPYRMAANELAEVKKQVDEQLQKGYIRPSTSPWGAPVIFVEKKDKTKRMCVDYRALNEVTIKNKYPLPRIDDLFDQLKGAKVFSKIDLRSGYHQLRIREEDIPKTAFTTRYGLYECTVMSFRLTNAPAFFMNLMNKVFMEFLDKFVVVFIDDILIYSKTEEEHEQHLRLVLEKLKEHQLYAKFSKCDFWLTEVKFLGHVITAQGVAVDPSNVESVTKWTPPKTVSQIRSFLGLAGYYRRFIENFSRIARPMTRLLKKDEKFKWTAECDKSFEELKKKLVSAPVLILPDQMKDFQVYCDASRHGLGCVLMQEGRVVAYASRQLRPHEGNYPTHDLELAAVVHALKIWRHYLIGNRCEVYTDHKSLKYIFTQPDLNLRQRRWLELIKDYDMSIHYHPGKANVVADALSRKSYCTALCIEGMCEELRFVAALEARPTLVDQVRAAQVNDSEIAELKKNMRVGKARDFHEDEHGTIWLGERLCVPDDKELKDLILTEAHQTQYSIHPGSTKMYQDLKEKFWWVSMRREIAEFVALCDVCQRVKAEHQRPAGLLQPLQIPEWKWEEIGMDFITGLPRTSSGHDSIWVVVDRLTKVAHFIPVHTTYTGKRLAELYLSRIICLHGVPKKIVSDRGSQFTSKFWQKLQEELGTRLNFSTAYHPQTDGQTERVNQILEDMLRACALDFGGAWDKNLPYAEFSYNNSYQASLQMAPFEALYGRKCRTPLFWDQTGERQLFGTEVLTEAEEKVRIIRERLRIAQSRQKSYADNRRRELTFEAGDYVYLRVTPLWGVHRFQTKGKLAPRFVGPYKILERRGEVAYQLELPSNMIGIHDVFHVSQLKKCLRVPEEQADSEHIDIQEDLTYVEKPVRILDTSERGTRNKVTRFCRVQWSHHSEEEATWEREDELKAAHPHLFASSSESRGRDSV

SEQ ID NO: 18832 - protein, 791 aa, Oryza sativa
  Clone ID: TF_OSC900406j.C1.p13.fg
MERPKSPLNPFHCICSLQLDFVPGKWGSVLVVQGKNLGRSFKMAGHPPNHRGEGMIDFVAELARMTLVVGYPDAPEYTTIPPLSGELPHRVRLEVHGYVGTCLANMAVEASGGTADHACQEAAYLMMARLRERHDYIFHDTAYRYHPRRAHGDGVSSFRPTAGENDTTFGHMCAVMRGLDQMHSDLHKATKALNDGKLMRIVALKDEIARLKKENAQLKGLPAPGGVRIRTTPRKRTTAPVRIQLAPRNPPPPAAPAAPPVPPAAPAVPAVPPAPAPAFTLSFAPASAARGPASGTGGCLFGMVYTRTGNRTTGEGSNGEERADGVHPNSDSGNGPPPLPENPTLAQVMAHQTQMMAAMMQQMQQQHQQMHQRMMQHAEQQHQQFGPPPPQSKLPEFLRVRPPTFSSTTNTMEANDWLHAIEKKLNLLQCNDQEKVAFATHQLQGPASAWWDNHMATRPPGTEVTWAEFCRSFRKAQVPDGVVAQKKREFRALHQGSRTVTEYLHEFNRLARYAPEDVRTDAEKQEKFMAGLDDELTNQLISGDYADFERLVDKAIRQEDQRNKMDRKRKAAQFRAHQGSHQRPRFTPGQQGGPTTMIVRQHRPFNPSNFHQGSSGSQNHHGSQPNRGTAPRPPMAPAQSGQPAQAKKETGAKPGSCFNCGELGHFADKCPKPRRAGPRFIQARVNHASAEEAQAAPEVVLGTFPVNSIPATVLFDSGATHSFISKKFVGMHGLIREELSTPMRVHTPGNSSTSVQFSPSITIEIQRSPGFAEFSGVIIRKRKRPGKGKMS

SEQ ID NO: 18833 - protein, 1628 aa, Oryza sativa
  Clone ID: TF_OSC9142j.C1.p1.fg
MGCKMAGHPPNHCGEGMIDFVAELARMTLVVGYPNAPEYTTVPPLSGELPHRVRLEVHGYVGTCLANMVVEASGGTADHACQEAAYLMMARLRERHNYIFHDTAYRFHPRRASGDDVSTFRPTAGENDTTFGHMCAVMRGLDRMHSDLHKATKALNDGKLMRIVALKDEIARLKRENAQLKGLPAPGGVRIRTTPRKTTTKPVRIQLAPRNPPPPAAPAVPAAPAPAPVHVLAPASALSFAPASAARGPASGNGGCLFGMVYTRNGSRATGEGSNGEERTEGVHPNSNSGNGPPPLPENPTLAQVMAHQTQMIAAMMQQMQQQHQQMHQRMLQHAEQQHQQFGPPPPQSKLPEFLRVRPPTFSSTTNPMEANDWLHAIEKKLNLLQCNDQEKVAFATHQLQGPASAWWDNHMATRPPGTEVTWEEFCRSFRKAQVPDGVVAQKKREFRALHQGNRTVTEYLHEFNGLARYAPEDVRTDAEKQEKFMAGLDDELTNQLISGDYADFERLMDRKRKAALFRAPQGSHQRPRFTPGQQGGPTTMIVRQYRPFNPSNFPQGASGSQNHHGGQPSRGAAPRPPVAPAQSGPPAQAKKETGAKPGSCFNCGELGHFADKCPKPRRAGPRFIQARVNHASAEEAQATPEVVLGTFPVNSIPATILFDSGATHSFISKKFVGMHGLRKEELSTPMRVHTPGNSSTSVSFSPSVLIEIQRSPFLANLILLESKDLDVILGMDWLTKFKGVIDCANRTVTLTNEKGETVVYKSPDSPKRGVSLNQIETKIPEDTVEKNLRKLEDIPIVCEYPEVFPEDLTTMPPKREIEFRIDLAPGTAPIYKRPYRMAANELAEVKKQVDEQLQKGYIRPSTSPWGAPIIFVEKKDKTKRMCVDYRALNEVTIKNKYPLPRIDDLFEFDQLKGAKVFSKIDLRSGYHQLRIREEDIPKTAFTTRYGLYECTVMSFGLTNAPAFFMNLMNKVFMEFLDKFVVVFIDDILIYSKSEEEHEQHLRLVLKKLKEHQLTPCSATQGVVVDLSNVESVTKWTPPKTVSQIRSFLGLAGYYRRFIENFSRIARPMTQLLKKDEKFKWTAECDKSFEELKKKLVSAPVLILPDQMKDFQVYCDASRHGLGCVLMQEGRVVAYASRQLRPHEGNYPTHDLELAAVVHVLKIWRHYLIGNRCEVYTDHKSLKYIFTQPDLNLRQRRWLELIKDYDMSIHYHPGKANVVADALSRKSYCTALCIEGIRSGGTAYARGSSQSRVNDSEIAELKKNMRVGKARDFHEDEHGTIWLGERLCVPDDKELKDLILTEAHQTQYSIHPGSTKMYQDLKEKFWWVSMRREIAEFVALCDVCQRVKAEHQRPAGLLQPLQIPEWKWEEIGMDFITGLPRTSSGHDSIWVVVDRLTKVAHFIPVHTTYTGKSTAYHPQTDGQTERVNQILEDMLRACALDFGGAWDKSLPYAEFSYNNSYQASLQMAPFEALYGRKCRTPLFWDQTGERQLFGTEVLAEAEEKVRIIRERLRIAQSRQKSYADNRRRELTFEAGDYVYLRVTPLRGVHRFQNKGKLAPRFVGPYKILERRGEVAYQLELPSNMIGIHDVFHVSQLKKCLRVPEEQADSEHIDIQEGPNLRGEAGSYT

SEQ ID NO: 18834 - protein, 1940 aa, Oryza sativa
  Clone ID: TF_OSC400653j.C1.p7.fg
MAAELVGEGDGGRRRRSGVEAAGSNGWRCGGGGCRWIGQAAVGWRRRRRLVVGGEAPDLRPPNVLRLAVVRQERRRRLAIGTRRRKWPTVRGEAAVAGSVPCKNERQQLQAGAAAAAAAGGISIEYPFCVEPGCYHPGFNLTCNHSYSPPRLFLGDGTVQVLEIAIPQATVRINSGRMVFNSTGNHAVNRSLLDQVGRPYFVAASNRIALLSCNARVDVRAAGRNNNKTSTKLLSSCTAICPTDDGGGATTILDIGPEGPCSGIGCCETSMLLAGSSTAAYSIQVQNLQEQAVVLNRTDDLVYLVDERFNYTLDMSFGYSSPEELPARLDWYINSSSACPLPASAPECRSAHSYCDSTYDNKAYICRCSEGYEGNPYVPDGCHDTDECSSGYCSYGECRNTPGSFICNCPRGYEGNPSPKDGCKARDLGLRIGLGVGGGTILLLLALSAPFISSKMKLRKMKRMKETFFRQNHGLLLGRLVSQNADIGQRMIMTLQELEKATDNFDKSREIGGGGHGVVYKGILDLQVVAIKKSRIVVKREIDDFINEVAILSQVNHRNVVKLLGCCLETEVPLLVYEFISNGSLDHHLHVDGPISLPWDDRIRIALEVARALTYLHSATTIPIFHRDIKACNILLDENLISKNCSLEKGPCIGLITVKVLCYILPRFIDKMSYKATRNRMPKPEGEIKATNLRAFNSSSVEIPSGVDFELGNTTTGTVSSSLPWDDRLRIAFEVVRALSYLHSAASMPIFHRDIKYSNILLDDSLTAKLLTRKKPIGGTFDNGDGLVSHFVSLVSKGNLYDIIDSQVREEEDGEVQEVATLAATCTKFKGEERPTMREVEMENDLQENRSAMKKCPDLKIERRFLGSARRDYSLFVNIYFTFTNMSNTGDNGNTGYKETEAPVNTNGGNTASNSSGGPFLGYNLLTLFQLEVLLLMFIAMSTLCYYVIVDAYSILSMLMLITFTTITGSNPIVNIMFIILLFWIKICRIMTKFPTIQKPDRSFSVVGFAATLKPHAFDGSNYKRWKARALLWLTAMQCFYVSRGKRSEPPLSPEEEAKFEASDCLFRGALISVLADNIVDVYIHMPLGKDMWDALEAKFRVSDAGSELYVMEQFYDYKMVDDRSVVEQAHEIQMLAKELENNNCELPDKFVAGGIIAKLPPSWSDFTISLKHKRQEFNVTDLIGSLGVEEKARAKDNWGKNIEGNSSANLATTNFKKKDKGKGKGDCFVCDKPGHWAKNCPDRKDKKSANMVISEGGGTSGYGNFLPTVLSVFHSPDWWVDTGANIHVGRGSSLLMGNESLAAVHGVGTVDLKFTSGKTVQLKNVQHVPSIKKNLVSGSLLCRDGFRLVFESNKCVVSKYGTFIGKGYDSEGSKCHTCVQSKQPRKPHKASEARNLAPLELVHSDLCEMNGVLTKGGKKYFMTLIDDCTRYCYVYLLKTKDEALHYFKIYKAEEWWGEAIFTACHVLNKIPVKHKEVTLFKEWERKKLNLSYLRTWGCLAKNEFPMKNTPSTSSQEPVLPHEHLAPIKHNDQTPEENPEEVNIVATRKSKRQRTAKSFGDDYIVYLVDDTPRTIEEAYSSPDADYWKEAVRSEMDSIMSNGTWEVVERPYGCKPVGCKWVFKKKLRPDGTIENLNVIEEVKDFLSKSFEIKDLEVADVILNIKLLRGDEGGITLVQSHYVDKVLSRFGYSDCKPAPTPYDSNVLLRKNGRIARDQLRYSQIIGSLMYLASATRPDISFAVSKLSRFVSNPGDDHCQALERVMRYLKGTISYGIHYTGYPKILEGYSDSNWISDADEIKATSGYVFTLGGGAVSWKSCKQTILTRSTMEAELTALDTATVKAEWLRELLMDLPVVEKPVPAILMNCDNQTVIIKVNSSKDNMKSSRHVKRRLKSVRKQKNSGVIALDYVQTAKNLADQFTKGLPRNVIDSASREMGLRPT

SEQ ID NO: 18835 - protein, 1809 aa, Oryza sativa
  Clone ID: TF_OSC900283j.C1.p5.fg
MAVNASFSSHGLGEGHHVAQLRDLTRFLGFSCPEYTGYSVDRVPPHCELSVYLYPRGGIHGAGLRPHHFTVARPTLQIAYQDLSWTALRRLAHDYSHRLGGSAFRQLPRLPSGHSDARYPCPYSESQPVLTRMVELSEAQATQHDLLLEAYRSLARRYAALEARLAEEGVTSVDTISWDSGRLCHASHLSSHSSRGSARTPSGPRSPSSRAPYSPVYSPYPHPVSPSYTPGHTPVASSRRGPRFIRTAWKRVVGSSTVFRFHHPAPPPPAARAAAGPRQMASRPRRAARAPARFGFEDGRVEAEANHEPANEQSHHSNRSHRTSPRNAEVEQPRRSNRSHRTVSRDAEMEQSLRSHRTASHNSGEERIPSPPHVENNIQHIMAVQTQILQGLTTAIASFQHNAYGNGHPHVGNNRSKLTDFLRSRPPEFSQTVEPVEADDWLKDVDRKLNLVQCTPVEKTLYASHQLRGPAADWWENYCNAHPEPTNIAWDEFATAFRAAHVPESTIDMKKEEFNRLRQGNSNVNEYLSQFNKLARYAPEEVNTDKKKIRRFLKGVAVGMRLQLLAHDFPTFQHMINKALLLEDARKEATEEYKKRKSNHQGNSSRGAPRPRYGQPMQYHQSVTQANRQPGYAPRPQMNRPAPQPQQRAPSGNTAPNSVTSFKSPQGPSAVQCFRCNQMSHYARQCPQNPTNTNSGHANGSTARTPTPAAAQSRPSSQASGQGSRASNNFGRGRVNHIQAETAQDAPDVVMGMFSVNSVPAIVLFDSGASHSFISQAFVKRNGWKTQNLRVPMIVHSPGRNIRATQICPEVNLRIEEVDFLAKPIVLDSQSLDIILGMDWLAKHKGQIDCAEKSITLQGPGGKQVRFTPNTPTASRSVLTCLQVTSLESVPIVCEYPDVFPEELTRMPPDREIEFAIELAPGTAPIAKRPYRMAANELAEVKRQIEELESKGYVRPSSSPWGAPVLLVKKKDGSERMVIDYRALNEVTIKNKYPLPRIDDLFNQLKGARVFSKIDLRSGYHQLKIRSEDIPKTAFSTRYGLYEFTVMSFGLTNAPAFFINLMNKIFMEYLDRFVVVFIDDILIYSKNEEEHAEHLRLIMEKLRDHQLFAKFSKCEFWLDRVAFLGHVISSNGVEVDPSKVEAVLAWNPPKNVSEIRSFLGLAGYYRRFIEGFSKLARPMTELLKKEKKFQWSAACEDSFQEMKKRLTTAPVLTLPDIRKDFEIFCDASRQGLGCVLMQERKVVAYASRQLRPHEVNYPTHDLELAAVIHALKIWRHYLIGNRCEVYTDHKSLKYIFTQTELNMRQRRWLELIKDYDLGIHYHPGVPASLTVQPTLESQIREAQKDDEGIKELIKRIQEKEDTNFSIDDQGTVWCGPRICVPAKKELRDLILKEAHESAYSIHPGSTKMYQDIKAYFWWAGMKRDVAEYVALCDICQRVKAEHQRPAGLLQPLPIPEWKWEEIGMDFITGLPRTPSGYDSIWVIVDRLTKSAHFVPVKTTYDGKKLAELYMTHVVCRFGCPKKIVSDRGTQFTSRFWKQLHEALGTDLNFSTAYHPQTDGQTERVNQILEDMLRACALDFEGTWDRCLPYAEFSYNNSYQASIQMSPNEALFGRKCRTPLCWNEVGEALVFGPDILQSVEEQVKLIRERLKTAQNRQKNYADNRRRDLEFEKGDHVYLRVSPLRGMKRFGMSGKLAPRYIGPYLITARRGEVAYQLELPEGLADVHNVFHVSQLKKCLRVPEEQVPLGNIELEKNLTYKERPIKVLEEAERQTRRKTIKFYKVQWSNHSEDEATWEREDLLRAEFPELLP

SEQ ID NO: 18836 - protein, 536 aa, Oryza sativa
  unsure (1)..(536): unsure at all Xaa locations
  Clone ID: TF_OSC28236j.C1.p1.np
MSDLGGKNGENGNEDGTSSKETPSPKGATIPFDYSKLTIPPHNFVSVPSRRAPQFDGTHYAAWKHKMKLHLIFLHPSIWKVVCIGIDVPHDDMELTSEQEQLIHRNAXASNPILSALSPEEFNKVDGLEEAKEIWDTLQLAHEGSPAVREAKIELLEERLGRFVMDDKETPQEMYDRMMILVNKIKGLGSEDMTNHFVVKRLLHAFGPRNPTLVSMIWERKAFKRLTPSDILGRIVSYEMQEETAREVRQMVKNPTMIKNQEVALKAKHEEMTFIVKRFKHFLRKSGYGKGRKLKAKHEEMTFIVKRFKHFLRKSGYGKGRKDDDKGKRQSKRACFNCGEYGHFIADCLKSNEAKAKGGKKKPERAHVAEAHMAEVWYSGDEEDLEVKPKPKPKDKVEGEGGVATVAFKSSSSSKERLFNNLSDDDDDSYHYSCFMAQGHKVMTQKPSHTSLDVDSSDEESDNELDDVLKSFSKPAMQHLAKLMRALDSKEQSLERQEELLILEKERNLALVESLAKECAKNEQLANELNLANGSL

SEQ ID NO: 18837 - protein, 749 aa, Oryza sativa
  Clone ID: TF_OSC402966j.C1.p1.fg
MAEKTIREFAAPSAENVLIGPQINLGDTDFDLKSSLITMAQASSFCGKPNENASVHLQQFLEICSTYTVKGVSPDAVRIRLFPFSLLGKVKQWSYANRATINTWDMCSTTFLSKFFPMGKTNALRGKISVFQQTRDELIPKAWERLQEYVAACPHHGMDEWLILQSFYNGLTPTSRDHLDVAAGRAFFSKTCEVCGSTGHFGNDCPETREETMYMGNDNNGFRPQGGQGWNSPAHISKEATIMVSTVNKSSNFKRPTTGSSKGPISNAESLNVVPVKSVFDRLRFPEIAAGKAPARDQGVRCASCHKLDHRALACWNKKKAQVWRPKKDSMPAAKKSIVERAVLGKEIICFKNQGSPSSSSQQLQSVPLLLSTSSPSAPMAVLLEPWDHQLERADLCLQEDPPKRNEGMAVACIEPPPTPEQYEGFRHLVINYVQNVLGYHVLEASRHPIEFMYVRVASALLRDTLIAGGPYEVDNQFMLRFVPHDLTSSCRNSPFTSEGWIMFLDFPLDFKTPAIIDKAVSLFGKVIKVQLDDNVRGRLMVKALYSSTLEVPRRIVVKRAIAFGGVGRSWTVSVFLCHEELPDVMPGDEDLPPVNHIPIPDPVQLLAPQVDAFGDNMEEDAPAVEQNSQPLSAVSVVAGNQNFALLAAVLLVVGNETEVEQAEGDLGHEYMNEAHIEDAEMVEPISCVLPEQQVLPQDPFQQSASSCLPSLKKSRKTKAKIVAIVDTDRRRNSRINKLTGGYMSPDPK

SEQ ID NO: 18838 - protein, 842 aa, Oryza sativa
  Clone ID: TF_OSC408676j.C1.p4.fg
MSTTGDNNNTGDKEKEPLVNTNRGDTVSNSSGGPFSGVLADNIVDVYMHMPSGKDMWDALEAKFEVSDAGSKLYVMEQFYDYKMVDDRSVVEQAHEIQMLAKELENNNCELPDKFVAGGIIAKLPPSWTDFATSLKHKRQEFSVTDLIGSLGVEEKSGAKDNRAKKIKGGSSANLVQKKNLHASHYNKKVKPNVKPKATTNFKKKGKGKTKGGCFVCGKSGHWAKHCPERKDKKYANTVISEGGGTSRYGKYLPTVLSVCHSPDWSVDTGANIHVCADISLFSSYQVGRGSSLLMGNGSLAAVHGVGMVDLKFTSGKIVQLKNVQHVPSIKKNLVSGFLLCRDGFRLVFESNKCVVPKYGTFIGKEYGIIHERTPPYSPQSNGVAERKNRTLTEMVNTMLDTAGHSKEWWGEAILTVCHVLNRIPTKYKKVTPFEEWERKKLNLSHLRTWGCLAKVNVPIAKKHKLGPKTVDCVFLGYAIHSVGYRFLIVNSGVPDMRVGTITESRDATFFGNEFLMKNAPSTSSQEPILSPEHFVPIEHIDQTLEENLEEDNIVATRKSKRQRTAKYFGDDYIVYLVDDTPRTIEEAHSSPDADYWKEAVRSEMDSLMSNGTWEVVEHPYGCKPVGCTWVFKKKLRPDGTIEKYKARLVAKGYTQKEGEDFFDTYSLVARLTTIRVLLALATSHGLLIHQMDVKTAFLNGELEEEIYMDQPDGYVLEGQEEMVYKLLKSLYGPKQAPKQWHEKFDNTLTSVGFVVNEADKCVYYRYGGGEGVILCLYVDDILIFGTSLNVIEEVKDFLSKSFEMKDLGVADIILNIKLLRGGWDYTCAISLCRQGLESLWL

SEQ ID NO: 18839 - protein, 1386 aa, Oryza sativa
  unsure (1)..(1386): unsure at all Xaa locations
  Clone ID: TF_OSC417436j.C1.p8.np
MVAGGGHRHGGAAAERGEGKGEKRWRSTAHPGSTSGGAEEGGGAARVDGDDGAPAVGELGEVVDGVGGGAAKPEEATPEAGDGPASGEGRPEVVGDGXXRRRRELDSGGEKVRQGVETGEGGAGRVXIGLEGREGGRQEGNRRGRFFLPAMRRRELRDQIRPFEGEREGKRKGEEITGSNCLTIWLILQSRWLXYQLVTPTPIRKPYLLGVEGFIRELCTMAFAIGFKTAPLYDQIPHDRDEEKCRVKVTITSDHEDIPSVMFEAGGRRYHACQEVARVAIGELRNLYNDQLVNTEYRYHPCQTHDRTQASYVDPEGLEDDATLCHVVELLWAMDGHRTEEALAAQEREDKNNGMINKLLDKVDRLEKELAELKGEAPPHRARACLTTWKRALVAPRFQLAPKVRVVEEAAPPVDSPVIQLCDDEEEPVDSPVIQLCDDEEEDSEEDPERTHSVVEWGATQENDDEGEPLVLRCQEALDNTRNTGSGSANNENPSLAQVLAQQTQLMNLMMQQLQNQQNQGNNHAPPQNKLAEFLRVRPPTFSSTTNPVEADDWLHAIEKKPDMLQCTDQEKVSFASHQLHGSASEWWDHFRLNRATAELIIWLEFTAAFKKTHKPSGVVALKKKEFRALTQGSRSVTEYLHEFNRLARYALEDVHTDKERQEKLTEGLNDELSYPLMTGDYADFQKLVDKIICQEDKYNRMEXKKRRITHFKAQQGNSQRPRLTLGPQAALQGGSSSAVHPQRQFYNNNTGSGNGNRNLAPRPAAAPAQHQPVKKEXGNKPGVCFKCGDPGHYADKCPKLRGVRTAHVXNNSNAPTSKARVNHVAAAEAQSAPDVILGTYPVNSVPATVLFDSGATHSFLSKSFAGSHGMEIEELRCPLMFSTPSNQALSSYRSPSVRIEIQGVPFLANLILLESKDFDVILGMDXLTKNRGMIDCANRKVKLTNSYGQVVTVHALPPASSQVSLNQVTVEEILIVCEYPDLFPDDLPGMPPKRDIEFRIDLVPGTAPIHKRPYRMAANELVEVKKQVDDLLQKGYIRPSSSPWGAPVIFVEKKDHTQRMCVDYRALNDVTIKNKYPLPRIDDLFDQLKGATVFSKIDLRSGYHQLSFREYGLFECTVMSFGLTNAPAFFMNLMNKFREYGLFECTVMSFGLTNAPAFFMNLMNKVFMEYLDKFVVVFIDDILNYSXTKEEHEVHLRLALEKLREHQMYAKFSKCDFWLSEVKFLGHVISAGGVAVNPSNVESVTNWKQPKTISEIRFLGLAGYYRWFIENFSKIAKPMTCLLQKDVKYKWSAECEQSFQELKKRLVSAPILILPNPKKGLQVYCDASQLGLGCVLMQDGKVVAYASRQLRPHEKNYLTQDLELAAVVHALKIWRHYLFGTRPEV

SEQ ID NO: 18840 - protein, 1491 aa, Oryza sativa
  Clone ID: TF_OSC900336j.C1.p19.gm
MDDKETPQEMYDRMMILVNKIKGLGSEDMTNHFVVKRLLHAFGPRNPTLVSMIWERKDFKRLTPSDILGRIVSHEMQEEEAREVRQMVKNATMIKNQEVALKAKQEEESSCEESEDEEMTFIVKRFKHFLRKSGYGKGRKDDDKGKRQSKRACFNCGEYGHFIADCLKSNEAKAKGGKKKPERAHVAEAHMAEVWYSGDEEDLEVKPKPKPKDKVEGEGGVATVAFKSSSSSKERLFNNLSDDDDDSYHYSCFMAQGHKVMTQKPSHTSLDVDSSDEESDNELDDVLKSFSKPAMQHLAKLMRALDSKEQSLERQEELLILEKERNLALVESLAKECAKNEQLANELNLANGSLASLRDVNETLQEKFASLDKSHKDLEVQFDTLWNSTSQPNVVSNSSNPSTSNGCARYYNIDLNSHATNVDAMQALKKENERLGTLVKYGCMKTYHSKDALYKTITAHPNKDGHGLRKFRASDRPKGLAGSSGYNARKFWPEGLYYDSYAYSSDGSSWVVDSGCTNHMTGERSMFTSLDEEGGSRENIVFGDDGKGKRVRSNNGGEFKNTQVEEFLDEEGIKHEFSAPYDPPQNGIVERKNRTLIEVARAMLDEYKTSDVFWAEAVSTACLAINRLYLHKILKKTSYELLSGKKPNVSYFHVFGSKCFILSKRSRSSKFSPKVDEGFLLGYESNAHAYRVFYKTSGIVEVTRDVTFDESNGSQGEQVVVHVVGDVDPNQAIGTNAIGDIRPVETQDDQEDRDQPPSSTSNSPTSAVSAEPEVPGPIDRNLRTSPDPEVPGSTVRNLRISGSEDVPTAQVDGIDAEGTLEHSDQAQVPPVHHPRIHHTVQRDHPVDNILGFEDPKLPNHVYKLHKALYGLKQAPRAWFEMSMMGELTFFLGLQVKQALEGTFISQTKYVKDILKKFGMEDAKPIKTPMPTNGYLDLDDNGRKFRCSWPGTSVVIMPREKRQKLSQDVPADSSPPVRGPRGRLGKEKVGVFYSGSQIPIHSRRAGSIVIRDAPRSPSPAASESDDGGNEDEPGSKSNPLRLYKTRAVDPDPKRTRVNYLKNLLQCGKDRMVSPDTLPADSQDDRFRTLVQVDWYNSMIMGRSHLVVEMKWLDWQYMSSKNNIVFNEVRKVCERKHVVDLLALQYSWNEEVIGQFYFTAFFGITKKGLDFVKWTIQGQQYRVSMAQFAAALGLDDDDLSRPHIFVEDALSPTSTTFMYEKDAPKDCLGTIRGLRPYYRVLYSIFRWSLLPKVGDATALPGRHALLLSRMRYNKPDFSIMKLIWSEIYKTMCEPKRGCIYAPYIMKMIEAKTGICYFKDNQHKLFRPHAPTTSATPTTRVTRASTSAAPSSSAAPQRSESSSPIKKALRAIFCMCAKTAKKVKKIERRQKEDWIAAGKDVSDISDDEEFVDPFAAYETARDIASGEGPSGTSRFFNEESSHSEESSDDEESNAPTENVLTDPDEAVDAAGQDIDSPHSGDTEIIPSDGDDDEA

SEQ ID NO: 18841 - protein, 256 aa, Oryza sativa
  Clone ID: TF_OSC29212j.C1.p2.fg
MASKRGEKKPQARMSRRRQQPGSDSDGEDDSFLYRYPLPSAAAPGASGPSSHGGKPGGGGGSGGLAPSKSTVYVSNLDFALTNSDLHTLFSRFGRVARVTVLKDRDSPRSRGVASVLFVRREDAAAAAARDARQAEFIRRRVYRDKSRCYECGEEGHLSYECPRNQLGPRERPPPSKKSRRGGGSGGGGGGGGGGRGASWQSDDEDSAAAFEDDRWASVVDTRGEEEKAAGKGEGKAMKKEKRKGYFSDESDEDED

SEQ ID NO: 18842 - protein, 1379 aa, Oryza sativa
  unsure (1)..(1379): unsure at all Xaa locations
  Clone ID: TF_OSC401338j.C1.p7.np
TIAQKADFENNCKARNIILNAISRSDFDRVSHLATANEIWKAFNDFHTGSSNIKELQKDVFKKEYIKFEMNSGESLDDYLGRFNKILSDLGSVDASYNVNYSQSKVACYFMNGLDMKIWDVKVTSIQESVGMNTLTLDILYTKLKTYEMNILSKRTDSKSTALVSSSSSSIDSTPMSIFSAFNALSEDQLEGVSEEDLVLIANRASKALSNTRSRRRGGPQRCFECGQLGHIRSQCPKLRRGTKAVDQDEVKTKNTKDDKQSKKQFKNMKMKNYQKAIDEAYAAIQESSDVDFDSDGDDDKGKNIVGVCLMARSIDEDSGDDNEVIPPSSVEYYQDIIARLGFKISKFEKRSPYEATIESLKAENSSIKSLVPDNDECQSCEVLCAEIKSNRDVCIKKLDVESRKTKKFESCVALSFAMNTRLVDELFLTKRALNKCQVALFASSIFNLISSKRIKQSSTKLFSTTCVANEMKLKYALGRVKHMEEIVKQDEVMSCSTCRKXKSVLDACKNCATLSQEVFYLKSSLQRFSKGKKNLNMILDQSKVNTNNRDLVVRMENVWIVDSGCMQHMTSFSFLKKASRRDSIIFGDASTSSITTTGSVKVSDKFTLNDVTLVENLKYNLLSVSQIVDEDFDVLFKKTRSKVFNSSGDVVLNVSRYGRVFKADFENSVSSEVTCLVAKFSKDVMFXHRRLGHVGFDHLTRISGSDLVRGLPKLKKNLDLVCSPYRYAKMVASSHAPIISVMTDAPGHLLHMDTVGPTRVQFVGGKWYVLVVVDDFSRYSWVFFMATKDEPFEHFKSLYLRLSLEFAGSLRTIRSDNGISHLRVFGCKCFVLKSRNLDKFESHSTNGLMLGYSTHSRGYRVLVLETNKIVETCEVTFDEASPGTRPDVSGTLSXVQGEDIFVDESNDEEEDEMAAVQTGATAGQTAGEDRSDRPGGSSSGASGDDGRGPPETSTSIGQGAEHEISSYATTPLHIQXRHPPQQMIGNIGEHTTRSKVTTRDHHVNSAFVANFEPKDVTHALTDESWINAMHEELENFERNKVWSLVEPPVGHNIIGTKWINEDGLIVRNKARLVAQGFTQMXGLDYDETFAPVARIEAIRLLLTFTASKGFKLYLMDVKSAFLNGYIQEEVYVKQPPGFENSEFPNHVFRLSKALYGLKQSPRAWHDRLENFLLAKGFIMGKVDKTLFVLKHGDDQLFVQIYVDDIIFGCSSHPLVVEFAETMRMEFEKSMMGELTYFLGLQIKQTKQGTFVHQTKYTKDLLRRFKMEDCKPMSTPIGSTPVLDPDEDGEVVDQKEYRSMIGSLLYLTASRPDIQFVVCLCACFQASPRASHRQAVKRIMRYLQXTLEFGIWYSTYSSICLSGYLDNKHRGTQTDNLIY

SEQ ID NO: 18843 - protein, 267 aa, Oryza sativa
  Clone ID: TF_OSC900093j.C1.p1.fg
MASKRGEKKPQARMSRRRQQPGSDSDGEDDSFLYRYPLPSAAAPGASGPSSHGGKPGGGGGSGGLAPSKSTVYVSNLDFALTNSDLHTLFFRFGRGPDLPRRPGGGLRPLRPPGGGPPAPPAEMHGKVLNGRTLSASIAEDNGRAAEFIRRRVYRDKSRCYECGEEGHLSYECPRNQLGPRERPPPSKKSRRGGGSGGGGGGGGGGRGASWQSDDEDSAAAFEDDRWASVVDTRGEEEKAAGKGEGKAMKKEKRKGYFSDESDEDED

SEQ ID NO: 18844 - protein, 255 aa, Oryza sativa
  Clone ID: TF_OSC900155j.C1.p15.fg
MASKRGEKKPQARMSRRRQQPGSDSDGEDDSFLYRYPLPSAADPGLAPSKSTVYVSNLDFALTNSDLHTLFSRFGRVARVTVLKDRDSRRSRGVAFVLFVRREDAAAAAAEMHGKVLNGRTLSASIAEDNGRAAEFIRRRVYRDKSRCYECGEEGHLSYECPRNQLGPRERPPPSKKSRRGGGSGGGGGGGGGGRGASWQSDDEDSAAAFEDDRWASVVDTRGEEEKAAGKGEGKAMKKEKRKGYFSDESDEDED

SEQ ID NO: 18845 - protein, 1072 aa, Oryza sativa
  Clone ID: TF_OSC11309j.C1.p1.fg
MQCFYVSRGKRSEPPLSPEEEAKFEASDCLFRGALISVLADNIVDVYMHMPSGKDMWDALEAKFGVSDAGSELYVMEQFYDYKMVDDRSVVEQAHEIQMLAKELENNNCELPDKFVAGGIIAKLPPSWSDFATSLKHKRQEFSVPDLIGSLGVEEKARAKDVRGKKVEGGSSANMVQKKNPHASHNNKKVKPDVKPKAATNFKKKSKGKAKGDCFVCGKSRHWAKDCPERKDRKSANMIISEGGGTSGYGKILPTVLSVFHSLDWWVDTGANIHVGRGSSLLMGNGSLAAVHGVGTVDLKFTSGKTVQLKNVQHVPSIKKNLVSGSLLCREGFRLVFESNKCVVSKYGTFVGKDYDSGGLFRFSLNDMCNNHNAVNHISENDESNVWHSRLCHVNFGCMTRLANMSLIPKFTLVKGSKCHTCVQSKQPRKPHKASEARNLAPLELVHSDLCEMNGVLTKGGKKYFMTLIDDCTRFCYVYLLKTKDEALHFFKIYKAEVENQLERKIKRLRSDRGGEYFSNEFASFCEEFGIIHEMTPPYSPQSNGVAERKNRTLTEMVNAMLDTAGLSKEWWGEAVLTACHVLNKIPMKHKEITPFEEWERKKLNLSYLRTWGCLAKVNVPIAKKRKLGPKTVDCVFLGYAIHSVGYRFLIVNSGVPDMHVGTILESRDATFFENEFPMKYTPSTSSKETVMPHEHFAPIEHNDQTPEENPEEDNIVDTRKSKRQRVAKSFGDDYIVYLVDDTPRTIEEAYSSPNADYWKEAVRSEMDSIMSNGTWEVVERPYGCKPVGCKWVFKKKLRLDGTIEKYKARLVAKGYTQKEGEDFFDTYSLVARLTTIRVLLALAASHGLLVHQMDVKTAFLNGELEEEIYMDQPDGYVLEGQEGMVCKLLKSLYGLKQAPKQCHEKFDTTLTSAGFVVNEADKCVCYRYGGGEGVILCLYVDDILIFGTSLNVIEEVKDYLSKSFEMKDLGEADVILNIKLQRGDEGGITLVQSHYVDKVLSRFGYSDCKPAPTPYDPSVLLRKNRRIARDQLRYSQIIGSLMYLASATRPDISFAVSKLSRFVSNPGDDHW

SEQ ID NO: 18846 - protein, 161 aa, Oryza sativa
  Clone ID: TF_OSC16291j.C1.p1.np
KACSRCGEIGHVASSCATTCVHCEEDHPPDRCPTSRITCFFCEGTDHVPKDCRFSFLLTKKMANQPVSSNGEKHQGNTNPRQDYSKQCTNAPPAAPDSAINHSNHSLHRQPQQRIVVDGRSCVSPRPTPGRAKSNQPPEGDTKQKTVIRFNQQSEGSFSCE

SEQ ID NO: 18847 - protein, 796 aa, Oryza sativa
  Clone ID: TF_OSC16541j.C1.p2.fg
MQCFYISRKKRSELPLSPEEEARFEDSDCLFRGTLISILADNIVDVYMHMPSGKVMWNAFEAKFGVSDTSSELYVMEQFYDYEMVDYREGESKGQQGKNIEGGSSANLVQKKNPHASHNNNNKKVKPDVKPKATTNFKDKGKGKAKGDCFVCGKPRHWAKNCPNRKDKKSANMVISEGGGTSGYGKFLPTILSVFHSPDWWVDTGANIHVCADISMFSSYQVGRDSSLLMGNGSLAVVHGVGMVDLKFTSGKTVQLKNVQHVPLIKKNLVSSSLLCRDAFRLVFESNKCAVSKYGTFIGKGYVSGVLFRFSLDDMRNNNNDVNHISENDEFNVWHSRLCHMNFGCMTRLANMSLIAKFTLVKGSKCHTCVQSKQPRKPHNASEARNLAPLELVHFDLCEMNGVLSKEGKKYFMTLIDDCTRFCYVYLLKPKDEALYYFKIYKAEEWWGEAILTTFHVLNKIPVKHKKVAPFKEWERKKLNLSYLRTWGCLAKNTVIKRLRKILRRITLYTRKSKRQRVAKSFGDDYIVYLVDDTPRTIEEAYSSPDADYWKEAVRSEMDSIISNSTWEVVERPYGCKPVGCKLVFKKKLRPDGTIKKYKVRLVAKGYKKRSLNVIEEVKDFLSQSFEMKDLGVANVVLNIKLLRGDEGGITLVQSHYVDNVLSRFGYSDCKPSPTPYDSSVLLRKNRRIARDQLRYSHIIGSLIYLASATSPDISFAVSKLSRFVSNPGDDHWQALERVIRYLKGTVSYGIHYTVYPKVLEGYSDSNLISDADEIKATSGYVFTLGGGAVSDHLNE

SEQ ID NO: 18848 - protein, 592 aa, Oryza sativa
  Clone ID: TF_OSC19063j.C1.p1.fg
MQCFYISRKKRSELPLSPEEEARFEDSDCLFRGTLISILADNIVDVYMHMPSGKVMWNAFEAKFGVSDTSSELYVMEQFYDYEMVDYREGESKGQQGKNIEGGSSANLVQKKNPHASHNNNNKKVKPDVKPKATTNFKDKGKGKAKGDCFVCGKPRHWAKNCPNRKDKKSANMVISEGGGTSGYGKFLPTILSVFHSPDWWVDTGANIHVCADISMFSSYQVGRDSSLLMGNGSLAVVHGVGMVDLKFTSGKTVQLKNVQHVPLIKKNLVSSSLLCRDAFRLVFESNKCAVSKYGTFIGKGYVSGVLFRFSLDDMRNNNNDVNHISENDEFNVWHSRLCHMNFGCMTRLANMSLIAKFTLVKGSKCHTCVQWKQPRKPHNASEARNLAPLELVHFDLCEMNGVLSKEGKKYFMTLIDDCTRFCYVYLLKTKDEALYYFKIYKAEEWWGEAILTTFHVLNKIPVKHKKVAPFKEWERKKLNLSYLRTWGCLAKNTVIKRLRKILRRITLYTRKSKRQRVAKSFGDDYIVYLVDDTPRTIEEAYSSPDADYWKEAVRSEMDSIISNSTWEVVERPYGCKPVGCKLVFKKKLRPD

SEQ ID NO: 18849 - protein, 1163 aa, Oryza sativa
  Clone ID: TF_OSC413690j.C1.p2.fg
MAAPDRRGSREIGKGGGRRRGRRPSDLLRPVGEDGRAIRFLGSARRDYSLFVNIYFIFTNMSNTGDKEKETPVNTNGGNTASNSSGGPFLGYNLITLFQLEVLLLMFIAMSTLCHYVIVDANSTLSMLMLITFTTITGSNPIVNIMFIILLFWIKICRIMTKFPTIQKPDRSFSVVGFAATLKPHAFDGSNYKRWKARALLWLTAMQCFYVSRGKRSEPPLSPEEEAKFEASDCLFRGALISVLADNIVDVYMHMPSGKDMWDALEAKFGVSDAGSELYVMEQFYDYKMVDDRSVVEQAHEIQMLAKELENNNCELPDKFVAGDIIAKLPPSWSDFATSLKHKRQEFSVPDLIGSLGVEEKARAKDVRGKKVEGGSSANMVQKKNPFASHNNKKVKPNVKPKAATNFKKKSKGKAKGDCFVCGKSRHWAKDCPERKDRKSANMIISEGGGTSGSGKILPIVLSVFHSPDWWVDTGANIHVGRGSSLLMGNGSLAAVHGVGTVDLKFTSGKTVQLKNVQHVPSIKKNLVSGSLLCREGFRLVFESNKCVVSKYGTFVGKDTAGLSKEWWGEAVLTACHVLNKIPMKHKEITPFEEWERKKLNLSYLRTWGCLAKINVPIAKKRKLGPKTVDCVFLGYAIHSVGYRFLIVNSGVPDMHVGTIHESRDATFFENEFPMKYTPSTSSKETVMPHEHFAPIEHNDQTPEENPEEDNIVDTRKSKRQRVAKSFGDDYIVYLVDDTPRTIEEAYSSPNADYWKEAVRSEMDSIMSNGTWEVVERPYGCKPVGCKWVFKKKLRPDGTIEKYKARLVAKGYTQKEGEDFFDTYSPVARLTTIRVLLALAASHGLLVHQMDVKTAFLNGELEEEIYMDQPEGQEGMVCKLLKSLYGLKQAPKQWHEKFDTTLTSAGFVVNEADKCVYYRYGGGEGVILCLYVDDILSNQLRYSQIIGSLMYLASATRPDISFAVSKLSRFVSNPGDDHWQALERVMCYLKGTMSYGIHYTGYPKVLEGYSDSNWISDADEIKATSGYVFTLGGGAVSWKSCKQTILTRSTMEAELTALDTATVEAEWLRELLMDLPVVEKPVPAILMNCDNQTVIIKVNSSKDNMKSSRHIKRRLKSVRKQKNSGVIALDYVQTARNLADQFTKGLPRNVIDSASREMGLIPT

SEQ ID NO: 18850 - protein, 1633 aa, Oryza sativa
  Clone ID: TF_OSC414105j.C1.p11.fg
MAVNASFSSHGFGEGHHVAQLRDLARFLGFSCLEYTGYSVDRVPPRCELSVYLYPRGGIHGVGLRPHHFTVARPTLQIAYQDLSWTALRRLAHDYSHRLGGSAFWQLPRLPSGHADARYPCPYSESQPVLTRMVELSEAQATQHDLLLEAYRSLAHRYAALEARLAEEGVTSVDTVSWDSGRLCHASYLSSHSFRGSARTPSGPHSPSSRAPYSPVYSPYPHPVSPSYTPGHTPVASSRRGPRFIRTARKRVVGSSTVFRFDYPAPPPPVARAAVGPRQMASRPRRAARAPARFGFEGGRVEPEANHESANEQSHHSNRSHCTASRNAEVEQPHRSNRLHHTASRNAEVEQSHHSHRTASHNSGEERLPSPPHVENNMQHLMAVQTQILQGLAAAVAGFQHNAHGNGHPHMSNNRFKLTDFLRSRPPEFSQTVEPVEADDWLKDVDRKLNLVQSHVPESTIDMKKEEFNKLKQGNSSVNEYLSMFNKLARYTPEEVDTDKKKIRKFLKGIAVGMRLQLLAHDFPTFQHMINKALLLEDARKEATEEYKKRKSNHQGNSSPGAPRPRYGQPMQYHQSVTQANRQPGYAPRPQMNRPAPQPQQRAPSGNTAPNSVTSFKSPPGPSSVQCFWCNQMGHYARQCPQNPTNTNSGHANGSTARTPTPAAAQSLHSPGKNIRATQICPEVNLRIEEVDFVAKPIVLDSQSLDIILGMDWLAKHKGQIDCAEKSITLQGPGGKQVRFTSNTPTASRSILTCLQVTSLESMPIVCEYPDVFPEELTSMPPDREIEFAIELAPGTAPIAKRPYRLAANELAEVKRQIEELESKGYVRPSSSPWGAPVLLVKKKDGSERMVIDYRALNEVTIKNKYPLPRIDDLFDQLKGARVFSKIDLRSGYHQLKIRSEDIPKTAFSTRYGLYEFTVMSFGLTNAPAFFMNLMNKIFMEYLDQFVVVFIDDILIYSKNEEEHAEHLRLIMEKLRDHQLFAKFSKCEFWLDRVAFLGHVISSNSVEVDPSKVEAVLAWNPPKNVSEIRSFLGLAGYYRRFIEGFSKLARPMTELLKKEKKFQWSAACEDSFQEMKKRLTTAPVLTLPDIRKDFEIFCDASRQGLGCVLMQERKVVAYASRQFRPHEVNYPTHDLELAAVVHALKIWRHYLIGNRCEVYTDHKSLKYIFTQTELNMRQRRWLELIKDYDLGIHYHPGKANVVADALSRKAYCNIAQIRPDQDRLCRELEKLRLTVVQSGVPASLTVQPTLESQIREAQKDDEGIKELIKRIQEKKDTDFSIDDQGTVWCGPRICVPAKKELRDLILKEAHESAYSIHPGSTKMYQDIKAYFWWAGMKRDVTEYWKWEEIGMDFITGLPRTPSGYDSTWVIVDRLTKSAHFVPVKTTFDGKKLAELYMTHVVCRFGCPKKIVSDRSTQFTSSYQASIQMLPNEAMFGRKCRTPLCWNEVGEALVFGPDILKAAKEQVKLIRERLKTAQNRQKDYADNRRRDLEFEKGDHVYLRVSPLRGMRRFGMSGKLAPRCIGPYLITARRGEVAYQLELPEGLADVHNVFHVSQLKKCLRVPEEQVPLGNIVLEKNLTYKERPIKVLEEAERQTRRKTVKFYKVQWSNHSEDEATWEREDLLRAEFPELLP

SEQ ID NO: 18851 - protein, 1357 aa, Oryza sativa
  unsure (1)..(1357): unsure at all Xaa locations
  Clone ID: TF_OSC900076j.C1.p3.np
MPVNLXAQGLWSAVEPGDNDRVDRQALAAILRAVPPEMLSTLAIKETVQEAWQAIKIRRIGVRRVREANEQQLRREFADMCFKDGESVDDFSLRLCGPANNLHTLGDEITEAEVVKKLLHVVPENLQQIAISIETLLIDEMSLEEVTGRLRSVEQRSNGDHVDANGRLLYTEEKWLAKFRKSASLLDGGQSGSSSSGGNGGRQGXGRGKKKTMALPKRPSPSQTTRAAILECTYCGKRGHWAKDCRSKPKPQAHVAQEDDEGPTLLLARAVPVPPLPRATPATPPPVPPLPRATPATPPQSKPLEVVQAKVFASLDDAAERSQRRWILDTGATNHMTGSRSLFAELDTAITGTVKFGDGLVVSIEGRDTILFACKTGEHRALTGVYFIPRLTANIVSLRQIDEAGSKVLIYHEVLRIWDPQGRLLVRVDRGVTRLYTIDLDVDRPVCLAARSSEPAWRWHARYGHLNFQALRKLSQKSIVRGLPMLDQVNKVCDGCLVGKQXRASFPSCSKYRATTHLNLVHGDLCGPVEPATPAGNRYFLLLVDDMSRYMWLTLIRSKDEAASTIKHFQARAEVESGRKLHVLRTDRGGEFNSIEFGEYCVDRGVHRQLTAPYSPQXNGAVEHRNQTIIATARSMMKAKGMPGLFWGEAVSTAVFLLNRSPTKFLANKTPYRAWYGERPAVHFLRTFGCIGHVNNDKPGLKKLDDRSAPIVLLGYEQGSKAYRLYDPVGDRVHVSRDIVFDEDAAWSWCREHGLAEXEPFTVEHAVSTTKEEVVTASSPPRSQSPPTPVSPTPEQGMQATEAEVEHASPPSTTPSSTPTPTPRNASRYRTLDNILGPASPSGMATRLLEQLELHAVSAEEPSSLAEAEAEVDPNWKGAMEDEMKSIEENNTWSLTDLPAGHRAIGLKWVYKLKRDEQGAVVCHKARLVAKGYVQRQGVDFDEVFTPVARLESVHLLLAVAAHQAWEVHHMDVKSAFLNSELQEMVFVXQPPGFINANDQGKVYKLHKVLYGLRQAPXAWNAKLDSSLLSLGFCCSSSEHGVYTRATAGKRLIVGVDLGTLKYYLGDLGTLKYYLGIXVTQRSGCITLGQSAYATKILEKAGLQDCNPSQTPMEVCLKLSKNSDSPLMDSTFYCILVGSLRYLVNTRPDLAYAIGYVSRFMETPREEHLSAVRRIQRYVAGTRNWGLTYLGGKEEKPSLLGYSDSDLAGDTDDRRSTSGQIFFTGGSPVTWQSSKQRVVVALSSCEAEYIAAAVAACQGVLLARLLTDVLEADAPAPKLMVDNQSTISLVKNPVHHDRTKHVDIKFHYLRECAEQKLIEVAFVGTADQLGDIFTKSLGRTRFHELCSKIGVSDLRQR

SEQ ID NO: 18852 - protein, 261 aa, Oryza sativa
  unsure (1)..(261): unsure at all Xaa locations
  Clone ID: TF_OSC33028j.C1.p2.np
FHGRGMQSKDQKRKASMRTEDEVRKMTITGIEWPPPGMTKRQIGNFFRGAQQLTEHLLANGGRVSDSEDSDQVSSDDEDEKYLHFKQNKMEHKACSRCGEIGHVASSCATTCVHYEEDHPSDGCPTSRITCFWCEGTDHVPKECQFSFLLTKKMANQPASSDGEKHQGNTNPRQDFVIHASRSSPIARVATAXTPMSALPQGVNAQFQPQQPVDKTEASICVVPLDVPAQQPRNQVQDEEPECKKVIVCYNCSEEGHYSRN

SEQ ID NO: 18853 - protein, 725 aa, Oryza sativa
  Clone ID: TF_OSC4448j.C1.p1.fg
EKLDLLQCTDQEKVSFASHQLHGPASEWWDHFRLNRTTAEPITWLEFTAAFRTTHIPSGVVSLKKKEFRSLTQGSRSVTEYLHKFNRLARYAPENVRNDEERQEKFLEGLNDELSYPLMTGEYHDFQKLVDKAIRQEDKYNRMEQKKRRIAQFKAQQGNSQRPRLTLGPQSMPQGGSSSVVRPQRQIFNNNTGNNIRNQAPRPVAVLTQQQPAKREQGSKPVVCFNCGDLGHYADKCPKPRRVKVVPTQSNSTVPASKARVNHVAAAEAQDAPDVILGTFLVNLVPATVLFDSGATHSFLSMSFAGNHGMEVEDLRRPLMVSTPSNQALSLQRSPSVRIEIQGVPFLANLILLESKDLDVILGMDWLARHKGVIDCANRKVTLTSNDGRVVTVHALFFESLRSRLNQIYFGKDSYSPGVSQCVPRRFTWVSALKGYRVQNRFGTRTTPIHKRPYRMAANELAEVKRQVDDLLQKGYIRPSSSPWGAPVIFVEKKDHTQRMCVDYRALNDVTIKNKYPLPRIDDLFDQLKGATVFSKIDLRSGYHQLRIKEEDIPKPAFTTSKVFMEYLDKFVVVFIDDILIYSRTKEEHEEHLRLALEKLQEHQLYAKFSKCEFWLSEVKFLGHVFSAESAVDPSNVESVTNWKQPKIVSEIRSFLGLAGYYRRFIENFSKIDKPMTRLLQKEVEYKWSEECVTTGNNPTGFPDVRALILVPGGKVHQKLIQFRV

SEQ ID NO: 18854 - protein, 1384 aa, Oryza sativa
  Clone ID: TF_OSC900056j.C1.p5.gm
MDQYRPLVEDLKLLWKKEGVLPVWDEDKQGMLVAASVSLVDIEQPLSFDGVGTTRIEGLVEAAGSAREVDGGERGVGGGSGLGGECRRSVETPVGQVASGVGEEEATTTRKDVTGLAAPGSVEAAASGSARKAAAPGSVEGVAGDPRCLLYPPPPSLSPLVVGNALAPCALAPPSPPSLQPSFAAVPVVAVAREDRRRGRQVVAVLVRPFAVAVDRRSTVAVVKPKSAAASSSLPSPSVPLPPLFWSPRCRSPASVRRPSRRAAAAGGDVTADVIVALSRGDYDPGKVRCSGLCYARGIVTTPFRGTVVMPRYKPEYLFGVEGFVQELSTMSFVIGFGTAPFYAQIPHDRHEEKCRVKVTLNSNSEDIPSVMFEAGGRNYIHACQEVARIAIGELRDRYSDQLADTEYRYHPRQPQGSDRGSYLETEGIENDATTRHLVEMLWAMDESRAETVLAAQDREDRNRGKICKLEDKVDRLERELAALKGEAPPQKARIRLTARKRALFVPRYQLAPKVRVVEKEVAPTLADPPVIIISDDEEEESKRNHSKIEWEATQDDEDEPNEPSIDLRCSEELDNGNGPNNNNNNNNEGNPTLAQVLAQQTQLMNMMMQQLQNQQNQGNNHAPPQNKLAEFLRVRPPIFSSTSNPVEAGDWLHAIEKKLDLLQCTDQEKVSFASHQLHGPASEWWDHFRLNRTTAEPITWLEFTAAFRKTHIPSGVVSLKKKEFRSLTQGSRSVTEYLHEFNRLARYAPEDVRNDEERQEKFLEGLNDELSYPLMTGDYSDFQKLVDKAIRQEDKNNRMEQKKRRIAQFKTQQGNNQKPRLTLGPQTMPHGGSSSVVRPQRQFFNNNAGNNICNQAPRPVAAPTQQQPSKREQGSKPVVCFNCGDLGHYADKCPKPRRVKVVPTQSNSTVPASKARVNHVAAAEAQDAPDVILVREYPDVFPDDLPANELAEVKRQVDDLLQKGYIRPSLSPWGAPVIFVEKKDHTQRMCVDYRALNDVTIKNKYPLPRIDDLFDQLKGATVFSKIDLRSGYHQLRIKEEDIPKTAFTTRYGLFECTVMSFGLTNAPAFFMNLMNKVFMEYLDKFVVVFIDDILIYSRTKEEHEEHLRLALEKLREHQLYAKFSKCEFWLSEVKFLGHVISAGGVAVDPSNVESVTNWKQPKTVSEIRSFLGLAGYYRRFIENFSKIAKPMTRLLQKDVKYKWSEECEQSFQELKNRLISAPILILPDPKKGFQVYCDASKLGLSCVLMQDGKPSFAAVPVVAVAREDRRRGRQVVAVLVRPFAVTVDRRSTVAVVKPKSAAASSSLPSPSVPLPPLFWSPRCRSPASVHRPSRRAAAAGGDVTADVIVALSREPAGPPAALADGWVPPVISLLAPRRRPPVP

SEQ ID NO: 18855 - protein, 1078 aa, Oryza sativa
  Clone ID: TF_OSC900175j.C1.p11.fg
MDEVGGRWTFSRANEGYTSCGPMPRYKPEYLFGVEGFVQELRTMSFVIGFGTAPFYAQIPHDRHEEKCRVKVTLNSNSEDIPSVMFEAGGRNYIHACQEVARIAIGELRDRYSDQLADTEYRYHPCQPQGSDRGSYLETEGIENDATTRHLVEMLWAMDETRAEIVLAAQDREDRNRGKICKLEDKVDCLEKELAALKGEAPPQKARIRLTARKRALFVPRYQLAPKVRVVEKEVTPALADPPMVLTRSNGNGPNNNNNNNNNGENPTLAQVLAQQAQLMNMMMQQLQNQQNQLNQGNNNAPPPQNKLAEFLRCTDQEKVSFASHQLHGPASEWWDHFRLNRTTAEPITWLEFTAAFRKTHIPSGVVSLKKKEFRSLTQGSRSVTEYLHEFNRLARYAPEDVRNDEERQEKFLEGLNDELSYPLMTGEYHDFQKLVDKAIRQEDKYNRMEQKKRRIAQFKAQQGNSQRPRLTLGPQSMPQGGSSSVVRPQRQIFNNNTGNNIRNQAPRPVAVLTQQQPAKREQGSKPVVCFNCGDLGHYADKCPKPRRVKVVPTQSNSTVPASKARVNHVAAAEAQDAPDVILGTFLVNLVPATVLFDSGATHSFLSMSFAGNHGMEVEDLRRPLMVSTPSNQALSLQRSPSVRIEIQGVPFLANLILLESKDLDVILGMDWLARHKGVIDCANRKVTLTSNDGRVVTVHALSSESLRSRLNQITLEEIPIVREYPDVFPDDLPGMPPKRDIEFRIDLVPGTTPIHKRPYRMAANELAEVKRQVDDLLQKGYIRPSSSPWGAPVIFVEKKDHTQRMCVDYRALNDVTIKNKYPLPRIDDLFDQLKGATVFSKIDLRSGYHQLRIKEEDIPKTAFTTRYGLFECTVMSFGLTNAPAFFMNLMNKVFMEYLDKFVVVFIDDILIYSRTKEEHEEHLRLALEKLQEHQLYAKFRGVAVDPSNVESVTNWKQPKIVSEIRSFLGLAGYYRRFIENFSKIDKPMTRLLQKEVEYKWSEECVTTGNNPTGFPDVRALILVPGGKTEPQTKPYPLDMWKYGSALQQRPEDRSLYGRGATIKTMHPEPSLKPFWGF

SEQ ID NO: 18856 - protein, 469 aa, Oryza sativa
  unsure (1)..(469): unsure at all Xaa locations
  Clone ID: TF_OSC1516j.C1.p2.np
MSWHRAGVLLGGSVLPTCPGGSGRRGVGSVLLFMARMGWELCHVFRPYTVVMFNREKGKNVSRYASSNSSFQLNPPLASRELTRAHPWSIPSMLLSSQLPLVGSPDQNQYVFDRAFATQVDELPMPEEDVPFCHDCREQGHYALNCPWVYAKEAPSFGLAGQTSLNQPPRTKSSLQPSVQRREPNGENPLNPGNCSPPSFSYHVGSHTKQAKGQKSKNQKRKAPMRTEEEVRKMTITSTEWPPARITIPTRQRGNAFRGARQLTQHLLIHGGRVSDSEGSDQVSSHDEDESPRHVXEEETESKACPRCGEIGHVASMCITLCTHCEEDHPPGECPTRKVTCFLCEGTNHVPKDCQLSVLLTKTAEIQRTTLRLSHQLVSSNSNIDDIIHSTNAPPAALDSAINHSNNTFSTNHSRHRQPQQXIVVDGRSCFSPRPTPGRAKGNQPQEGDTKQKTVIHFNQQSEGIFLLX

SEQ ID NO: 18857 - protein, 1471 aa, Oryza sativa
  unsure (1)..(1471): unsure at all Xaa locations
  Clone ID: TF_OSC400773j.C1.p40.np
MGENQGIEQVMGKLVDMLAKKLSETSTTINAIVPHAESVQKIELMQNDIKLEGVKNYLSWTRRAMLILKTKGLEGYVIGEVKEPESTSVEWKTXSTTNSLVVAWXLTSLIPAIATTVETISSASEMWKTLTNLYSEEGNMMLMMVAQEKISALKQGERMAEYVAELKCLXFDLDYYDPLGLEHSNYIAKMKKWVERKRVLEFLKGLNPEFKGRRDAMFHQTTLPTLDVAIATMAQEELKKKLFPATSSSSSPTYAIVQGNKTRECFNCGEMGHLMCDCRASHKPSYGRGRNGDRGGARGGRGYESRDNRGRGYEYRGDHKANVVTLEGGSSEPINVDVTNFVHSTSDNSNQAFMSINGSYPNWILDSSATHVTSMRGAFASYKPYPFTRKETIQIADGTSCPLKGEGTVQCTPSITLSSVLYISSFPVNLVSKSFLVDHMDCQVSLDRENCLIQERQTGKKLGIGVRHDGLSYLDRGRTNEAMCLALMASTSEEAKVLFLHCRLGHISFEIISKIFPVEFSRVDKHKLVCDACEYGKHTKMSYVSRGLRSMLPFMLIHSDIWTSPVVSMSGMKYFVTFIDCYSRMTWIYLMRHKDEVLKCFQNFYAYIKNHFNARVXFIRTDNGGEYINCFQNFYAYIKNHFNARVXFIRTDNGGEYINEFSNFLSSEGILHQTSCPDTPPQNGVAEKKNHHHLETARSLMYTMNVPKFLWSVAVMAATYLINRTPSGILGMKTPYEMIFHKNVFVLPPKVFGCTCFVRNNRPSVAKLDFIGYSSGQKGYKCWSPSEQXTFVSTDVTFREFVPFYDEKIDLSSFFVDLDNSTSNHDKQREDKIMGSKEDEQAKEKIVIGQIPVDMNDPIXEQELRKPHEEENLQVYKRRARFPVIQXVVEDNXVVGDASHVQVPLELGGEEDEVREEESNLPIAVRKGVKSNVGKPPRYGFEAQDEGNDENNISNYISYDSLSSTYKAFVASVDLVGILKNWREAKQDPKXHQTMLDDLEALEKNKTWNLVPFPEGKKVVNCKWVYTIKQNLNGKKERXKARLVAKGYSQTYGIDYDETCTTNFDWSLHQLDVKNAFLHGDLQEVVYMDIPPGFSTSQTEGKVLRLKKSLYGLKQSPGEWFDCFQRVMCGMGYKQCNGDHTSFYHHKGCHATIFAVYVDDMIIIGDDSIEIARLKENLSKEFELKNLGQLKYLGIEIARSPRGIVLSQXKYALDLLSDTGMLGCRPASTQIEQNHKLCAELGDPVNKESYQRLVGQVIYLCHTRPDITHAVSVISQYMHNPRSGHMDAVYRILRYLKGSLGKGLWFKNXHLDVEGYCDADQGNCLDDRRSISGYCVFVRGNLVSWRSKKQLVVSRSTAEAEYKSMSISLSELLWVRDLLTELKLMINIPMKLWCDSKSAINIANNSVQHDRTKHVETDRFFIKERIDDKTLKLNFVNSREQVVDCLTKALGVKXCMSSCSEMGMIDIYRPS

SEQ ID NO: 18858 - protein, 1899 aa, Oryza sativa
  unsure (1)..(1899): unsure at all Xaa locations
  Clone ID: TF_OSC32500j.C1.p1.np
FQPNSRDSIREKIDDVVIDYNLFSSWFGMVYSWFGDRTVXPMPRFKPEYLFGVEGFVQELRTMSFTIGFGTAPLYAQIPHDRDKEKCCVKVTLNSDREDLPSVIFEAGGGSYPHACQEVARIAIGELDRYNDLLADTEYRYHPHQPQGRDRASYVDPEGIENDASTRHLVEMLWAMDESHAEVVSATQAREDRNHGKIYKLEDKVDRLEKELTELKGEAPPQKARVRLTARKRALFIPRYQLVPKIRVVAREAVPIPVDPRVVNLSDDEKEDSERTHSKVEWGVTXDDEDEPNELSILRCQEDLDNGNGPNNNNNNNKXEIPTLAQVLAQQAQLMNMMMQQLQNQQNXGNNHAPPQNKLAEFLRVRPPTFSSTTNPVEAGDWLHVIEKKLDLLQGTNQEKVSFASHQLHGPASKWWDHFRLNRATAEPITWLEFTAAFRKTHVPSRVVSLKKKEFRALTQGSRSVTKYMHEFNRLARYAPEDVCTDEERQEKFLEGLNDELSYPLMTRDYSDFQKLVDKAIRQEDKYNRMEQKKRRIAHFKAQQRNSQRSRLTMGPQAVSQGGSSSVVRPQRQFFNNNAGNNNRNQAPRPVATPVQHQPVKREQGNKPGVCFNCGEAGHYSDKCPKPRRVKIVPVQNNSNAPTSKARVNHVAAAEAQGAPDVILGMFPVNSVPATVLFDSGATHSFLSMSFAGNHGMEMEDLRRPLMVSPSNQGLSSQRSPSVRIEIQGVPFLANFILLESKDLDVILGMDWLARYKGVIDCDNSKVTLTSNDGQVVTVHALPTEPLRSSLNQITLEEIPIVRDYPDVFPDDLPGMPPKRDIXFRIDLVPGTTPIHKRPYRMAANELAEVKRQVDDLLQKGYIRPSSSPWGAPVIFVEKKDHTQRMCVDYRALNNVTIKNKYPMPRIDDLFDQLKGATVFSKIDLRSGYHQLRIKEYGLFECIVMSFRYGLFECIVMSFRLTNAPAFFMNLMNKVFMEYLDKFVVVFIDDILIYSRTKEEHEEHLRLALEKLREHQLFAKFSKYEFWLSEVKFLGHVISARGVAVDPSNVESVTNWKQPNTVSEIRSFLGLAGYYRRFIENFSKIAKHMTRLLQKDVKYKWSKECEQSFQELKNRLISAPILILPDPKMGFQVYCDASKLGLGCVLMXDGKVVAYASRQLCPHEKNYPTHDLELAAVVHALKIWRHYLFGTHTEEFERLNLGIVSRGFVAALEAKSTLIDXXLVREAQTNDPDIQEIKKNMRRGKAIGYLEDEQGTIWLGERICVPDNKELKGTVLKEAHDTLYSIHPGSTKMYQDLMEKFWWASRKREIAEYVAVCDVCQRVKAEHQKPAGLLQPLKIPEWKWEEIGMDFITGLPRMSSGHDSIWVIVDRLTKVAHCIPVRTTYSGNRLAELYMARIVCLHGVPKKIVSDQASQFTSKFWKKLLEEMASKLNFSTSYHPQTDGQTERVNQILEDMLRACVLDFDGSCYKNLPYAEFSYNNSYQASLQMAPYEALYGRKCRTPLLWDQTGERQVYGTDILREAEEKVKIIQERLRIAQCRHKRYADNRRRDLSFEKGDHVYLRVTPLRGVYRFHTKGKLAPRFVGPYKIVSRRGEVAYQLELPQSLAGVHNVFHVSQLKXCLRVPTEEANPEQIEIQEDLTYVEKPIRILETDERRTRNRVIRFCKVQWSNHSEEEATWEREDELNVGFDLDSDLIFPSNPKPSIAAVGRCGPSRRLLATIKGSPGRPLFAATFALARRRLXRRFRVSPCAAVVAASAVAREGRHRVRQVVAVAREGRHRVRQVVAVLVPSSVSAKGHRSTAVAVDPNVFAASTSPPSPSTRRCCPFAPPSPSTRRCCPFAPPRRRSPASMRCRAAVGNDVIIDVSTTSADFALLCLDSDVPGESGFEKTEEFQGQQGK

SEQ ID NO: 18859 - protein, 881 aa, Oryza sativa
  Clone ID: TF_OSC13800j.C1.p1.fg
MEAEDWLRIIEKKLTLVRVRETDKVIFAVNQLEGPASDWWDTYKEARENDAGEPTWEEFTAAFRENFVPAAVMRMKKNEFRWLRQGNTTVQEYLNKFTQLARYAIGDLADEEEKIDKFIEGLNDELRGPMIGQDHESFQSLINKVVRLENDQRTVEHNRKRRLAMSRLPQIVPQRLKGATSSGWKPPIVATNRPAAPSNFNRPVAIQNRTPTPTLAAPGAKMNVNCFNCGGYGHYANNCPHPRKTPVRTGTNAMTVRGTTTPVTGRGLFKTPQSNRTATGLGRGQVNHVRAEEAQEDQGILMGMFSINSTPVKVLFDSGASHSFISLKASQKHNLTLVGLRKPMIVHSPGGEITVSHACIDVPIRLRDVVFPSNLMILIPQTLDVILGMDWLTKNRGVIDCGRREVTLTTPWGSDMRATMDQDPRLTERAGGIFTMLPLKGMPVVQRFPDVFPEDLPGMPPDRDIKFIIDLIPGTAPISKRPYRMPVNELEELKKQIRELQEKGFVRPSSSPWGAPVLFVKKKDGSMRMCVDYRSLNEVTIKNKYLLPRIDDLFDQLKGAKVFSKIDIRSGYHQLKIRTKDIPKTAFSTHYGLYEFTVMSFGLTNAPAYFMNLMNKINTLDIQPLLRTQIEEAQKDNEEIRELKERLAAGRAKEFSIDEKDVLWYKKRIYVPEQGGLRGLILKEAHESAYSLHPGSTKMYQDLKEGYWWPNMKRDVAEYVALCDVCQKVKAEHQRPAGLLQPLRIPEWKWDEIVCLHGIPKRIISDRGTQFTSHFWEKVHEALGSYLAFSTAYHPQTDGQTERTNQVLEDMLRACALDFSKDWERCLPYAEFSYNNSFQASLKMSPNEALFGRRCRTPLMWSETGERAVFGPDIINEAEEK

SEQ ID NO: 18860 - protein, 1333 aa, Oryza sativa
  unsure (1)..(1333): unsure at all Xaa locations
  Clone ID: TF_OSC15177j.C1.p4.np
MRVNLQAQGLWTAIDPCYAEYREDRAALSAILQAVPREMLRGLAKHDTAKAAWDAIKTMRVGVDRVSEAREQGFRRQFEAMRFKDGETPEEFAMRLTAIVADMRNMGGVMEDEHINKKLLRVVPKKYKPVAISLEQLLDVKTMALEELIEWLSTVDSYSDDEEASDGGKLYLTKEQWQAGVKQREXEGSGSSNKGRAGSGNQNRRGKAGDSPKGKEMATSGHGCRDISKVKCFNCDEYGHYSKQCRMPRRQCRGEANANLVQAEEEPTLLMAHVMGVSLAGEAAVGRTPCVQEVHLTEKKVVLDHEDGRKEEKTGEWFLDTGATNHLTGARSAFAELDTGVVGTVKFSDGSVVDIXGRGTVVFQSKNGDHRSLEAVYYIPKLRKNIVSVGRLDARGYDAHIWHGVFTLRDPEGMQLAKVNRDSSYLYVLKLNLATLICMAASGSELAWRWHARFGHLNFLALRRLAKGGVVRRIPQIDHIDQLCDGYLAGKQHRTPFPEEAQYRAQTALELVHGDLCGPITPATTGGKKYFLLLVDDMSHHMWIRLLSAKHEASAAIKGVEKDSNRKLMALRTDRGGEFTSIEFMEYYADTGVKRXITAPYSRQQNSVVERRNQTVVAAARSMLKAANMLAYFWGEAVVAAVYVLSKSPMKSLDGVTPYEAWYGRRPTVEHLRVFECVGYVKTAKPNLRKLDDRSTRMVFIGYEQGSKAYKMYDFVVRRVCVSRDVVFYETTFWDWGSNTDEEGDQEEFTVENFTIPVQGSETHAQDAAATPTMLATSPTSSTGTATTLPSGVEFCSPPTDASEGTDEGPRSYRTVVNTLATLTPILDFNYSDQCLMAAEEPASFLEAEQESCWRKAMLEEMESIEGNNTWTLYDLPSSHRATGLKWVYKIKRDAKDVIVKYKARLVAKGYVHQQGVDFDEVFAPVTRMETVRLLIATAAHQGWEVHQMDVKLAFLNRELEEDAXVVQPPGFVVDGKEDKVLKLKKALYGLKQAPRACYAKLDSSLVSLNFVKSGVKSAVYTRGEKNSXLVVGVDLGLLSYYLGDLGLLSYYLGMEVKHAKEGITVSQGAYAAKILDKAGMRDCNPCQTPMDARLKLRKEGGECMEETQFRSIIGSLRYLVNTRPHLSYSVGYVSRFMEKPTSEHWAAMKHILRYVAGTLNLGVEFRKKQQQVPQLNGYSDSDMAGDIDDRKSTTGVLFKLGDSLISWQSQKQKVVAISSCEAEYIAAATAAVQGVWLARPIGELEGQEPGCALIKVDNKSAISLLKNPVLHDRSKHIDTKFYFIWDCVDQKRVEVEYIRLEEQHADILTKPLGKIRFLELRGKLGLVPVXCF

SEQ ID NO: 18861 - protein, 896 aa, Oryza sativa
  Clone ID: TF_OSC16862j.C1.p1.gm
YLHEFNRLARYAPEDVRTDAEKQEKFLFGLDDELTNQLISGVYEDFEKLVDKAIRQEEQRNKMDRKRKAAQISFPQGNNQKPRFMTGQLGGPSTLIVCQHRPYHPSNFDNDYNGGSHNNSKQHNHNSTPPPLMAPAQSDPPAVSAQSEQPKKRAVGKPGPCFNCGKHGHFASKCPKLNRTGPRFIQAHANHVSAVEAQAAPEVVLGTFPVNSYPATVLFDSGASHSFISKRFAGTHGLSVVELKIPMQVHTPGNDMRTAHYCPSVTIEIRRSPFLSNLILLESKDLDVILGMDWLTRNKGVIDCASRTITLTNDKGEKITFRSPASQKSVASLNQAAIEGQTETVEKSPRKLEDIPIVQEYPEVFPEDLTTMPPKREIEFRIDLAPGTTPIYKRPYRMAANELAEVKKQVDEQLQKGYIRPSTSPWGAPVIFVEKKDKTKRMCVDYRALNEVTIKNKYPLPRIDDLFDQLKGAKVFSKIDLRSGYHQLRIREEDIPKTAFTTRYGLFECTVMSFGLTNAPAFFMNLMNKVFMEFLDKFVVVFIDDILIYSKSEEEHEQHLRLVLEKLKEHQLYAKFSKCDFWLSEVKFLGHVISAQGVAVDPSNVESVTKWTPPKTVSQIRSFLGLAGYYRRFIENFSKIARPMTQLLKKDKKFKWSAECNQSFEELKKKLVSAPVLILPDQTKDFQLRPHETNYPTHDLELAAVVHALKIWRHYLIGNRCEVYTDHKSLKYIFTQPDLNLRQRRWLELIKDYDMGIHYHPGKANVVADALSRKSYCNAVCTEGMCDKLQQDLEHLNLGIVEHGYVAALEARPTLVDQVRAAQVNDPEIAELKKNMRVGKARDFHEDENGTIWLGERLCVPDDKELKDLILTEAHQTQYSIHPGSTKMYQDLKEKF

SEQ ID NO: 18862 - protein, 1408 aa, Oryza sativa
  Clone ID: TF_OSC18686j.C1.p1.fg
MVKTRNDPRDSNDASGSEEQTDGAHVSGASGSRSSPPPENPTVTQMMTMMMQQMQQHYHQMLQQAQQNQQFGPPPSHVSKLLDFLRIQPPTFSSTTNPMEANDWLRAIEKKLNLLQCNDQEKVAFATHQLQGPASAWWDNYVATRLDATEKREFRALQQGTMSVTEYLHEFNRLARYAPEDVRTDAEKQEKFLFGLDDELTNQLISGVYEDFEKLVDKAIRQEEQRNKMDRKRKAAQISFPQGNNQKPRFMTGQLGGPSTLIVCQHRPYHPSNFDNDYNGGSHNNSKQHNHNSTPPPLMAPAQSDPPAVSAQSEQPKKRAVGKPGPCFNCGKHGHFASKCPKLNRTGPRFIQAHANHVSAVEAQAAPEVVLGTFPVNSYPATVLFDSGASHSFISKRFAGTHGLSVVELKIPMQVHTPGNDMRTAHYCPSVTIEIRRSPFLSNLILLESKDLDVILGMDWLTRNKGVIDCASRTITLTNDKGEKITFRSPASQKSVASLNQAAIEGQTETVEKSPRKLEDIPIVQEYPEVFPEDLTTMPPKREIEFRIDLAPGTTPIYKRPYRMAANELAEVKKQVDEQLQKGYIRPSTSPWGAPVIFVEKKDKTKRMCVDYRALNEVTIKNKYPLPRIDDLFDQLKGAKVFSKIDLRSGYHQLRIREEDIPKTAFTTRYGLFECTVMSFGLTNAPAFFMNLMNKVFMEFLDKFVVVFIDDILIYSKSEEEHEQHLRLVLEKLKEHQLYAKFSKCDFWLSEVKFLGHVISAQGVAVDPSNVESVTKWTPPKTVSQIRSFLGLAGYYRRFIENFSKIARPMTQLLKKDKKFKWSAECNQSFEELKKKLVSAPVLILPDQTKDFQVYCDASRQGLGCVLMQEGRVVAYASRQLRPHETNYPTHDLELAAVVHALKIWRHYLIGNRCEVYTDHKSLKYIFTQPDLNLRQRRWLELIKDYDMGIHYHPGKANVVADALSRKSYCNAVCTEGMCDKLQQDLEHLNLGIVEHGYVAALEARPTLVDQVRAAQVNDPEIAELKKNMRVGKARDFHEDENGTIWLGERLCVPDDKELKDLILTEAHQTQYSIHPGSTKMYQDLKEKFWWVSMRREIAEFVALCDVCQRVKAEHQRPAGLLQPLQIPEWKWEEIGMDFITGLPRTSSGHDSIWVVVDRLTKVAHFIPVHTTYTGKRLAELYLSRIMCLHGVPKKIVSDRGSQFTSKFWQKLQEELGTRLNFSTAYHPQTDAISPVCKWYRLKHCTDESAAHHFSGIKQGIMCTLRVTPLRGVHRFQTKGKLAPRFVRPYRILERRGEVAYQLELPPNMVGIHDVFHVSQLKKCLRVPEEQASSEHIDIQEDLTYVEKPVRILETSERRTRSKVIRFCKVQWSHHSEEEATWEREDELKAAHPHLFASSSESRGRDSV

SEQ ID NO: 18863 - protein, 1516 aa, Oryza sativa
  Clone ID: TF_OSC400481j.C1.p14.fg
MVKTRNDPRDSNDASGSEEQTDEAHTSGAPGSSSSPPPENPTVTQMMTMMMQQMQQHYHQMLQQAQQNQRFGPPPSHLSKLLDFLRIQPPTFSSTTNPMEANDWLRAIEKKLNLLQCNDREKVAFATHQLQGPASAWWDNYVATRLGATEVTWAEFCQNFRKAQIPKGIMAQQKREFRALQQGTRTITEYLHEFNRLARYAPEDVRTDAEKQEKFLFGLDDELTNQLISGVYEDFEKLVDKAIRQEEQRNKMDRKRKAAQISFPQGNDQKPRFMTGQLGGPSTLIVCQHRPYHPSNFNNDYNGGSHNNSKQHNHNSTPPPLMAPAQSDPPAVSVQSEQPKKGAVGKPGPCFNCGKHGHFASKCPKLNRTRPRFIQARAHDVSAKEAQAAPEVVLGTFPVNSYPATVLFDSGASHSFISKRFAGTHGLSVVELKIPMQVHTPGNDMRTAHYCPSVTIEIKRSPFLSNLILLESKDLDVILGMDWLTRNKGVIDCASRTITLTNDKGEKITFRSPASQKSVASLNQAAIEGQTETVEKSPRKLEDIPIVQEYPEVFPEDLTTMPPKREIEFRIDLAPGTAPIYKRPYRMAANELAEVKKQVDEQLQKGYIRPSTSPWGAPVIFVEKKDKTKRMCVDYRALNEVTIRNKYSLPRIDDLFDQLKGAKVFSKIDLRSGYHQLRIREEDIPKTAFTTRYGLFECTVMSFGLTNAPAFFMNLMNKVFMEFLDKFVVVFIDDILIYSKSEEEHEQHLRLVLEKLKEHQLYAKFSKCDFWLSEVKFLGHIISAQGVAVDPSNVESVTKWTPPKTVSQIRSFLGLAGYYRRFIENFSKIARPMTQLLKKDEKFKWSAECNQSFEELKKKLVSAPVLILPDQTKDFQVYCDASRQGLGCVLMQEGRVAAYASRQLRPHETNYPTHDLELAAVVHALKIWRHYLIGNRCEVYTDHKSLKYIFTQPNLNLRQRRWLELIKDYDMGIHYHPGKANVVADALSRKSYCNALCTEDMCGKLQQDLEHLNLGIVEHGYVAALEARPTLVDQVRAAQVNDPEIAELKKNMRVGKARDFHEDEHGTIWLGERLCVPDDKELKDLILTEAHQTQYSIHPGSTKMYQDLKEKFWWASMRREIAEFVALCDVCQRVKAEHQRPAGLLQPLQIPEWKWEEIGMDFITGLPRTSSGHDSIWVVVDRLTKVAHFIPVHTTYTGKRLAELYLARIMCLHGVPKKIVSDRGSQFTSKFWQKLQEELGTRLNFSTAYHPQTDGQTERVNQILEDMLRACALDFGGAWDKSLPYAEFSYNNSYQSSLQMAPFEALYGRKCRTPLFWDQTGERQLFGTEVLTEAEEKVRTVRERLRIAQSRQKSYADNRRRELTFEAGDYVYLRVTPLRGVHRFQTKGKLAPRFVGPYRILERRGEVAYQLELPSNMVGIHDVFHVSQLKKCLRVPEEQASSEHIDIQEDLTYVEKPIRILETSERRTRNKVIRFCKVQWSHHSEEEATWEREDELKAAHPHLFASPSESRGRDSV

SEQ ID NO: 18864 - protein, 1537 aa, Oryza sativa
  Clone ID: TF_OSC400738j.C1.p7.fg
MEAEDWLRIIEKKLTLVRVRETDKVIFAVNQLEGPASDWWDTYKEARENDAGEPTWEEFTAAFRENFVPAAVMRMKKNEFRWLRQGNTTVQEYLNKFTQLARYAIGDLADEEEKIDKFIEGLNDELRGPMIGQDHESFQSLINKVVRLENDQRTVEHNRKRRLAMSRLPQIVPQRLKGATSSGWKPPIVATNRPAAPSNFNRPVAIQNRTPTPTLAAPGAKMNVNCFNCGGYGHYANNCPHPRKTPVRTGTNAMTVRGTTTPVTGRGLFKTPQSNRTATGLGRGQVNHVRAEEAQEDQGILMGMFSINSTPVKVLFDSGASHSFISLKASQKHNLTLVGLRKPMIVHSPGGEITVSHACIDVPIRLRDVVFPSNLMILIPQTLDVILGMDWLTKNRGVIDCGRREVTLTTPWGSDMRATMDQDPRLTERAGGIFTMLPLKGMPVVQRFPDVFPEDLPGMPPDRDIKFIIDLIPGTAPISKRPYRMPVNELEELKKQIRELQEKGFVRPSSSPWGAPVLFVKKKDGSMRMCVDYRSLNEVTIKNKYLLPRFDDLFDQLKGAKVFSKIDIRSGYHQLKIRTKDIPKTAFSTHYGLYEFTVMSFGLTNAPAYFMNLMNKINTLDIQPLLRTQIEEAQKDNEEIRELKERLAAGRAKEFSIDEKDVLWYKKRIYVPEQGGLRGLILKEAHESAYSLHPGSTKMYQDLKEGYWWPNMKRDVAEYVALCDVCQKVKAEHQRPAGLLQPLRIPEWKWDEIGMDFIVGLPKTATGYDSIWVIVDRLTKTARFIPVKTNYSSAKLAELYMTRIVCLHGIPKRIISDRGTQFTSHFWEKVHEALGSYLAFSTAYHPQTDGQTERTNQVLEDMLRACALDFSKDWERCLPYAEFSYNNSFQASLKMSPNEALFGRRCRTPLMWSETGERAVFGPDIINEAEEKVRLIRDRLKVAQSRQKSYADTRRRNLEFKEGDYVYLKVSPMRGTKRFRVKGKLAPRYVGPFQITARRGEVAYQLQLPENIADVHPVFHVSQLKKCLRVPEEQAPLEEIHISNDLTYPEHPIRILDEAEKRTRSKVWRMNKEAVRSEIDSIMSNGTWEVVERLYGSKPVGCKWVFKKKLRPEVTIEKYKARLVAKGYTQKEGEDFFDTYSSVAHLTTIRVLLALAASHALLVHQMDVKTAFLNGELEEEIYMDQPNGYALEGREGMVCKLLKSLYGLKQAPKQWHEKFDTTLTSAGFVVNETDKCVYYRYGGGEGVILCLYVDDILIFRTSLNVIEEVKDFLSKSFEMKDLGEADVILNIKLLRGDEGGITLVQSHYVDKVLSRFGHNDCKPAPTPYDPSVLLRKNRRIARDQLRYSQIIGSLMYLASATRPDISFAVSKLSRFVSNLVDDHWQALERVMRYLKGTMSYGIHYTGYLKVLEGYSDSNWISDADEIKATSGYVFTLGGGTVSWKSCKQTILTRSTMEAELTGLDTATVEAEWLRELLMDLPVVEKPVPAILTNCDNQTVIIKVNSSKDNVKSSRHIKIRLKSVRKQKNSGVIALDYV

SEQ ID NO: 18865 - protein, 1399 aa, Oryza sativa
  unsure (1)..(1399): unsure at all Xaa locations
  Clone ID: TF_OSC401018j.C1.p41.np
MSYTPPGRRGGGGGGGSDNGCSLPLVDAGHTARLLILSRTNYIDXALLMRVNLQAQGLWTAIDPCYAEYREDRAALSAILQAVPREMLRGLAKHDTAKAAWDAIKTMRVGVDRVSEAREQGFRRQFEAMRFKDGETPEEFAMRLTAIVADMRNMGGVMEDEHINKKLLRVVPKKYKPVAISLEQLLDVKTMALEELIEWLSTVDSYSDDEEASDGGKLYLTKEQWQAGVKQREXEGSGSSNKGRAGSGNQNRRGKAGDSPKGKEMATSGHGCRDISKVKCFNCDEYGHYSKQCRMPRRQCRGEANANLVQAEEEPTLLMAHVMGVSLAGEAAVGRTPCVQEVHLTEKKVVLDHEDGRKEEKTGEWFLDTGATNHLTGARSAFAELDTGVVGTVKFSDGSVVDIXGRGTVVFQSKNGDHRSLEAVYYIPKLRKNIVSVGRLDARGYDAHIWHGVFTLRDPEGMQLAKVNRDSSYLYVLKLNLATLICMAASGSELAWRWHARFGHLNFLALRRLAKGGVVRRIPQIDHIDQLCDGYLAGKQHRTPFPEEAQYRAQTALELVHGDLCGPITPATTGGKKYFLLLVDDMSHHMWIRLLSAKHEASAAIKGVEKDSNRKLMALRTDRGGEFTSIEFMEYYADTGVKRXITAPYSRQQNSVVERRNQTVVAAARSMLKAANMLAYFWGEAVVAAVYVLSKSPMKSLDGVTPYEAWYGRRPTVEHLRVFECVGYVKTAKPNLRKLDDRSTRMVFIGYEQGSKAYKMYDFVVRRVCVSRDVVFYETTFWDWGSNTDEEGDQEEFTVENFTIPVQGSETHAQDAAATPTMLATSPTSSGTATTLPSGVEFCSPPTDASEGTDEGPRSYRTVVNTLATLTPILDFNYSDQCLMAAEEPASFLEAEQESCWRKAMLEEMESIEGNNTWTLYDLPSSHRATGLKWVYKIKRDAKDVIVKYKARLVAKGYVHQQGVDFDEVFAPVTRMETVRLLIATAAHQGWEVHQMDVKLAFLNRELEEDAXVVQPPGFVVDGKEDKVLKLKKALYGLKQAPRACYAKLDSSLVSLNFVKSGVKSAVYTRGEKNSXLVVGVYVDDLITTGASLMEINKFKEQMQALFKMSDLGLLSYYLGMEVKHAKEGITVSQGAYAAKILDKAGMRDCNPCQTPMDARLKLRKEGGECMEETQFRSIIGSLRYLVNTRPHLSYSVGYVSRFMEKPTSEHWAAMKHILRYVAGTLNLGVEFRKKQQQVPQLNGYSDSDMAGDIDDRKSTTGVLFKLGDSLISWQSQKQKVVAISSCEAEYIAAATAAVQGVWLARPIGELEGQEPGCALIKVDNKSAISLLKNPVLHDRSKHIDTKFYFIWDCVDQKRVEVEYIRLEEQHADILTKPLGKIRFLELRGKLGLVPVXCF

SEQ ID NO: 18866 - protein, 300 aa, Oryza sativa
  unsure (1)..(300): unsure at all Xaa locations
  Clone ID: TF_OSC401101j.C1.p2.np
CHCSGSGSGSALGGHLVVQQVKEVGLTLCYPMLEENNYGVWAVKMKIFMRAQGVWAAVEGNTADEKMDQMALTAIVQAMPEAVVMTIFEKETAKAAXDALKLMNMGEESIKKAXVQTLKSELDGMKMGNSEKINDFALKVTTIMNEIHSLGVKVEETTVVEKLLHSVPEKSXSLISTIEQWGDVSEMMVTKTIGHLRAFEDSSQGLRRDKEGEQQLFAAYAEPRLMRAEWEAKVAKERRSGGGSGSSSGGDKRKYHGKFDKAKVHCYNCQEYGHFADECPKPKKMAFLATVDADDEPTLV

SEQ ID NO: 18867 - protein, 1309 aa, Oryza sativa
  Clone ID: TF_OSC900319j.C1.p16.fg
MVKTRNDLRDSNGASGSEEQTDEAHTSGAPGSSSSPPPENPTVTQMMTMMMQQMQQHYHQMLQQVQQNQQFGPPPSHVSKLLDFLRIQPPTFSSTTNPMEANDWLRAIEKKLNLLQCNDQEKVAFATHQLQGRQLDRKRKTAQISFPQGNNQKPRFMTGQLGGPSTLIVCQHRPYRPSNFNNYYNGGSHNNSKQHNHNSTPPPLMAPAQSDPPAVSAQSEQPKKGAVGKPGPCFNCGKHGHFASKCPKLNRTGPRFIQAHANHVSAMEAQAAPEVVLGTFPVNSYPATVLFDSGASHSFISKRFAGTHGLSVVELKIPMQVHTPGNDMRTAHYCPSVTIEIRRSPFLSNLILLESKDLDVVLGMDWLTRNKGVIDCASRTITLTNDKGEKITFRSPASQKSVASLNQAAIEGQTETVEKSPRKLEDIPIVQEYPEVFPEDLTTMPPKREIEFRIDLAPGTAPIYKRPYRMAANELAEVKKQVDEQLQKGYIRPSTSPWGAPVIFVEKKDKTKRMCVDYRALNEVTIKNKYPLPRIDDLFDQLKGAKVFSKIDLRSGYHQLRIREEDIPKTAFTTRYGLFECTVMSFGLTNAPAFFMNLMNKVFMEFLDKFVVVFIDDILIYSKSEEQHEQHLRLVLEKLKEHQLYAKFSKCDFWLSEVKFLGHVISAQGVAVDPSNVESVTKWTPPKTVSQIRSFLGLAGYYRRFIENFSKIAKPMTQLLKKDEKFKWSAECNQSFEELKKKLVSAPVLILPDQTKDFQVYCDASRQGLGCKANVVADALSRKSYCNALCTEDMCGKLQQDLEHLNLGIVEHGYVAALEARPTLVDQVRAAQVNDPEIAELKKNMRVGKARDFHEDEHGTIWLGERLCVPDDKELKDLILTEAHQTQYSIHPGSTKMYQDLKEKFWWVSMRKEIAEFVALCDVCQRVKAEHQRPAGLLQPLQIPEWKWEEIGMDFITGLPRTSSGHDSIWVVMDRLTKVAHFIPVHTTYTGKRLAELYLARIMCLHGVPKKIVSDRGSQFTSKFWQKLQEELGTRLNFSTAYHPQTDGQTERVNQILEDMLRACALDFGGAWDKSLPYAEFSYNNSYQSSLQMAPFEALYGRKCRTPLFWNQTGERQLFGTEVLTEAEEKVRTVRERLRIAQSRQKSYADNRRRELTFEAGDYVYLRVTPLRGVHRFQTKGKLAPRFVGPYRILERRGEVAYQLELPSNMVGIHDVFHVSQLKKCLRVPEEQASSEHIDIQEDLTYVEKPIRILETSERRTRNKVIRFCKVQWSHHSEEEATWEREDELKAAHPHLFANSSESRGQDSV

SEQ ID NO: 18868 - protein, 1424 aa, Oryza sativa
  Clone ID: TF_OSC900325j.C1.p4.fg
MVKTRNDLRNSNDASGSEEQTDEAHTSGAPGSSSSPPPENPTVTQMMTMMMQQMQQHYHQMLQQAQQNQQFGPPPSHANDWLRAIEKKLNLLQCNDQEKVAFATHQLQGPASAWWDNYVVTRPDATKVTWAEFCQNFRKAQIPEGIMAQQKREFRALQQGTRTVIEYLHEFNRLARYAPEDVRSDTEKQEKFLFGLDDELTNQLISGVYEDFEKLVDKAIRQEEQRNKMDRKRKAAQISFPQGNNQKPRFMMGQLGGPSTLIVCQHRPYHPSNFNNDYNGGSHNNRKQHNHNSTPPPLMAPAQSDPPAVSAQSEQPKKGAVGKPGPCFNCGKHGHFASKCPKLNRTRPRFIQARANHVSAEEAQAAPEVVLGTFPMNSYPATVLFDSGASHSFISKRFAGTHGLSVVELKIPMQVHTPGNDMRTAHYCPSVTIEIKRSPFLSNLILLESKDLDVILGMDWLTRNKGVIDCASRTITLTNDKGEKITFRSPASQKPVASLNQAAIEGQTETVEKSPRKLEDIPIVQEYPEVFPEDLTTMPPKREIEFRIDLVPGTAPIYKRPYRMAANELADVKKQVDEQLQKGYIRPSTSPWGAPVIFVEKKDRTKRMCVDYRALNEVTIKNKYPLPRIDDLFDQLKGAKVFSKIDLRSGYHQLRIREEDIPKTAFTTRYGLFECTVMSFGLTNAPAFFMNLMNKVFMEFLDKFVVVFIDDILIYSKSEKQHEQHLRLVLEKLKEHQLYAKFSKCDFWLSEVKFLGHIISAQGVAVDPSNVESVTKWTPPKTVSQIRSFLGLAGYYRRFIENFSKIARPMTQLLKKDEKFKWSAECNQSFEELKNRLVSAPVLILPDQTKDFQVYCDASRQGLGCVLMQEGRVVAYASRQLRPHETNYPTHDLELAAVVHALKIWRHYLIGNRCEVYTDHKSLKYIFTQPDLNLRQRRWLELIKDYDMGIHYHPGKANVVADALSRKSCCNALCPEDMCGKLQQDLEHLNLGIVEHGYVAALEARPTLVDQVRAAQENDPEIAELKKNMRVGKARDFHEDEHGTIWLGERLCVPDDKELKDLILTEAHQTQYSIHPSSTKMYQDLKEKFWWASMRREIAEFVALCDVCQRVKAEHQRPAGLLQPLQIPEWKWEEIGMDFITGLPRTSSGHDSIWVVVDRLTKVAHFIPVHTTYTGKRLAELYLARIMCLHGVPKKIVSDRGSQFTSKFWQKLQEELGTRLNFSTAYHPQTDGQTERVNQILEDMLRACALDFGGAWDKSLPYAEFSYNNSYQSSLQMAPFEALYGRKCRTPLFWDQTGERQLFGTEVLTEAEEKVRTVRERLRIAQSRQKSYADNRRRELTFEAGDYVYLRVTPLRGVHRFQTKGKLAPRFVGPYRILERRGEVAYQLELPSNMVGIHDVFHVSQLKKCLRVPEEQASSEHIDI

SEQ ID NO: 18869 - protein, 1585 aa, Oryza sativa
  unsure (1)..(1585): unsure at all Xaa locations
  Clone ID: TF_OSC900398j.C1.p13.np
PGHRQVGPTCRPLLPPQPTAPPPPKPPPTPPVSPPAAHSARNPKPTSPPTFPAPPASRGPANGGGDLKFPMVKTRNDPRDSNDASGSEEQTDGAHVSGASGSRSSPPPENPTVTQMMTMMMQQMQQHYHQMLQQAQQNQQFGPPPSQSKLLDFLRIQPPTFSSTTNPMEANDWLRAIEKKLNLLQCNDQEKVAFATHQLQGPASAWWDNYVATRLDATEVTWAEFCQSFRKAQIPEGIMAQXKREFRALQQGTMSVTEYLHEFNRLARYAPEDVRTDAEKQEKFLFGLDDELTNQLISGVYEDFEKLVDKAIRQEEQRNKMDRKRKAAQISFPQGNNQKPRFMTGQLGGPSTLIVCQHRPYHPSNFDNDYNGGSHNNSKQHNHNSTPPPLMAPAQSDPPAVSAQSEQPKKRAVGKPGPCFNCGKHGHFASKCPKLNRTGPRFIQAHANHVSAVEAQAAPEVVLGTFPVNSYPATVLFDSGASHSFISKRFAGTHGLSVVELKIPMQVHTPGNDMRTAHYCPSVTIEIRRSPFLSNLILLESKDLDVILGMDWLTRNKGVIDCASRTITLTNDKGEKITFRSPASQKSVASLNQAAIEGQTETVEKSPRKLEDIPIVQEYPEVFPEDLTTMPPKREIEFRIDLAPGTTPIYKRPYRMAANELAEVKKQVDEQLQKGYIRPSTSPWGAPVIFVEKKDKTKRMCVDYRALNEVTIKNKYPLPRIDDLFDQLKGAKVFSKIDLRSGYHQLRIREEDIPKTAFTTRYGLFECTVMSFGLTNAPAFFMNLMNKVFMEFLDKFVVVFIDDILIYSKSEEEHEQHLRLVLEKLKEHQLYAKFSKCDFWLSEVKFLGHVISAQGVAVDPSNVESVTKWTPPKTVSQIRSFLGLAGYYRRFIENFSKIARPMTQLLKKDKKFKWSAECNQSFEELKKKLVSAPVLILPDQTKDFQVYCDASRQGLGCVLMQEGRVVAYASRQLRPHETNYPTHDLELAAVVHALKIWRHYLIGNRCEVYTDHKSLKYIFTQPDLNLRQRRWLELIKDYDMGIHYHPGKANVVADALSRKSYCNAVCTEGMCDKLQQDLEHLNLGIVEHGYVAALEARPTLVDQVRAAQVNDPEIAELKKNMRVGKARDFHEDENGTIWLGERLCVPDDKELKDLILTEAHQTQYSIHPGSTKMYQDLKEKFWWVSMRREIAEFVALCDVCQRVKAEHQRPAGLLQPLQIPEWKWEEIGMDFITGLPRTSSGHDSIWVVVDRLTKVAHFIPVHTTYTGKRLAELYLSRIMCLHGVPKKIVSDRGSQFTSKFWQKLQEELGTRLNFSTAYHPQTDGQTERVNQILXDMLRACALDFGGAWDKSLPYAEFSYNNSYQSSLQMVPFEALYGRKCRTPLFWDQTGERQLFGTEVLTEAEEKVRTVRERLRIAQSRQKSYADNRRRELTFEAGDYVYLRVTPLRGVHRFQTKGKLAPRFVRPYRILERRGEVAYQLELPPNMVGIHDVFHVSQLKKCLRVPEEQASSEHIDIQEDLTYVEKPVRILETSERRTRSKVIRFCKVQWSHHSEEEATWEREDELKAAHPHLFASSSESRGRDSV

SEQ ID NO: 18870 - protein, 1635 aa, Oryza sativa
  unsure (1)..(1635): unsure at all Xaa locations
  Clone ID: TF_OSC900414j.C1.p9.np
RRLSWFRPLAWGNTLRLVCRLDLCQLKRQECYRLGLVPGPYRARATDDMLRTVSLIIRLQPTAPPPPKPPPTPPVSPFPAPTPPVPHAHVAAPSPHLPPARAPANGGGFEISPTLSLLLHMVKTRNDPRDSNDASGSEEQTDGAHVSGASGSRSSPPPENPTVTQMMTMMMQQMQQHYHQMLQQAQQNQQFGPPPSQSKLLDFLRIQPPTFSSTTNPMEANDWLRAIEKKLNLLQCNDQEKVAFATHQLQGPASAWWDNYVATRLDATEVTWAEFCQSFRKAQIPEGIMAQXKREFRALQQGTMSVTEYLHEFNRLARYAPEDVRTDAEKQEKFLFGLDDELTNQLISGVYEDFEKLVDKAIRQEEQRNKMDRKRKAAQISFPQGNNQKPRFMTGQLGGPSTLIVCQHRPYHPSNFDNDYNGGSHNNSKQHNHNSTPPPLMAPAQSDPPAVSAQSEQPKKRAVGKPGPCFNCGKHGHFASKCPKLNRTGPRFIQAHANHVSAVEAQAAPEVVLGTFPVNSYPATVLFDSGASHSFISKRFAGTHGLSVVELKIPMQVHTPGNDMRTAHYCPSVTIEIRRSPFLSNLILLESKDLDVILGMDWLTRNKGVIDCASRTITLTNDKGEKITFRSPASQKSVASLNQAAIEGQTETVEKSPRKLEDIPIVQEYPEVFPEDLTTMPPKREIEFRIDLAPGTTPIYKRPYRMAANELAEVKKQVDEQLQKGYIRPSTSPWGAPVIFVEKKDKTKRMCVDYRALNEVTIKNKYPLPRIDDLFDQLKGAKVFSKIDLRSGYHQLRIREEDIPKTAFTTRYGLFECTVMSFGLTNAPAFFMNLMNKVFMEFLDKFVVVFIDDILIYSKSEEEHEQHLRLVLEKLKEHQLYAKFSKCDFWLSEVKFLGHVISAQGVAVDPSNVESVTKWTPPKTVSQIRSFLGLAGYYRRFIENFSKIARPMTQLLKKDKKFKWSAECNQSFEELKKKLVSAPVLILPDQTKDFQVYCDASRQGLGCVLMQEGRVVAYASRQLRPHETNYPTHDLELAAVVHALKIWRHYLIGNRCEVYTDHKSLKYIFTQPDLNLRQRRWLELIKDYDMGIHYHPGKANVVADALSRKSYCNAVCTEGMCDKLQQDLEHLNLGIVEHGYVAALEARPTLVDQVRAAQVNDPEIAELKKNMRVGKARDFHEDENGTIWLGERLCVPDDKELKDLILTEAHQTQYSIHPGSTKMYQDLKEKFWWVSMRREIAEFVALCDVCQRVKAEHQRPAGLLQPLQIPEWKWEEIGMDFITGLPRTSSGHDSIWVVVDRLTKVAHFIPVHTTYTGKRLAELYLSRIMCLHGVPKKIVSDRGSQFTSKFWQKLQEELGTRLNFSTAYHPQTDGQTERVNQILXDMLRACALDFGGAWDKSLPYAEFSYNNSYQSSLQMVPFEALYGRKCRTPLFWDQTGERQLFGTEVLTEAEEKVRTVRERLRIAQSRQKSYADNRRRELTFEAGDYVYLRVTPLRGVHRFQTKGKLAPRFVRPYRILERRGEVAYQLELPPNMVGIHDVFHVSQLKKCLRVPEEQASSEHIDIQEDLTYVEKPVRILETSERRTRSKVIRFCKVQWSHHSEEEATWEREDELKAAHPHLFASSSESRGRDSV

SEQ ID NO: 18871 - protein, 309 aa, Oryza sativa
  Clone ID: TF_OSC423524j.C1.p5.fg
MAEKEVGRIFVGGLSWDTTERTLERAFSEYGKVIETQMVVLERDTGRSRGFGFVTFSEPRAVDAAIRGMHNGELDGRTISVNKAQPRMNTDDGYGYGGGGGGGGTYSSGARGGYRGGGDAVPSANDDCFKCGRAGHWARECPYSSGGGGGRTGRYSPPSRYGSGTGGGRGDRFGGSDRFANRYVDDRYDGGRYVDDRYGGGGRDRYATDRYPPTADRFTGDRYGGSDRYASSGFTRERSYERDGGRSGGSYYRDEPRGSGGYDRGGMRMGSGDRYGTGGPARFAGSYRDRPAPYDRPSRAAARTYDDRY

SEQ ID NO: 18872 - protein, 199 aa, Oryza sativa
  unsure (1)..(199): unsure at all Xaa locations
  Clone ID: TF_OSC423524j.C1.p9.gp
GGYRGGGDAVPSANDDCFKCGRAGHWARECPYSSGGGGGRTGRYSPPSRYGSGTGGGRGDRFGGSDRFANRYVDDRYDGGRYVDDRYGGGGRDRYATDRYPPTADRFTGDRYGGSDRYASSGFTRERSYERDGGRSGGSYYRDEPRGSGGYDRGGMRMGSGDRYGTGGPARFAGSYRDRPAPYDRPSRAAARTYDDRYX

SEQ ID NO: 18873 - protein, 1868 aa, Oryza sativa
  Clone ID: TF_OSC400058j.C1.p8.fg
MAARMVTAGLRPPHAWAKRAVRGGALVVVPAVAEPRPWQAARTCLLGSEAGRINVGVEAGTREEMVQAWQAGAWMATVTGELVWHLIDHLHAGSLLVTLGGCRLLDGLWRSCPVTSPRRLWRRPGAGFAITGTLLMEIDHRNLQLNAQAMNALFNSLSQEEFDRVSNLETAYEIWNKLAEIHEGISEYKDAKLHFLKIQYETFSMLPHESVNDMYGRLNVIVNDLKGLGANYTDLEVAQKMLRALPEKYETLVTMLINSDMSRMTPASLLGKINTNDMYKLKKKEMEEVSHSKKCIVLQAEVKDKGKGKVNEANEDLEEEIALLARRCFECGEKGHFASKCPSKDDDGDKSSKKKSGGYKLMKKLKKEGKNIEAFIGEWDSNEESSASSGSEEEGGDDASSKKKKMAVVAIKEAPSLFAPLCLMAKDSSKVAFLSDSESDDDCDDVSYDELVSMFKELYAYSEKEIVKFKARKKDHASLEVLYEELKTSHERLTISHEKLKEAHDNLLSTTQHGVLIDVGISCDLLDDSAICHIAHVVSSSISTSCDDLVDMPSSSSSTCVSICDASLVVENNELKEQVVKLNKSLEMCFKGRLMMVALLLDMWVPLYSVVNYRTGGSHCVLDSGCTQHMTGDRAMFTIFEVGGKEQEKVTFGDNSKGKVIGLVAKTSMGWLWHRRLAHVCVNQLSKLSKRDLVVGLKDVKFEKDKLCSACQAGKQVACSHPTKSIMSTSRPLELLHMDLFGPTTYKSIGVERKNRTLIEMAMTMLDEYGVSDSFWAEAINTACHATNWLYLHRLMKKTFYERIIGRKPNVAYFRVFGCKCYIYQKGVRLTKFESRCDEGFLLGYASNSKAYRVYNKNKGIVEETADVQFDETNGSQEGHKNLDDVGDEGLMRAMKNMSIGDVKPTEVEDKPSTSTQDEPSTSATPSQAQVEVEEEKAQDPPMPPRIHTALSKDHPIDQVLSDISKGVQTRSRVASICEHYSFVSCLEPKHVDEALCDPDWMNAMHEELNNFARNNVWTLVERLRDHNVIGTKWVFRNKQDENGLVVRNKARLVAQGFTQVEGLDFGETFAPVARLEAIRILLAFALCFDIKLFQMDVKSAFLNGEIAELVFVEQPPGFEDPKNPNHVYKLSKALYGLKQAPRAWYERLRDFLLSKDFKIGKVDTTLFTKIIGDDFFVCQIYVDDFIFGSTNKVFCKGFGDMMSREFEMSMIEELSFFLGLQIKQLKDGTFVSQTKYIKDLLKRFGLEDAKPIKTPMATNGHLDLDEGGKPVDLKLYRSMIGSLLYLTASRPDIMFSVCMCARFQAAPKECHLVAVKRILRYLKHSSTIGLWYLKGAKFKLVGYSDSDYAGCKVDRKSTFGSCQMLGRSLVSWSSKKQNSVALYRRGGICFGGNYILIFGQNEIFLQNEIEREFEKSFKTKLRWSDRARSAVDGLTELGRRSDRHVDGGLTGRYPPQMPPRTRHSRREPTPDPVSEESSGDEYAQSDEEVEANVEGASEEESGDDVSGSGEDEDEGSDDMHIDPSIQFVVNMRNPSQYTILRHHDQFLRPRDTRNPRFHTAFQKMWVAGDYSEMKWMSDTLQCSISRRQFWRLLSIRLDFGDDLHEEHTHNPLSIDYVSQFYEDGVWYTHGKVAGLRTIPCVVNRIVRVTILPRLGNNDDIRGVAWHVIDAIIQGHQFDIVSLMMQEIAISKATFTQGIYYAPYIMRLIQDKLGAVGQNLKKHKQYKPRLQLGAPRAPRAAPSSHPGASSSSAPPPPHGYDPNAFFYPQYAYFGMQPNEYFNPVLGAINTLSESIQRLSTGHEALHENVRGLRTDVGDLNASVGRLHTRVGTLDSRVQMLESSQAFVYHRRRDAPHPSTSARPPPLQE

SEQ ID NO: 18874 - protein, 931 aa, Oryza sativa
  Clone ID: TF_OSC900191j.C1.p6.fg
MSNTGHNGNTGDKEKEVPVNINGVNTASNSNRGPFLGSFSVVGFAATLKHHAFDGSNYKRWKARALLWLTAMQCFYVSRGKQSEPPLSSEKEAKFEASDCLFRGALISVLADNIVDVYIHMPSRKDMYDALEAKFRVSDAGNELYVMEQFYDYKMVDDHSVVQQAHEIQMLAKELENNNCELPGKFVAGGIIAKLPPSWLDFATSLKHKRQKFSVTDLIGSLGVEEKERAKDNRGNKIEGGTRSPPTWLLARVDEHWGTATTNFKKKGKGKAKGNCFVCGKPRHWAKNCPDRRDKKSANMVISKGGGTLGYGRERFLFVDGKRIACGCSWCCMLTKGGNKYFMTLIDDCTRFCYVYLLKTKDEALHYFKIYKAETLRDFPRNGWGEAILTAFHVLNKIPVKHNLAKVNVPIAKKRKLGPKTVDCVFLGYAILSVGYWFLIVNSGVPDMCMGTITESRDATFFDNEFPMKNTPNTSSQEPVLPHEHFAPIEHNDQTPEENPEEDNIVDTRKSKRQRVAKFFGDDYIVYLMDYTPRTIEEAYSSPDADYWKEVKARLVAKGYTQKEREDFFDTYSLVARLTTIQVLLALAASHGLLVHQMDVKTAFLNRELEEKIYMDQPDEYVLEGQEGMVCKLLKSLYGLKQAPKQWHEKFDTTLTSAGFVVNEVDKCVYYRYGGGEGVILCLYVDDILIFGTSLKVIEEVKDFLSKSFEMKDLRVADVILNIKLLRGDEGGIILVQSHYVDKMIIGKLWKRVMRYLKGTVSYGIHYTGYPKVLEGYSDSNWISDADEIEATSGYVFTLGGGAVSWKSCKQTILTRSTMEAELTALDTATVEAEWLRELLMDLPVVKKPVPAILMNCDNQTMIIKVNSSKDNMKSARHVKRRLKSVGKQKKSRVIALDYVQTAKNLVDQFTKGLLHNVIDSASREMGLRPT

SEQ ID NO: 18875 - protein, 1824 aa, Oryza sativa
  unsure (1)..(1824): unsure at all Xaa locations
  Clone ID: TF_OSC28808j.C1.p2.np
RGDHPTNYRGEGIDDFVAELARMTLVVGYPNASEYSTVPPLSGKLPHRVRLEVHGXVGTCLANMVVVASGGTADHACQEAAYLMMARLRERDNYIFCNTAYRFHPRRASGDGVSTFRPTAGENDTTFGHMCAMMRGMDRMHSDLHKASKALNDGKLVRIIALKDEIARLKKENAHLKGLPIPGGVRIRTMPRKSTTAPVRIXLAPRNPPPPAALAAPPVPPAVPAAPAAPPPVPAPVPVSAPASALSFAPASAARGPASGNGGWLPATPSGSRDRSSSGSELGSGETYLLDSRSRSEGPGLFLQMANTRNGSRAAGEGSNGEERTDGGYPNSASGNGPPPLPENPTLAPVMAHQTQMMAAMMQQMQQRHQQMHQRMQQQAEQQXQQFGPPPPQSKLLEFLRVRPPTFSSTTNPMEANDWLHTIEKKLNLLQCNDQEKVAFATHQLQGPVSAWWDNHMATRPAGTEVTWVEFCRSFRKAXVPDGVVAQKKREFRALHQGNRTVTEYLHEFNRLAXYAPEDVRTDAEKQEKFLAGLDDELTNQLISGDYADFEKLVDKAIRQEDQRNKVDRKRKPAQFRSNQGSHQRPRFTPGQQGGPTTMIVRQHRPFNSSSFHPGASGSXNHQGGQLNCSAALRPPMAPAQSVPSAQAKKETRAKPRSCFNCGEHGHFANKCPKPRRAGPRFAQARVNHASAEEAQAAPEVVLGTFLVNSVPATVLFDSGATHSFISKKFVGMHGLRKEELSTPMRVHTPGNSSTSVSYSPLVLIEIHLSQFLANLILLESKDLDVILGLDGLTKFKGVIDCANRTVTLTNEKGETMVYKSPVSPKQRISLNQIEVENPVTTEEKSSRKLEDIPIVCEYPEVFPEDLTTMPPKREIEFRIDLAPGNAPIYKRPYRMVANELAEVKKQVDEQLQKGYIRLSTSPWGAPVIFVDKKDKTKRMCVDYRALNEVTIKNKYPLPRIDDLFDQLNGAKVFSKIDLRSGYHQLRIREDIPKTAFTTRYGLYECTVMSFGLTNAPAFFMNLMNKMFMEFLDKFVVVFIDDILIYSKLEEEHERHLRLVLEKLEEHQLYAKFSKCDFWLSEVKFLGHVITAQGVAVDPSNVESVTKWTPPKTVSQIRSFLGLAGYYRRFIENFSRIARPMTQLLKKDEKFKWTAECDKSFEEFNKKLVSTPVLILPDQTKDFQVYCNASRHGLGCVLMQEGRVVAYASRQLRPHEGNYPTHDLELAAVVYALKIWTRYLIGNRCEVYTDHKSLKYIFTQPDVNLRQRRWLELIKDYDMSIHYHPGKANVVADALSRKSYCNTLCTEGMCKELQQELEHLNLGLVEYGYVAALEARPTLVDQVRAAQVNDPEIADMKKNMRVGKARDFHEDEHGTIWLGERLCVPDDKELKDLILTEAHQTQYSIHPGNTKMXQDLKEKFWXVSMRREIAEFVALCDVCQRVKAEHQRPAGFLQPLQIPKWKWEEIGMDFITGLPRTSSGHDSIWVVVNRLTKVAHFIPVHTTYTGKKLAELYLARIMCLHGVPKKIVSDRGSQFTSKFWQKLQKELGTRLNFSTTYHPQTDGQTERVNQILEDMLRACVLDFGGAWDKSLPYAEFSYNNSYQASLQMAPFEALYGRKCRTPLYWDQTGERQLFATEVLTKAEEKVRTVRERLRIAQSRQKSYADNRRRELTFEAGDYMYLRVTPLRGVHRFQTKGKLAPRFVGPYKILEQRGEVAYQLELPSNMIGIHVMFHVSQLKKCLRVPEEQADSEHIDIQEDLTYVEKPVRILETSERRTRNKVTRFCRVQWSHHLEEXATWERENGLKAAHPHLFTSSSESRGRDSV

SEQ ID NO: 18876 - protein, 1595 aa, Oryza sativa
  Clone ID: TF_OSC416746j.C1.p20.fg
MGTPGDQGILDEFSTNPFHAKKNKNWILIADNEVIANVAASYMSFMSALNLGLWLQSGVGTRAAVDDSIKKATPDRWLVMGAIALRAEPEFWARLVQRLDVCTFTRESGSPPGVVFLNSGERSDSGEGRNTWYQSRRSSGGGMSRHSEPHGGRSHTPPRRRRLSISPEPTRGRGGPKIIVRRTIKEANATIQYPTLTRTNYDEWAMLMQVNMEAAGIWYAVEPYPDEEVEYRDDRLALAAILRSVPSEMLPTLRGKRSARAAWDAIKTIRVGVERVRESKAQQLRREFAALTWKEGETAEDFSVRITGLANNLRTLGDNISDADVVRKMLDVVPEHLEQIAVAVETLLDLNTVSVEEVTGRLRAVEQRRHRSAPVVNNQGRLLLTQEEWMAKLKNPGASGEKGTPSGSGGGGNKRTGGSRRHDRGKGGSRQAAGPGDGSNQPKKTDKCRYCGKKGHWAKECRSRLRDEAHLAQGEEEEEPMLMVATAQVNAISSSSPPRFTSLPALEQIHLDESKLFVQLGGEHGGEATRWILDTGATNHMTGTRSAFSELNTGIRGTVKFGDGSVVGIEGRGTVLFKCKDGEHQALEGVYHIPRLTTNIVSLGQLDEEKFKWSCEDGVLKIWNKQRRLLAKVVRSPNRLYVVKLNIGRPVCLAAQGGDIAWRWHARFGHLNFRALEKLGRAVMVRGLPLINHVDQVCDSCLVGKQRRLPFPSKAKYRAKEKLELVHGDICGPVTPATPSGNKLFLLLVDDLSRYMWLILLSSKDQASVAIKRFLACAEAEAGRKLRTLRTDRGGEFTAHAFAEYCAEHGIQRHLTAPYTPQQNGVVERRNQTVMGMARSMMKAKSLPGWFWGEAVNTAVFLLNRAPTQCVDGKTPFEVWHGVKPPVHFLRTFGCVAHVKNGGQRLAKLDDRSMPMVFVGYEAGTKAYRFYNPVSRRVHVSRDAVFEEERSWEWGAEKGAGPDDDIEPFVVEHLATGPTGQGGPVAATPTATQRSTSAPAPMAPPATPSQAGTPTHGAGPRTPASASSPAIEFASPPQGDLDLDNDHDDDVPLRFRTVDNLLGASSPPGLAEREVTEGLMVAIEDEPATAEEAKQVKEWREAMIEEMASIEHNKTWSLVELPAGQRAIGLKWVFKIKKDEHGNITKHKARLVAKGYVQRQGIDYEEVFAPVARIESVRVLLAVAAHRSWSVHHMDVKSAFLNGDLAEEVYVQQPPGFVAAGHERKVLKLHKALYGLKQAPRAWNSKLDSSLLMLGFARSECEHGLYTRSDGEKRLVVGIYVDDLIITGGSTEVINTFKTEMKTLFRMSDLGVLSYYLGIEVRQGRRGIELLQAAYAKKILEKAGMGTCNPCATPMEARLKLSKQSTSPAVDATEYRSLIGSLRYLMNTRPDMAFAVGYLSRFMENPRQEHLAAMKHLLRYVAGTIDYGLVYTSGDTEFNLVGYSDSDMAGDIDDRKSTSGIIYFLGGNPVAWQSQKQRVVALSSCEAEYIAGAAAACQGVWLRRLLQDVVGVSGPPPQLKMDNQSAIALSKNPVLHDRSKHIDTKFHFLRECVDSGAVRLAFVSTQAQLADIMTKALGRSKFQELRELIGVTKLK

SEQ ID NO: 18877 - protein, 347 aa, Oryza sativa
  Clone ID: TF_OSC10366j.C1.p2.fg
MSGHTGDGNDGEKGARIPFDYPSTSTSYVSTYSGKAPYFNGKDYAAWKHKMKMHLKSINPSIWRIVEKGYVLQNPEDPTKEDNENEHKNAQAANAILSALSRSEFNRVDGIESAKVIWDTLRNLHEGTDSVRESKVEILKGQFERFVMLDGEIPSDMYDRLSKIVNEIKGLGSKDMTDEVVVKKMVRAITPRNSTLVTIIRERPDYKTLTPYDLLGRILAHDMLVQDSKDVIQYINQSSTASIKKEDLALKAEEEEEENRKSKSKVEIDDEEMALFVKKFGKFMRQSGFFKGSSSKHYSNKSSGRHSARVCYVCKEPGHFIAECPHLKDGSHLKEDKKKGEKKDEKK

SEQ ID NO: 18878 - protein, 1517 aa, Oryza sativa
  Clone ID: TF_OSC401417j.C1.p15.np
TRLRSGGDKPTGVAGESMPYSARNQNNNHHNSQLPPPPTRNSGASGSRPTGAMDPTLAQILAAQSQLFDRLVATQEALGNALLQNNRQPQSKLAEVQRTQPPVFSAAADPLDADDWLRDIENKLNFVRCDDEEKATYAAYYLQGAAAAWWETYKSTLPQGTAITWNVFKQGFRTAHVPEGLMKAKRKEFLNLTQGDLPFMEFLSRFNYLARYATDELGTTEARKVQLCLDRLSPELKHGLSTHEIDSMKTLVDKALRWEASEKEVAVDRKRKFLARRATVSRSSRPRTWQPAPAARPASAPPQRLQYAPGGYNRAANVPGGYNRAANVNCFNCGKLGHYSNNCPYPRRTGAPPPRPAAPQPSSTGPWRPCCCSVGAEPLPSAQNFGRGRLNHATAEEAVDAPDVVLGTFLVHSVPVVLFDSGASHSFISTKVAKQNNIATTLLDTPMIIQSPGSTFKTRTICKDVPILIDKVEFKADLIQVSSLSLDVILGMDWLSKHKGNINCASKTISFVNTNGKTATFTSNKATTSKQPCINSLIKPELESIPVVCEYPDVFPDELPGMPPDRDIEFVIDLVPGATPVAKQPYRMTSDELVELKKQIDEQLEKGFIRHSSSPWGCPVLFAPKSDGTLRLCVDYRPLNEVTIKNKYPLPRIDDLFDQMTGAQVFSKIDLRSGYFQLKIRPEDIPKTAFRTRYGLFEYTVVSFGLTNAPATFMNLMNKVFMEYLDKFVVVFIDDILVFSKNEEEHAQHLRLVLDKLREHQLYAKFNKCEFWMNEVAFLGHVISGGGIAVDPSKVESVLNWEQPKTVTEVRAFLGLAGYYRRFIGNFSKIARPLTQLLKKENKFVWSEVCEASFQELKKRLTTAPVLIMPDIHKNFDVYCDASQNGLGCVLMQERKVVAYASRQLRPHELNYPTHDLELAAVVHALKIWRHYLIGKRCEIYTDHKSLKYFFTQPDLNLRQRRWLELIKDYDLGIHYHPGKANVVADALSWKLNHISASELVTQPELLLEFQKLNLGVVEEGFVTALALQPTLLSQIKEAQLTNQEVAEIKKEMASGKPTIFSLDDDGVVVHGKQLFVPDTQHLRELILTEAHESPMSIHPGCTKMYQDIRSLYWWPTMRRDIAAYVAICDVCQRVKAEHQRPAGLLQPLQIPEWKFNEVGMDFITGLPKTSNGHDSIWVIVDRLTKVAHFIPVNVSYNGAKLAKLYLTHIVRLHGVPKAIVSDRGPQFTSRFWENLHELLGTQLFFSTAFHPQTGGQTERTNQILEDMLRSCVLSYNTNWEKCLSFAEFSYNNSYQASLQMSPFEALYGRKCRTPLFWSEVGERQLFGPAVIKEAEQNVALIRNRLKEAQSRQKSYSDRRRRELSFEVGDYVYLKVSPLRGTRRFQVHGKLAPRYIGPYRVLAKRGQVAYKLQLPSQLSDVHDVFHVSQLKKCLRVPTELTPLEDINIQPDLSYQEYPIRILEEAERHMRSRSIKMLKIQWSNHTPEEATWEREDRLRADFPSFFSDPIKSRGRDFV

SEQ ID NO: 18879 - protein, 1299 aa, Oryza sativa
  Clone ID: TF_OSC418198j.C1.p21.fg
MGENQGLEQVMGKLVEMLAKKFNEAPTTSSAVVPHTESVQKIELMQNDIKLEGVKNYLSWSRRALLILKTKGLEGYVTGEIKEPENISSVEWKTWSTTNSLVVAWLLTSLIPAIATTVETISSASEMWKTLTNLYSGEGNVMLMVEAQEKISVLRQGERSVAEYVAELKHLWSDLDHYDPLGLEHPDCIAKMRKWIERRRVIEFLKGLNSEFEGRRDAMFHQTTLPSLDEAIAAMAQEELKKKVLPSATPSSPSPTYVVAQSKETRECFNCGEMGHLIRDYRAPRKPSYGRGRFGDRGGARGGRGYAGRGNRGRGYEYRSDHRANVVTLEESCSGSTNVDVANLVHSSSGNSNQAFMSINSSHSNWILDSGASRHVTVNLVSISSLVDHMNCRVSLDRENCLIQERETGKKLGIGVRRDGLWYLDRKETSEDVCLALMAPTSEEEAKFIRTDNGGEYINNEFSSFLSSEGILHQTSCPDTPPQNGVAERKNRHLLETARSLMYAMNVPKFLWSEAVMTATYLINRTPSRILGMKTPCEMIFGKNEFVVPPKVFGCTCFVRDHRPSIGKLDPRAVKCIFVGYSSGQKGYKCWSPSERRTFVSMDVTFRESVPFYGEKTDLSSLFIDLDDSTSGHDGHQMKDEILGPKGDEQPKKEKLVVGSIPCPMGGPVAQEQEWRKPHEEKNLQVYTRRTRCPVIQQVEEDNQVEEDVSREQGSLESGGEEEEVREESDLPIAIRKSVRSNAGKPPLRYGFEAQDEGDDENNISNYVSYDSLSSTYKAFIASLDSVQIPKDWREAKQDPRWHQAMLDELEALEKNKTWDLVPFPKGKKIVNCKWVYTVKQNPDGKVERYKARLVAKGYSQTYGIDYDETFAPVAKMSTVRTLISCAANFDWPLHQLDVKNAFLHRDLQEEVYMDVPPGFATSQTKGKVLRLKKSLYGLKQSPRAWFDRFRRAMCAMDYKQCNGDHTVFYHHSGDHITILAVYVDDMIITGNDCLEITRLKRNLSKEFEVKDLGQLRYFLGIEIARSPRGIVISQRKYVLDLLSETGMLGCCPVSTPIDQNHKLCAESGDPVNRERYQRLVGRLIYLCHTRPDITYAVSMVSRYMHDPRSSHMEAVYRILRYLKGSPGKGLWFKKNGHLKIEGYCDADWASCLDDRRSTSGYCVYVGGNLVSWRSKKQSVVSRSTAEAEYRAMAASLSELLWLRNLLVELKILGNTPMKLLCDNKSAINIANNPVQHDRTKHVEIDRFFIKEKLDEGVLELGFVTSGGQVADCLTKGLGVKECNCSCDKMGMIDIYHPS

SEQ ID NO: 18880 - protein, 1393 aa, Oryza sativa
  unsure (1)..(1393): unsure at all Xaa locations
  Clone ID: TF_OSC10678j.C1.p1.np
LCSXAAKSFPGSVHLHSQVYRTSSWNSVRLRTCTGRRAIKFLGSAKRDCSCFRDYYCYIDAFVNMSTEIGDKEVNVNGGNTASKSSGGTFLGSFSVVGFAASLKPHAFDGSNYKKWKARTLLWLTAMHCFFVSRGKPSEPPLSPEEEAKFEASDCLFRGVLISVLVDYIVDVYMHMPSGKDMWDALEAKFGVSDAGSERYVMEQFYDYNMVDDRSVVEQAHEIQMLAKELGNNNCELPDKFVADGIIAKLPLSWSDFATSLKHKRQEFSITDLIGSLGVEEKARANDNRGKKIEGGSSANLVQKKNPHTSHNNNKKVKLDVKPKATTNFKKKGKGKAKGDCFVCGKPGHXAMDCPERKDKKSANMVISEGGGTLWYGKFLPTVLSVCHSPDWWVDTGANIHVCADISLFSSYQVGRGSSLLMGNGSLVAVHGVGTVDLKFTSGKIVQLKNVQHVPSIKKNLVSGSLLCRDGFRLVFEYNKCVISKYGTFIGKGYDSGGLFRFSLNDMCNVVNHVSDDNDESNVWHSRLCHVNFGCMTGLANMSLIPKFTLVKGSKCHTCVQLKQPRKPHKASEARNLAPLELVHSDMCEMNGVLTKGGKKYFMTLIDDCTRFCYVYILKTKDEALHYFKIYKAEVKNQLERKIKRLRSDRGGEYFSNEFTSFCEEYGIIHERTSPYSPXSNRVAERKNRTLTEMVNAMLDTAELSKEWWGEAILTACHVLNRIPTKHKEVTPFEEWERKKLNLSHLRTWGCLAKINVPIAKKRKLGPKTVDCVFFGYAIHNVGDRFLIVNSGVPDMRVGTITESRDATFFENEFPMKNAPSTSSQEPILSPEHFVPIKHIDQTLEENPKEDNIVATRKSKRQRTAKSFGDDYIVYLVDDTSRTIEEAYSSPDADYWKEAIRCEMNSIMSNGTWEVVERIYGCKLVGCKWVFKKKLRPDGTIEKYKAMLVAKGYTQKEGEDFFDTYSPVARLTTIRVLLALAASHGLLVHQMDVKTAFLNGELEEEIYMDQSDGYVLEGQEGMMCKLLKSLYGLKQAPKQWHEKFDNTLTSAGFVVNEADKCVYYRYGGGEGVILCLYVDDILIFGTSLNVIEEVKDFLSKSFEMKDLGVADVILNIKLLRGDEGGITLVXSHYVDKVLSRFGYSDCKAAPTPYDPSVLLRKNRRIARDQLRYSQIIGSLMYLASATRPDISFAVSKLSRFVSNPGDDHWHALERVMRYLKGTMSYGINYAGYPKVLEGYSDSNWISDADEIKATGGYVFTLRGGVVSXKSCKQTILTRSTMEAELTALDTATVEAEWLRELLMDLPVVEKPVPAILMSCDNQTVIIKVNSLKDKMKSSRHVKRRLKSVRKQKNSGVIALDYVQMAKNLADQFTKGLPRNVIDCASRKMGLRPT

SEQ ID NO: 18881 - protein, 1008 aa, Oryza sativa
  Clone ID: TF_OSC19178j.C1.p1.fg
MSAPGAGAAAAAGGDGGGGAPPGAGAGGGAPGAGACAANNNTNGVNSASQSSGGPFSGYILLLFLFPLLALYCYVPVPDIHDVSSMLLRYCYVLVPDIHNAHDAISMLLVMLHVVTRSPYTVYAMIIVLTFWIKICRFMTIFLTIQKPDRLFSVVGFAAALKPHAFDGSNYKRWKARVLLWLTAMQCFYVSRGKRSEPPLSPEEEANFEASDCLFCGALISVLADNIVDVYMHMPSRKDMWDALEAKFGVSDTGSELYVMEQFYDYKMVDDRSVVEQAHEIQMLAKELENNNCELPDKFVAGGIIAKLPPSWSDFATSLKHKRQEFSVSDLIGSLGVEEKARAKDVRGKKVEGGSSANMVQKKNPHASHNNKKVKSDVKPKAATNFKKKGKGKAKGDCFVYGKYGHWAKDCPERKDRKSANMVISEGGGTSVYGKILPTVLSIFHSPDWWVDTGANIHVGRGSSLLMGNGSLAVVHGVGTVDLKFTSGKTVQLKNVQHVPSIKKNLVSGSLLCREGFRLVFESNKCVVSKYGTFVGKGSKCHTCVQSKQPRKPHKTSEARNLAPLELVHSDLCEMNGVLTKGGKKYFMTLIDDCTTFCYVYLLKTKDEALHYFKIYKAEFGIIHERTPPYSPQSNGVVERKNRTLTEMVNAMLDTVGLSKEWWGEAVLTVCHVLNKIPMKHKEVTPFEEWERKKLNLSYLRTWGCLAKVNVPIAKKQKLGPNTVDCVFLGYAIHSVGYRFLIVNSGVPDMHIGTIFESRDATFFENEFPMKHTPSTSSQETVMPHEHFAPIEHNDQTPEENPEEDNIVDTRKSKRQRVAKSFGDDYIVYLVDDTPRTIEEAYSSPDADYWKEAVRSEMDSIMSNGTWEVVERPYGCKPVGCKWVFKKKLRPDGTIEKYKTRLVAKGYTQKEGEDFFDTYSPVARLTTIRELLVLAASYGLLVHQMDVKTAFLNGELEEEIYMDQPDSLNVIEEVKDYLSKSFEMKDLGEADVILNIKLQRGDESGITL

SEQ ID NO: 18882 - protein, 216 aa, Oryza sativa
  Clone ID: TF_OSC2953j.C1.p1.fg
MADNLFVVEQAHEIQTMAKELELLKCVLPDKFVAGCIIVKLPPSWRGFGTALKHKILEYSVEGLIASLDVEEKAREKDAASKGDGGQSSANVVHKAQNKSKGKYKAQQTTNFKKKNINNNPNQDKMTCFVCGLPGHLAKKCPQRKGMKAPAGQTSKSTNMTIGNTVDESGYGRTGFHRPNGEWVTCFCSWCWHGRSEVYFGKDRAAEERTACPYYR

SEQ ID NO: 18883 - protein, 1108 aa, Oryza sativa
  Clone ID: TF_OSC421135j.C1.p6.fg
MSAPGAGAAAAAGGDGGGGAPPGAGAGGGAPGAGACAANNNTNGVNSASQSSGGPFSGYILLLFLFPLLALYCYVPVPDIHDVSSMLLRYCYVLVPDIHNAHDAISMLLVMLHVVTRSPYTVYAMIIVLTFWIKICRFMTIFLTIQKPDRLFSVVGFAAALKPHAFDGSNYKRWKARVLLWLTAMQCFYVSRGKRSEPPLSPEEEANFEASDCLFCGALISVLADNIVDVYMHMPSRKDMWDALEAKFGVSDTGSELYVMEQFYDYKMVDDRSVVEQAHEIQMLAKELENNNCELPDKFVAGGIIAKLPPSWSDFATSLKHKRQEFSVSDLIGSLGVEEKARAKDVRGKKVEGGSSANMVQKKNPHASHNNKKVKSDVKPKAATNFKKKGKGKAKGDCFVYGKYGHWAKDCPERKDRKSANMVISEGGGTSVYGKILPTVLSIFHSPDWWVDTGANIHVGRGSSLLMGNGSLAVVHGVGTVDLKFTSGKTVQLKNVQHVPSIKKNLVSGSLLCREGFRLVFESNKCVVSKYGTFVGKGSKCHTCVQSKHPRKPHKTSEARNLAPLELVHSDLCEMNGVLTKGGKKYFMTLIDDCTTFCYVYLLKTKDEALHYFKIYKAEFGIIHERTPPYSPQSNGVVERKNRTLTEMVNAMLDTVGLSKEWWGEAVLTVCHVLNKIPMKHKEVTPFEEWERKKLNLSYLRTWGCLAKVNVPIAKKQKLGPNTVDCVFLGYAIHSVGYRFLIVNSGVPDMHIGTIFESRDATFFENEFPMKHTPSTSSQETVMPHEHFAPIEHNDQTPEENPEEDNIVDTRKSKRQRVAKSFGDDYIVYLVDDTPRTIEEAYSSPDADYWKEAVRSEMDSIMSNGTWEVVERPYGCKPVGCKWVFKKKLRPDGTIEKYKTRLVAKMDVKTAFLNGELEEEIYMDQPDSLNVIEEVKDYLSKSFEMKDLGEADVILNIKLQRGDESGITLVQSHYVDKILSCFGYSDCKPTPTPYDPSVLLRKNRRIARDQLRYYQIIGSLMYLASATRPDISFAVSKLSRFVSNPGDDHWQALERVIRYLKGIMSYGIHYTGYPKVLEGYSDSNWISDADEIKATSGYVFTLGGGAVS

SEQ ID NO: 18884 - protein, 1413 aa, Oryza sativa
  Clone ID: TF_OSC401917j.C1.p9.fg
MSNTGDKEKETPVNTNGGNTASNSSGGPFLGYNLITLFQLEVLLLMFIAMSTLCHYVIVDAYSTLSMLMLITFTTITGSNPIVNIMIIILLFWIKICRIMTKFPTIQKPDRSFSVVGFAAALKPHAFDGSNYKRWKARALLWLTAMQCFYVSRGKRSEPPLSPEEEAKFEASDCLFRGALISVLADNIVDVYMHMPSGKDMWDALEAKFGVSDAGSELYVMEQFYDYKMVDDRSVVEQAHEIQMLAKELENNNCELPDKFVAGGIIAKLPSSWSDFATSLKHKRQEFSVPDLIGSLGVEEKARAKDVRGKKVEGGSSANMVQKKNPHASHNNKKVKPDVKPKAATNFKKKSKGKAKGDCFVCGKSGHWAKDYPERKDRKSANMIISEGGGTSGYGKILPTVLSVFHSPDWWVDTGANIHVCADISLFSSYQVGRGSSLLMGNGSLAAVHGVGTVDLKFTSGKTVQLKNVQHVPSIKKNLVSGSLLCREGFRLVFESNKCVVSKYGTFVGKGYDSGGLFRFSLNDMCNNHNAVNHISENDESNVWHSRLCHMNFGCMTRLANMSLIPKFTLVKGSKCHTCVQSKQPRKPHKASEARNLAPLELVHSDLCEMNGVLTKGGKKYFMTLIDDCTRFCYVYLLKTKDEALHFFKIYKAEVENQLERKIKRLRSDRGGEYFSNKFASFCEEFRIIHEMTPPYSPQSNGVAERKNRTLTEMVNAMLDTAGLSKEWWGEAVLTACHVLNKIPMKHKEVTPFEEWERKKLNLSYLRTWGCLAKVNVPIAKKRKLGPKTVDCVFLGYAIHSVGYRFLIVNSGVPDMHVGTILESRDATFFENEFPMKYTPSTSSKETVMPHEHFAPIEHNDQTPEENPEEDNIVDTRKSKRQRVAKSFGDDYIVYLVDDTPRTIEEAYSSPDADYWKEAVRSEMDSIMSNGTWEVVERPYGCKPVGCKWVFKKKLRPDGTIEKYKARLVAKGYTQKEGEDFFDTYSPVARLTTIRVLLALAASHGLLVHQMDVKTAFLNGELEEEIYMDQPDGYVLEGQEGMVCKLLKSLYGLKQAPKQWHEKFDTTLTSAGFVVNEADKCVYYRYGGGEGVILCLYVDDILIFGTSLNLIEEVKDYLSKSFEMKDLGEADVILNIKLQRGDEGGITLVQSHYVDKVLSRFGYSDCKPAPTPYDPSVLLRKNRRIARDQLRYSQIIGSLMYLASATRPDISFAVSKLSRFVSNPGDDHWQALERVMRYLKGTMSYGIHYTGYPKVLEGYSDSNWISDADEIKATSGYVFTLGGGAVSWKSCKQTILTRSTMEAELTALDTATVEAEWLRELLMDLPVVEKPVPAILMNCDNQTVIIKVNSSKDNMKSSRHIKRRLKSVRKQKNSGVIALDYVQTARNLADQFTKGLPRNVIDSASREMGLIPT

SEQ ID NO: 18885 - protein, 179 aa, Oryza sativa
  unsure (1)..(179): unsure at all Xaa locations
  Clone ID: TF_OSC13024j.C1.p3.np
MTGALGEEEMESKACTYCGEIGHVASMCLTLCPHCEEDHPPGECPTRKVTCFLCEGTNHVPKDCQLSVLLTKTAEIQXTTLRLSHQLVSSNSNIDDIIHSTNAPPAAPDSAINHSNNTFSTNHSLGRQPQQRIVVDGRSCVSPRPTPGRAKGNQPQEGDTKQKTVIRFNQQSEGSFSCE

SEQ ID NO: 18886 - protein, 1154 aa, Oryza sativa
  Clone ID: TF_OSC400479j.C1.p1.fg
MAGRTATTAALGYMVLGLYRRREAKARVAAGFLGCYKDDGHQRHCARNGEREDRFGKLKVTIPKFCGTNDPEEYLTWEFKVDKIFRMRNYTEETKLHMASLEFDEYALIWWEQMLNQREEHDELAVATWVEMKHEMRARFVPSHYKRDLFERLQNMRQGTRSVEEYYKEMEKAMIRAKIYNTIVQLVHQATKAEHQVQEDAKVAHNTSFTTRSLSSGGRPTPKFNLSKNFISSNSPSLNLASKKEESTQSASKKFVVPTGSSTSSVGSTPKSSNIQCFKCLGRGHMQKDCPNNKTMLILEDGEYESTSEDKDDLAADLTHFDDAQEEDEENGVVYYDFEEGPSLVVTPKVLTVQPKIDHEQRCNLFQTKAKVDGKVCKVIIDGGSCHSLASKEICNKLGLNLVRHPHPYHVQWFSDCGEVKIQFMVQVTFQIGDYCDTVECDVVPMTVCHLLLGRPWQYDRAAQHDGRTNQYKLRWKEKDIVLRPMTPSQIINENCQKLEVVVQSDKKREQKIVIHKSKDGTWRMCVDCRAINSISVRYRHPIPRLDDMLDELSGAVIFSKIDLRSGYHQIRMKEGDEWKIAFKTKFGLYEWLVMPFGLTNAPSTFMRLMNHVLRAFIGKFVVVYFDDILIYSKTMEEHLAHIRQVLEMLRSERLFANFEKCTFCREKEGKPIAYFSEKLGSAQLNYPVYDKELYALVRALETWQHYLWPKEFVIHSNHEALKYLRGQANLNRRHAKWVEFIESFPYIVRYKKGKENVVADALSRKSVLLTQLDVKVSSLESLKELYSKDSEFSDPYSKCLDGKGWEKYHVHDGFLFRADKLCVPESSLRHDVERYVQRCVTSHKAKSKLNPHGLYTPLPVPNAPWEDISMDFVLGLPRTRRGRDSIFVAVDRFSKMAHFIPCNKSDDASHVADLFFREVVRLHGVPRTIVSDRDVKFMSYFWKTLWAKLGTKLLFSTTCHSQIDGQMEVVNRTLSMLLRMMIKKNLKEWEDCLPHVEFAYNRVVHSTTQLSPFEVVYGFNPITPLDLLPLPLQERANMEATKRADYVKKMHEKTKETIERIIQSYAAKANKDRKKMLFQPGELVWVHLRKDRFPEKRKSKLMPHGDGPFRVLEKITDNAYKIDLPGDYTVSNTFNVVDLSPFFGTEETDSRTI

SEQ ID NO: 18887 - protein, 1040 aa, Oryza sativa
  Clone ID: TF_OSC401033j.C1.p4.fg
MADNRSVVEQAHEIQTMAKELELLKCVLPDKFLAGCIIAKLPPSWRGFGTALKHKRQEYSVEGWIASLDIEEKAQEKDAASKGDGGQSTANVVHKAQNKSKGKYKAQQTTNFKKKNNNNNSNQDERTCFVCDQPDHLARKCPQRKRMKALAGQTSKSANVTIGNTGDGSGYGHTGFHRPNGEWVTCFCSWCWHGRSKVYLGKIVQLKNVQHVPSIDRNLVSGSRLTRDGFKLVFESNKVVMSKHGYFIGKGYECGGLFRFSLSDFCNKSVNHICGSVDDEANVWHSRLCHINFGLMSRLSSMYLIPRFSIVKGSKCHSCVQSKQPRKPHKAAEERNLAPLEFLHSDLCEMIGVLTKGGKRYFMTLIDDATRFCYVYLLKMKDEALDYFKIYKAEVENQLDRKIKRLRSDRGGEFFSNEFDLFCEEHGIIHESAPPYSPESNGIAERKNRTLTNLVNAMLDTAGLPKAWWGEALLTSNHVLNRVPNRNKDKTPYEIWIGRKSSLSYLRTWGCLAKVNVPITKKRKLRPKTMDYVFLGYAHHSIADRFLIVKSEVPDMHVGTIMESRDPTFFESFFPMNDTHSSSSQPSEIIPSSITPPEQTEYTHEHVTEEDDSEAPQRSKRQRTTKSFGDDFTVYLVDETPKSISEAYASPDADYWKEAVRSEMNSIIANGTWEVTERPYGCKPVGCKWVFKKKLRPDGTIEKYKARLVAKGYTQKEGEDFFDTYSPVARLTIIRVLLSLAASHGLLVHQMDVKTAFLNGELDEEIYMDQPDGFVVEGQEGKVCKLLKSLYGLKQVPKQRHEKFDKTLTSAGFTVNEADKCVYYRHGGDLGVADVILNIKLIRGENVITLLQSHYVEKILNRFGYIDSTMELGLHYSGYSAVLEGYSDFNWISDVDEIKATSGYVFTLGGAAVSWRSCKQTILTRSTMEAELMALDTATVEAEWLRDLLMDLPIVEKPVPAILMNCDNQTVIVKVNSSKDNMKSSRHVKRRLKSVRKLRNSGVITLDYIQTARNLADPFTKGLSRNVIDNASKEMGLRPM

SEQ ID NO: 18888 - protein, 727 aa, Oryza sativa
  Clone ID: TF_OSC420097j.C1.p9.fg
MSDARSRRSVASSTRRQQDAELAAAEERRRATAQTAAAAARAARLAAAELAAARAEAEAEAAEDAARAAEVEVETLRSSINGSIAGDITADRELEELARGRARERAERWAAAHLHGGGGGPRDRASADGNPDGRRRAGGSPELARGPRRQHGSLSPDRRHGHHGVQTVVRDFGPGGGWPTLTKTNYIEWAAVMRVRLQVWHMWEAVRYSDVDYDEDRRALDALIAAVPPEMQFSLSQKRTAKEAWDAIAAARIGSDRARKSTLQALRKEWENLAFKPGEDVDDFALRLNTLLQKMVQYGDDTYDEERAVEKLFRCVPEKYRQIARSIESLLDLSTMSIEEALGRLKVVDGDEPQPLSGPITIGGKLHLTREQWEASQGDGRKGESSSPTGGRKPRKARGGVQLRWARRRAEGGARRGAQGIATGNHKPARDDACRNYGKLGHWAKDCRQPRRGQAHVARVEEEEPALLLAHASIELPPAAPAAAAFLHLDEPKVLVSLCNGSSNDKADGWYLDTGATHHMTGRREFFTEFDSSVRGSVKFGDASGVEIKGVGSVTFTAKSGEHRLLTGVYYIPALRNSIISVGQLDENGSRVLVEDGLMRIWDRRRHLLAKVTRGTNRLYILSAQVAQPVCLAARRDDEAWQWHERFGHLHFEALKQLSAKEMVRGMPCLDVTPRNSRIEFQAECALKSPSRTSRGTQTTMLTFRSTSYKHHKSLTKNAAENKRNWS

SEQ ID NO: 18889 - protein, 1789 aa, Oryza sativa
  Clone ID: TF_OSC100146j.C1.p1.fg
MSNEVNHVGKAPMFNGTNYSTWKIKMSTHLKAMSFHIWSIVDVGFAITGKPLTEIDHRNLQLNAQAMNALFNSLSQEEFDRVSNLETAYEIWNKLAEIHEGTSEYKDAKLHFLKIQYETFSMLPHESVNDMYGRLNVIVNDLKGLGTNYTDLEVAQKMLRALPEKYETLVTMLINSDMSMMTPASLLGKINTNDMYKLKKKEMEEASPSKKCIALQAEVEDKGKGKVNEANEDLEEEIALLARRFNDLLGRRKERGRGSNSNRRRNRRPNKTLSNLRCFECGEKGHFASKCPSKDDDGDKSCKKKSGGYKLMKKLKKEGKKIEAFIGEWDSNEESSASSGSEEEGGDDASSKKKKMAVVAIKEALSLFAPLCLMAKGSSKVTSLSDNESDDDCDDVSYDELVSMFEELHAYSEKEIVKFKALKKDHASLEVLYEELKTSHERLTISHEKLKEAHDNLLSTTQHGALIDVGISCDLLDDSATCHIAHVASSSISISCDDLVDMSSSSSCISICDASLVVENNELKEQVAKLNKSLERCFKGKNTLDKILSEQRCILNKEGLGFIPKKGKKPSNRATRFVKSNGRLMMVALLLDMWVPLYSVVNYHTGGSHWVLDSGCTQHMTGDRAMFTTFEVGGNEQEKVTFGDNSKGKSIVAELFKKFAKRAQNEFSCTLVKIRSDNGSEFKNTNIEDYCDDLGIKHELSATYSPQQNGVVERKNRTLIEMARTMLDEYGVSDSFGAEAINTACHATNRLYLHILLKKTFYELIVGRKPNVAYFQVFGCKCYIYRKGVRLTKFESRCDEGFLLGYASNSKAYRVYNKNKGIVEETADVQFDETNGSQEGHENLDDVGDEGLMRTMKNMSIGDVKPIEVEDKPSTSTQDEPSTSAMPSQAQVEVEEEKVQDPPMPPRIHTALSKDHPIDQVLGDISKGVQTRSRVASICEHYSFVSCLEPKHVDEALCDPDWMNAMHEELNNFARNKVWTLVERPRDHNVIGTKWVFRNKQDENGLVVRNKARLVAQGFTKVEGLDFGETFAPVARLEAIRILLAFASCFDIKLFQMDVKSAFLNGEIAELVFVEQPPGFEDSKYPNHVYKLSKALYGLKQAPRAWYERLRYFLLSKDFKIGKVDTTLFTKIIDDDFFVCQIYVDDIIFGSTNEVFCKKFGDMMSREFEMSMIGELSFFLGLQIKQLKDGTFVSQTKYIKDLLKRFGLEDAKPIKTPMATNGHLDLDEGGKPVDLKLYRSMIGSLLYLTASRPDIMFSVCTCARFQAAPKECHLVAVKRILRYLKYSSTIGLWYPKGAKFKLAGYSDSDYAGCKVDRKSTSGSCQMLGRSLVSWSSKKQNSVALSTAEAEYVSAAMPPRTRHGRREPMPNPVNENEESSGDEYVQSDDDNMENVEGDEMEVSDDGDDNGSGNGEDDEASDDGSPLDSTIQFVFNLRNAQQYTILRHHDQFRRPNDCNDPRFHTQFQKSVYEQVYANKAFAEHKWISWRHIGETPEFEDLQEMFWTVGIDRIVTMKQSFDEDLIRQFYATVWVSGDCDAMKWMSGTLQCSINRREFKELLHIRFNNGDDLHDEHTHNPFPIDHFSQIYEDGGRHTYGKVAVRATILPRCGNNDDIRGVAWHVIDAILDGRRFDVINLMMKEIAISKGTIGQGIYYAPYIMRLIQSKLGQIGHNLKEHKEYKPRLQLSSPKAPRVRQPTFDQGASSSAAPPPPHGSDPSAFFHPQYAYFGMQPNEFFNPVLGAINTLSESIQRLSTGHEALHEDVRGLRTDVGNLNTSVGRLHTRVGVLDS

SEQ ID NO: 18890 - protein, 721 aa, Oryza sativa
  Clone ID: TF_OSC102011j.C1.p13.fg
MALPHRTGTMVTTGFRPSSGKSALAVCGLNPTLTKTNYVEWAVVMRIRLQVRHMWEPVRHGDVNYDEDQRAPRSGLPRRPGTPSLRHASEATALASPHCRHFARSGRTWPSSQKLVSYGDDTYDEERAVKKLFRCIPEKYKQIARSIESLLDLSTMSIEEAIGSFISLESSGRPARVTGRRGSPLPRQAASAARDTSCEDAPRVAPAEAPKPARDDACRNYGKFGHWAKDCRQPRHGQANVAQVEEEEESALLLAHASIELSPAAPAAAAFLQLDEPKALKRLSAKEMVRGLPCLDHVKQLCDVCVLTKQRRLPFPQQISFRAKERLELVHGDLCGPVTPATPGGRRYFMLLVDDLSRFMWVMVLGSKGEVADAIRRAQAAAEADCGGEFTAAEFASYCADECIQHHYFAPYSPQQYGVVERHNQTVVGMARALLKQRGMPAVFWGEAVVTAVYILNRSTTKARTRLGMGASRRPRASTDSSSDTLSSYDFGCNEFFADTITTGDPTHSSTNSHPSGHIHSDARLCQAQPGGVRYSALSRRGAHRRIPRHRRGCLRPRGAIPGKEGKVLLLALAAQESWCVHHMNVKSAFLNDDLKEEVYVHQPPGFAIPDKEGKVLLLHMALYGLWQAPRAWNTKLDSTLKGMGFEQSPHEVAINRLGNGGNVLLVGVYVDNLVITGTKDAEVAAFKEEMKATFQMSDLGPLFFYLGIEVHQDDSGITFR

SEQ ID NO: 18891 - protein, 1290 aa, Oryza sativa
  Clone ID: TF_OSC10931j.C1.p1.fg
EVEDKGKGKVNEVNENLEEENALLARRFNDFLGRRKERGKGSNSNRRRNRRPNKTLSNLRCFECGEKGHFASKCPSKDDDGDKSSKKKSGGYKLMKKLKKEGKKIEAFIEEWDSNEESSPHPGSSKVTSLSDSESDDDCDDVSYDELVSMFEELHAYSEKEIVKFKALKKDHASLEVLYEELKTSHERLTISHEKLKEAHDNLLSTTQHGALIDVGISCDLLDDSATFHIAYVASSSISTSCDDLVDMSSSSSSSCVSICDASLVVENNELKEQVAKLNKRLERCFKGKNTLDKILSEQRCILNKEGLGFIPKKGKKPSHRATRFVKSNGRLMMVALFLDMWVPLYSVVNYHTGGSHWVLDSGCTQHMTGDRAMFTTFEVGRNEQEKVTFGDNSKGKVIGLGKIAISNDLSIDNVSLVKSLNFNLLSVAQICDLSLSCAFFPQEVIVSSLLDKSCVFKGFRYGNLYLVDFNSSEANLKTCLVAKTSLGWLWHRRLAHVGMNQLSKFSKRDLVMGLKDVKFEKDKLCSACQAGKQVACSHPTKSIMSTSKPLELLHMDLFDPTTYKSIGGNSHCLVIVDDYSRYTWVFFLHDKSIVADLFKKFAKRAQNEFSCTLVKIRSNIGSEFKNTNIEDYCDDLGIKHELFATYSPQQNGVVERKNRTLIEMARTMLDEYGVSDSFWAEAINTACHATNRLYLHRVLKKTSYEVIVGRKPNIAYFRVFGCKCYIHRKGVRLTKFESRCDEGFLLGYASKSKAYRVYNKNKGIVEETADVQFDETNGSQEGHENLDDVGDEGLMRVMKNMSIGDVKPIEVEDKPSTSTQDEPSTSAMPSQAQVEVEEEKAQEPPMPPRIHTALSKDHPIDQVLGDISKGVQTRSRVTSICEHYSFVSCLERKHVDEALCDPDWMNAMHEELKNFARNKVWTLVERPRDHNVIGTKWVFRNKQDENGLVVRNKARLVAQGFTQVEGLDFGETFAPVARLEAICILLAFASCFDIKLFQMDVKSAFLNDTKYPNHVYKLSKALYGLRQAPRAWYERLRDFLLSKDFKIGKVDITLFTKIIGDDFFVYQIYVDDIIFGSTNEVFCKEFGDMMSREFEMSMIGELSFFLGLQIKQLKNGTFVSQTKYIKDLLKRFGLEDAKPIKTPMATNGHLDLDEGGKPVDLKLYRSMIGSLLYLTVSRPDIMFSVCMCARFQAAPKECHLVAVKRILRYLKHSSTIGLWYPKGAKFKLVGYSDPDYAGCKVDRKSTSSSCQMLGRSLVSWSSKKQNSVALLLPRQNMFRRVVVVPNCFG

SEQ ID NO: 18892 - protein, 293 aa, Oryza sativa
  Clone ID: TF_OSC17329j.C1.p1.gm
GRSDRPHSGGLTGVPCPVTSPRRLWRRPGAGFAITGTPLMEIDHRNLQLNAQAMNALFNSLSQEEFDRVSNLETAYEIWNKLAEIHEGTSEYKDAKLHFLKIQYETFSMLPHESVNDMYGRLNVIVNDLKGLGANYTDLEVAQKMLRALPEKYETLVTMLINSDMSRMTPASLLGKINTNDMYKLKKKEMEEASPSKKFNDFLGRRKERGKGSNSNRRRNRRPNKTLSNLRCFECGEKGHFASKCPSKDDDGDKSSKKKSGGYKLMKKLKKEGKKIEAFIEEWDSNEESSPHP

SEQ ID NO: 18893 - protein, 1140 aa, Oryza sativa
  Clone ID: TF_OSC19010j.C1.p1.fg
MSNEVNHVGKAPMFNGTNYSTWKIKMSTHLKAMRFHIWSIVDVGFAITGTPLTEIDHRNLQLNVQAINDLFNSLSQEEFDRVSNLETAYEIWNKLAEIHEGTSEYKDAKLHFLKIQYETFSMLPHESVNDMYGRLNVIVNDLKGLGANYTDLEVAQKMLRALPEKYETLVTMLINSDMSRMTPASLLGKINTNDMYKLKKKEMEEASPSKKCIALQAEVEDKGKGKVNEANENLEEEIALLARRFNDLLGRRKERGRGCNSNRRRNRRPNKTLSNLRCFECGEKGHFASKCPSKDDDGDKSSKKKSGGYKLMKKLKKEGKKIEAFIGEWDSNEESSASSGSEEEDGDDASSKKMTVVAIKEAPSLFAPLCLMAKGSSKVTSLSDSESDDDCDDVSYDELVSMFEELHAYSEKEIVKFKALKKDHASLEVLYEELKTYHARLTISHEKLKEAHDNLLSTTQHGALIDVGISCDLLDDSATCYIAHVASSSISTSCDDLVDMSSSSSSSCVSICDASLVVENNELKEQVAKLNKSLERCFKGKNTLDKILSEQRCILNKEGLGFIPKKGKKPSHRATRFVKSNGRLMMVALLLDMWVPLYSVVNYHTGGSHWVLDSGCTQHMTGDRAMFTTFEVGGNEQEKVTFGDNSKGKSIVAELFKKFAKRAKNEFSCTLVKIRSDNGSEFKNTNIEDYCDDLGIKHELSATYSSQQNGVVERKNRTLIEMARTMLDEYGVSDSFWAEAINTACHATNILYLHPLLKKTSYELIVGRKPNVAYFRVFGCKCYIYQKGVRLTKFKSQCDEGFLLGYASNSKTYRVYNKNKGIVEETAVVQFDETNGSQEGHENLDDVGDEGLMRAMKNMSIGDVKPIEVEDKPSTSTQDEPSTSATPSQAQVEVEEEKAQDPPMPPRIHTALSKDHPIDQVLGDISKGVQTRSRVVSICEHYSFVSCLEPKHVDEALCDPEWMKAMHEELNNFARNKVWTLVERPRDHNVIGTKWVFRNKQDENGLVVRNKARLVAQGFTQVEGLDFGETFAPVARLEAVLILLAFASCFDIKLFQMDVKSTFLNGEIAELVFVEQPPDFEDPKNPNHVYKLSKALYGLKQAPRDWYVSVIWDREYHDQRLEADAIAHVAWHLRGRRARG

SEQ ID NO: 18894 - protein, 1076 aa, Oryza sativa
  Clone ID: TF_OSC27261j.C1.p6.gm
MERGGPCDGLCRFRIHLGTRGDCPLPARDGGFAITGTSLTEIDNRNLQLNAQAMNALFNSLSQEEFDRVSNLETAYEIWNKLAEIHEDTSEYKDAKLHFLKIQYETFSMLPHESVNDMYGRLNVIVNDLKGLGVNYTDLEVAQKMLRALPEKYETLVTMLINSDMSRMTPASLLGKINTNDMYKLKKKEMEEASPSKKCIALQAEVEDKGKGKVNEANEDLEEEIALLARRFNDLLGRRKERGRGSNSNRRRNRRPNKTLSNLRCFECGEKGHFASKCPSKDDDGDKSSKKKSGGYKLMKKLKKEGKKIEAFIGEWDSNEESSASSGSEEEGGDDASSKKKKMAVVAIKIVKFKALKKDHASLEVLYEELKTSHERLTISHEKLKEAHDNLISTTQLGALIDVGISCDLLDDSATRHIAHVASSSISTSCDDLVDMSSSSSSSCVSICDASLVVEKNELKEQMAKLNKSLERCFKGKNTLDKILSEQRCILNKEGLGFIPKKGYASKSKAYRVYNKNKGIVEETADVQFDETNGSQEGYENLDDVCDEGLMRAMKNMSIGDVKPIEVEDKPSTSTQDEPSTSATPSQAQVEVEEEKAQDPPMPPRIHTALSKDHPIDQVLGDISKDEALCDPDWMNAMHEELNNFARNKVWTLVERPRDHNVIGTKWVFRNKHDENGLVVRNKAREFEMSMIGELSFFLGLQIKQLKDGTFVSKTKYIKDLLKRFGLEDAKPIKTPMATNGYLDLDEGVMPPRTCHDRRAPTPDPVSEPGESSGEDYAQSDEEVEANVEGASEEASGDDDSGSGEDEDEGRKAFAEHKWISWRDINETPEFEGLQDLFKTVGIDRIMTLKQDYNEDLIRQFYATVWVAGDYSEMKWMSDTLQCSISRRQFWRLLNIRLDFGDDLHEEHTHNPLSIDYLSQFYEDGVRYTHGKVAGLRTIPSVVNRIVRATILPRLGNNDDIRGVAWHVIDAIIQGRQFDIVSLMMQEIAISKGTFTQGIYYAPYIMRLIQDKLGAAGQNLKKHKQYKPRLQLGTPRAPRAAPSSHPGASSSSAPPPPPHGYVPNAFFHPQYAYFGM

SEQ ID NO: 18895 - protein, 320 aa, Oryza sativa
  Clone ID: TF_OSC31820j.C1.p1.fg
MELGSPQQGVGNQRVSEPRLCYLTGTPLTEIDHSNLLLNAQVMNALFNSLSQEEFDRVSNLKIAYEIWNKLAEIHEGTSEYKDAKLHFLKIQYETFSMLPHESVNDMYGRLNVIVNDLKGLGATYTDLEVAQKMLSALPEKYETLIAMLINSDMSRMTPASLLGKINTNDMYKLKKKEMEEASPSKKCIALQAEVEDKWKSKVNEANDDLEEEIALLAKRFNDLLGRRKERGRGSNSNRRRNIIPNKTLSNLRCFECGEKGHFASKCPSKANDGDKSSKKKSGGYKLMKKLKKEGKKIEAFIGQWDSNEESSTSSGSEEE

SEQ ID NO: 18896 - protein, 1879 aa, Oryza sativa
  unsure (1)..(1879): unsure at all Xaa locations
  Clone ID: TF_OSC400192j.C1.p40.np
RFVINHRNQIKALELTPAAQLPSEADVVATAADGGRCGVGSTAVGGGGRIRLSRRWERRGWWEWTARQLVWHDHLHAGSSLVTLGGCRLLDGLWRSCPVTSPRRLWRRPGAGFAITGKPLTEIDHRNLQLNAQAMNALFNSLSQEEFDRVSNLETAYEIWNKLAEIHEGTSEYKDAKLHFLKIQYETFSMLPHESVNDMYGRLNVIVNDLKGLGANYTDLEIAQKMLRALPEKYETLVTMLINSDMSRMTPASLLGKINTNDMYKLKKKEMEEASPSKKCIALQTEVEDKGKGKERGRGSNSNRRRNRRPNKTLSNLRCFECGEKGHFASKCPSKDDDGDKSSKKKSGGYKLMKKLKKEGKKIEAFIGEWDSNKESSASSGSEEEGGDDASSKKKKMAVVAIKEAPSLFAPLCLMAKGSSKVTSLSDSESDDDCDDVSYDEFVSMFEELHAYSEKEIVKFKALKKNHASLKVLYEELKTSHERLTISHEKLKETHDNLLSTTQHGAHIDIGISCDLLNDSATCHIAHVASSSISTSCDDLVDMPSSSSSSCVSICDVSLVVENNELKEQVAKLNKSLERCFKGRLMIVVLLLDMWVPLYLVVNYHTDGSHWVLDSGCTQHMTGNRAMFTTFEVGGKEQEKVTFGGNSKGKVIGLVAKTSLGWLWHMRLAHVGMNQLSKLSKRDLVVGLKDVKFEKDKLCSACQAGKQVACSHPTKSIMSTSRPLELLHMDLFGPTTYKSIGVERKNRTLIEMAMTMLDEYGVSDSFWAEAINTACYATNRLYLHRLLKKTSYVLIVGRKPNVAYFRVFGCKCYIYRKGVRLTKFESRCCDEGFLLGYASNSKAYQVYNKNKGIVEETADVQFDETNGSQEGHENLDDVDDEGLMRDMKNMSIGDVKPIEVEDKPSTSTQDEPSTSASPSQAXIEVEEEKAQDPPMPPRIHTALSKDHPIDQVLGDISKGVQTRSRVASICEHYSFVSCLEPKHVDEALCDPDWMNAMHEXLNNFARNKVWTLIERPRDHNAIGTKWVFRNNQDENRLVVRNKARLVTQGFTQVEGLDFGETFAPVARLEAIRILLGFASCFDIKLFQMDVKSAFLNGEIAELVFVEQPPGFEDPKNSNHVCKLSKGLYGLKQAPRAWYERLRDFLLSKDFKIGKVDTTLFTKIIGDDFFVCQIYVDDIIFGSTNEVFCKEFGDMMSREFEMSMIGELSFFLRLQIKQLKDGTFLSQTKYIKDLLKRFGLEDAKPIKTPMVTNGHLDLDEGGKPVDLKLYHSMIGSLLYLTASRPDIMFSVCMCARFQVAPKECHLVAVKRILRYLKHSSIIGLWYPKGAKFKLVGYSDSDYAGCKVDRKSTSGSCQMLGRSLVSWSSKKQNSVALYCRSGICFSGNXILSFGQNEIYPQNKIEKEFEKSFKTKLRWSDRVPAAGLTALGRRSDRHMDGGLTGCWPSAMPPRTRRGRREPTLDPVSENEESNGDEYVQSDDEVMENIEGDEVEVSGDNGSGDGEDDEASDDGSPLDNGSGDGEDDEASDDGSPLDPTIQFVLNLRNAXQYTILRHHDQFRRPNDCNDLRFHTRYQKSVVSGDCDAMKWMSGTLRCSINCRAFKELLHIHFNNRDDLHDEQNHNPFPIDHFSQFYEEGRRHTYGKVVSLRAIPSLINRIVRATILPRCGNNDDICGVAWHVIEAIMDGRRFGVINLMMKEIAISKGTIGQGVYYAPYIMRLIQSKLRQIGNNLKEHKDYKPHLQLSTPRAPRVRQPTFDQGASSSAPPPPHGYDPSAFFHPQYAYFGMQPNEYFNPVLGAINTLSESIQRLSTGHXALHEDVHGLRTDVGDLNASVGRLHTRVGVLDSXVQMLESTQAFVYHRRRDAPHPSSLARPPSPPQ

SEQ ID NO: 18897 - protein, 1796 aa, Oryza sativa
  unsure (1)..(1796): unsure at all Xaa locations
  Clone ID: TF_OSC400703j.C1.p6.np
ELVWHLIDHLHAGSLLVTLGGCRLLDGLWRSCLVISPRRLWRRPGAGFAITGTPLTEIDHRNLQLNAQMNALFNSLSQEEFDRVSNLETAYEIWNKLAEIHEGTSEYKNAKLHFLKIXYETFSMLPHESVNDMYGRLNVIVNDLKGLGANYTDFEVAQKMLRALPENYETLFTMLINSDMSRMTPASLLGKINTNDMYKLKKKEMEEASPSKKCIALQAEVEDKGKGKERGRGSNSNRRERGRGSNSNRRRNRRPNKTFSNLRCFECGEKGHFASKCPSKDDDGDKSSKKKSGGYKLMKKLKKEGKKIEAFIGEWDSNEESSASSGSEEEGGDDVSSKKKKMAVVAIKEAPLFAKGSSKVTSLSDSEGDDDCDDVSYDEFVSMFEELQAYNEKEIVKFKALKKDHASLDVLYEELKTSHERLTISHEKLKEAHDNLLSTTQHGAHIDVGISCDLLDDSATCHIAHVASSSIPTSCDDLVDMPSSSSSSCVSICDASLVVENNELKEQVANDKSLERCFKGRLMMVALLLDMWVPLYSVVNYRTGGSHWVLDSGCTQHMTGDRAMFTTFEVGGNEQEKVTFGDNSKGKVIGLVKTSLGWLWHRRLAHVSMNQLSKLSKRDLVVGLKDVKFEKDKLCSACQAGKQVACSHPTKSIMSTSRPLELLHMDLFGPTTYKSIGVERKNRTLIEMARTMLDEYGVSDSFWAEAINTACYATNRLYLHHLLKKTSYELIVGRKPNVAYFRVFGCKCYIYRKGVRLTKFASRCDEGFLLGYASNSKAYRVYNKNKGIVEETANVHFDETNGSQEGHENLDDVGDEGLMRAMKNMSIRDVKPIKVEDKPSTFTQDEPSTSATPSQAQVEVEEEKAQDPPMPQRIHTALSKDHPIDQVLGDISKGVQTRSRVASICEYYSFVSCLEPKHVDEALCDSDWINAMHEELNNFARNKVWTLVKRPRDHNVIGRKWVFRNKQDENGLVVXNNARLVAQGFTQVEGLDFGETFAPVARLEAIRILLAFASCFDIKLFQMDVKSAFLNGEIAELVFVEQPPGFEDPKNPNHVYKLSKALYGLKQAPRAWYERLKDFLLSKDFKIGKVDTTLFTKIIGDDFFVCQIYVDDIIFGFTNEVFCKXFGDLMSRGFEMSMIGELSFFLGLQIKQLKDGTFVSQTKYIKDLLKRFGLEDAKPIKTPMATNGHLDLDEGGKPVDLKLYRSMIGSLLYLTASRPDIMFSVCMCARFQAAPKECHLVAVKRILRYLKHFSTIGLWYPKGAKFKLVGYSDSDYAGCKVDRKSTSVSCQMLGISLVSWSSKKQNSVALYRRGGICFGGNXILSFGQNEIYPQNEIEKEFEKIFKTKLGAWQSDRRYMRGLTGQVRRSDRPHRAGLTGRGGPMMPPRTRHGCRAPTLDPMSEPEESSGEDYAQSDEEVEANVEGASEEASGDDVSGSGEDEDEQSDEMNIDPSIQFVVNMRNPSQYTILRHHDQFLRPRDTPDPHFHTAFQKMWVAGDXSEMKWMSDTLQCSISRRQFRQLLNIRLDFGDDLHEEHTHNPLSIDYLSQFYEDGVRYTHGKVAGLRTIPSVVKRIMRATILPRLGNNDDIRGVAWHVIDAIIQGRQFDIVSLMMQEIAIFKRTFTQGIYYAPYIMRLIQDKLGAAGQNLKKHKQYKPRLQPRAPRAPRTVPSSHPGASSSPAPPPPHGYDPNFFHPHYAYFGMQPNEYFNPVLGAINTLSESIQRLSTRHEALHEDVRGLRTDVGDLNASMGRLHTRVGALDSRVQMLESTQAFVYHRRRDTPNPSSLALPPSPPQ

SEQ ID NO: 18898 - protein, 1627 aa, Oryza sativa
  Clone ID: TF_OSC400718j.C1.p73.fg
MSNEVNHVGKAPMFNGTNYSTWKIKMSTHLKAMSFHIWSIVDVGFAITGTPLTEIDHCNLQLNAQAMNALFNSFSQEEFDRVSNLETAYEIWNKLAEIHEGTSEYKDAKLHFLKIQYETFSMLPHESVNDMYGRLNVIVNDLKGLGATYTDLEVAQKMLRALPKKYETLVTMLINSDMSRMTPASLLGKINTNDMYKLKKKEMEEASPSKKCIALQAEVEDKGKSKVNEANDDLKEEIALLARRFNDLLGRRKERVRGSNSNRRRNRRPNKTLSNLRCFECGEKGHFASKCPSKDDDGDKSSKKKSGGYKLMKKLKKEGKKIEAFIGEWDSNEESSASSGSEEEGGDDASSKKKKMAVVVIKEAPTLFAPLCLMAKGSSKVTSLSDSESDDDCDDVSYDELVSMFEELHAYSEKEIVKFKALKMDHASLEVLYEELKTSHERLTISHKKLNSSSSSCVSICDASLVVENNELKEQVAKLNKSLERCFNGKNTLDKILSEQRCILNKEGLGFIPKKSKKPSHRATRFVKSNGKHCSKYCEVGHLVNYRTGGSHWVLDTGCHAQKFTSCDNGCTQHTTGDRAMFTTFEVGGKEQEKVTFGDNSKGKVIGLVAKTSLGWLWHRRLAHVGMNQLSKLSKRDLVVGLKDVKFEKDKLCSACQAGKQVACSHPTKSIMSTPRPMELLHIDLFGPTTYKSIGGNSHCLVIIDDYSRYTWVFFLHDKSIVAELFKKFANRAQNEFSCTLVKIRSDNGSEFKNTNIEDYCDDLGIKHELSATYSPQQNGVVERKNRTLIEMARTMLDEYGYASNSKAYRVYNKNKGIVEETADVQFNETNGSQEGHENLDDVGDEGLMRAMKNMSIGDVKPIEVEDKPSTSTQDEPSTSASPSQPQVEVEEEKAQDSPMPPRIHTVLSKHHPIDQFLGDISKGVQTRSRVASICEHYSFVSCLEPKHVDEALCDPDWMNAMHEELNNFARNKVWTLVERPRDHNVIGTKWVFRNKQDEIGLVVRNKPRLVAQGFTQDEGLDFGETFAPVARLEAIRILLAFASCFDIKLFQMDVKSAFLNGEIAELVFVEQPLGFEDPKNPNHVYKLSKALYGLKQAPRAWYERLRDFLLSKYFKIGKVDTTLFTKIIGDDFFVCQIYVDDIIFGSTNEVFCKEFGNMMSREFEMSMIGELSFFLGVQIKQLKDGTFVSQTKYIKDLLKRFGLEDAKSIKTPIATNGHLDLDEGGKPVDLKLYRSMIGSLLFLTASRPDIIFSVCMCARFQAAPKECHLVAVKRILRYLKHSSTIGLWYPKGEARGVLRFAPIEGSFLLCLPALVMVVVSPRRSQVRMRNQADRSMLKGDEVEVSGDDTGSGDGEDDEASDDGSPLDPTIQFVLNLRNAQQYTILRHHDQFRRPNDCNDSRFHTRYQKAVYEQVYANKAFTEHKWISWRHIGETPEFVDLQGLFKAVGIDRIITMKQPFDEDLIWQFYATFYEEGGRHTYGKVAGLRVIPSVINRIVKATILPRCGNNDDIRGVAWHVIDAIMDGRRFHFINLMMKEIAISKGTIGQGIYYAPYIMRLIQSKLGQVGNNLKEHKEYKPRLQLSTPRAPRVRQPTFDQGASSSATPPPPHGYDTNAFFHPQYAYFGM

SEQ ID NO: 18899 - protein, 1767 aa, Oryza sativa
  Clone ID: TF_OSC401716j.C1.p99.fg
MSNEVNHVGKASMFNGTNYSTWKIKMSTHLKAMSFHIWSIVDVGFDITGTPLTESDHRNLQLNAQAMNALFNSLSQEEFDRVSNLETAYEIWNKLAEIHEGTSEYKDAKLHFLKIQYETFSMLPHESVNDMYGRLNVIVNDLKGLGANYTDLEVAQKMLRALPEKYETLVTMLINSDMSRMTPASLLGKINTNDMYKLKKEMEEASPSKKCVALQAKVEDKSKSKVNEVNEDLRKERGRGSNSNRRRNRRPNKTLSNLRCFECGEKGHFASKCPSKDDDGDKSSKKKTGGYKLMKKLKKEGKKIEAFIGEWDSNEESSVSSGSEEEGGDDASSKKKKMAVVPIKEAPSLFAPLCLMAKGSSKVTSLSDSESDDDCDDVSYDELVSMFEELHAYSEKEIVKFKALKKDHVSLEVLYEELKTSHERLTISHEKLKEAHDNLLSTTQHGAHIDVGISCDLLDDSATCHIAHIASSSISTSWDDLMDMPSPSSSSSSCVSICDASLIVENNELKEQVAKLNKSLERCFKGKNTLDKILSEQRCILNKEGLGFTPKKGKKPSHHATRFVKSNGKYCSKCCEVGHLVNYRTGGSHWVLDSGYTQHMTGDRAMFTTFEVGENEQEKVTFGDNSKGKVIGLGKIVISNDLSNENVSLVKSLNFNLLSVAQICDLGLSCAFFPQEVIVSSLLDKSCVFKGFRYGNLYLVDFNSSEANLKTCLVAKTSLGWLWHRRLAHVGMNQLSKLSKRDLVVGLKDLKFEKDKLCSACQAGKQVAGSHSTKSIMSTSRPLELLHMNLFGPTTYKSIGGNSHCLVIVDDYSRYTWVFFLHDKSIVAEFFKKFAKRAQNEFSCTLVKIRSDNGSEFKNTNIEDYCDDLHIKHELSATYSPQQNGVVERKNRTLIEMARTMLDEYGVSDSFWAEAINTACHATNRLYLHRLLKKTFYELIVGRKPNVAYFRVFGCKCYIYRNGVRLTKFESRCDEGFLLGYASNSKAYRVYNKNKGIVEETADVQFDETNGSQEGHENLDVVGDEGLMRAMKNMSIRDVKSIEVEDKPSTSTQDEPSTSASPSQAQVEVEEEKAQDPPMPPRIHTALSKDHPIDQVLGDISKGVQTRSRVASICEHYSFVSCLEPKHVDEALCDPDWMNAMHEELNNFARNKVWTLVERPRDHNVIGTKWIFRNKVDWWEFEMSMIGELSFFLGLQIKQLKDGTFVSQTKYIKDLLKRFGLEDAKPIKTPMATNGHLDLDEGDYAGCKVDRKSTSGSCQMLGRSLVSWSSKKQNSVALSTAEAEYVSAGSCCAQLLWMKQTLLDYGISFTKTPLLCDNDSAIKIANNPVQHSRTKHIDIRHHFLRDHVAKCDIVISHIRTEDQLADIFTKPLDETRFSMPPRTRHGRREPTPDPVSENEESSGDEYVQSDDDNMENVEGDEMEVSDDGDDNGSGNGEDDEASDDGSPLDSSIQFVLNLRNAQQYTILRHHDQFRRPNDCNDPRFHTRFQKSVYAQVYANKAFAEHKWISWRHIGETPEFENLQEMFRTVGIDRIVTMKQPFDEDLIRQFYATVWVSGDCDAMKWMSGTLRCSINRHEFKELLHIRFNNGDDLHDEHTHNPFPIDHFSQFYEEGRRHTYGKVAGLRALPSVINRIVRATILPRGGNNDDIRGVAWHVIDAIMDGRRFDVINLMMKEIAISKGTLGQGIYYAPYIMRLIQSKLGQIGHNLKEHKEYKPRLKLSSPRAPRVRQPTFDQGASSSAAPLLLKGMIQVFFFPSTICLLWNATQ

SEQ ID NO: 18900 - protein, 1475 aa, Oryza sativa
  Clone ID: TF_OSC405965j.C1.p6.fg
MSNEVNHVGKAPMFNGTNYSTWKIKMSTHLKAMSFYIWSIVDVGFAITGTPLTEIDHRNLQLNAQAMNALFNSLSQEEFDRVSNLETAYEIWNKLAEIHEGTSEYKDAKLHFLKIQYETFSMLPHESVNDMYGRLNVIVNDLKGLGANYTDLEVAQKMLRALSEKYETLVTMLINSDMSRMTPASLLGKINTNDMYKLKKKEMKEASPSKKCIALQAEVEDKSKSKVNEVNEDLEEEMVLLARKFNDLLGRRKERGRGSNSNRRRNRRPNKTLSNLRCFECGEKGHFASKCPSKDDDGDKSSKKKSGGYKLMKKLKKEGKKIEAFIGEWDSNEESSASSGFEEQCSDDASSKKKKMAVVAIKEAPSLFAPLCLMAKGSSKVTSLSDSESDDDCDDVSYDELVSMFEELHAYSEKEIVKFKALKKDHASLEVLYEELKTSHERLTISHEKLKEAHDNLLSTTQHGAHIDIGISCNLLDDSATCHIAHVASSSISTSCDDLMDMPSPSSSSSSCVSICDASLIVENNELKRDLDSFQRRVRNLLTMPLVLSRAMVNYRTGGSHWVLDSGCTQHMTGDRAMFTIFEVGGHEQEKVTFGDNSKGKLFKKFAKRAQNEFSCTLVKIRSDNGSEFKNTNIEDYCDDLGIKHELSATYSPQQNGVVERLYLHRLLKKTSYELIVGRKPNVAYFRVFGCKCYIYRKGVRLTKFESRCDEGFLLGYASNSKAYRVYNKNKGIVEETADVQFDETNGSQEGHENLDDVGDEGLMRAMKNMPIGDVKPIEVEDKSSTSTQDEPSTSASPSQAQVEVEEEKAQDPPMPPRIHTALSKDHSIDQVLGDINEALCNPDWMNAMHEELNNFARNKVWTLVERPRDHNVIGTKWIFRNKQDENGLVVRNKARLVAQGFTQVEGLDFGETFAPVARLEAIRILLAFTSCFDIKLFQMDVKSAFLNGEIAELVFVEQPPGFEDPKNPNHVYKLSKALYGLKQAPRAWYEILRDFLLSKDFKIGKVDTTLFTKIIGDDFFVCQIYVDDIIFGSTNEVFCKEFGDMMSREFEMSMIGELSFFLGLQIKQLKDGTFVSQTKYIKDLLKRFGLEDAKPIKTPMATNGHLDLDEGAMPPRTRHSRREPTPDPVSENEDSSGDEYVQSDDDNMENVEGDEIESVYAQVYANKAFAEHKWISWRHIGETPEFENLQEMFQTVGIDRIVTMKQPFDEDLIQQFYATVWVSGNCDAMKWMSGSLRCSINRREFKELLHIRFNNGDDLHDEHTHNPFPIDHFSQFYEEGGRHTLERWREIAISKGTIGQGIYYAPYIMRLIQSKLGQIGHNLKEHKEYKPRLQLSSPRAPRVRQPTFDQGASSSVVPPPPPHGYDPSAFFHPQYAYFGMQPNEYFNPVLGAINTLSESIQRLSTGHEALHEDVRGLRTDVGNLNTSVGRLHARVGVLDSRVQTLESTQAFVYHRRHDASHPSTSARPPSPPQE

SEQ ID NO: 18901 - protein, 575 aa, Oryza sativa
  Clone ID: TF_OSC408741j.C1.p7.gm
MGPSDKATTASFIAVAEYHGLTGHTPPIQYEIFSLLLHESVNDMYGRLNVIVNDLKGLGEIYTDLEVAQKMLRALTEKYETLVTMLINSDMSRMTPARLLGKINTNDIYKLKKKEMEEASPSKKCIALQAEVEDKGEEQERRGRGSNSNRRRNRRPNKILSNLRCFECGEKGHFASKCPSKDDNGDKSSKKKSGGYKLMKKLKKEGKKIEAFIGQWDSNEESSASSGSEEEGDDDANSKKKKMAVVAIKEAPSLFAPLCLMAKGSFKVTSLTDGESDDDCDDISYDEFVSMFEDLNTYSEKEIVKFKALKKDHASLEVLYEELKTSRERLTISHEKLKEAHDNLLSTTQHGAHIDVDISCDLLDDSASCHIPHVASSSISTACDDVTPGISIQNSKRLHRLGFAVDRVDGGGSRDWTAEIHPSKTDDQDPSVHDRATGNDDDDITSGGGSGVHACRRTTARRRERRAPTGSGRHSELTGDQNGGGRSTDGDGVEEKAAALFGLTTATVLRRLTATMEGRTRTATRRRPRRRSSRATATTRATAAHSWSDGDDGGARSHGARALRTTAGKGEGGDG

SEQ ID NO: 18902 - protein, 1539 aa, Oryza sativa
  Clone ID: TF_OSC413734j.C1.p11.fg
MSNEVNHVGKAPMFNGTNYSTWKIKMSTHLKAMSFHIWSIVDVGFAITGTPLTEIDHRNLQLNAQAMNALFNSLSQEEFDRVSNLETAYEIWNKLAKIHEGTSEYKDAKLHFLKIQYETFSMLPHESVNDMYGRLNVIVNDLKGLGANYTDLEVAKKMLRALPEKYETLVTMLINSDMSRMTPASLLGKINTNDMYKLKKKEMEEASPSKKCIALQAEVEDKGKVNDVNKNLEEEIALLARRFNDFLGRRKERGKGSNSNRRRNKRPNKTLSNLRCFECGEKGHFASKCPSKDDDGDKSSKKKSGGYKLMKKLKKEGKKIEAFIGEWDSNEESSASSGSKEEDGDDASSKKKKMAVVAIKEAPSLFAPLCLMAKGSSKVTSLSDSESDDDCDDISYDELVSMFEELHAYSEKEIVKFKALKKDHASLEVLYEELKTSHERLTISHEKLKEAHDNLLSTTQHGALIDVGISCDLLDDTLALALVYLFVMPHLLLRTMSLSSKWLSSTRAWRGASRVNYHTGGSHWVLDSGCTQHMTGDRAMFTTFEVGGNEQEKVTFVDNSKRKVIGLGKIAISNDLSIDNVSFVKSLNFNLLSVAQICDLGLSCAFFPQEVIVSSLLDKSCVFKGFRYGNLYFVDFNSSEANLKTCLVAKTSLGWLWHRRLAHVGMNQLSKLSKRDLVVGLKDVKFEKDKLCSACQAGKQVACSHPTKSIMSTSRPLELLHMDLFGPTTYKSIGGNSHCLVIVDDYSRYTWVFFLHDKSIVAELFKKIAKRAQNEFSCTLVKIRSDNGSEFKNTNIEDYCDDLGIKHELSATYSPQQNGVVERKNRTLIEMARTMLDEYGVSDSFWAEAINTACHATNRFYLHRLLKNTSYELIVGRKPNVAYFRVFGCKCYIYRKGVRLTKFESRCDEGFLLGYASNSKAYRVYNKNKGTVEETADVQFDETNGSQEGHENLDDVGDEGLIRAMKNMSFGDVKPIEVEDKPSTSTQDEPSTFATPSQAQVEVEEEKAQDPPIPPRIHTTLSKDHPIDQVLGDISKGVQTLSRVASICEHYSFVSCLEPKHVDEALCDPDWMNAMHEELNNFARNKVWTLVERPRDHNVIGTKWVFRNKQDENGLVVRNKARLVAQGFTQVEGLDFGETFAPVARLEAICILLAFASWFDIKLFQMDVKSAFLNGEIAELVFVEQPPGFEDPKYPNHDFKIGKVDTTLFTKIIGDDFFVCQIYVDDIIFGSTNEVFCKEFGDMMSREFEMSMIGELSFFLGLQIKQLKDGTFVSQTKYIKDLLKRFGLEDAKPIKTPMATNGHLDLDEGGKPVDLKLYRSMIGSLLYLTASRPDIMFSVCMCAWFQAAPKECHLVAVKRILRYLKYSSTIGLWYPKGAKFKLVGYSDSDYAGCKVDRNSTSGSCQMLGRSLVSWSSKKQNSVALSTAEAEYVSAGSCCAQLLWMKQTLLDYGISFTKTPLLCDNDSAIKIANNPVQHSRTKHIDIRHHFLRDHVAKCDIVISHIRTEDQLADIFTKPLDETRFCKLRNELNVIDFSNVA

SEQ ID NO: 18903 - protein, 479 aa, Oryza sativa
  Clone ID: TF_OSC415632j.C1.p3.gm
MLPHESVNDMYGRLNVIVNGLKGFGANYTDLEVAQKMLRALPEKYETLVTMLINSDMSRMTPASLLGKINTNDMYKLKKKEMEEASPSKKCIALQAEVEDKGKGKVNEVNEDLEEEISLLARRFNDLLGRRKERESGSNSNRRRNRRPNKTLSNLRCFECGEKGHFASKCPSKDDDGDKSSKKKSGGYKLMKKLKKEGKKIEAFIGEWDSNEESSASSGSEEEGGDDASSKKKKMAVVAIKEAPSLFSPLCLMAKGSSKVTSLSDSESDDDCDDVSYDELVSMFEELYAYSEKEIVKFKALKKDHASFEALEFEMSELSFFLGLQIKQLKDGTFVSQTKYIKDVLNRFGLEDAKPIKTPMATNGHLDLDEGVMPPRTRHGRRAPTPDPVSEPEESSGDEYAQSDEEVEANVEGASEEASGDDDSGSGEDEDEGSDDMHIDLSIQFVVNMRNLSQYTILRHHDQFFSPRDTPDPRFHTAF

SEQ ID NO: 18904 - protein, 1374 aa, Oryza sativa
  Clone ID: TF_OSC421293j.C1.p7.fg
MSNEVNHVGKAPMFNGTNYSTWKIKMSTHLKAMSFHIWSIVDVGFAITGTPLTEIDHCILQLNAQAMNALFNSLSQEEFDRVSNLETAYEIWNKLAEIHEGTSEYKDAKLHFLKIQYETFSMLPHESVNDMYGRLNVIMNDLKGLGANYTDLKVAQKMLRALPEKYETLVTMLINSDMSSMTPASLLGKINTNDMYKLKKKEMEEASPSKKCIALQAEVEDKGKGKVNEANEDLEEDIALLARRFNDLLGRRKERRRGSNSNRRRNRRPNKTLSNLRCFECGEKGHFASKCPSKDDDGDKSSKKKSGGYKLMKKLKKEGKKIEAFIGEWDSNEESSASSGSKEEGGDDASSKKKKMAIVAIKEAPSLFAPLCLMAKGYSKVTSLSDSESDDDCDDVSYDELVSMFEELHAYNEKEIVKFKALKKDHASLNVFSSFSSCVSICDASLVVENNELKEQVAKLNKSLERCFKGKNTLDKILSEQRCILNKEGLGFIPKKGKKPSHRATRFVKSNGRLMMVALFLDMWVPLYSVVNYRTGGSHWVLDSGCTQHMTGDRAMFTTFEVGGNEQEKVTFGDNSKGKLFKKFVKRVQNEFNCTLVKIRSDNGSEFKNTNIEDYCDDLGIKHKLSATYSPQQNGVVERKNCTLIEMARTMLDEYGVSDSFWAETINTACHATNRLYLYRLLKKTSYELIVGRKPNVAYFRVFGCKCYIYRKGARLTKFESRCDEGFLLGYASNSKAYQVYNKNKGIVEETADVQFDETNGSQEGHKNLDDVGDEGLMRAMKNMSIGDVKPIEVEDKPSTSTQDEPSTSATPSQAQVEVEEEKAQEPPMPPRIHTALSKDHPIDQVLGDISKGVQTRSRVASICEHYSFVSCLEPKHMNAMHEELNNFARNKVWTLVERPRDHNVIGTKWVFRNKQDENGLVVRNKARLVAQGFTHVEGLDFGETFAPVARLEAIRILLAFASCFDIKLFQMDVKSAFLNGEIAELVFVEQPPGFEDTKNPNHVYKLSKALYALKQAPRAWYERLRDFLLSKDFKIEKVDTTLFTKIIGDDFFVCQIYVDDIIFGSTNEVFCKEFGDMISREFEMSMIGELSFFLGLQIKQLKDGTFVSQTKYIKDLLKRFGLEDAKPIKTPMATNGHLDLDDGGKPVDLKLYRSMIGSLLYLTASRPDIMISVCMCARFQAAPKECHLVAVKRILRYLNHSSTIGLWYPKGAKFKLVGNSDSDYAGCKVDRKSTSGSFQMLGRSLVSWSSKKQNSVALSTAGAEYVSAGSCCAQLLWMKQTLLDYGISFTKTPLLCDNDSAIKIANNPVQHSRTKHIDIRHHFLRDHVAKCDIVISHIRTENQLADIFTKPLDETRFCKLRNELNVIDFSNVA

SEQ ID NO: 18905 - protein, 195 aa, Oryza sativa
  Clone ID: TF_OSC421503j.C1.p11.fg
MARRGEGGTTLKRRARGGLGGAGGNSSVEMAAWGGRHRGYTDLEVAQKMLRTLPEKYETLVTMLINSDMSRMTPASLLGKINTNDMYKLKKKEMEEASPSKKCIALQAEVEDKGKSKVNEANDDLEEHTALLARRFNDLLGRRKQRGRDSNSNRRRNRRPNKTLSNLRCFECGEKGHFASKCPSKDDDGDKSSKK

SEQ ID NO: 18906 - protein, 181 aa, Oryza sativa
  Clone ID: TF_OSC4271j.C1.p1.fg
MEEASPSKKCIALQAEVEDKGKVNDVNKNLEEEIALLARRFNDFLGRRKERGKGSNSNRRRNKRPNKTLSNLRCFECGEKGHFASKCPSKDDDGDKSSKKKSGGYKLMKKLKKEGKKIEAFIGEWDSNEESSASSGSKEEDGDDASSKKKKMAVVAIKEAPSLFAPLCLMAKGSSKHFYLL

SEQ ID NO: 18907 - protein, 1020 aa, Oryza sativa
  Clone ID: TF_OSC5481j.C1.p1.fg
MSNEVNHVGKASMFNGTNYSTWKIKMSTHLKAMSFHIWSIVDVGFDITGTPLTESDHRNLQLNAQAMNALFNSLSQEEFDRVSNLETAYEIWNKLAEIHEGTSEYKDAKLHFLKIQYETFSMLPHESVNDMYGRLNVIVNDLKGLGANYTDLEVAQKMLRALPEKYETLVTMLINSDMSRMTPASLLGKINTNDMYKLKKEMEEASPSKKCVALQAKVEDKSKSKVNEVNEDLRKERGRGSNSNRRRNRRPNKTLSNLRCFECGEKGHFASKCPSKDDDGDKSSKKKTGGYKLMKKLKKEGKKIEAFIGEWDSNEESSVSSGSEEEGGDDASSKKKKMAVVPIKEAPSLFAPLCLMAKGSSKVTSLSDSESDDDCDDVSYDELVSMFEELHAYSEKEIVKFKALKKDHVSLEVLYEELKTSHERLTISHEKLKEAHDNLLSTTQHGAHIDVGISCDLLDDSATCHIAHIASSSISTSWDDLMDMPSPSSSSSSCVSICDASLIVENNELKEQVAKLNKSLERCFKGKNTLDKILSEQRCILNKEGLGFTPKKGKKPSHHATRFVKSNGKYCSKCCEVGHLVNYRTGGSHWVLDSGYTQHMTGDRAMFTTFEVGENEQEKVTFGDNSKGKVIGLVAKTSLGWLWHRRLAHVGMNQLSKLSKRDLVVGLKDLKFEKDKLCSACQAGKQVAGSHSTKSIMSTSRPLELLHMNLFGPTTYKSIGGNSHCLVIVDDYSRYTWVFFLHDKSIVAEFFKKFAKRAQNEFSCTLVKIRSDNGSEFKNTNIEDYCDDLHIKHELSATYSPQQNGVVERKNRTLIEMARTMLDEYGVSDSFWAEAINTACHATNRLYLHRLLKKTFYELIVGRKPNVAYFRVFGCKCYIYRNGVRLTKFESRCDEGFLLGYASNSKAYRVYNKNKGIVEETADVQFDETNGSQEGHENLDVVGDEGLMRAMKNMSIRDVKSIEVEDKPSTSTQDEPSTSASPSQAQVEVEEEKAQDPPMPPRIHTALSKDHPIDQVLGDI

SEQ ID NO: 18908 - protein, 536 aa, Oryza sativa
  Clone ID: TF_OSC6365j.C1.p1.np
LVWHDHLRARSSLVTLGGCRLLDGLWRSCPVTSPRRLWRRPGAGFAITGTLLMEIDHRNLQLNAQAMNALFNSLSQEEFDRVSNLETAYEIWNKLAEIHEGISEYKDAKLHFLKIQYETFSMLPHESVNDMYGRLNVIVNDLKGLGANYTDLEVAQKMLRALPEKYETLVTMLINSDMSRMTPASLLGKINTNDMYKLKKKEMEEVSHSKKCIVLQAEVKDKGKGKERGRDSNSNRRRERGRDSNSNRRRNRRPNKTLPNLRCFECGEKGHFASKCPSKDDDGDKSSKKKSGGYKLMKKLKKEGKNIEAFIGEWDSNEESSASSGSEEEGGDDASSKKKKMAVVAIKEAPSLFAPLCLMAKDSSKVAFLSDSESDDDCDDVSYDELVSMFKELYAYSEKEIVKFKARKKDHASLEVLYEELKTSHERLTISHEKLKEAHDNLLSTTQHGVLIDVGISCDLLDDSAICHIAHVVSSSISTSCDDLVDMPSSSSSTCVSICDASLVVENNELKEQVVKLNSLEMCFKGKDTLDKILSE

SEQ ID NO: 18909 - protein, 1011 aa, Oryza sativa
  Clone ID: TF_OSC900219j.C1.p12.gm
MNRSNMRNILNTYRGDGKTGCVKTANPAGSHDRRLPGGGGNGSGGGCCALPSARSGKRGFGGLPRPAADRRRQQRRRWPHPLHLAGLTGWHRRSDRHVKAGFAITGTPLTEIDHRNLQLNAHAMNALFNSLCQEEFDRVSSLETAYEIWNKLVEIHEGTSEYKDAKLHFLKIQYETFSMLPHESVNDMYGRLNVIVNDLKGLGANYTDLEVAQKMLRALPEKYETLVTMLINSDMSRMTPASLLGKINTNDMYKLKKKEMEEASPSKKCIAFQAEVEDKGKVKVNEANKDLEEEIALLARRFNDLLGRRKERGRGSNSNRRRNRRPNKTLSNLRCFECGEKGHFASKCPSKDDDGDKSSKKKSGGYKLMKKLKKEGKKIEAFIGEWDSNEESSVSSGSEEEGGDDASSKKKKMAVVAIKEAPSLFAPLCLMAKGSSKVTSLSDSESDDDCDDISYDELVSMFEELHAYSEKDIVKFKALKKDHASLEVLYEELKTSYERLTISHEKLKEAHDNLLSTTQHGAHIDVGISCDLLDYSATCHIAHVASSSISTSCDDLVDMPSSSSCVSICDASLVVENNELKEQVAKLNNSLEKCFKGKNTLDKILSEQWCILNKEGLGFIPKKGKKPSHRATHFVKSNGRLMMVALLLDLWVPLYLVVNYRTGGSHWVLDSGCTQHMTGFLLSYASNSKAYWVYNKNKGIVEETADVQFDETNGSQEGHENLDDVGDEGLMIAMKNMSVRDVKPIEVEHKPSTSTQGEPSTSASPSQAQVEMEEEKAQDPPMPPRIHTALSKDHPINQVLGDISKDEALCDPDWMNAMHEELNNFTRNKVWTLVERPRDHNVIGTKWVFRNKQDENELVQLKDGTFVSQTKYIKDLLKRFGLEDAKPIKTPMATNRYLDLDEGVGWGRRSDRPYRLGLTGLELAPEMTSDKQYTCLLLRSSALPVDARFILHSMASDFLATLALKPGMDLTGTDIPTPGVSTPASARDESQEALIILTGWGEACDRPPVAT

SEQ ID NO: 18910 - protein, 1648 aa, Oryza sativa
  Clone ID: TF_OSC401828j.C1.p6.fg
MSDARSRRSDASSTRRQQDAELAAAEERRRATAQTAAAAARAARLAAAELAAARAEAEAEAAEDAACAAEVEVETLRSSINGSIAGDITADRELEELARGRARERAERWAAAHLHGGGGGPRDHGPANGNPDGRGRAGGSPEPARGPRRQRGSFSPDRRHGHHGVQTVVRDFGPGGGWPTLTKTNYIEWAAVMRVRLQVRHMWEAVRYGDVDYDEDRRALDALIAAVPPEMQFSLSQKRTAKEAWDAIAAARIGSDRARKSTLQALRKEWENLAFKPGEDVDDFALRLNTLLQKMVQYGDDTYDEERAVEKLFRCVPEKYRQIARSIESLLDLSTMSIEEALGRLKVVDGDEPQPLSGPITIGGKLHLTREQWEASQGDGRKGESSSPTGGRKPRKARGGVQLRWARRRAEGGARRGAQGVATGNHKPARDDACRNCVKLGHWAKDCRQPRRGQAHVARVEEEEPALLLAHASIELPPAAPAAAAFLHLDEPKVLVSLCDGSSNDKADGWYLDTGATHHMTGRREFFTEFDSSVRGSVKFGDASGVEIKGVGSVTFTAKSGEHRLLTGVYYIPALRNSIISVGQLDENGSCVLVEDGLMRIWDRRRRLLAKVTRGTNRLYILSAQVAQPVCLAARRDDEAWQWHERFGHLHFEALKRLSAKEMVRGMPCLDHVEQLCDVCVVTKQRRLPFPQQTSFRAKERLELVHGDLCGPVTPATPGGRRYFLLLVDDLSRYMWVMVLGSKGEAADAIRRAQAAAEAECGRKLRVLRTDNGGEFTAAEFASYCADEGIQRHYTAPYSPQQNGVVERRNQTVVGMARALLKQRGMPAIFWGEAVVTAVYILNRSPTKALDGRTPYEAWHGHKPAVSHLRVFGCLAFAKELGHIGKLDDRSTPGVFIGYAEGSKAYRILDPETQRVRTARDVVFDEGRGWVWDKAVDDGSTPTYDDFTIEYVHFEGAGGVGSFSSSVSTPAPESPPTPTPTHPRATTSTTTSSSSTPPQPVTPHAPAPTATPPSTSTPTPARVERSPVEFATPLSHDGERIDAYHDGEQLRYRTMEDLLGDQPVPGLVPRDLEAQLHLACDDGEPRSFAEAEKHAAWRAAMQSEMDAVQENRTWELADLPRGHRAITLKWVFKLKRDEAGAIVKHKARLVARGFVQQEGIDYDDAFAPVARMESVRLLFALAAQEGWGVHHMDVKSAFLNGDLKEEVYVHQPPGFVIPGKEGKVLRLHKALYGLRQAPRAWNAKLDSTLKGMGFEQSPHEVAIYRRGIGGNALLVGVYVDDLVITGTKDAEVAAFKEEMKATFQMSDLGPLSFYLGIEVHQDNSGITLRQTAYAKRVVELAGLTDCNPALTPMEERLKLSRDSTAEEVDATQYRRLVGSLRYLTHTRPDLAFFVGYVSRFMQRPTTEHQQAVKRIIRYVAGTLDHGLYYPRCPGKAHFVGYSDSDHAGDIDTSKSTSGILFFLGECLVSWQSIKQQVVALSSCEAEYMAASAASTQALWLARLLSDLLGRDTGAVELRVDSKSALALAKNPVFHERSKHIRVSCCLVCDHDGDGHPDGAGEQSDGPQEVERDDGADKREPGQEQELGAGGDEREEADNLGGAGRVSLHFAPAGAASSTTSLAPWARTHGATVPDRARAAADMPFSRLT

SEQ ID NO: 18911 - protein, 1443 aa, Oryza sativa
  Clone ID: TF_OSC10374j.C1.p1.fg
MVVQNDWAYATGMPRYKPEYLFGVEGFVQELRTMSFVIGFGTAPFYAQIPHDRHEEKCRVKVTLNSNSEDIPSVMFEARGRNYIHACQEVARIAIGELRDRYSDQLADTEYRYHPRQPQGSDRGSYLETEGIENDATTRHLVEMLRAMDETRAEVVLAAQDREDRNRGKICKLEDKVDRLEKELAALKGEAPPQKARIRLTARKRALFVPRYQLAPKVRVVEKEVTPALADPPVVNMVLTRSNGNGPNNNNNNNNNGENPTLAQVLAQQAQLMNMMMQQLQNQQNQGNNHAPPQNKLAEFLRVRPPTFSSTTNPVEAGDWLHDIEKKLDLLQCTDQEKVSFASHQLHGPASEWWDHFRLNRTTAEPITWLEFTAAFRKTHIPSGVVSLKKEFRSLTQGSRSVTEYLHEFNRLARYAPEDVRTDEERQEKFLEGLNDELSYPLMTGDYHDFQKLVDKAIRQEDKYNRMEQKKRRIAQFKAQQGNSQRPRLTLGPQSMPQGGSSSVVRPHRQFFNHNAGNNIRNQAPRPVAASTQQQPAKKEQGSKPGVCFNCGDLGHYADKCPKPRRVKVVPTQSNSTAPASKARVNHVAAAEAQGAPDVILGTFLVNLVPATVLFDSGASHSFLSMSFAGNHGMEVEDLRRPLMVSTPSNQALSLQRSPSVRIEIQGVPFLANLILLESKDLDVILGMDWLARYKGVIDCANRKVTLTSNDGRVVTVHALSSESLRSRLNQITLDEIPVVREYPDVFPDNLPGMPPKRDIEFRIDLVPGTTPIHKRPYRMAANELAEVKRQVDDLLQKGYIRPSSSPWGAPIDLRSGYHQLRINEEDIPKTAFTTRYELFECTGMSFGLTNAPAFFMNLMNKVFMEYLDKFVVVFIDDILIYSRTKEEHEEHLRLALEKLREHQLYAKFSKCEFWLSEVKFLGHVISAGGVAVDPSNVESVTNWKQPKTVSEIRSFLGLAGYYQRFIENFSKIAKPMTRLLQKDVKYKWSEECEQSFQELKNRLISAPILILPDPKKGFQVYCDASKLGLGCVLMQDGKVVAYASRQLRPHEKNYPTHDLELAAVVHALKIWRHYLFGTRTEDEQGTVWLGERICVPDNKDLKDAILKEAHDTLYSIHPGSTKMYQDLKERFWWASMKREIAEYVAVCDVCQRVKAEHQKPAGLLQPLKIPEWKWEEIGMDFITGLPRTSSGHDSIWVIVDRLTKVAHFIPVKTTYSGSRLAELYMARIVCLHGVPKKIVSDRGSQFTSKFWKKLQEEMGSKLNFSTAYHPQTDGQTERTYAEFSYNNSYQASLQMAPYEALYGWKCRTPLLWDQTGERQVFGTDILREAEEKVKTIQERLRVAQSRHKSYADNRRRDLSFDEGDYVYLRVTPLQGVHRFHTKGKLAPRFVGPYKIVSRRGEVAYQLKLPQSLAGVHNVFHVSQLKMCLRVPTEETNLEQIEV

SEQ ID NO: 18912 - protein, 406 aa, Oryza sativa
  Clone ID: TF_OSC400044j.C1.p80.fg
MLLRLPCARGPAPAAAARWRPPGRAARTAPRLGRGHAAASSADGSGAPSSPLFVLCHSQALTLALPPQSLHYDYDPLADLLGPDVDPTSSQRSFNAGVILVTWLIWKEHNESLRGVQSLRNTAPVAEKGKLRSWVGPNGQYYRELPCPSCRGRGYTPCKQCGIDRSSLDCPMCNGKGIRECVQCAGECVIWQESIDEQPWEKVRSSSPLKVKEDDEVDKLEIKINTSKRSRRTYPSPSPEVALKISRSLRSLNAKTGLFTKHMKIIHQDPKLHAQRVAAIKKTKGTAAARKHASETQKAFFSNPENRLKRSIAMKGVKFFCSKCGQEGHRSFYCPTVREISGRAHFRCRLCGGKGHNSRTCGKPKSENECQRQPRHCSQCGERGHNRRNCPRSTTVEVEDVKIYSE

SEQ ID NO: 18913 - protein, 1731 aa, Oryza sativa
  unsure (1)..(1731): unsure at all Xaa locations
  Clone ID: TF_OSC401692j.C1.p10.np
IPTFPESPNLQENILRNFKASKATPGLEXYIPGLEIELCSRDGCSEWLGLCNRIRRSPGQAAYGVESFVQELRTMSFLIGFETAPLYAQIPHDRDEEKCRVKVTLNSNREDIPSVMFEAGEGSYNHACXEVARIAIGELRESYNDRLADTEYRYHPRQPQGSDRGSYLEPAGIENDATTRHLVEMLWAMDETRAKIVIAAQDREDRNRGKICKLEDKVDRLEKELAALKGEAPPQKARVRLTARKRALFVPRYQLAPKMVLTRSNGNGPNPNNNNNNAENPTLAQVLAQQAQLMNLMMQQLQNQQNQGNNHAPPPNKLAEFLRVRPPTFSSTTNPVEAGDCLHAIEKKLDLLQCTDQEKVSFASHQLHGPASEWWDHFRLNRTTAEPISWLEFTAAFRKTHIPSGVVSLKKKEFRALIQGSRSVTEYLHEFNRLARCAPEDVRTDEERQEKFFEGLNDELSYPLMTGDYHDFQKLVDKAIRQEDKYNCMEQKKRRIAHFKAQQGNSQRQRLAMGPQSMLEGGSXSVVRPQRQFFNNNAGNNNRNQAPRPVAALTXNQLAKREQGSKPGVCFNCGDLGHYADKCPKPRRAKVVPAQNNSSAPATKARVNHVAAAEAQGAPDVILGTFPVNSVPTTVLFDSGATHSFLSLSFAGNHGMEVEDLRRPLMVSTPSNQALSSQRSPSVRTEIQGVPFLANLILLESKDLDVILGMDWLARYKGVIDCANRKVTLTSNDGQVVTVHALPSELLRSSLNQITLEEIPIVREYPDVFPDDLPGMPPKRDIEFRIDLVPGTTPIHKRPYRMAANELAEVKRQVDDLLQKGYIRPSSSPWGAPVIFVEKKDHTQRMCVDYRALNDVTIKNKYPLPRIDDLFDQLKGATVFSKIDLRSGYHQLRIKEEDIPKTAFTTKYGLFECTVMSFGLTNAPAFFMNLMNKVFIEYLDKFVVVFIDDILIYSRTNEEHEEHLRLALEKLREHQLYAKFSKCEFWLSEVKFLGHIISAGGVAVDPSNVESVTNWKQPKTVSEIRSFLGLAGYYRRFIENFSKIAKPMTRLLQKDVKYKWSEECEQSFQELKSRLISAPILILHDPKKGFQVYCDASKLGLGCVLMQDGKVVAYASRXLRPHEKNYPTHDLELAAVVHALKIWRHYLFGTRTEVYTDHKSLKYIFIXSDLNMRQQRWLELIKDYDMGIHYHPGKANVVADALSRKGYCNATEGRQLPLKLCKEFERLNLEIVSRGFVAALEAKPTLIDQVREAQINDPDIHEIKKNMRRGKAIGFLEDEQGTVWLGERICVPDNKDLKDAILKEAHDTLYSIHPGSTKMYQDLKERFWWASMKREIAEYVAVCDVCXXVEAEHQKPVGLLQPLKIPEWKWEEIGMDFITGLPRTSSGHHSIWVIVDKLTKMAHFILVRTTYSGSRLAELYMARIVCLHGVPKKIVSDRSSQFTSKFWKKLXEEMGSKLNFSTAYHPQTDGQTERVNQILEDMLRACALDFGGCWDKNLLYAEFSYNNSYQASLQMAPYEALYGRKCRTPLLWDQMGERQVFGTDILREAEEKVKIIQERLRVAHSRHKSYANNRRRDLSFEEGDHVYLRVTPLQGVHRFHTKGKLAPRFVGPYKIVSRRGEVAYQLELPQSLAGVHNVFHVSQLKKCLRVPTEEANLEQIVVQEDLTYIEKPIRILETDERRTKNRVIRFYKVQWSNHSEEESTWEREDELKSAHPHLFASSSKSRGRDSV

SEQ ID NO: 18914 - protein, 1732 aa, Oryza sativa
  unsure (1)..(1732): unsure at all Xaa locations
  Clone ID: TF_OSC422791j.C1.p7.np
IPTFPESPFLQEKNLKSSKASKASPGLEWYIPGLEIELCSRDGCSGWLGLCSMMPRFKPEYLFGVEGFVQELRTMSFAIGFGTAPLYAQIPHDRDEEKCRVKVTLNSNSEDIPSVMFEAGGGNYIHACQEVARIAIGELRDRYSDQLADTEYRYHPRQPQGRDRGSYLETEGIENDATTRHLVEMLWAMDETRAETVLAAQDREDWNRGKICKLEDKVDHLEKELAALKGEAPPQKARVRLTARKRALFVPRYQLAPKMVFTRSNGNGPNINNNNNNNGKNPTLAQVLAQQAQLMNMMMQQLQNQQNQGNNHAPPQNKLAEFLRVRLPTFSSTTNPVEAGDWLHAIEKKLDLLQCTDQEKVSFASHQLHGPASEWWDHFRLNRTTAEPITWLEFTAAFRKTHIPSGVVSLKKKEFRSLTQGSHTVTEYLHEFNRLARYAPEDVRTDEERQERFLEGLNDELSYPLMTGDYHDFQKLVDKAIRQEDKYNRMEQKKRRIAHFKAQQGNSQRPHLTLGPQSMPQGGSSSVVRPQRQFFNNNAGNNIRNQAPRPVAAPTQQQPAKREQGSKPGVCFNCGDLGHYADKCPKPRRVKVVPAQSNSTAPASKARVNHVAAAEAQGAPDVILGTFLVNSVPATVLFDSGATHSFLSMGFAGNHGMEVEDLRRPLMVSTPSNQALSLQRSPSVRIEIQGVPFLANLILLESKDLDVILGMDWLARYKGVIDCANRKVTLTNNDGRVVTVHALSSESLRSSLNQIALEEIPIEQEYPDVFPDDLPGMPPKRDIEFRIDLVPGTTPIHKRPYRMAANELAEVKRQVDDLLQKGYIRPSSSPWGAPVIFVEKKDHTQRMCVDYRALNDVTIKNKYPLPRIDDLFDQLKGATVFSKIDPRSGYHQLRIKEEDIPKTAFTTRYGLFECTVMSFGLTNAPAFFMNLMNKVFMEYLDKFEVVFIDDILIYSRTKEEHEEHLCLALEKLREHQLYAKFSKCEFWLSEVKFLGHVISAGGVAVDPSNVESVTNWKQPKTVSEIRSFLGLAGYYRRFIENFSKIAKPMTRLLQKDVKYKWSEECEQSFQELKNRLISAPILIXPDPKKGFQVYCDASKLGLGCVLMQDGKVVAYASRQLRPHEKNYPTHDLELAAVVHALKIWRHYLFGTRTEVYTDHKSLKYIFTQPDLNMRQRRWLELIKDYDMGIHYHPGKVNVVADALSRKGYCNATEGRQLPLELCKEFERLNLGIVSRGFVAALEAKPTLIDQVREAQINDPDIQEIKKNMRRGKAIGFLEDEQGTVWLGERICVPDNKDLKDAILKEAHNTLYSIHPGSTKMYQDLKERFWWASMKREIAEYEAVCDVCQQVKAEHQKPAGLLQPLKIPEWKWEEIGMDFITGLPRTSSGHDSIWVIVDRLTKVAHFIPVKTTYSGSRLAELYMARIVCLHGVPKKIVSDRGSQFTSKFWKKLQEEMGSKLNFSTAYHPQTDGQTERVNQILEDMLRACALDFGGSWDKNLPYAGFSYNNSYQASLQMAPYEALYGRKCHTPLLWDQTGERQVFGTDILREAEEKVKIIQEGLRMAQSRHKCYADNRRRDLSFEEGDYVYLRVTPLRGVHRFHTKGKLAPRFVGPYKIVSRRGEVAYQLELPQSLAGVHNVFHVSQLKKCFRVSIEEANLEQIEVQEDLTYVEKPILILETDERRTRNRVIRFCKVQWSNHSEEESTWEREDELQSAHPHLFASSPESRGRDSV

SEQ ID NO: 18915 - protein, 506 aa, Oryza sativa
  Clone ID: TF_OSC15750j.C1.p3.gm
MEAEDWLCIIEKKLTLVRMREADKVIFTVNQLEGPAGDWWDTYKEAREEDAGEPTWDEFTAAFHENFVPAAVMRMKKNEFRRPRQGNTTVQEYLNRFTQLTRYAIGDLADEEEKIDKFIEGLNDELRGPMIGQDHESFQSLINKVVRLENDRKVVEHNRKRRLAMNRPPQVATQHPKGAASSGWKPTVVTTNRPTAHSNFHRPVTTQNRAPAPNQAATGVMRPGSCFNCGEYGHFANKCPHLNKTPIRTGANAMAIHGAATPAGGRGVRKPMIVHSPGGETLDIILGMDWLTKNKGIIDCRRREVTLTTPWGSDMRATMDQDPRLTERAGGIFTMLPMKGMPVVQRFPDVFPEDLPGMPPDRDIEFIIDLIPGTAPISKRPYRMSVNELEELKKQIRELQEKGFVRPSSSPWGAPVLFVKKKDGSMRMCVDYRSLNEVTIKNKYLLPRIDDLFDQLKGAKVFSKIDLRSGYHQLKIRIGDIPKTAFLTRYGLYEFTVMSFGLTNAP

SEQ ID NO: 18916 - protein, 1493 aa, Oryza sativa
  Clone ID: TF_OSC17805j.C1.p1.np
LSLPQSEGYVIELHRMLRRLRYPGFPSYRVRQCGPVWEARVEIHPRVPSELDYSFQTRHHRDLPETAMQDAAREAFLRLSSIHRAELVSTEFAHHPFREEGNSVCTVQDTPCCYNPIVTRLSRWAEAVDDYYEEALLEIDDHQRRMGELETELTDLSVQQLQLEEEHQAWGSEIDSLKAQLQLGSGLETPIQIDSEIEGTDTEPEIEPDITDPSEDEAPVPRITFLGGPRTLSTARKSTRPPGKRPKPDPEATTSEPWGLRVIEKKLTLVRVREADKVIFAANQLEGPAGDWWDTYKEAREEDAGEPNWEEFTTAFRDNFVPAAVMRMKKNEFKRLRQGNTTVQEYLNRFTQLARYATGDLADEEEKIDKFIEGLNDELRGPMIGQDHDSFQSLINKVVRLENDRKVMEHNRKRRLAMNRPPQTAPQRPKGTTSLAWRPTVVTTSRPAASSNFHRPVTIQNRAPAPNQAATGSVRPGSCFNCGEYGHFANKCPHPNKTPIRTGANATAIHGTATPATGRGLFRTPQTNRTATGFGRGQVNHVRAEEAQEDQGVLMGMFSLNSTPVKVLFDSGASHSFISLKASQQHNLTRVKLRQPMLVHSPGGEIAVDTACIDVPIRLDVVFPSNLMVLIPQTLDVILGMDWLAKHRGVIDCGRREVTLTTPWGSDMRATMDQDPRLTERAGGIFTMLPLKGMPVVQRFPDVFPEDLPGMPPDRDIEFIIDLIPGTAPISKRPYRMPVNELEELKKQIRELQEKGFVPSSSPWGAPVLFVKKKDGSMRMCVDYRSLNEVTIKNKYPLPRIDDLFDQLKGAKVFSKIDLRSGYHQLKIRTEDIPKTAFSTRYGLYEFTVMSFGLTNAPAYFMNLMNKVFMDYLDKFVVVFIDDILVYSKDEEEHAEHLRLVLQKLRKHKLYAKFSKCEFWLKEVAFLGHVISAGGVAVDPAKVEAVTEWKAPKSVTEIRSFLGLAGYYRRFIEGFSKIARPMTQLLKKEKKFVWSEQCQESFEQLKEKLTSAPILVLPDIRKDFVIYCDASRQGLGGVLMQEGKVVAYASRQLRPYEENYPTHDLELATVVHTLKIWRHYLIGNHCDIYTDHKSLKYIFTQSDLNLRQRRWLELIKDYDLEVHYHPGKANVVADALSRKSHCNHLRMEGMVPELRKEIAQLNLHIEAHESAYSLHPGSTKMYQDLKVGYWWPNMKRDVAEYVALCDVCQKVKAEHQRPADRLTKTARFIPVKTNYSSAKLAELYMTRIVCLHGIPKKIISDRGTQFTSHFWEKVHEALGSYLAFSTAYHPQTDGQTERTNQVLEDMLRACALDFSKDWERCLPYAEFSYNNSFQASLKMSPNEALFGRRCRTPLMWSETGERAVFGPDIIQEAEEKIRLVRDRLKVAQSRQKSYADTRRRNLEFKEGDYIYLKVSPMRPFPFSPTSPPQPPPLPRAPRARPPRAPCRRIAASKPPGRRPCAVVPPRLCPRAAAPVCRTVGRCCRRRRCRCRRR

SEQ ID NO: 18917 - protein, 1402 aa, Oryza sativa
  Clone ID: TF_OSC20335j.C1.p2.fg
MASRRWATTSNDETQTPDLTTLAGVMATQTQLLQAIANNQGNRGGSSFGEFMRTKPPTFATAEEPMDAEDWLRIIEKKLTLVRVPEADKVIFAANQLEGPAGDWWDMYKEAREEDAGEPNWEEFTIAFRDNFVPAAVMRMKKNEFRRLRQGNTTVQEYLNRFTQLARYATRDLADEEEKIDKFIEGLNDELRGPMIGQDHDSFQSLINKVVRLENDRKVVEHNRKRRLAMNRPPQTAPQRPKGTTPSAWRPTVVTTSRPAASSNFHWPVTIQNRSPAPNQAATGSVRPGSCFNCGEYGHFANKCPHPNKTPIRTGANATAIHGTATPVAGRGLFRTPQTNRTATGFGRGQVNHVRAEEAQEDQGVLMGMFSLNSTPVKVLFDSGASHSFISLKASQQHNLTRVKLRQPMLVHSPGGEIAVDTACIDVPIRLRDVVFPSNLMVLIPQTLDVILGMDWLAKHRGIIDYRRREVTLTTPWGSDMRATMDQDPRLTERVGGIFTMLPLKGMPVVQRFPDVFPEDLPGMPPDRDIEFIIDLIPGTALISKRPYRMPVNELEELKKQIRELQEKGFVRPSSSPWGAPVLFVKKKDGSIRMCVDYRSLNEVTIKNKYPLPRIDDLFDQLKGAKVFSKIDLRSGYHQLKIRTRDIPKTAFSTRYGLYEFTVMSFGLTNAPAYFMNLMNKVFMDYLDKFVVVFIDDILIYSKDEEEHAEHLQLVLEKLRKHKLYAKFSKCEFWLKEVAFLGHVISAGGVAVDPAKVEAVTEWKAPKSVTEIRSFLGLAGYYRRFIKGFSKIARPMTQLLKKEKKFVWQGLGGVLMQDGKVVAYASRQLRPHEENYPTHDLELAAVVHALKIWRHYLIGNHCDIYTDHKSLKYIFTQSDLNLRQRRWLELIKDYDLEVHYHPGKANVVADALSRKSHCNHLRMEGMVPELREEIAQLNLHIVPRGQINTLDIQPLLRTQIEEAQKDNEEIREVKERLAAGRAKEFSTDENDVLWYKKRIYVPEQGGLRGLILKEAHESAYSLHPGSTEMYQDLKEGYWWPNMKRDVAEYVALCDVCQKVKAEHQRPAVCLHGVPKKIISDRGTLFTSHFWEKVHEAVGSYLAFSTAYHPQTDGQTERTNQVLEDMLRACAMDFSKDWERCLPYTEFSYNNSFQASLKMSPNEALFGRRCRTPLMWSETRERAVFGPGIIQEAEEKVRLIRDRLKVAQSRQKIYADTRRRILEFKEADYVYLKVSPMRGTKRFKVKGKLAPKYVGPFQIIARRGEVAYQLQLPENIADVHPVFHVSQLKKCLRMPEEQAPLEEIHISNDLTYPEHPIRILDEAEKRTRSKVWRMYKVQWSNHTEDEATWESEEFLRTEYPHLFENWYEISGRALFKGKREMKPRRIPMPTTRREMKTMAFSRS

SEQ ID NO: 18918 - protein, 1221 aa, Oryza sativa
  Clone ID: TF_OSC20639j.C1.p2.fg
MASRRRATTSNDETQTPDLTTLAGVMATQTQLLQAIANNQGNRGRSSFGEFMRTKPPTFATAEEPMDAEDWLRIIEKKLTLVRVREADKVIFAANQLEGPAGDWWDTYKEAREEDAVEPNWEEFTTAFRDNFVPAAVMRMKNNEFRRLQQGNTTVQEYLNRFTQLARYATRDLADEEEKIDKFIEGLNDELRGPMIGQDHDSFQSLINKVVRLENDRKVVEHNRKRRLAMNRSPQTAPQRPKGTTSSAWRPTVVTTSRPAASSNFHRPVTIQNRAPAPNQAATGSVRPGSCFNCGEYGHFANKCPHPNKTPICTGANATAIHGTATPAVGRGLFRTPQTNRTATGFGRGQVNHVRAEEAQEDQGVLMEDLPGMPPDRDIEFIIDLIPGTAPISKRPYRMPVNELEELKKQIRELQEKGFVRPSSSPWGAPVLFVKKKDGSMRMCVDYRSLNEVTIKNKYPLPRIDDLFDQLKGAKVFSKIDLRSGYHQLKIRTGDIPKTAFSTRYGLYEFTVMSFGLTNAPAYFMNLMNKVFMDYLDKFVVVFIDDILIYSKDEEEHAEHLRLVLEKLRKHKLYAKFSKCEFWLKEVAFLGHVISAGGVAVDPAKVEAVTEWKAPKSVTEIRSFLGLARYYRRFIEGFSKIARPMTQLLKKEKKFVWSEQCQESFEQLKEKLTSAPILVLPDIRKDFVIYCDASRQGLGGVLMQDGKVVAYASRQLRPHEENYPTHDLELAAVVHALKIWRHYLIGNHCDIYTDHKSLKYIFTQSDLNLRQRRWLELIKDYDLEVHYHPGKANVVADALSRKSHCNYLRMEGMVPELREEIAQLNLPRGQINTLDIQSLLRTQIEEAQKDNEEIREVKERLAAGRAKEFSTDEKDVLWYKKRIYVPEQGGLRGLILKEAHESAYSLHPGSTKMYQDLKEGYWWPNMKRDVAEYVALCDVCQKVKAEHQRPAGLLQPLRIPEWKWDETDGQTERTNQVLEDMLRACALDFSKDWERCLPYAEFSYNNSFQASLKMSPNEALFGRRCRTPLMWSETGEQAVFGPDIIQEAEEKVRLIRDRLKVAQSRQKSYADTRRRNLEFKEGDYVYLKVSPMRGTKRFKVKGKLAPRYVGPFQIIARRGEVAYQLQLPENIADVHPVFHVSQLKKCLRVPEEQAPLEEIHISNDLTYPEHPIRILDEAEKRTRSKVWRMYKVQWSNHTEDEATWESEEFLRTEYPHLFENW

SEQ ID NO: 18919 - protein, 1297 aa, Oryza sativa
  Clone ID: TF_OSC400179j.C1.p9.fg
MASRRRATTSNDETQTPDLATLAGVMATQTQLLQAIANNQGNRGGPSFGEFMRTKPPTFATAEEPMDAEDWLRIIEKKLTLIRVREADKVIFAANQLEGPAGDWWDTYKESREEDAGEPNWEEFTTAFRDNFVPAAVMRMKKNEFRRLRQGNTTVQEYLNHFTQLARYATRDLANEEEKIDKFIEGLNDELRGPMIGQDHDSFQSLINKVVRLENDRKVVEHNRKRRLAMNRPPQTAPQRPKGTTSSAWRPTVVTTSRPAASSNFHRPVTIQNRAPAPNQAATGSVRPGSCFNCGEYGHFANKCPHPNKTPIRTGANATAIHGTATPAAGRGLFRTPQTNRTATEFGRGQVNHVRAEEAQEDQGVLMGASHSFISLKASQQHNLIRVKLRQPMLVHSPGGEIAVDTACIDVPIRLRDVVFPSNLMVLIPQTLDVILGMDWLAKHRGIIDCRRREVTLTTPWGSDMRATMDQDPRLTERAGGIFTMLPLKGMPVVQRFPDVFPEDLPGMPPDRDTEFIIDLIPGTAPISKRPYRMPVNELDELKKQIRELQEKGFVRPSSSPWGAPVLFVKKKDGSMRMCVDYRSLNEVTIKNKYPLPRIDDLFDQLKGAKVFSKIDHRSGYHQLKIRTGDIPKTAFSTRYGLYEFTVMSFGLTNAPAYFMNLMNKVFMDYLDKFVVVFIDDILIYSKDEEEHAEHLRLVLEKLRKHKLYAKFSKCEFWLKEVAFLGHVISAGGVAVDPAKVEAVTEWKAPKSVTEIRSFLGLAGYYRRFIEGFSKIARPMTQLLKKEKKFVWSEQCQESFEQLKEKLTSAPILVLPDIRKDFVIYCDASRQGLGGVLMQDGKVVAYASRQLQPHEENYPTRDLELAAVVHALKIWRHYLIGNHCDIYTDHKSLKYIFTQSDLNLRQRRWLELIKDYDLEVHYHPGKANVVADALSRKSHCNHLRMEGMIPELREEIAQLNLHIVPRGQINTLDIQPLLRTQIEEAQKDNEEVREVKERLATGRAKEFSTDEKDVLWYKKRIYVPEQGGLRGLILKEAHESAYSLHPGSTKMYQDLKEGYWWPNMKRDVAEYIALCDVCQKVKAEHQRPVGLLQPLRIPEWKWDEIGMDFIVGLPKTATGYDSIWVIVDRLTKTARFIPVKTNYSSAKLAELYMTRIVCLHGVPKKITSDRGTQFTSHFWEKVHEALGSYLAFSTAYHPQTDGQTERTNQVLEEMLRACALDFSKDWERCLPYAEFSYNNSFQASLKMSPNEALFGRRCRTLLMWSETGEQAVFGPDIIQEAEEKVRLIRDRLKVAQS

SEQ ID NO: 18920 - protein, 1030 aa, Oryza sativa
  Clone ID: TF_OSC400477j.C1.p39.fg
METNSGDNASSNFHRPVTIQNRAPAPNQAATGPVRPGSCFNCGEYGHFANKCPHPNKTPIRTGANATTIHGTATPAAGRGASHSFISLKASQQHKLTRVKLRQPMLVHSPGGEIAVDTACIDVPIRLRDVVFPSNLMVLIPQTLDVILGMDWLAKHRGVIDCRRREVTLTTPWGSDMRATMDQDPRLTERAGGIFTMLPLKGMPVVQLFPDVFPEDLPGMPPDRDIEFIIDLIPGTAPISKRPYRMLVNELEEHKKQIRELQEKGFVRPSSSPWGAPVLFVKKKDGSMRMCVDYRSLNEVTIKNKYPLPRIDDLFDQLKGAKVFSKIDLRLGYHQLKIRTGDIPKTAFSTRYGLYEFTVMSFGLTNAPAYFMNLMNKVFMDYLEKFVVVFIDDILIYSKDEEEHAEHLRLVLEKLRKHKLYAKFSKCEFWLKEVAFLGHVISAGGVAVDPTKVEAVTEWKAPKSVTEIQSFLGLAGYYRRFIEGFSKIARPMTQLLKKEKKFVWSEQCQESFEQLKEKLTSAPILVLPNIRKDFVIYCDASRQGLGGVLMQDGKVVAYASRQLRPHEENYPTYDLELAAVVHALKIWRHYLIGNHCDIYTDHKSLKYIFTQSDLNLRQKRWLELIKDYDLEVNTLDIQPLLRTQIEEAQKDNGEIQEVKERMATGHVKEFSMDEKKTLWYKKRIYVPEQGGLRGLILKEAHESAYSLHPGSTKMYQDLKEGYWWPNMKRDVKEYVALCDVCQKVIVDRLTKMARFIPVKTNYSSAKLAELYMTRITDGQTERTNQVLEDMLRACALDFSKDGERCLPYAEFSYNNSFQASLKMSPNEALFGRRCRTPLMWSETGERAVFGADIIQEAEEKVCLIRDRLKVAQSRQKSYTDTRRRNLEFKEGDYVYLKVSPIRGIKRFKVKGKLAPRYVGPFQIIARQGEVAYQLQLPENIADVHPVFHVSQLKKCLRVPEEQATLEEIHISNDLTYPEHPVRILDEAEKRTRTKVWHMYKVQWSNHTEDEATWESEEFLRTEYPHLFENW

SEQ ID NO: 18921 - protein, 1494 aa, Oryza sativa
  unsure (1)..(1494): unsure at all Xaa locations
  Clone ID: TF_OSC400603j.C1.p12.np
MGVPRSEGYVIELHRLMRRLRYPRFPIYRVRQCGSVWEARVEVHTLVPSELDYSFPTRHRRDLPETAMQDAAREAFLRLSSIHRAELASTEFAHHPFREESNSVCTVQDTPCCYNPIVTRLSRWAEVVDDFYEEALLEIDDQQRRVGELETEVTDLTAQQLQLEEEHQAWGSEIDSLKAQLQPGSSLETPIQVDSETEGTDTEPETEPDITDPSEDETLVPRITFLGGPRTLSTARKSTRPPGKKPKPDPEATTSEPWGLRVIEKKLTLVRVREADKVIFEANQLEGPAGDWWDTYKEAREEDAGEPNWEEFTTAFRDNFVPAAVMRMKKNEFRRLRQGNTTVQEYLNRFTQLARYATGDLADEEEKIDKFIEGLNDELRGPMIGQDHDSFQSLINKVVRLENDRKVVEHNRKRRLAMNRPPQPVPXRHKGTTSSVWRPTVVTTNRPTASSNFHRLITIQNRAPAPNQAATGSVRLGSCFNCGEYGHFANKCPHPNKTPICTGANATAIHGTATPAAGRGLFGTPQTNRTTTGFGRGQVNHVRAEEAQEDQGVLMGMFSINSTPVKVLFDSGASHSFISLKVSQQHNLTRVKLRQPMLVHSPGGEIAVDTACIDVPIRLRDVVFPSNLMVLMPQTLDVILGMDWLTKHRGVIDCRRREVTLTTPWGSDMRATMDQDPRLTERAGGIFTMLPQKGIPVVQRFPDVFPEDLPGMPPDRDIEFLIDLIPGTAPISKRPYRMPVNELEELKKQIRELQEKGFVRPSSSPWGAPVLFVKKKDGSMRMCVDYRSLNEVTIKNKYPLPRIDDLFDQLKGAKVFSKIDLRSGYHQLKIRTGDIPKTAFSTRYGLYEFTVLSFGLTNAPAYFMNLMNKVFMDYLDKFVVVFIDDILIYSRDEEEHAEHLRLVLEKLRKHKLYAKFSKCEFWLKEVAFLGHVISAGGVAVDPAKVEAVTEWKAPKSVTEIRSFLGLAGYYRRFTEGLSKIARPMRQLLKKEKKFVWSEQCQESFEQLKEKLTSAPILVLPDIRKDFVIYCDASRQGLGGVLMQDGKVVAYASRKLRPHEENYPTHDLELAAVVHALKIWRHYLIGNHCDIYTDHKSLKYIFTQSDLNLRQRRWLELIKDYDLEVHYHLGKANVVADALSRKSHCNHLRTEGMAPELKEEIAQLNLHIEAHESAYSLHPGSTKMYQDLKDGYWWPNMKRDVAEYVALCDVCQKVKAEYQRPADRLTKTARFIPVKTNYSSAKLVELYMTRIVCLHGIPKRIISDRGTQFTSHFWEKVHEALGSYLAFSTAYHPQTDGQTERTNQVLEDMLRACALDFSKDWERCLPYTEFSYNNSFQANLKMSPNEALFGRRCRTPLMWSETGERAVFGPDIIQEAEEKVRLIRDRLKVAQSRQKSYTDTRRRNLEFKEGDYVYLKVSPMRAPPFSPLLTPSPPPLPLPLLHAPPSSCRRVAAFEPPRRRPRAVVPPHSCHRATASVCRAVRRRRRRRRRXAAAP

SEQ ID NO: 18922 - protein, 1470 aa, Oryza sativa
  Clone ID: TF_OSC400800j.C1.p10.fg
MASRRRATTSNDETQTPDLNTLAGIMATQTQLLQAIASNQGNRGGSSFGEFMRTKPPTFATAEEPMDAEDWLRIIEKKLTLVRVREADKVIFAANQLEGPAGDWWDTYKEAREEDAGEPNWEEFTTAFRDNFVPAAVMRMKKNEFRKLRQGNTTVQEYLNRFTQLARYATRDLADEEEKIDKFIEGLNDELRGPMIGQDHDSFQSLINKVVRLENDRKVVEHNRKRRLAMNRPPQTAPQRPKGTTPSAWRPTVVTTSRPAASSNFHRPVTIQNRAPTPNQAATGSVRPGSCFNCGEYGHFANKCPHPNKTPIRTGANATAIHGTATPAAGRGLFRTPQTNRTATGFGRGQVNHVRAEEAQEDQGVLMGMFSLNSTPVKVLFDSGASHSFISLKASQQHNLTRVKLRQPMLVHSPGGEIAVDTACIDVPIRLRDVVFPSNLMVLIPQTLDVILGMDWLAKHRGVIDCRRREVTLTTPWGSDMRATMDQDPRLTERAGGIFTMLPLKGMPIVQRFPDVFPEDLPGMPPDRDIEFIIDLIPGTAPISKRPYRMPVNELEELKKQIRELQEKGFVRPSSSPWGAQVLFVKKKDGSMRMCVDYRSLNEVTIKNKYPLPRIDNLFDQLKGAKVFSKIDLRSGYHQLKIRTEDIPKTAFSTRYGLYEFTVMSFGLTNAPAYFMNLMNKVFMEYLDKFVVVFIDDILIYSKDEEEHAEHLRLVLQKLRKHKLYAKFSKCEFWLKEVAFLGHVISAGGVAVDPAKVEAVTEWKAPKSVTEIRSFLGLARYYRRFIEGFSKIARPMTQLLKKEKKFVWSEQCQESFEQLKEKLTSAPILVLPDIRKDFVIYCDASRQGLGGVLMQDGKVVAYASRQLRPHEENYPTHDLELAAVVHALKIWRHYLIGNHCDIYTDHKSLKYIFTQSDLNLRQRRWLELIKDYDLEVHYHPGKANVVADALSRKIHCNHLRMEGMVPELREEIAQLNLHIVPRGQINTLDIQPLLRTQIEEAQKDNEEVREVKERLAAGRAKEFSTDEKDVLWYKKRIYVPEQGGLRGLILKEAHESAYSLHPGSTKMYQDLKEGYWWPNMKRDVAEYVALCDVCQKVKAEHQRPAGLLQPLRIPEWKWDEIGMDFIVGLPKTATGYDSIWVIVDRLTKTARFIPVKTNYSSAKLAELYMTRIVCLHGVPKKIISDRGTQFTSHFWEKVHEALGSYLAFSTAYHPQTDGQTERTNQVLEDMLRACALDFSKDWERCLPYAEFSYNNSFQASLKMSPNEALFGRRCRTPLMWSETGERAVFGPDIIQEAEEKVRLIRDRLKIAQSRQKSYADTRRRNLEFKEGDYIYLKVSPMRGTKRFKVKGKLAPRYVGPFQIIARRGEVAYQLQLPENIADVHPVFHVSQLKKCLRVPEEQAPLEEVHISNDLTYPEHPIRILDEAAKRTRSKVWRMYKVQWSNHTEEEATWESEEFLRTEYPHLFEDW

SEQ ID NO: 18923 - protein, 1421 aa, Oryza sativa
  Clone ID: TF_OSC401478j.C1.p74.fg
MASRRRATTSNDETQTPDLNTLAGIMATQTQLLQAIANNQGNRGGSSFGEFMRTKPPTFATAEEPMDAEDWLRIIEKKLTLVRVREADKVIFAANQLEGPAGDWWDTYKEAREEDAGEPNWEEFTTAFRDNFVPAAVMRMKKNEFRRLRQGNTTVQEYLNRFTQLARYATRDLADEEEKIDKFIEGLNDELRGPMIGQDHDSFQSLINKVVRLENDRKVVEHNRKRRLAMNRTPQTAPQRPKGTTSSAWRPTVVTTSRPAASSNFHRPVTIQNRAPAPNQAATGSVRPGSCFNCGEYGHFANKCPHPNKTPIRTGTNATAIHGTATPAAGRGLFRTPQTNRTATGFGRGQVNHVRAEEAQEDQGVLMGMFSLNSTPVKVLFDSGASHSFISLKASQQHNLTRVKLRQPMLVHSPGGEIAVDTACINVPIRLRDVVFPSNLMVLIPQTLDVILGMDWLAKHRGVIDCRRREVTLTTPWGSDMRATMDQDPRLTERAGGIFTMLPLKGMPVVQRFPDVFPEDLPGMPPDRDIEFIIDLIPGTAPISKRPYRMPVNELEELKKQIRELQEKGFVRPSSSPWGAPVLFVKKKDGSMRMCVDYRSLNEVTIKNKYPLPRIDDLFDQLEGAKVFSKIDLRSGYHQLKIRTEDIPKTAFSTRYGLYEFTVMSFGLTNAPAYFMNLMNKVFMDYLDKFVVVFIDDILIYSKDEEEHAEHLRLVLQKLRKHKLYAKFSKCEFWLKEVAFLGHVISAGGVAVDPAKVEAVTEWKAPKSVTEIWSFLGLAGYYRRFIEGFSKIARPMTQLLKKEKKFVWSEQCQESFEQLKEKLTSAPILVLPDIRKDFVIYCDASRQGLGGVLMQDGKVVAYASRQLRPHEENYPTHDLELAAVVHALKIWRHYLIGNHCDIYTDHKSLKYIFTQSDLNLRQRRWLELIKDYDLEINTLDIQPLLRTQIEEAQKDNEEVREVKERLAAGRAKEFSTNEKDVLWYKKRIYVPEQGGLRGLILKEAHESAYSLHPGSTKMYQDLKEGYWWPNMKRDVAEYVALCDVCQKVKAEHQRPAGLLQPLRIPEWKWDEIGMDFIVGLPKTATGHDSIWVIVDRLTKTARFIPVKTNYSSAKLAELYMTRIVCLHCVPKKIISDRGTQFTYHFWEKVHEALGSYLAFSTAYHPQTDGQTERTNQVLEDMLRACALDFNKDWERCLPYAEFSYNNSFQASLKMSPNEALFGRRCRTPLMWSETGERAVFGPDIIQEAEEKVRLIRDRLKIAQSRQKSYADTRRRNLEFKEGDYVYLKVSPMRGTKRFKVKGKLAPRYVGPFQIIARRGEVAYQIQLPENIADVHPVFHVSQLKKCLRVPEEQAPLEEIHISNDLTYPEHPIRILDEAEKRTRSKVWHMYKVQWSNHTEDEATWESEEFLRTEYPHLFEDW

SEQ ID NO: 18924 - protein, 1579 aa, Oryza sativa
  Clone ID: TF_OSC401834j.C1.p7.fg
MGVPRSEGYVIELHQLMRRLRYPRFPIYRVRQCGPVWEVLVEVLTRVPSESDYSFPTRHCHDLPETAMQDAAWEAFLQLSSIHRAELAIDDFYEEALLEIDDQQRRVGELETEVTDLTVQQLQLEEEHQAWGSEINLLKAQLQVHGDQFQQLSDQYNDRRGMMDTLEEQLRESQEHVSQLEEQLRAATVNTTGASTSTAVGRDRYFFLTPPYPPAFHALLGELGSSMETPIQVDSETEGTDTEPEIEPDITDPSEDETPVPRITFIGGPRTLSTAHKSTRPPGKKPKPDPEATTSEPWGLSNEETQAPDLTTLAGVMAAQTQLLQAIANNQGNRGGSSFGEFMRTKPPTFATADEPMEAEDWLRIIEKKLTLVRVREADKVIFAANQLEEAREEDAGEPNWEEFTTAFRNNFVPAADHDNFYSLINKVVRMENDRKVVEHNRKRRFAMNRLSQAAPQRPKGTTSSVWRPTVVTTNRLAASSNFHRPVTIQNRAPAPNQAATGSVRPGSCFNCGEYGHFANKCPHPKKTPVRTGANTTAIHGTTTPAAGRGLFKTPQTNRTATGFGRGQVNHVRAEEAQEDQGVLMGMFSINSTPVKVLFDSGASHSFISLKASQQHKLTRVKLRQPMLVHSPGGEIAVDTACIDVPIRLRDVVFPSNLMVLIPQTLYVVLGMDWLTKHRGVIDCRRREVTLTTPWGSDMRATMDQDPRLAERAEGIFTMLPMKGMPVVQRFPDVFLEDLPGMPLDRDIEFIIDLIPGTAPISKRPYRMPVNELEELKKQIRELQEKGFVRPSSSPWGAPVLFVRKKDGSMRMCVDYRSLNEVTIKNKYPLPRIDDLFDQLKGAKVFSKIDLRSGYHQLKIRTENIPKTAFSTRYGLYEFTVMSFGLTNAPAYFMNLMNKVFMDYLDKFVVVFIDDILIYSKDEEEHAEHLRLVLEKLRKHKLYAKFGKCEFWLKEVAFLGHVISAGGVAVDPAKVEAVTEWKAPKSVTEIRSFLGLAGYYRRKDFVIYCDASRQGLGGVLMQDGKVVAYALRQLRPHEENYPTHDLELAAVVHALKIWRHYLIGNHCDIYIDHKSLKYIFTQSDLNLRQRRWLELIKDYDLEVHYHPGKANVVADALSRKSHCNHLRMEGMAPELKEEIAQLNLHIVPHGQINTLDIQPLLRTQIEEAQKDNEEIQEVKERLAAGFAKEFSTDEKDVLWYKKRIYVPERGGLRGLILKEAHESAYSLHPGNTKMYQDLKEGYWWPNMKRDVAEYVALCDVCQKTATGYDSIWVIVDRLTKTARFIPVKTNYSGAKLAELYMTRIVYLHGVPKRIVSDRGTQFTSHFWEKVHETLGSYLAFSTAYHPQTDGQTERTNQVLEDMLRACALDFSKDWERCLPYAEFSYNNSFQASLKMSPNEALFGRRCRTPLMWSETCERAVFGPDIIKEAKEKVRLIRDRLKVAQSRQKSYADTRKRNLEFKEGDYVYLKVSPIRGTKRFKVKGKLAPRYVGPFQITARRGEVAYQLQLPENIADVHLVFHVSQLKKCLRVPEEQAPLEEIHISNDLTYPEHPVRILDEAEKRTRNKVWRMYKVQWSNHT

SEQ ID NO: 18925 - protein, 1470 aa, Oryza sativa
  Clone ID: TF_OSC410570j.C1.p1.fg
MASRRRATTGNDETQTPDLNTLAGIMATQTQLLQAIASNQGNRRGSSFGEFMRTKPPTFATAEEPMDAEDWLRIIEKKLTLVRVREADKVIFAANQLEGPAGDWWDTYKEAREEDAGEPNWEEFTTAFCDNFVPAAVMRMKKNEFRRLRQGNTTVQEYLNRFTQLARYATGDLADEEEKIDKFIEGLNDELRGPMIGQDHDSFQSLINKVVRLENDRKVVEHNRKRRLAMSRPPQTAPQRPKGTTPSAWRPTVVTTSRPAASSNFHRPVTIQNRAPTPNQAATGSVRPGSCFNCGEYGHFANKCPHPNKTPIRTGANATAIHGTATPAAGRGLFRTPQTNRTATGFGRGQVNHVRAEEAQEDQGVLMGMFSLNSTPVKVLFDSGASHSFISLKASQQHNLTRVKLRQPMLVHSPGGEIAVDTACIDVPIRLRDVVFPSNLMVLIPQTLDVILGMDWLAKHRGVIDCRRREVTLTTPWGSDMRATMDQDPRLTERAGGIFTMLPLKGMPVVQRFPDVFPEDLPGMPPDRDIEFIIDLIPGTAPISKRPYRMPVNELEELKKQIRELQEKGFVRPSSSPWGAPVLFVKKKDGSMRMCVDYRSLNEVTIKNKYPLPRIDDLFDQLKGAKVFSKIDLRSGYHQLKIRTEDIPKTAFSTRYGLYEFTVMSFGLTNAPAYFMNLMNKVFMEYLDKFVVVFIDDILIYSKDEEEHAEHLRLVLQKLRKHKLYAKFSKCEFWLKEVAFLGHVISAGGVAVDPAKVEAVTEWKAPKSVTEIRSFLGLAGYYRRFIEGFSKIARPITQLLKKEKKFAWSEQCQESFEQLKEKLTSAPILVLPDIRKDFVIYCDASRQGLGGVLMQEGKVVAYASRQLRPHEENYPTHDLELAAVVHALKIWRHYLIGNHCDIYTDHKSLKYIFTQSDLNLRQRRWLELIKDYDLEVHYHPGKANVVADALSRKSHCNHLRTEGMVPELREEMAQLNLHIVPRGQINTLDIQPLLRTQIEEAQKDNEEVREVKERLAVGRAKEFSTDEKDVLWYKKRIYVPEQGGLRGLILKEAHESAYSLHPGSTKMYQDLKEGYWWPNMKRDVAEYVALCDVCQKVKAEHQRPAGLLQPLRIPEWKWDEIGMDFIVGLPKTATGYDSIWVIVDRLTKTARFIPVKTNYSSAKLAELYMTRIVCLHGIPKRIISDRGTQFTSHFWEKVHEALGSYLAFSTAYHPQTDGQTERTNQVLEDMLRACALDFSKDWERCLPYAEFSYNNSFQASLKMSPNEALFGRRCRTPLIWSETGERAVFGPDIIQEAEEKVRLIRDRLKVAQSRQKSYADTRRRDLEFKEGDYVYLKVSPMRGTKRFKVKGKLAPRYVGPFQIIARRGEVAYQLQLPENIADVHLVFHVSQLKKCLRVSEEQAPLEEIHISNDLTYPEHPIRILDEAEKRTRSKVWRMYKVQWSNHTEDEATWESEEFLRTEYPHLFYNW

SEQ ID NO: 18926 - protein, 1691 aa, Oryza sativa
  Clone ID: TF_OSC416395j.C1.p15.fg
MERTTEDDERPTVPLLEPKPASNEEEEEVGSVRRRVVEENKKLWVVAGPSICARFSSFGVTVISQAFIGHIGGTELAAYALVSTVLMRFSNGILLGMASALETLCGQSYGAKQYHMLGVYLQRSWLVLFCCAVILLPVYIFTTPLLIALGQDPEISAVAGTISLWYIPVMFSYIWAFMLQMYLQAQSKNMIVTYLAFLNLGIHLFLSWLLTVKFQLGLAGVMGSMVISFWIPVFGQLAFVFFGGCPLTWTGFSSSAFTDLGAIMKLSLSSGVMLCLELWYNTILVLLTGYMKNAEVALDALSICLAYIFTESKAVADEVADLAPLLAFSILLNSVQPVLSGVAIGSGWQSVVAYVNVTSYYLIGIPLGAILGYVLGFQAKGIWIGMLLGTLVQTLVLLFITLRTNWKKQLGSSLETPIQVDSETEGTDTEPEIEPDITDPSEDETPVPRITFLGGPRTLSTARKSTRPPGKRPKLDPEMASRRWASTSNEETETPDLTTLAGVMATQTQLLQAIANNQGNRCGSSFGEFMRTKPPTFATAEEPMDAEDWLRIIEKKLTLVRVREADKVIFAANQLEGPAGDSWDTYKGAREEDAGEPNWEEFTTAFRDNFVPAAVMLMKKNEFRRLRQGNTTVQEYLNRFTQLARYATRDLADEEETIDKFIEGLNDELRGPMIGQDHDSFQSLINKAATGPVRPGSCFNCGEYGHFANKCPHPNKTPIRTGANATAIHGTTTPAVRRGLFRTPQTNRTATGFGRGQVNHVRAEEAQEDQGVLMGMFSLNSTPVKVLFDSGASYLFISLKASQQHNLTRVKLRQPMLVHSPGGEIAVDTACIDVPIRLRDVVFPSNLMVLIPQTLDVILAMDWLAKHRGVIDCRRREVTLTTPWGSDMRATMDQDPRLTERVGGIFTMLPLKGMPVVQRFPDVFPEDLPGMPPNRDIEFIIDLIPGTAPISKRPYRMPVNELEELKKQIRELQEKGFVRPSSSPWGAPVLFVKKKDGSMRMCVDYRSLNEVTIKNKYPLPRIDDLFDQLKGAKMFSKIDLRSGYHQLKIRTEDIPKTALSTRYGLYEFTVMSFGLTNAPAYFMNLMNKVFMDYLDKFVVVFIDDILIYSKDEEEHAEHLRLVLQKLRKHKLYAKFSKCEFWLKEVAFLGHVISAGGVAVDPAKVEAVMEWKAPKSVTEIRSFLGLVGYYRRFIEGFSKIARPMTQLLKKEKKFVWSEQCQESFEQLKEKLTSAPILVLPDIRKDFVIYCDASRQGLGGVLMQDGKVVAYASRQLRPHEENYPTHDLELAAVVHALNIWRHYLIGNHCDIYTDHKNLKYIFTQSDLNLRQRRWLELIKDYDLEIWRHYLIGNHCDIYTDHKSLKYIFIQSDLNLRQRRWLELIKDYDLEVHYHPGKANVVADALSRKSHCNHLEMEGMAPELKEELAQLNLHIVPRGQVNTLDIQPLLRTQIEEAQKDNEEIREVKERLAAGFAKEFSTDEKDVLWYKKRIYVPKQGGLRGLILKEAHESAYSLHPGSTKMYQDLKEVYWWPNMKRDVAEYVALCDVCQKTATGYDSIWVIVDRLTKTARFIPVKTNYSSAKLAELYMTRIVCLHGVPKRIISDRGTQFTSHFWEKVHEALGSYLAFSTAYHPQTDGQTERTNQVLEDMLRACALDFSKDWERCLPYAEFSYNNSFQASLKMSPNEALFGRR

SEQ ID NO: 18927 - protein, 1418 aa, Oryza sativa
  Clone ID: TF_OSC420750j.C1.p6.fg
MASRRRATTSNDETQTPDLTTLAGVMTTQTQLLQAIANNQGNRGGSSFGEFMRTKPPTFATAEEPMDAEDWLRIIEKKLTLVQVREADKVIFAANQLEGPTGDWWDTYKEAREEDAGEPNWEEFTTAFRDNFVPAAVMRMKKNEFRRLRQGNTTVQEYLNRFTQLARYATRDLADEEEKIDKFIEGLNDELRGPMIGQDHDSFQSLINKVVRLENDRKVVEHNRKRRLAMNRSPQTAPQRPKGTTPSAWRPTVVTTSRPAASSNFHKPVTIQNRAPAPNQAATGSVRPGSCFNCGEYGHFANKCPHPNKTPIRTGANATANHGTATPAAGRGLFRTPQTNRTATGFGRGQVKHVRAEEAQEDQGVLMGMFSLNSTPVKVLFDSGASHSFISLKASQQHNLIRVKLRQPMLVHSPGGEIAVDTACIDVPIRLRDVVFPSNLMVLIPQTLDVILGMDWLAKHRGVIDCRRREVTLTTPWGSDMRATMDQDPRLTEHAGGIFTMLPLKGMPVVQRFPDVFPEDLPGMPPDRDIEFIIDLIPGTAPISKRPYRMPVNELEEIKKQIRELQEKGFVRPSSSPWGAPVLFVKKKDGSMRMCVDYRSLNEVTIKNKYPLPRIDDLFDQLKGAKVFSKIDLRSGYHQLKIRTEDIPKTAFSTRYGLYEFTVMSFGLTNAPAYFMNLMNKVFMDYLDKFVVVFIDDILIYSKDEEEHTEHLRLVLQRLRKHKLYAKFSKCEFWLKEVAFLGHVISAGGVAVDPAKVEAVTEWKAPKSVTEIRSFLGLAGYYRRFIEGFSKIARPMTQLLKKEKKFVWSEQCQESFEQLKEKLTSAPILVLPDIRKDFVIYCDASRQGLGGIWRHYLIGNHCDIYTDHKSLKYIFTQSDLNLRQRRWLELIKDYDLEVHYHPGKANVVADALSRKSHCNHLRMEGMVPELREEIAQLNLHIVPHGQINTLDIQPLLRTQIEEAQKDNEEIREVKERLAAGRAKEFSTDEKDVLWYKKRIYVPEQGGLRGLILKEAHESAYSLHPGSTKMYQDLKEGYWWPNMKRDVAEYVALCDVCQKVKAEHQRPAGLLQPLRIPEWKWDEIGMDFIVGLPKIATGYDSIWVIVDRLTKTARFIPVKTNYSSAKLAELYMTRIVCLHGVPMKIISDRGTQFTSHFWEKVHEALGSYLAFSTAYHPQTDGQTERTNQVLEDMLRACALDFSKDWERCLPYAEFSYNNSFQASLKMSLNESLFGRRCRTPLMWSETGERAVLGPDIIQEAEEKVRLIRDRLKVAQSRQKSYADTRRRNLEFKEGDYVYLKVSPMRGTKRFKIIARRGEVAYQLQLPENIADVHPVFHVSQLKKCLRVPEEQAPLEEIHISNDLTYPEHPIRILDEAEKRTRSKVWRMYKVQWSNHTEDEATWESEEFLRTEYPHLFEDW

SEQ ID NO: 18928 - protein, 1074 aa, Oryza sativa
  Clone ID: TF_OSC900173j.C1.p6.fg
MASRRRATTSNDETQTPDLTTLAGVMATQTQLLQAIANNQGNRGGSSFGEFMRTKPPTFARAEEPMDAKDWLRIIEKKLTLVRVREADKVIFAANQLEGPVGDWWDTYKEAREEDAGEPNWEEFTTDFRDNFVPAAVMRMKKNEFRRLRQGNTTVQEYLNCFTQLARYATRDLADEEEKIDKFIEGLNDELRGPMIGQDHDKNDRKVVEHNRKRRLAMNRPPQTAPQRPKGATSSAWRPTVVTTSRPATSSNFHRPVTIQNRAPAPNQAATGSVRPGSCFNCGEYGHFANKCPHPNKTPIRTGANATAIHGTATPAAGRGLFRTPQTNRTATGFGRGQVNHVRAEEAQEDQGVLMGMFSLNFTPVKVLFDSGASHSFISLKASQQHNLTRVKLRQPMLVHSPGGEIAVDTACIDVPIRLRDVVFPSNLMVLIPQTLDVILGMDWLAKHRGVIDCRRREVTLITPWGSDMRATMDQNPRLTERAGGIFTMLPLKGMPVVQRFPDVFPEDLPGMPPDRDIEFIIDLIPATAPISKRPYRMPVNELKELKKQIRELQEKGFVRPSSSPWGAPVLFVKKKDGSMRMCVDYRSLKEVTIKNKYPLPRIDDLFDQLKGAKVFSKINLRSGYHQLKIRTEDIPKTAFSTRYGLYEFTVMSFGLTNAPAYFMNLMNKVFMDYLDKFVVVFIDDILIYSKDEEEHAEHLRLVLQKLRKHKLYAKFSKCEFRLKEVAFLGHVISASGVAVDPAKVEAVTEWKAPKSVTEIRSFLGLAGYYRTFIEGFSKIARPMTQLLKKEKKFDLKEGYWWPNMKRDVAEYVALCDICQKVKAEHQRPAGLLQPLRISEWKWDEIGMDFIVGLPKTATGFQASLKMSPNEALLGRRCRTPLMWSETGERAVFGPDIINEAEEKVRLIRDRLKVTQSRQKSYADTRRRDLEFKKRDYVYLKVSPMRGTKRFKVKGKLAPRYGGPFQITARRGEVAYQLQLPENIADVHPVFHVSQLKKCLPVPEEQAPLEEIHISNDLTYPEHPIRILDEVEKRTRSKVWRMYKVQWSNHTEDEATWESEEFLRTEYPHLFENW

SEQ ID NO: 18929 - protein, 1428 aa, Oryza sativa
  Clone ID: TF_OSC900324j.C1.p13.fg
MASRRRATTSNDETQTPDLNTLAGIMATQTQLLQAIASNQGNRGGSSFGEFMRTKPPTFATAEEPMDAEDWLRIIEKKLTLVRVREADKVIFAANQLEGPAGDWWDTYKEAREEDAGEPNWEEFTTAFRDNFVPAAVMRMKKNEFRRLRQGNTTVQEYLNRFTQLARYATRDLADEEEKIDKFIEGLNDELRGPMIGQDHDSFQSLINKVVRLENDRKVVEHNRKRRLAMNRPPQTAPQRPKGTTPSAWRPTVVTTSRPAASSNFHRPVTIQNRAPTPNQAATGSVRPGSCFNCGEYGHFANKCPHPNKTPIRTGANATAIHGTATPAAGRGLFRTPQTNRTATGFGRGVKLRQPMLIHSPGGEIAVDTACIDVPIRLRDVVFPSNLMVLIPQTLDVILGMDWLAKHRGVIDCRRREVTLTTPWGSDMRATMDQDPRLTERAGGIFTMLPLKGMPVVQRFPDVFPEDLPGMPPDRDIEFIIDLIPGTAPISKRPYRMPVNELEELKKQIRELQEKGFVRPSSSPWGAPVLFVKKKDGSMRMCVDYRSLNEVTIKNKYPLPRIDDLFDQLKGAKVFSKIDLRSGYHQLKIRTEDIPKTAFSTRYGLYEFTVMSFGLTNAPAYFMNLMSKVFMDYLDKFVVVFIDDILIYSKDEEEHAEHLRLVLQKLRKHKLYAKFSKCEFWLKEVAFLGHVISAGGVAVDPAKVEAVTEWKASKSVTEIQSFLGLAGYYRRFIEGFSKIARPMTQLFKKEKKFVWSEQCQESFEQLKEKLTSAPILVLPDIRKDFVIYCDASRQGLGGVLMQDGKVVAYASRQLRPHEENYPTHDLELAAVVHALKIWRHYLIGNHCDIYTDHKSLKYIFTQSDLNLRQRRWLELIKDYDLEVHYHPGKANVVADALSRKSHCNHLRMEGMVPELREEIAQLNLYIVPHGQINTLDIQPLLRTQIEEAQKDNEEVREVKERLAAGRAKEFSTDEKDVLWYKKRIYVPKQGGLRGLILKEAHESAYSLHPGSTKMYQDLKEGYWWPNMKRDVAEYVALCDVCQKVKAEHQRPAGLLQPLRIPEWKWDEIGMDFIVGLPKTATGYDSIWVIVDRLTKTARFIPVKTNYSSAKLAELYMTRIVCLHGIPKRIISDRGTQFTSHFWEKVHEALGSYLAFSTAYHPQTDGQTERTNQVLEDMLRACALDFSKDWERCLPYAEFSYNNSFQASLKMSPTEALFGRRCRTPLMWSETGERAVFGPDIIQEAEEKVRLIRDRLKVAQSRQKSYADTRRRNLEFKEGDYVYLKVSPMRGTKRFKVKGKLAPRYVGPFQITARRGEVAYQLQLPENIADVHPIFHVSQLKKCLRVPEEQAPLEEIHISNDLTYPEHPIRILDEAEKRTRSKVWRMYKVQWSNHTEDEATWESEEFLRTEYPHLFENWNCGIKFIWEIL

SEQ ID NO: 18930 - protein, 1427 aa, Oryza sativa
  Clone ID: TF_OSC100949j.C1.p4.fg
MALVPAGAAADPARGSSGSAFSYPQLTATNYTSWCIRVQAMMEDQGVWDAIEPAAGVAVDPRRDKKSKSHLLQSLPEDLLMQVAKKRSAKEVWDCLKTRFVGADRVREARLQTLKGEFGAMVMEPGETLDQYAGRITAMSVRHSVLGSTLSDSAIVKKLFDTVPEKFISLVAGIEQFYEIDNMPFEEAVGRLKAYEERVRKKKAAAGGVTADGQVLLTQAEWEARFRKDGSESSSPQKNKPPSDRGNRAQGGRGRGRGHGGGGGRGSAPRNSGAGGSGGGGRDKSHIKCYNCEEFGHYSTQCPHPKKKKVEAHLAQTDDANPALLLAVTEDEPASGLVVHEERVWPQLLLADSGAATGDIWFLDNGASNHMTGDRAKFRDLDVSITGSVKFGDASTVKIQGKGSILFSCKNGDQWLLQDVFYIPSLCCNMVSLGQLTETGHRVVMDEDVLEVFDKSPLRLVMRVRRTPNRLYRIELKLATPVCLLTRMDEPAWLWHARLGHVNFQAMKLLADKGMAGGIPAITHPNQLCQACLVAKQIRQPFPATANFRAEEPLELLHIDLCGPITPTTMAGNRYFMLIVDDFSRWMWMFVIKTKDQALEAFTKFKPLAENTAGRRIKTLRSDRGGEFLSGEFAQLCEQAGIQRHLTAPYSPQQNGVVERRNRSVMAMARSLMKGMSVPGRFWGEAVRHAVYLLNRLPTKAMGDRTPFEAWTGRKPQLGHLRVFGCIAHAKITTPNQKKLDDRSAPYVYLGVEKGSKAHRLFDPRCGRIHVSRDVIFEENVPWQWSVVAGEQNSTEFTVEEDGVDAPPAGAPAYPVPRYRAPSPAVPQSPPASPVGASSSLPTSPQSSPSSTPPSTPATGSAGPVASPGSGGDLRSDEGPVRFRSLEDIMREAPRVDLVEDEHDGDALLAEMEEPSSYREAAGQPAWENAMAQELQAIEKNSTWALTALPAGHKPIGLKWVYKLKKNTAGEVIKHKARLVAKGYVQRQGVDFEEVFAPVARLDTVRVILAIAADRRWEVHHLDVKSAFLNGDLEEEVYVAQPEGFVKRGEEHLVLRLSKALYGLRQAPRAWNTRLDKCLKELGFARCTQEQAVYTRGKGQAGVIVGVYVDDLIVTGENPHEIAMFKQQMMGEFEMSDLGLLSYYLGIEVIQGENGIAIKQAAYAKKILSQFGMQGCNPTSIPMEPRSLLHKDADGNPIDATEYRRVIGCLRYLLHTRPDLSYAVGVASRFMERPTTMHLKAVKMILRYLKGTLDSGLVFASGSGSLDITGFTDSDLAGDMDDRRSTGGMAFYVNSSLVSWCSQKQKTVALSSCEAEFMAATAAACHALWLRALLSEMMGTEAKRVKLFVDNKSAIALMKNPVFHGRSKHIDTRYHFIRECVESGQILIEFVRSEEQRADAMTKGLPAAKLATARHLLGVRDLRPRQD

SEQ ID NO: 18931 - protein, 1427 aa, Oryza sativa
  Clone ID: TF_OSC24132j.C1.p4.fg
MALVPAGAAADPARGSSGSAFSYPQLTATNYTSWCIRVQAMMEDQGVWDAIEPAAGVAVDPRRDKKSKSHLLQSLPEDLLMQVAKKRSAKEVWDCLKTRFVGADRVREARLQTLKGEFGAMVMEPGETLDQYAGRITAMSVRHSVLGSTLSDSAIVKKLFDTVPEKFISLVAGIEQFYEIDNMPFEEAVGRLKAYEERVRKKKAAAGGVTADGQVLLTQAEWEARFRKDGSESSSPQKNKPPSDRGNRAQGGRGRGRGHGGGGGRGSAPRNSGAGGSGGGGRDKSHIKCYNCEEFGHYSTQCPHPKKKKVEAHLAQTDDANPALLLAVTEDEPASGLVVHEERVWPQLLLADSGAATGDIWFLDNGASNHMTGDRAKFRDLDVSITGSVKFGDASTVKIQGKGSILFSCKNGDQWLLQDVFYIPSLCCNMVSLGQLTETGHRVVMDEDVLEVFDKSPLRLVMRVRRTPNRLYRIELKLATPVCLLTRMDEPAWLWHARLGHVNFQAMKLLADKGMAGGIPAITHPNQLCQACLVAKQIRQPFPATANFRAEEPLELLHIDLCGPITPTTMAGNRYFMLIVDDFSRWMWMFVIKTKDQALEAFTKFKPLAENTAGRRIKTLRSDRGGEFLSGEFAQLCEQAGIQRHLTAPYSPQQNGVVERRNRSVMAMARSLMKGMSVPGRFWGEAVRHAVYLLNRLPTKAMGDRTPFEAWTGRKPQLGHLRVFGCIAHAKITTPNQKKLDDRSAPYVYLGVEEGSKAHRLFDPRCGRIHVSRDVIFEENVPWQWSVVAGEQNSTEFTVEEDGVDAPPAGAPAYPVPRYRAPSPAVPQSPPASPVGASSSLPTSPQSSPSSTPPSTPATGSAGPVASPGSGGDLRSDEGPVRFRSLEDIMREAPRVDLVEDEHDGDALLAEMEEPSSYREAAGQPAWENAMAQELQAIEKNSTWALTALPAGHKPIGLKWVYKLKKNTAGEVIKHKARLVAKGYVQRQGVDFEEVFAPVARLDTVRVILAIAADRRWEVHHLDVKSAFLNGDLEEEVYVAQPEGFVKRGEEHLVLRLSKALYGLRQAPRAWNTRLDKCLKELGFARCTQEQAVYTRGKGQAGVIVGVYVDDLIVTGENPHEIAMFKQQMMGEFEMSDLGLLSYYLGIEVIQGENGIAIKQAAYAKKILSQFGMQGCNPTSIPMEPRSLLHKDADGNPIDATEYRRVIGCLRYLLHTRPDLSYAVGVASRFMERPTTMHLKAVKMILRYLKGTLDSGLVFASGSGSLDITGFTDSDLAGDMDDRRSTGGMAFYVNSSLVSWCSQKQKTVALSSCEAEFMAATAAACHALWLRALLSEMMGTEAKRVKLFVDNKSAIALMKNPVFHGRSKHIDTRYHFIRECVESGQILIEFVRSEEQRADAMTKGLPAAKLATARHLLGVRDLRPRQD

SEQ ID NO: 18932 - protein, 1528 aa, Oryza sativa
  Clone ID: TF_OSC400181j.C1.p4.fg
MSDARSRRSVASSTQRQQDAELAAAEERRRATAQTAAAAARAARLAAAELAAARAEAEAEAAEDAARAAEVEVETLRSSINGSIAGDITADRELEELARGRARERAERWAAAHLHGGGGGPRDRAPADGNPDGRGRAGGSPEPTRGPHRQRGSPLTGAMVTTASRRWSGTLVPAVRHMWEAVRYGDVDYDEDRQALDALIAAVPPEMQFSLSQKRTAKEAWDAITTARIDSDRARKSTLQALRKEWENLAFKPGEDVDDFALRLNTLLQKMVQYGDDTYDEERAVEKLFRCVPEKYRQIARSIESLLDLSTMSIEEALGRLKVVDGDEPQPLSGPITIGGKLHLTREQWEASQGDGRKRESSSPTGGRKPRKARGGVQLRWARRRAEGGARRGAQGVATGNHKQARDDACRNCGKLGHWAKDYRQPRRGQAHVAQVEEEEPALLLAHASIELPPAAPAAAAFLHLDEPKVLVSLCNGSSNDKADEWYLDTGATHHMTSRREFFTEFDSGVRGSVKFGDASGVEIKGVGSVTFTAKSGEHRLLTGIYYIPALRNSIISVGQLDENGSRVLVEDGLMRIWDRRRRLLAKVTRGTNRLYILSAQVAQPVCLAARRDDEAWQWHERFGHLHFEALKQLSAKEMVRGMPCLDHVEQLCDVCVVTKQRRLPFPQQTSFRAKEWLELVHGDLCGPVTPATPGGRRYFLLLVDDLSRYMWVMVLGSKGEAADAIRHAQAAAEAECGRKLRVLRTDNGGEFTAAEFASYCADEGIQRHYTTPYSPQQNGVVERRNQTVVGMARALLKQRGMPAIFWGEAVVTAAYILNRSPTKALDGRTPYEAWHGRKPAVSHLRVFGCLAFAKELGHIGKLDDRSTPGVFIGYAEGSKAYRILDPGDTAWRGWVWDKAVDDGSTPTYDDFTVEYIHFEGAGGVGSSSSPSVSTPALESPPTPTPTHPRATTSTTTSSSSTPPQPVTPHAPAPTATPPSTSTPTPARVERSPVEFATPLSHDRERIDAYHDGEQLRYRTMEDLLGDQPVPGLVPRDLEAQLHLACDDGEPRSFAEAEKHAAWRAAMQSEMDAVQENRTWELADLPRGHRAITLKWVFKLKRDEAGAIVKHKARLVARGFVQQEGIDYDDAFAPVARMESVRLLLALAAQEGWGVHHMDVKSAFLNGDLKEEVYVHQPPGFVIPGKEGKVLRLHKALYGLRQAPRAWNAKLDSTLKGMASSKARTRRPSTGGAMEEMPCWMRRSRRSSEEMKATFQMSDLGPLSFYLGIEVHQDDSGITLRQTAYAKRVVELPGLTDCNPALTPMEERLKLSRDSTAEEVDATQYRRLVGSLRYLTHTRPDLAFSVGYVNRFMQRPTTEHQQAVKRIIRYVAGTLDHGLYYPRCPGKAHFVGYSDSDHAGDIDTSKSTSGILFFLGKCLVSWQSVKQQVVALSSCEAEDTGTVELRVDSKSALALAKNPVFHERSKHIRVRYHFIQSYLEEGSIKASYINTKDQLADLLTKPLGRIKFLELYSRIGMAQLPHKTTHKT

SEQ ID NO: 18933 - protein, 1470 aa, Oryza sativa
  unsure (1)..(1470): unsure at all Xaa locations
  Clone ID: TF_OSC407196j.C1.p1.np
MASRRRASTSNEETQTPDLTTLAGVMATQTQLLQAIANNQGNYGGSSFGEFMRTKPPTFATAEEPMDAEDWLRIIEKKITLVRVREADKVIFAANQLDGPAGDRWDTYKEAREEDAGEPNWEEFTTAFLDNFVPAAVMRMKKNEFRRLWQGNTTVQEYLNRFTQLARYATRDLADEEEKIDKFIKGLNDELRGPMIRQDHDSFQSLINKVVRLENDRKVVEHNRKRRLTMNRPPQTAPQRPKGTTSSAWRPTVVTTSRPTASSNFHRPVTIQNRAPAPNQATTGSVRPESCFNCGEYGHFANKCPHPNKTPIRTGANATAIHGTATPAAGRDLFRTPQTNRTATGFGRGQVNHVRAEEAXEDQGVLMGMFSLNSTPVKVLFDSGASHSFISLKASQQHNLTRVKLRQPMLVHSPRGEVAVDTACIDVPIRLRDVVFPSNLMVLIPQTLDVILGMDWLAKHRGVIDCRRREVTLTTPWGSDIRATMDQDPRLTECAGGIFTMLPQKGMPVVQRFPDVFPEDLPGMPPDRDIEFIIDLIPGTAPISKRPYRMPVNELEELKKQIRELQEKGFVRPSSSPWGAPVLFVKKKDGSMRMYVDYRSLNEVTIKNKYPLPQIDDLFDQLKGAKVFSKINLRSGYHQLKIRTGDIPKTAFSTRYGLYEFTVMSFGLTNAPAYFMNLMNKVFMDYLDKFVVVFIDDILIYSKDEEEHAEHLRLVLEKLRKHKLYAKFSKCEFWLKEVAFLGHVISAGGVAVDPAKVEAVTEWKAPKSVTEIQSFLGLAGYYRRFIEGFSKIARPMTQLLKKEKKFVWSEQCQGSFEQLKEKLTLAPILVLSDNRKDFVIYCDASRQGLGGVLMQDGKVVAYASRQLXPHEENYPIHDLELAAVVHALKIWRHYLIGNHCDIYTDHKSLKYIFTQSDLNLRQRRWLELIKDYDLEVHYHLGKANVVADALSRKNHCNHLRMEGMAPELRKEIAQLNLHIVSRGQINTLDIQPLLRTQIEEAXKDNGEIQEVKERIATGRAKEFSMDEKEILWYKKRIYVPEQGGLRGLILKEAHESAYSLHPGSTKMYQDLKEGYWWPNMKRDVAEYVALCDVCQKVKAEHQRPVGLLQPLRIPEWKWDEIGMDFVVGLPKTATGYDSIXVIVDRLTKTARFIPVKTNYSSAKLAELYMTRIVCLHGVPKRIISDRGTQFTSHFWEKVHEALGSYLVFSTAYHPQTDGQTERTNQVLEDMLRACALDFSKDWERCLPYAEFSYNNSFQASLKMSSNEALFGRRCRTPLMWTETGEQVVFGPDIIKEAEEKVRLIRDRLKVAQSRQKSYADTRRRNLEFKEGDYVYLKVSPMRGTKRFKVKGKLAPRYVGPFQIIARRGEVAYQLQLPENIADVHPVFHVSQLKKCLRVPEEQAPLEEIHISNDLTYPEHPVXILDEAEKRTRTKVWHMYKVQWSNHTEDEATWESEEFLRTEYPHLFETX

SEQ ID NO: 18934 - protein, 1004 aa, Oryza sativa
  Clone ID: TF_OSC101460j.C1.p3.fg
MAPSNSYDDAMKPERFNGAAARMMYWLTALDLFSVITDQEPQPGEFFPGAIPYADFYQTRNFNCVGRILSMLSDKFYDIYMHHTSARVLWETLEKKYSVPDAGKDLYLVEKYHDFKMTNGKSMVEQTQELQLLVGELNHSKIALPDKFQVGMVIAKLPPSWRDFATALKHRREEMTMDDLVASLDVEEKARAKDAPLVNEDYNSRVNLTDTHQRRNKKNPKENNSGMKPRGKIDKGNGKKNGKGPMSCFECGKPGHFARNCRYKKRNEKVQKDKSDDQTDAKVNMVIDEAEVARTKDEAFEHFKIFKAEAENQLDLKIKILRSDRGGEYLSIEFSKFHQEHGIIHETTPPYSPQSNGVVERKNRTLTDLVNAMLSNSGLPNNMWGEALYTACFVLNRVPAKGTEVNIPVVKKRKLGPKTVDCVFIGYAQNSPAYRFLVVKSETTEVRENTVMESCDATFFEDTFPLKVKSPSSEPISVEPRISILSDDSLNLRRSKRSRTEKMFGEDFIIYLVNDVPSTLSEAFASAEAAYWKEAVQSEMDSILSNDTWEITHLPQGCRAIGCKWIFKKKLKPDGTIDKFKARLVAKGYTQRQGEDYFDTFSPVARMPTIRALVALAAAYGYKIHQMDVKTAFLNGELEEEIYMQQPDGFVIPGQEDKVCKLEKSLYGLKQAPMQWHEKFDKTLISAGFTVNDADKCVYSRFDGDIDLGEAKVILNIKIQEKDKGFELNQSHYVEKLLHRFGHFNSKSAATPYDPCLKLHKNQGHGLDQVKFAQIIGSLMYLANTTRPNISYAVSRLSRYSSKPDSNHWHALECVLRYLKGTINQGLFYSGFPAVLEGYSDANWITYSNEMKSTSGFVFTLGGAAISWKSAKQTILTRSTMEAELVALETACCEAEWLRELLMDIPIVEKPIPAVLLYCDNQAVIAKVTSKKENMKSSRHVKRRLKSVRDLRNTGVVTFDYIKTEKNLADPFTKGLARKPILELSKGMGLRPANELLTVATQPV

SEQ ID NO: 18935 - protein, 1400 aa, Oryza sativa
  Clone ID: TF_OSC400798j.C1.p12.fg
MATATGGDGDVGAAAGDGATGRLSLTLSSMMYPNVEECKGWTRLSPPAAYLTFLGAHNKRRARFRAWTRDRALEEALMPRRRTSSPRCWSVSPSERTPGGSGGRASGSGGKDSGLVIHRVVKESGSSANYPVLTKTNYNDWALLMKIKLQARCLWDAVERGRAAVELHEDQMALDAIYSAVPPEMISILATKASAKEAWDCIKTMRVGDNRIRKASAQRVRTEYERIAFRDGESVEEFAMWLTSVVNQLATHGDPEPDDKVVEKYLHVARPRFSQLAAEDYQTPPSSQNTDGKLYLTEEEWLEHHKKEQEAKRSGAGSSGRNKRRGGKGCIGGGSDGSTSSPARRDDKCRNCGKLSHWAKECRSKPKHEDQAHVAQDDKPTLMLLTGGYVETAGSMLPPPPPRATPAPQRVCVELVEKKVFAGLDHEADRDQRSWIMDSGVSNHMAGCRAAFSDLDTGITGNVWLGDGSIIPIEGCGMVLFACKNGEHRTLANTYFLPRLAANIVSIGQLDETSFQVLVEDGIMRVRDKQRRLLARIPRSPGRLYVLDIILARPVCLTARAGEDAWHWHARFGHINFTVLKKMSRETLVRGLPLLTQVDQVCEACLAGKHRRAPFPRRALSRSSKPLQLLHGDLCGPISPVTPSGNRYFLLLIDDYSRFMWIKLLPSKDAEPATIKQIQAAAERKSGKRLRALRMHRGGEYTAGHFNEYWAELGLRRELTALYSPQQNGVVERRNQSVVGTARSMLKAKGLPGHHRRESAKNSIRAMERRFAGGSSSSYIWVCGPCEELDDRSKPMIFVGYEPGSKAYCAYNPVTRQVHISRNIVFDEEAQWRWDGQAETGVDTDFVIEYTTVQQSDAAPPSPAAAPPSPGSPFRTIDNVLGPATPQGQAVREFDEDLLMVSAEEPASFDEAEQHQCWRHAMIEEIKSIEANNTWRLADGPSRQCPIGLKWVFKTKKDVAGNITRYKAYLVAKGYVQRQGIDFDEVFALVARLESVRLLLAHAAPRAWYAKLDASLLALGFHQSSSEHAVYFRATGARRLVVGVYVDDLVITGGDSAELEQFKDEMKGTFQMSDLGLLKYYLGLEVNQTEDGITVCQRAYAEKILEMAGMSSTNPSLTPMESRLKLSKSSAAPAVDATDYRRIVGSLRYLVNSRSDLAFLVGYVSRFMEKPTTEHMAAVKRVLRYIAGTTNYGCQYRRKKDAVCLVGYSDSDLAGDVDSRKSTTGVLFFLGDNLITWQSQKQKVVALSSYEAEYIAATTVACQGVWLALLLAELRGEEGSAITLKVDNQSAILLSKNLCFTIVANILTLGIISFGSVSRKRMSPNVWKPIGIENPDTEMKSNIIEYRYRRNTKLNEYGNEDLLERESAISDLAGHKLEEEDYPVVDYESDLQTAISKTVR

SEQ ID NO: 18936 - protein, 1029 aa, Oryza sativa
  Clone ID: TF_OSC410421j.C1.p8.fg
MAPSNSYDDAMKPERFNGAAARMMYWLTALDLFSVITDQEPQPGEFFPGAIPYADFYQTRNFNCVGRILSMLSDKFYDIYMHHTSARVLWETLEKKYSVPDAGKDLYLVEKYHDFKMTNGKSMVEQTQELQLLVGELNHSKIALPDKFQVGMVIAKLPPSWRDFATALKHRREEMTMDDLVASLDVEEKARAKDAPLVNEDYNSRVNLTDTHQRRNKKNPKENNSGMKPRGKIDKGNGKKNGKGPMSCFECGKPGHFARNCRYKKRNEKVQKDKSDDQTDAKVNMVIDEAEVARTKDEAFEHFKIFKAEAENQLDLKIKILRSDRGGEYLSIEFSKFHQEHGIIHETTPPYSPQSNGVVERKNRTLTDLVNAMLSNSGLPNNMWGEALYTACFVLNRVPAKGTEVTPYELWKGRKPNLNFLKVWGCLAKVNIPVVKKRKLGPKTVDCVFIGYAQNSPAYRFLVVKSETTEVRENTVMESCDATFFEDTFPLKVKSPSSEPISVEPRISILSDDSLNLRRSKRSRTEKMFGEDFIIYLVNDVPSTLSEAFASAEAAYWKEAVQSEMDSILSNDTWEITHLPQGCRAIGCKWIFKKKLKPDGTIDKFKARLVAKGYTQRQGEDYFDTFSPVARMPTIRALVALAAAYGYKIHQMDVKTAFLNGELEEEIYMQQPDGFVIPGQEDKVCKLEKSLYGLKQAPMQWHEKFDKTLISAGFTVNDADKCVYSRFDGDIDLGEAKVILNIKIQEKDKGFELNQSHYVEKLLHRFGHFNSKSAATPYDPCLKLHKNQGHGLDQVKFAQIIGSLMYLANTTRPNISYAVSRLSRYSSKPDSNHWHALECVLRYLKGTINQGLFYSGFPAVLEGYSDANWITYSNEMKSTSGFVFTLGGAAISWKSAKQTILTRSTMEAELVALETACCEAEWLRELLMDIPIVEKPIPAVLLYCDNQAVIAKVTSKKENMKSSRHVKRRLKSVRDLRNTGVVTFDYIKTEKNLADPFTKGLARKPILELSKGMGLRPANELLTVATQPV

SEQ ID NO: 18937 - protein, 1075 aa, Oryza sativa
  Clone ID: TF_OSC900212j.C1.p7.fg
MDGGGGHTHARARYLVEKKASCGVTVSMAPSNSYDDAMKPEKFNGNHFERWQTRIMYWLTALDLFSVITDQEPQPGEFFPRAVPYADFYQTRNFNCVGRILSMLSDKFYDIYMHHTSARVLRETLEKKYSVPDAGKDLYLVEKYHDFKMTNGKSVVEQTQELQLLVGELNHSKIALPDKFQVGMVIAKLPPSWRDFATALKHRMEEMTMDDLVASLDVEEKARAKDAPLVNEDDNSRVNLTDTHQRRNKKNPKENNSGMKPRGKIDKGNGKKNGKGPMSCFECGKPGHFARNCRYKKRNEKVQKDKSDDQTDAKVNMVIDEAKVARCVSNMSQKFDKCQPVDWWVDTGATIHEQQGGRSVIGLESKSRVLGSGRVDLKLSSRKVLTLHNVLFVPAAKANLISMNGILTKGGRRYFITFIDDCSKYCYVYLLRTKDEAFEHFKIFKAEAENQLDLKIKILRSDRGGEYLSIEFSKFHQEHGIIHETTPPYSPQSNGVAERKNRTLTNLVNAMLSNSGLPNYMWGEALYTACFVLNRVPAKGTEVTPYELWKGRKPNLNFLKVWGCLAKVNIPVVKKRKLGPKTVDCVFIGYAQNSLAYRFLVVKSETTEVRENTVMESRDTTFFEDTFPLKVKSPSSEPISVEPRISISSDDSLNLRRSKRSRTEKTFGDDFIIYLVDDVPSTLSEAFASAEAAYWKEAVQSEMDSILSNGTWEITHLPQGYRAIGYRAIGCKKLKPDGTIDKFKARLVAKGYTQRQGEDYFDTFSPVAHMPTIRALVALAAAYGYKIHQMDVKTAFLNGELEEEIYMQQPDGFVIPGQEDKVCKLEKSLYGLKQAPMQWHEKFDKTLISAGFTVNDADKCVYSRFDGDIGVILCLYVDDILILGTNLNIISEIKSYLSNKFDMKDLGEAKVILNIKIQKKDKGFELNQSHYVEKLLHRFGHFNSKSTATPYDPCLKLHKNQGQGLDQVKFAQIIGSLMYLANTTRPNISYAVSRLSRYSSKPDSNHWHALERVLRYLKGTMNQGLFYSGFPAVLEGYSDANWITDSDEMKSTSGFVFTLGGAAISWKSAKQTILT

SEQ ID NO: 18938 - protein, 1549 aa, Oryza sativa
  Clone ID: TF_OSC401668j.C1.p29.fg
MSDARSRRLVASSTRRQQDAELAAAEERRQATAQTAAAAARVARLAAAELAAARAEAEAEAAEDAARAAEVEVETLRSSINGSIAGDITADRELEELARERARERAERWAAAHLHGGGGGPRDRAPADGNPDGRRRAGGSPELSRGPRRQHGSLSPDRRHGHHGVQTVVRDFGPGGGWPTLTKTNYIEWAAVMRVRLQVRHMWEAVRYGDVDYDEDRRALDALIAAVPPEMQFSLSQKRTAKEAWDAIAAARIGSDRARKSTLQALRKEWENLAFKPGENVDDFALRLNTLLQKMVQYGDDTYDEERAVEKLFRCVPEKYRQIARSIESLLDLSTMSIEEALGRLKVVDGDEPQPLSGPITIGGKLHLTREQWEASQGDGRKGESSSPTGGRKPRKARGGVQLRWARRRAEGGARRGAQGVATGNHKPARDDACHNCGKLGHWAKDYRQPRRGQAHVARVEEKEPALLLAHASIELPQAAPAAAAFLHLDEPKVLVSLCNGSSNDKADGWYLDTGATHHMTGRREFFTEFDSSVRGSVKFGDASGVEIKGVGSVTFTAKSGEHRLLTGVYYIPALRNSIISVGQLDENGSRVLVEDGLMRIWDRRRRLLAKITRGTNRLYILSAQVAQPVCLAARRDDEAWQWHERFGHLHFEALKQLSAKEMVRGMPCLDHVEQLCDVCVVTKQRRLPFPQQTSFRAKERLELVHGDLCGPVTPATPGGRPREAADAIRHAQAAAEAECGRKLRVLRTDNGGEFTAAEFASYCADEGIQRHYTAPYSPQQNGVVERRNQTVVGMARALLKQRGMPAIFWGEAVVTAVYILNRSPTKALDGRTPYEAWHGHKPAVSHLRVFGCLAFAKELGHIGKLDDRSTPGVFIGYAEGSKAYRILDPETQRVRTVRDVVFDEGRGWVWDKAVDDGSTPTYDDFTIEYVHFEGAGGVGSSSSPSVSTPIPEPPPTPTPTHPRATTSTTTSSSSTPPQPVSPRAPAPIATPPGTSTPTPARVERSPVEFATPLSHDGERIDAYHDGEQLRYRTMEDLLGDQPVPGLVPRDLEAQLHLACDDGEPRFFAEAEKHAAWRAAMQSEMDAVQENRTWELADLPRGHRAITLKWVFKLKRDEAGAIVKHKTRLVARGFVQQEGIDYDDAFAPVARMESVRLLLALAAQEGWGVHHMDVKSAFLNGDLKEEVYVHQPPGFVIPGKEGKVLRLHKALYGLRQAPRAWNAKLDSTLKGMGFEQSPHEAAIYRRGNGGNALLVGVYVDDLVITGTKDAEVAAFKEEMKATFQMSDLGPLSFYLGIEVHQDNSGITLRQTAYAKRVVELAGLTDCNPAHSDGGETEAEPRQHDGGGGCYTRPTTEHQQAVKRIIRYVAGTLDHGLYYPRCPGKAHFVGYSDSDHAGDIDTSKSTSGILFFLGECLVSWQSVKQQVVALSSCEAEYMAASAASTQALWLARLLGDLLGRDTGAVELRVDSKSALALAKNPVFHERSKHIWVRYHFIQSYLEEGSIKASYINTKDQLADLLTKPLGRIKFLELCSRIGMAQLSHKTTHKT

SEQ ID NO: 18939 - protein, 200 aa, Oryza sativa
  Clone ID: TF_OSC30776j.C1.p1.fg
MADNRFVVEQAHEIQTIAKELELLKCVLPDKFVAGCIIAKLPPSWRSFGTAFKHKRQEYSIEGLIASLDVEEKAREKDAASKDDAQQTTNFKRQKKNNNNPNQDERICFVCGQPGHLARKYPQRKGMKAPAGQTSKSANVTIGNTGDGSGYGRTGFHLPNGEWVTCFCSWCWHGRCEVYFGKDRAAEERAACPFYQQESC

SEQ ID NO: 18940 - protein, 556 aa, Oryza sativa
  Clone ID: TF_OSC401836j.C1.p4.fg
MADNRFVVEQAHEIQTIAKELELLKCVLPDKFVAGCIIAKLPPSWRSFGTAFKHKRQEYSIEGLIASLDVEEKAREKDAASKDDAQQTTNFKRQKKNNNNPNQDERICFVCGQPGHLARKYPQRKGMKAPAGQTSKSANVTIGNTGDGSGYGNLPTVFSVNQSTNWWVDTGANVARGSTFLMANGSHASVHGVGTVDVKFTSGKIVQLRNVQHVPSINRNLVSGSRLTRDGFKLVFESNKVVVSKHGYFISKGYECGGLFRFSLSDFCNKSVNNICGSVDDEANVWHSRLCHINFGLMSRLSSMCLISKFSIVKGSKCHSCVQSKQPRKPHKAAEERNLAPLELLHSDLCEMNEVLTKGGKQYFMTLIDDATRFCYVYLLKTKDEALDYFKIYKAEVENQLDRKIKRLRSDRGGEFFSNEFDLFCDEHDIIHERTPPYSPESNGIAERKNRTLTDLVNAMLDTAGQPKAWWGEALLTTNHVLNRVPNRNKNKTPYEIWIGRKPSLSYLRTWGVVGRSEVKLDYPFRNAADNVFVSHDFAKREGGDNCDPVGLEVVV

SEQ ID NO: 18941 - protein, 1185 aa, Oryza sativa
  Clone ID: TF_OSC23905j.C1.p5.gm
MSVVEHGTSAMVLPVPYMSVSGTSAAPEEEKDDPCSAGGRRGSLLTRQKEMRYDVRRIEPTESLKDTAARGAKPRVSSSRNAGSRTELTVRALHGSMTDVQLTCSCAVPLRLVVETLLADEDRKATRLRNRAENTRFGNMAIISAGRDYSLFVNIYFIFTNMSNTGDKEKETPVNTNGGNTASNSSGGPFLGVLADNIVDVYMHMPSGKDMWDALEAKFGVSDAGSELYVMEQFYDYNMVDDRSVVEQAHEIQMLAKELENNNCELPDKFVAGGIIAKLPPSWSDFATSLKHKRQEFSVPDLIGSLGVEEKARAKDVRGKKVEGGSSANMVQKKNPHASHNNKKVKPDVKPKAATNFKKKSKGKAKGDCFVCGKSGHWPKDCPERKDKKSANMIISEGGGTSGDATFFENEFPMKYTPSTSSKETVMPHEHFAPIEHNDQTPEENPEEDNIVDTRKSKRQRVAKSFGDDYIVYLVDDTPRTIEEAYSSPDADYWKEAVRSEMDSIMSNGTWEVVERPYGCKPVGCKWVFKKKLRPDGTIEKYKARLVAKGYTQKEGEDFFDTYSPVARLTTIRVLLALAASHGLLVHQMDVKTAFINGELEEEIYMDQPDGYVLEGQEGMVCKLLKSLYGLKQAPKQWHEKFDTTLTSAGFVVNEADKCVYYRYGGGEGVILCLYVDDILIFGTSLNVIEEVKDYLSKSFEMKDLGEADVILNIKLQRGDEGGITLVQSHYVDKVLSRFGYSDCKPAPTPYDPSVLLRKNRRIARDQLRYSQIIGSLMYLANATRPDISFAVSKLSRFVSNPGDDHWQALERVMRYLKGTMSYGIHYTGYPKVLEGYSDSNWISDADEIKATSGYVFTLGGGAVSWKSCKQTILTRSTMEAELTALDTAIVEAEWLRELLMDLPVVEKPVPAILMNCDNQTVIIKVNSSKDNMKSSRHIKRRLKSVRKQKNSGVIALDYVQTARNLADQFTKGLPHGRAIRFLGSARRDYSLFVNIYFIFTNMSNTGDKEKETPVNTNGGNTASNSSGGPFLGLFDRRIPEEEEEEEKMSYYGQQPPVGVPPQQGYPGKDGYPPPGYPPAGYPPAQGYPPAGYPPQQGYPPPYAQPPPQQQQHSSGPSFMEGCNYRTLVSDLSTPTGAVAGASAAAAAAAAAHLGCPLLLLSPGRLLLRIEATGARELKRFVSWS

SEQ ID NO: 18942 - protein, 1388 aa, Oryza sativa
  unsure (1)..(1388): unsure at all Xaa locations
  Clone ID: TF_OSC401841j.C1.p20.np
VYFYILNACKDLKKIFCKILCASVFSXNHIIPFKDGWVISFLRSARRDYSLFINIYFTFTNMSNTGDNSNTGYKEKEPPVNTNRGNASNSSGGPFLGSFSVVGFAATLKPHAFDGSNYKRWKARALLWLTACFYVSRGKRCEPPLSPEEEAKFEVSDCLFRGALISVLADNIVDVYMHMPSGKDMWDALEAKFRVSDAGNELYVMEQFYDYKMVDNRSVVEQDHEIXMLANELENNNCELPDKFVVGGIIAKLPPSWSDFATSLKHKRQEFSVIDLIGSLGVEEKARAKENRGKNIEGGSSANLVQKKNPHASHNNNNKKVKSDVKPKATTNFKKKGKGKAKGDCFVCGKPRHWAKNCPDRKDKKSANMVISEGGGTSGYDNFLPTVLSVFHSPDWWVDTGANIHVCADISLFSSYQVGRGSSLLMGNGSLAAVHGVGTVDLKFTSGKTVXLKNVQHVPSIKKNLVSGSLLCRDGFRLVFEFNKCVISKYXTFIGKGYDNGGLFRFSLDDMCNNNNNVVNHISENDESNVWHSXLANMSLILKFTLVKGSKCHTCVQLKQPCKPHKASEARNLAPLELVHSDLCEMNGVLTKGGKKYFMTLIDDCTRYCYVYLLKTKDETLHYFKIYKAEVENQLERKIKRLRSDRGGEYFSNEFTSFCKKFGIIHERTHPYSPQSNGVAERKNRTLTEMVNAMLDTAGLSKEWWGEAILTVCHVLNKIPVKHKKVTPFEEWERKKLNLSYLRTWGCLAKVNIPIAKKRKLGPKTVDCFLGYAIHSVGYRFLIVNSGVPDMRVGTITESRDATFFENEFPMKNTLSTSSQEPVLPHEHFAPIEHNDQTAEENPEEDNIVATRKSKRQRTAKSFGDDYIVYLVDDTPRTIEEAYSSPDADYWKEAVRSEMDSIMSNGTWEVVERPYGCKPVGCKWVFKKKLRPDGTIEKYKARLVAKGYTQKEGEDFFDTYSPVARLTTIRVLLAFEASHGLLVHQMDVKTAFLNGELEEEIYMDQPDGYVLEGQEGMVCKLLKSLYSLKQAPKQWHEKFDTTLTSAGFVVNEADKCLYYHYGGGEGVILYLYVDDILIFGTSLNVIEEVKDFLSKSFEMKDLGVADVILNIKLLRGDEGGITLVQSYYVDKVLSRFGYSDCKPAPTPYNSSVLLRKNRRIERDQLRYSQIIGSLMYLASATRPDISFAVSKLSRFVXNLGDDHWQALEMVMRYLKDTTSYGIHYTSYPKVLXGYSDSNWISDADEIKATSGYVFTLGGGAVSWKSCKQTILTRSTMEAELTALDTATVEAEWLRELLMDLPVIEKPVPAILMNCDNQTVIIKVNSSKDNMKSFRHVKRRLKSIRKQKNSRVIALDYVQTAKNLADQFTKGLPRNVIDSASREMGLRPT

SEQ ID NO: 18943 - protein, 374 aa, Oryza sativa
  Clone ID: TF_OSC11678j.C1.p1.fg
MSGDGEKSVKGAMGPQIEQVIVVSISPPSDQMLSFEEEEKCIHLNAQATNVLFSALSEDVFESIMPLEDAHLIWNTLKERYDKSECDETHVFIEGNEMVSSVNVDTSTSYSACETNLLKEEVCGKKWPSEEFTSPRCSSPRSDEYSCIMEKSSLEKENLELKAQLVELTSKHVDLQEKYDELLCSHGNIVDSHAMLEVTHEVIITTVKSYVPHIQVDFTCANSYCSQANIFPSTICDLDYVEKKDKRIDHGLVGNAQPSQDNRESMVKKLEKGTTVACNKFYQEDIKSNNKIKGQDQRKNKTSITCFKCKKMGHHVRDCPWKKEKKLNKNEDLAHKFFKSTKEGHFASSCPRKIDDEITLPTKTSRINKRKCYG

SEQ ID NO: 18944 - protein, 362 aa, Oryza sativa
  Clone ID: TF_OSC402680j.C1.p1.fg
MGPQIEQVIVVSISPPSDQMLSFEEEEKCIHLNAQATNVLFSALSEDVFESIMPLEDAHLIWNTLKERYDKSECDETHVFIEGNEMVSSVNVDTSTSYSACETNLLKEEVCGKKWPSEEFTSPRCSSPRSDEYSCIMEKSSLEKENLELKAQLVELTSKHVDLQEKYDELLCSHGNIVDSHAMLEVTHEVIITTVKSYVPHIQVDFTCANSYCSQANIFPSTICDLDYVEKKDKRIDHGLVGNAQPSQDNRESMVKKLEKGTTVACNKFYQEDIKSNNKIKGQDQRKNKTSITCFKCKKMGHHVRDCPWKKEKKLNKNEDLAHKFFKSTKEGHFASSCPRKIDDEITLPTKTSRINKRKCYG

SEQ ID NO: 18945 - protein, 1179 aa, Oryza sativa
  Clone ID: TF_OSC100566j.C1.p19.gm
MPCKTHAHNARLTRSSTPAARHISRRVGGALQERRGRNLVATEEQALCGRDKSHIKCFNCEEFGHYSTQCPHPKKKKAEAHLAQTEDAGPALLLAVTEAVQNAPCQDALCGLVVHEERVWPRLMLAEKGAAAGDLWYLDNGASNHMSGDRRKFRELDETVTGQVRFGDASSVQIMGQGSILFSCKNGDQWLLDDVYYIPSLCCNMVSLGQLTETGHRVVMDGDDLEVFDKNPWRLVMKVRRTSNRLYRIELQLASPLLVDKEMVAGVPAVHHPNQLCQACLVAKQVRQSFPGMANYRAEAPLELLHMDLCGPITPSTFAGNRYFMLIVDDFSRWMWVFVIKSKDQALAASEKFKPLAENTAGRTIKTLRTDRGSEFLSGEFARVCDAAGIERHLTAPYSPQQNGVVEHRNRTVMAMARSLLKGMSVPGRMWGEAVRHAVFLLNRLPTKAMGNRTSFEAWMGKKPHLGHLWVFGCTAHTKVTAPHLMKLDDRSNPFVYLGVEEGSKAHRLFDPRRRQIIVSRDVVFDENTPWQWSAAAGEVTSTEFEVEEPVGAEQAASVPWYRAPPAGRRAGKEPEVAEQRGTPPASPARFSPTLPSTPTLGSSSTHSAEVQASPRTPGSDDGPVRYRSLVEIMLEAPRVDLVEDDDDAEALLAEMEEPTSYREAAGETAWVNAMNKELEAIEKNRTWSLCMLPAGRKAIGLKWVFKLKKNTAGEVIKHKARLVAKGYVQRQGVDFDEVYAPVARLDTVRAILAVAADRRWQVHHLDVKSAFLNGDLEEEVYVFQPEGRLPLLSSVPRPAQADGGLPARCRCALTPPPDRVGPTRQADRLCRLARAPAGRAVASSSVAATSSTPACPPFRAVTAGGAFPPSSFFFLRAGRLQPPLPPRRSAVRPRRLLPRPRSHLLSLGQPSVSRGKHRRRVLAGKTVALPPLFHLRPPLSRFPCAGRRRHHLPRLRDATLIPGITSSSPEVRRNAAAAPTTHSSSSARRPAAPPPSPTSQQRVPLRPLLRSAAAACHHRFHVTVRPRRSTSRRSPGSSSRGAASVIVIAAACSTPSSSPCSRCRLSSSPPRRSRSSSSSSSSRRSRPVLVFVLGSASSSLVPAVSRLRPRIAAEVVPSPSVSAAPVRRCRSLASSRGGKDLSSRCPVLVLSVSPRIRCAVVDPGTRVPVSVVVHVCGW

SEQ ID NO: 18946 - protein, 1224 aa, Oryza sativa
  Clone ID: TF_OSC401435j.C1.p49.np
MALVPVTADPAMGSSGSAFLYPQLMSTNYTSWVIRVQAMMEDQGIWEAIEPAAGAAVDPRKDKKAKSHLLQSLPEDLLMQVAKKRSAKEVWDCLKTRFVGVDRVRDARLQTLKGEFTSMVMEAGETLDQYAGRITTMGWLNDAAMVKKLFDTVPEKFVSLVAGIEQFYDVDTMPFEEAVGRLKAYEEWMWKKKATAGGVTADGQVLLTQGEWEARFKKGGGETSSPQKNKPSGEGANHGQAERGRGRGRGRGGTQRSGGGSSGGGRDKSHIKCFNCEEFGHYSTQCPHPKKKKAEAHLVQTEDAGPALLLAVTEAVQNAPRQDAHCGLVVHEERVWPRLMLAEKGAAAGDLWYLDNGASNHMSGDRRKFRELDETMTGQVRFGDASSVQIMGMGSILFSCKNGDQWLLDDVYYIPSLCCNMVSLGQLTETGHRVMMDGDDLKVFDKNPWRLVMKVRRTSNRLYRIELQLASQVCLLASLDNPAWLWHARIGHVNFHALKLLVDKEMASGVPTVHHPNQLCQACLVAKQVRQPFPGMANYRAEAPLELLHMDLCGPITPSTFAGNRYFMLIVDDFSNWMWVFVIKLKDQALAVFEKFKPLAKNTVGRTIKTLRTDRGGEFLSGKFARVCDAASIERHLTAPYSPQQNDVVERRNRTVMAMARSLLKGMSVPGRMWGEAVRHAIFLLNWLPTKAMGNRTPFEAWTGKKPHLGHLRVFGCVEEGSKAVEEGSKAHRLFDPRRRQIIVSRDVVFDENTPWQWSAAAGEVTSTEFEVEEPVGAEQPALAEQAGLVPWYRAPPAGRRAGKEPEVAEHDVGPVRYRSLAEIMLEAPRVDLVEDDDDARALLAEMEEPLSYREATGEPAWVNAMNKELEAIEKNKTWSLCMLPAGHKAIGLKWVFKLKKNTAGEVIKHKARLVANGYVQQQGVDFDEVFAPVARLDTVRAILAVAADRRWQVHHLDVKSAFLNGDLEEEVYVSQLEGFVEKGKEHLVYELSKALYGLRQAPRAWNTRLDRSMKELGFSRCAQEQAVYTRGVVSKFMEQLTVMHFKAVKQILRYLKGTINCGLMFSGGNDAVEITGFTDSDLAGDSDDRRSTSGMAFYFNSSLVSWSSQKQKTVALSSCEAEFMAATAAACQALWLRGLLIEMIGAEARPVKLYVDNKSAIALMKNPVFHGRKSGDGGDGDGAGGGGGVAVGVTSTGRRRWGWEGLGGWEDAGGGWLDKVVGG

SEQ ID NO: 18947 - protein, 1331 aa, Oryza sativa
  Clone ID: TF_OSC405457j.C1.p13.fg
MAGECNGGPPPLLPLPPLAAHRVTAPTRLAAAGGRWTARFLVDGDAPELHAMMEDQGVWEAIEPAAGAAVDPRKDKKAKSHLLQSLPEDLLMQVAKKCSAKEVWDCLKTRFVGADRVRDARLQTLKGEFTNMVMEAGETLDQYAGRITTMGVRYSALGATLNDAAMVKKLFDTVPEKFISLVAGIEQFYDVDTMPFEEVVGRLKAYEERMRKKKATTGGVTADRQKNKPSGEGANRGQAGRGRGRGRGRGGTQSSGGGSGGGGGGRDKSHIKCFNCEEFGHYSTQCPHPKKKKVEAHLAQTEDAGPALLLAVTEAVQNAPRQDALCGLVVHEERVWPRLMLAEKGAAAGDLWYLDNGASNHMSGDRRKFRELDKTVTGQVRFGDASSVQIMGKGSILFSCKNGDQWLLDDVYYIPSLRCNMVSLGQLTETGHRVVMDGDDLEVFDKNPWRLVMKVRRSSNRLYRIELQLASPLLVDKEMAAGVPAVHHPNQLCQACLVAKQVRQPFPGMANYRAEAPLELLHMDLCGPITPSTFAGNRYFMFIVDDFSRWMWVFVIKSKDQALAAFEKFKPLAENTAGRTIKTLRTDRGGEFLSGEFARVCDAAGIERHLTAPYSPQQNGVVERRNRMVMAMARSLLKGMSVPGRMWGEAVRHAVFLLNRLPTKAMGNRTPFEAWTGKKPHLGPCGCSGWSVAAGEVTSTEFEVEEPVGAEQPAPAEQAGSVPWYRAPPAGRRAGKEPEVAEQRGTPPASPARFSPTLPSTPTLGSSSTHSAEVQASPRTADSDDGPVWYRSLAEIMIEAPRVDLVEDDDDTEALLAEMEEPTSYREAAGEPAWVNAMNKELEAIEKNKTWSLCMLPAGHKAIGLKWVFKLKKNTAGEVIKHKARLVAKGYFQRQGVDFDEVFAPVARLDMVRAILAVAADRRWQVHHLDVKSAFLNGDLEEEVYVSQPEGFVEKGKEHLVYKLSKALYGLRQAPWAWNTQLDRSMKELGFSRCAQEQAVYTRGTGSAGIIVGVYVDDLIVTGESPSEITAFKQQMMGEFEMSDLGLLTYYLGIEVLQGTDGIAIKQVAYARKILTQFRMLDCNSTSIPIEHRSQLHKDAQGSTVDPTEYRRVIGCLRYLLHTRPDLSYTVGVVSRFMERPTVMHFKAVKQILRYLKGTINCGLMFSGGNGAVEITGFTDCDLAGDSDDRRSTSGMAFYFNGSLVSWSSQKQKTVALSSCEAEFMAATAAACHALWLRGLLIEMIGAEARPVKLYVDNKSAIALMKNPVFHGRSKHIDTRYHFIRECVESGKIQIEFVRTEEQRADALTKGLPAARLATARHLLGVRDFGP

SEQ ID NO: 18948 - protein, 1339 aa, Oryza sativa
  Clone ID: TF_OSC8960j.C1.p8.fg
MALVPATADPARGSSGSAFLYPQLTSTNYTSWVAKKRSAKEVWDCLKTRFIGADRVRDARLQTLKEEFTNMVMEAGETLDQYAGRITTMGVRYSALGATLNDAAMVKRLFDTVPEKFISLVAGIEQFYDVDTMPFEEAVGRLKAYEERMRKKKATTGGVTADGQVLLTQAEWEARFKKGGGETSSPQKNKPSGEGANRGQAGRGRGRGRGRGGTQSSGGGSGGGSGGRDKSHIKCFNCEEFGHYSTQCPHPKKKKAEAHLAQTEDAGPTLLLAVTEAVQNASRQDALCGLVVHEERVWPRLMLAEKGAAAGDLWYLDNGASNHMSGDHRKFRELDETVTGQVRFGDASSVQIMGKGSILFSCKNGDQWLLDDVYYIPSLYCNMVSLGQLTETGHRVVMDGDDLEVFDKNPWRLVMKVRRSSNRLYRIELQLASPVCLLASLDDPAWLWHARLGHVNFHALKLLVDKEMAAGVPAVHHPNQLCQACLVAKQVRQPFPGMANYLAEAPLELLHMDLCGPITPSTFTGNRYFMLIVDDFSHWMWVFVIKSKDQALAAFEKFKPLAENTAGRTIKTLRTDRGGEFLSGEFARVCDAAGIERHLTVPYSPQQNGVVERRNRTVMAMARSLLKGMSVPGRMWGEAVRHAVFLLNRLPTKAMGNRTPFEAWTGKKPHLGHLRVFGCTAHAKVTAPHLKKLDDRSNPVVYLGVEEGSKAHRLFDPRRRQIIVSRDVVFDENTPWQWSAAAGEVTSTEFEVEEPVGAEQPAPAEQAGSVPWYRAPPAGRRAGKEPEVAEQRGTPPASPARFSPTLPSTPTLGSSSTHSAEVQASPRTAGSDDEPVRYRSLAEIMIEAPRVDLVEDDDDTEALLVEMEEPTSYREAAGEPAWVNAMNKELEAIEKNKTWSLCMLPASHKAIGLKWVFKLKKNTAGEVIKHKARLVAKGYVQRQGVDFDEVFAPVARLDTVRAILPVAVDRRWQVHHLDVKSAFLNGDLEEEVYVSQPEGFVEKGKEHLVYKLSKALYGLRQAPRAWNTRLDRSMKELGFSRCAQEQAVYTRGTGSTGIIVGVYVDDLIVTGESPSDITAFKQQMMGEFEMSDLGLLTYYLGIELHKDAQGSTVDPTEYRRVIGCLRYLLHTRPDLSYAVGVASRFMERPTVMHFKAVKQILRYLKGTINCGLMFSGGNGAVEITGFTDSDLAGDSDDRRSTSGMAFYFNGSLVSWSSQKQKTVALSSCEAEFMAATAAACHALWLRGLLIEMIGAEARPVKLYVDNKSAIALMKNPVFHGRSKHIDTRYHFIRECVESGKIQIEFVRIEEQRADALTKGLPAARLATARHLLGVRDFGL

SEQ ID NO: 18949 - protein, 1349 aa, Oryza sativa
  Clone ID: TF_OSC900206j.C1.p25.fg
MAGECNGGPPPLLPLPPLAAHRVTAPTRLAAAGGRWTARFLVDGDAPELHAMMEDQGVWEAIEPAAGAAVDPRKDKKAKSHLLQSLPEDLLMQVAKKCSAKEVWDCLKTRFVGADRVRDARLQTLKGEFTNMVMEAGETLDQYAGRITTMGVRYSALGATLNDAAMVKKLFDTVPEKFISLVAGIEQFYDVDTMPFEEVVGRLKAYEERMRKKKATTGGVTADRQKNKPSGEGANRGQAGRGRGRGRGRGGTQSSGGGSGGGGGGRDKSHIKCFNCEEFGHYSTQCPHPKKKKVEAHLAQTEDAGPALLLAVTEAVQNAPRQDALCGLVVHEERVWPRLMLAEKGAAAGDLWYLDNGASNHMSGDRRKFRELDKTVTGQVRFGDASSVQIMGKGSILFSCKNGDQWLLDDVYYIPSLRCNMVSLGQLTETGHRVVMDGDDLEVFDKNPWRLVMKVRRSSNRLYRIELQLASPLLVDKEMAAGVPAVHHPNQLCQACLVAKQVRQPFPGMANYRAEAPLELLHMDLCGPITPSTFAGNRYFMFIVDDFSRWMWVFVIKSKDQALAAFEKFKPLAENTAGRTIKTLRTDRGGEFLSGEFARVCDAAGIERHLTAPYSPQQNGVVERRNRMVMAMARSLLKGMSVPGRMWGEAVRHAVFLLNRLPTKAMGNRTPFEAWTGKKPHLGPCGCSGVRRTRSRDVVFDENTPWQWSVAAGEVTSTEFEVEEPVGAEQPAPAEQAGSVPWYRAPPAGRRAGKEPEVAEQRGTPPASPARFSPTLPSTPTLGSSSTHSAEVQASPRTADSDDGPVWYRSLAEIMIEAPRVDLVEDDDDTEALLAEMEEPTSYREAAGEPAWVNAMNKELEAIEKNKTWSLCMLPAGHKAIGLKWVFKLKKNTAGEVIKHKARLVAKGYFQRQGVDFDEVFAPVARLDMVRAILAVAADRRWQVHHLDVKSAFLNGDLEEEVYVSQPEGFVEKGKEHLVYKLSKALYGLRQAPWAWNTQLDRSMKELGFSRCAQEQAVYTRGTGSAGIIVGVYVDDLIVTGESPSEITAFKQQMMGEFEMSDLGLLTYYLGIEVLQGTDGIAIKQVAYARKILTQFRMLDCNSTSIPIEHRSQLHKDAQGSTVDPTEYRRVIGCLRYLLHTRPDLSYTVGVVSRFMERPTVMHFKAVKQILRYLKGTINCGLMFSGGNGAVEITGFTDCDLAGDSDDRRSTSGMAFYFNGSLVSWSSQKQKTVALSSCEAEFMAATAAACHALWLRGLLIEMIGAEARPVKLYVDNKSAIALMKNPVFHGRSKHIDTRYHFIRECVESGKIQIEFVRTEEQRADALTKGLPAARLATARHLLGVRDFGP

SEQ ID NO: 18950 - protein, 1785 aa, Oryza sativa
  unsure (1)..(1785): unsure at all Xaa locations
  Clone ID: TF_OSC900365j.C1.p11.np
RKEGIDEEASTSKEEVEETKAVDLESTFRERTFISCVFNFVXSESKVKIPTFSESPILQEKTLKSSKASKATPGLEWYIPGLEIELYSRDGCSEWLGLCNTMPRFKPEYLFGTEGFVLELRTMSFLIGFGTAPLYAQIPHDRDEEKCRVKVTLNSNREDIPSVMFEAGGGNCIHACQEVARITIGELRERYNDQLADTEYRYHPCQPQGSGRGSYLELAGIENDATTRHLVEMLWAMDETRAEIVLAAQDHEDRNRGKICKLEDKVDRLEKELAALKGEAPPQKARVRLTARKRALFVPRYQLAPKMVLTRSNGNGPNNNNNNNNNNNGENPTLAQVLAQQAQLMNMMMHQLQNQQNQGNNHAPPQNKLAXFLRVRPPTFSSTTNPVEAGDWLHAIEKKLDLLQCTDQEKVSFASHQLHGPASEWWDHFRLNRTTAEPITWLEFTAAFRKTHIPSGVVSLKKKEFRALTQGSRSVTEYLHEFNRLARYAPKDVCTDDGRQEKFLEGLNDEFSYPLMTGDYHDFQKLVDKAIRQEDKYNHMEQKKRRIAHFKALQGNSQRPRLAMGPQAVLQGGSSSVVRPQRQFFNNNAGNNNRNQAPRPVATPVQHQPAKREQGSKPGVCFNCGEQGHYSDKCPKPRRVKVVPAXSNSTAPATKARVNHVAAVEAQGALDVILGTFPVNSIPATVLFDSGATHSFLSMSFAGNHGMQVEDLRRPLMVSTPSKQALTSQRSPSVRIEIQGVPFLANLILLESKDLDVILGMDWLARYKGVIDCANRKVTLTSNDGQVVTVHALPSEPLWSSLNQITLEEIPIVREYPDVFLDDLPGMPPKRDIEFRIDLVPGTPIHKRPYRMAANELAEDKRQVDDLLQKGYIRPSSSPWRAPVIFVEKKDHTQRMCVDYRALNDVTIKNKYPLPRIDDLFDQLKGATVFSKIDLRSGYHQLRIKEEHIPKTVFTTRYGLFECTVMSFGLTNALAFFMNLMNKVFIEYLDKFVVVFINDILIYSRTKEEHEEYLRHALEKLREHQLYAKFSKCEFWLSEIKFLGHIISAGGVAVDPSNVESVTNWKQPKTVSEIRSFMGLAGYYWRFIENFSKIAKPMTRLLQKNVKYKRSEECEQSFQELKSRLISAPILILPDPKKGFQVYCDASKLGLGCVLMQDGKVVAYAGCLCSRQLRPHEKNYPTLDLELAAVVHALKIWRHYLFGTRTEVYTDHKSLKYIFTQPDLNMRQRRWLELIKDYDMGIHYHPGKANVVADALSRKGYCNATEGRQLPLELCKEFERLNLGIVSRGFVAALEATPTLIDQVREAQVNDPDIQEIKKNIRRGKAISFLEDEQGTVWLGERIYVPENKELKDVILKEAHDTLYSIHPGSTKMYQDLKEKFWWASMKHEIAEYVAVCDVCQRVKAEHQKPTGLLQPLKLPEWKWEEIGMDFITGLPRTSSGHDSILVIVDRLTKVAHFIPVWTTYSGSRLAELYMARIVCLHGVPKKIVSDRGNQFTSKFWKKLQEEMGSKLNFSTAYHPQTDGQTERVNQILEDMLRAYALDFGGSWDKNLPYAEFSYNNSYQASLQMAPYEALYGRKCRTPLFWDQTGERQVFRTDILREVEEKVKIIQKRLRIAQSRHKSYADNRRRDLSFEEGDHVYLRVTPLRGVHRFHTKGKLAPCFAGPYMIVSRRGEVAYQLELPQSLAGVYNVFHVSQLKKCLRVPTEEANLEQIEIQKDLTYVEKPIRILETDEIRTKNRVIRFCKVQWSNHTEEEATWEREDELKSAHPHLFDSSSESRGRDSV

SEQ ID NO: 18951 - protein, 932 aa, Oryza sativa
  Clone ID: TF_OSC400321j.C1.p28.fg
MDHGAYEPIMLSIGPYHHGLSYLLAFEKEKWNCLDLFLKLNREIKLEDYLNLVKDLEEEARACYEDIDMQHDKFLQMLLLDSCLFVHHFRGLEGILPSTLGANICSADSSDIIMERTIHKSTTSQGNFGEQCSRDNSICTQRELVLAGSSREVTSQGTDFDHTEELESSQCNNWQIGTWFDSCIEQDLMLLENQIPFFIVRRIYELFAGNERPISFLTDKVAQSLENFIQYHPRAIQEAHRPKDFHHMLHLFQMYLKPSKKLVEGSQYLERGRYFHSFANICYRYLKIGRKLADSNHDMSPDPLLNCFQDHHPRIRGRRAVQYHQAGVQFKKKSFDRNNPHSLLDISFDNGTLMVPYLFVDQSTVSHFRNLIAFEQTCPQFGNDVTAYSAFMSFLLCRADDIAFLGRKGIIVHHLCSDGEVSAIFAKLGKNVDFDLNGRHFLKHVCHAMEEHYQSRINSECNSIVTHWRKMINLLNFPTSVVKASLINAPPHGIAHGQGRISKDDVMSIVPQNPNADEGPEAWSGSILCCEEEMDPTMQGEGVVGSQEKEVVIASSSLVIKDEMKDLLEDLVKLGMIGTRGGGSAELKLELMPNELRLEGSKNCLSWSRRAQLMLRAKGVDHFLQEDYKEPADKESSAWRMWNTTNSTVVSWLRNSVAPSIARMLETIQNAAVVWKTLSSMYSEEGSVMMMVEAQNKGLNNEFEDRRAAMFHQATLPTMEEAISAMVQEEMRLKLMRGTNPMGSAYIVADDRECYNCGQVGHVSCNCPTPRNSGGRGSMRGWYGGFGGNHGGFGGSHGGRGGDRGGRIGDHGRGRGAPQANAAMEDGKAISLTVNLLSVSSAIDQFKCIVAFDENSCLFQEKGTGRRIGTRGSSVPILGTPDSDSDSGSGLASGLAPAVGDIDATPDIAVASGIFGTDVASVVTTLPLFEFD

SEQ ID NO: 18952 - protein, 1325 aa, Oryza sativa
  unsure (1)..(1325): unsure at all Xaa locations
  Clone ID: TF_OSC400685j.C1.p16.np
MLGAKKLLNCIQDPTIATSAGGVNNLPTSAEKNQALHFLMHHLNTTLKNEYMTEEDPKVLWDSLKDRYGHQVKALLPKAKREWLHLCFQDYKSVEXYNSVLHRIVTCLKLCGEKITDADMIDKTLSTFHANHVNIQRQYRQAKYEKYSELISVLMEAQGEDETLVENHTSRPTGSSAAPEANASSFKKGKNQNNQNKGKNFWKNNGKVNKMSFKKKGNQNSKSKKGSTSGEYGKQYQVCFKCGTRGHWSRICRTPKHLIELYQEKHGKKKSEHESHFTVEIQHSEEKMAAMHIDKQTSQIATIAGSNAHIVGVGRASVVLPHSTKIIINYALLYPESSRTLLSFKDIRANGYHVETKDENKLEFLLITKLDGNRKTIVEKLPSLKSGLYYTHIKPENVALKTIFKNPESYRIWHDRLGHPGLGMMRRIISTSNGYNLRPNDFPNQEDFVCTDCATWKLIVRPSNLKVNAESPVFLQQIQGDICGPINPMSGSFRFPGNRIQSIRMDNAGEFTSKVFNEYCMALGIKVEHSVPHVHTQNGLAESLIKRIKLIARPLLLHSNLPTTCWGHTVLHAAALLQIRPTAYNVVSPMXLTRGYAPNISHLRKFGCAVYVPIPPPKRTSMGPHRKLGIYVRFESPSIIKFLEPLTGDLHMGRYADCIFNEDHFPALGGGKYLQKVECREIEWETKNLLHLDPRTKESDQEVXTIIDSQRITNNLPEAFTNLKGIMKSHIPAVNAPERVEIPPDAEELVFKLISTSTPTSRKKGRPPVAHNQTKVSRRRPTKQQIGQNTTAPENSEGAHQVDEPPAVTCPDGNEPSENARAITTSTRRPEIPDLNIAGNNEDQECERIEEISTSYVDTGETYNRETTIVDIYFAEKIAKIIDLDPEPKSMAECKKRSDWVKWKEAIKAELISLNKRKLFGPIDRTPVGISSVGYKWVFVRKRDENNQVVRYKARLVAXGFTQRPGIDFDETNSPVMDGITFRFLISMAVNLNLEIQLMDVVTAYLYGSLDFEIYMKVPDGIQVPEEKHNIYSVKLQRSLYGLKQSGRMWYNRLSEFLEGKGFIKNDDSCKTKYCLGLQLEHTHEGVLLHQSAYIQKIMEKFNMKDLYPTRTPMVVRSLAVESDPFRPXENNEELLGPECPYLSAIGALMYLANGTRPDIAFAVNLLARFSLAPTKRHLNGVKQIFRYLRGTQDLGLFFRKNQDLTMVGYADAGYLSDPHKALSQTGYVFLCGGTAISWKSTKQTMVATSTNHLEIIALFEASKECMWLRRVIQHVQNTCGLNITPTPTIIFEDNSACVAQIQTGYVKTSLTKHISPKFFYMHEL

SEQ ID NO: 18953 - protein, 1335 aa, Oryza sativa
  unsure (1)..(1335): unsure at all Xaa locations
  Clone ID: TF_OSC401807j.C1.p5.np
MLGAKKLLNCIQDPTIATSAGGVNNLPTSAEKNQALHFLRHHLNTTLKNEYMTEEDPKVLWDSLKDRYGHQVKALLPKAKREWLHLRFQDYKYMEQYNSVLHRIVTFLKLCGEKITDADMIDKTLSTFHANHVNIQRQYRQAKYEKYSELVSVLMEVQGEDETLVENHTSRPNESSATPEANASSFKKGENQNNQNKGKNFWKNGGKVNKMSFKKKGNSKSKKGSTSGEYGKQDQVCFKCGTRGHWSRICRTPKHLIELYQEKHGKKKSEHESHFTVEIQHSEEKMAAMHIDKHTGQIATIAGSNAHIVGVGRATVVLPHGTKIIINNALLYPESSRTLLSFKDIRANGYHVETKDENKLEFLLITKLDGNRKTVVEKLPSLKSGLYYTHIKPENVALKTIFKNPESYRIWHDRLGHPGLGMMRRIISTSNGHNLRTNDFPNQEDFVCTDCATGKLIVRPSNLKVNAESPVFLQRIQGDICGPINPMSGSFRFPDNRIQSIRMDNAGEFTSKVFNEYCMALGIKVEHSVPHVHTQNGLAESLIKRIKLIARPLLLHSNLPTTCWGHAVLHAAALLQIRPTAYNAVSPMQLTRGYAPNISHLRKFGCAVYAPIPPPKRTSMGPHRKLGIYVGFESPSIIKFLEPLTGDLHMGRYADCIFKEDHFPALGGGKYLQKVECREIEWETKNLLHLDPRTKESDQEVQTIIDLQRIENNLPEAFTNPKGIMKSHIPVVNAPERVEIPHDAEEPVFKLISTSTPTSRKRGRPPVAHNQTKVSRRRPMKQQIGXNTTAPENSEGAHQVDEPPAVICPDGNEPSENARAITTSTGRPEIPDLNIAGNNEDQECERIEEISTSYVDTGETYNRETTIVDIYFAEKIAKIIDLDPEPKSMAECKKRSDWVKWKEAIKAELISLNKRKVFGPVDRTPVGISPVGYKWVFVRKRDENNQVVRYKARLVAQGFTQRPGIDFDETYSPLMDGITFRFLISMAVNLNLEMQLMDVVTAYLYGSLDSEIYMKVPDGIQVPEETKCNIYSVKLQTSLYGLKQSGRMWYNRLSEFLEGKGFIKNDDSCKTKYCLGLQLEHTHEGVLLHQSAYIQKILEKFNMKDSYPTRTPMVVRSLAVESDPFRPQENNDELLGPECPYLSAIGALMYLANGTRPDIAFAVNLLARFSSVPTKRHWNGIKQIFRYLRGTQDIDLTMAGYANAGYLSDPHKALLTMAGYANAGYLSDPHKALSQTGYVFLCGGTAISWKSTKQTMVATSTNHSEIIALFEASKECMWLRRVIQHVLNRCGLNITPTPTIIYEDNSACVAQIQTGYVKTSLTKHISPKFFYMHEL

SEQ ID NO: 18954 - protein, 364 aa, Oryza sativa
  Clone ID: TF_OSC422281j.C1.p1.fg
MTDIAKRDFAELAVSGKNYLTWALDAKIMLGAKKLLNCIQDPTIATSAGGVNNLPTSAEKNQALHFLRHHLNTTLKNEYMTEEDPKVLWDSLKDRYGHQVKALLLKTKREWLHLRFQDYKSVEQYNSVLHRNVTCLKLCGEKITDADMIDKTLSTFHANHVNIQRQYRQAKYEKYSELVSMLIEAQGEDETLVENHTSRPTGSSAAPEANASSFKKGKNQNNQNKGKNFWKNGGKVNKTSFKKKGNQNSKSKKGSTSGEYGKQDQVCFKCGTRGHWSRICRTPKHLIELYQEKHRKKKSEHESHFTVEIQHSEEKMAAMHIDKQVDEKAVVAMHIDDKMEKNAADAELKLSDDLMDSDQLYGDI

SEQ ID NO: 18955 - protein, 1329 aa, Oryza sativa
  unsure (1)..(1329): unsure at all Xaa locations
  Clone ID: TF_OSC422283j.C1.p4.np
MLGAKKLLNCIQDPTIATSAGGVNNLPTSAEKNQALHFLRHHLNTTLKNEYMTEEDPKVLWDSLKDRYGHQVKALLLKTKREWLHLRFQDYKSVEQYNSVLHRNVTCLKLCGEKITDADMIDKTLSTFHANHVNIQRQYRQAKYEKYSELVSMLIEAQGEDETLVENHTSRPTGSSAAPEANASSFKKGKNQNNQNKGKNFWKNGGKVNKTSFKKKGNQNSKSKKGSTSGEYGKQDQVCFKCGTRGHWSRICRTPKHLIELYQEKHRKKKSEHESHFTVEIQHSEEKMAAMHIDKQTGQIATIAGSNAPIVGVGRATVVLPHGTKIIINDALLYLKSSRTLLIFKDIRAYGYHVETKDENKLEFLLITKLDGNHKTVVEKLPSLKSGLYYTHIKPENVALKTIFKNPESYRIGLGMMRRIILTSNGHNLLTNDFPNQEDFVCTDCATGKLIVRPSNLKVATGKLIVRPSNLKVDAESPVFLQRIQGDICGPINPMSGSFRFLDNRIQSIRMDNAGEFTSKVFNAYCMALGIKVEHSVPHVHTHNGLAESLIKRIKLIARPLLLHSNLPTTCWGHAVLHAAALLQIRPTAYNVVSPMQLTRGYAPNISHLHNFGCVVYVPIPPPKRTSMGPHRKLVIYVGFESPSIIKFLEPLTGDVHTGRYADCIFNEDHFPALGGGKYLQKVECREIEWETKNLLHLDPRTKESDHEVQSIIDLQRIANNLLEAFTNPKGIMKSHIPAVNAPERIEIPHDAEEPVFKLISTSTLTSRKRGRPPVAHNQTKVSRRRPTKQQIGQNTTAPENSEGAHQEDEPPAVICPDGNEPSENARAITTSTGRPEIPDLNIAGNNEDQECERIEEISTNYVDTGETYNKETTIVDIYFAEKIAKIIDLDPEPKSMAECKKRXDWVKWKEAIKAELISLNKRKVFGPVDRTPVGISPVGYKWVFVRKQDENNQVVRYKARLVAQGFTHRPGIDFDETYSPVMDGITFRFLISMAVNLNLEVQLMDVVTAYLYGSLDSEIYMKVSDGIQVPEETKRNIYSVKLQRSLYGLKQSGRMWYNRLSEFLKGFIKNDDSCKAKYCLGLQLEHTPEGVLLHQSAYIQKILEKFNMKDSYPTRTPMVVRSLAVESDPFRPQENNEELLGHECPYLSAIGALMYLANGTRPDIAFVVNLLARFSSAPTKRHWNDIKQILRYLRGTQDLGLFFRKNQDLTMAGYADSGYLSDPHKALSQTGYVFLCGGTTISWKSTKQTMVATSTNHSEIIGLFEVSKECMWLRRVIQHVQNTCGLNITPTPAIIYEDNSACVAQIQMGYVKTSLTKHISPKFYMHEL

SEQ ID NO: 18956 - protein, 1452 aa, Oryza sativa
  Clone ID: TF_OSC400761j.C1.p70.fg
MSDLGGKNGENGNEYGASSKGTPSPKGATIPFDYSKLTIPPHNFVSVPFGRAPQFDGTHYAAWKHKMKLHLISLHPSIWKVVCTGVDVPHDDMELTSEQEQLIHRNAQASNAILSALSPEEFNKVDGLEEAKEIWDTLQLAHEGSPAVPEAKIELLEGRLGRFVMDDKLLRAFGPRNPTLVSMIQERKDFKRLTPSDILRRIVSHEMQEEEAREVRQMVKNAAMIKNQEVVLKAKQEEESSCEESEDEEMAFIVKIFKHFLRKSGYGKGRKDDDKGKRQSKRACFNCGEYGHFIADFPKSNEAKAKGGNKKPEHAHVAEVWYSGDEEDPEVKPKPKPKDKVEGEDGVAIVAFKSSSSSKERLFNNLSDDDDDSYHYSCFMAQGRKVMTQKPSHTSLNVDSSDEETSLRVVNETLQEKFANLDKSHKDLEVQFDTLWNSTSQPNVVSNSSNPSTSNGCARCYNIDLNSYATNVDAMQALKKENEKLGTLVKYGCMKTYHSKDALYKTITAHPNKDGHGLKFSGGSPVSKRVMINGKECLMFVREGKAPQASEVTCPFTGQTPRSSGQNDQKFLSCKTGSSGHFVRKFRASDRPKGVTGSSGYNARKFRPEGLYYDSYAYSSGGSSWVVDSSCTNHMTRERRMFTSLDEEGGSRKNIVFGDDGKGKVMGLGKIAISKNQSLSNVLLVNSLSYNLLSVSQLCKLGFNCLFTDVDVTVFRRDDSSIAFKGVLKGDLYLVNFDMDRVNPEACLIAKSSMGWLWHRRLAHVGMRNLASLLKGEHILGLSNVSFEKDRVCSACQAGKQVGSPHAIKNIMTTTRPLELLHMDLFGPMAYISIGGNKYGFVIVDDFSRFTWVYFLHDKSEAQDVFKRFAKQAQNLYDLTIKKNTQVEEFLDEEGIKHEFSAPYDPPQNGIVERKNQTLIEAARAMLDEYKTSDVFWAEAVSTACHTINRLYLHKILKKTSYELLSGKKPNVSYFRVFGSKCFILSKKPRSSKFSPKVDEGFLLGYESNAHAYRVFNKTSGIVEVTRDVTFDESNGSQGEQVVVHVVGDVDPSQAIGTKAIGDIRPIETQDDQEDRDQPPSSTSNSPTSVVSAEPEVPSPIDRNLRTSPGPEVPDFTVRNLRTCGSEDVPTAQVPSVHHPRIHHTVQRDHSVDNILGDIRKGVTTRSCVAGFCQHFSFVSSLEPIRVEDTLGDPDWVMAMQEELNNFTRNQIWTLVERPKQNVIGTKLFQMDIKSAFLNGPISELVYVEQPPGFEDPKLPNHVYKLHKALYGLKQAPRAWYECLRNFLLKNGFEIGKADTTLFTKKFKSDLFICQIYVDDIIFGSTNASFCEEFSSIMTKRFEMSMIGELTFFLGLQVKQAQEDTFISQTKYVKDILKKFGMEDAKLIKTPMPTNGHLDLDDNGKYVDQKGCDFEVLGYSDSDYAGCKVDRKSTTGTCQFLGPSLVNWSSKK

SEQ ID NO: 18957 - protein, 1933 aa, Oryza sativa
  Clone ID: TF_OSC401324j.C1.p2.fg
MKLHLISLHPSIWKVVCTGVDVPHDDMELTSEQEQLIHRNAQASNAILSTLSLEEFNKVDGLEEAKEICDTLQLAHEGSPAVREAKIELLEGRLGRFVMDDKETPQEMYDRMMILVNKIKGLGSEDMTNHFVVKRLLREFGPRNPTLVSMIREKKDFKRLTLSDILGRIVSHEMQEEEARKTRRRVKRFKHFLRKSGYGKGRKDDDKGKKQSKRACFNCGEYGHFIADFPKSNEAKAKGGKKKPERAHVAEAHMPEVWYSGDEEDPEVKPKPKPKDKVDGEGGVATVTFKSSSSSKERLFNNLSDDDDDSYHYSCFMAQGRKVMTQKPSHTSLDVDSSDEESDNELDDVLKSFSKPAMQHLAKLMRALDSKEQSLERQEELLILEVGLLASPILLLAMVVLALKKENERLGTLVKYGCMKTYHSKDALYKTITAHPNKDGHGLGFSSESPVSKRVMVNGKECLMFVREESKVVAYFNGNYNDEYHTCVWVPKALAYSYDGSSWVVDSGCTNHMTGERSMFTSLDEKGGSRENIVFGDDGKEKLQFIIRVSIVRDDSSIAFKGVLKGDLYLVDFDVDRVNPEACLIAKSSMGWLWHRRLAHVGMRNLASLLKGEHILGLSNVSFEMDRVCSACQAGKQVGSPHPIKNIMTTTRPLELLHMDLFGPVAYISIGGNKYGFVIVDDFSCFTWVYFLHDKSEAQDVFKRFTKQAQNLYDLTIKRVRSDNGGEFKNTQVEEFLDEEGIKHEFSAPYDPPQNGIVERKNRTLIEAARAMLDEYKTSDVFWAEAVSTACHAINRLYLHKILKKTSYELLSGKKPNVSYFRVFGSKFFILSKMPRSSKFSPKVDEGFLLGYESNAHAYRVFNKTSGEQVVIHVVRDVDPSQAIGTKAIGDIRPVETQDDQEDRDQPPSSTSNSPTSVVSAEPEVPGPIDRNLRTSPGPEVPGSTVRNLRTSGSEDVPTAQVDGIDAAGTLGHTDQAQVPLVHHPRIHHTVQRDHPVDNILGDIRKGVTTRSRVASFCQHYSFVSSLEPTRVEDALGDSDWVMAMQEELNNFARNQVWNLVERPKQNVIGTKWIFRNKQDEHVVVVRNKARLVTQGFTQVEGLDFGETFAPVARLESIRILLAYAAHHDFRLFQMDVKSAFLNGPISELVYVEQPPGFEDPKLPNHVYKLHKALYGLKQAPRAWYECLRDFLLKNGFEIGNADTTLFTKKFKSDLFICQIYVDDIIFGSTNASFCEEFSSIMTKRFEMSMMGELTFFLWLQVKQAQEGTFISQTKYVKDILKKFGMEDAKPIKTPMPTNGHLDLDDNGKCVDQKVYRSMIGSLLYLCASRPDIMLSVCMCARFQAEPKECHLIAVKRIQRYLVHTPNLGLWYPKGCDFELLGYSDSDYAGCKVDRKSITGTCQFLGPSLVSWFPKKQNSIVLSTTEAEYVAAGSCCAQLLWMKQTLKDFGYNFTKTPLLCDNESAIKIANNPVQHSKTKHIDIHHHFLRDHETKGDICLTHFCRAEVPVSVQPASNLDSSTVSFNHCTPTLLILVAVVSMPREKRQKLSQDVPADSSPPVHGPRGRLGKEKVGDFFSGSHIPIHSKRAGSIVIRDAPRSPSPVASESDDGGNEDEPGSDSNPLRLYKTRAVDPDPRRPRVNYLKNLLKCGKDRMDDRFRTLVQVDWYNSVIMGRSYPVYSWNEEVIGQFYSTAFFGTTKKGLDFVKWTIQGQQYRVSMAQFAAALGLDDDDLSRPHIFVEDALSSTSTTFLYEKDAPKDCLGTTRGLRPYYRMLYYKVKSYYGISRNLLIKFKDDQIDETSILAQVLSSESAISSLLDMSIRSLPGDHGLPLQQVLPDVPPAMADAVNRGGELLTNLATGTPWEAVAKEVGTGGAQYCTVLSANLQFSFTRNVHLVATEDGYFIRLLQQQQQQQLILSHMGSTYPDIKYCMCV

SEQ ID NO: 18958 - protein, 800 aa, Oryza sativa
  Clone ID: TF_OSC410643j.C1.p22.fg
MAESKATSTAALGRACLPERRPPSPATPKRGGNRDVSIGGKWCWNTHGLAQGPDTIHAGWSGGARGIRHGWSMRDLLPSPIKEVFLSASWVWVPKGGSLSPHLGFPATRREVVRFGATTRRIWRAPARLTDGRSFLEVAKGSMDRKPQFQRPDQWVPNKRRAFEEEGGGGNWGNRNLQEREERELRNRLMGQQQQREEGRWQQVERRGANKQWQGDRNREGGAWEGGDRRPTRGKEKLGEEGRSGPSQKEEIKCFNCGESGYHQVNCQKPPLCYVCKNPGHISSHCPVHVGGSSSNLSKLEVKLKGYGIPEQGFFSLNVDNLGVAEKGAQFRGILTVEKGAGSVQKVANEMSHLFREKNWDWNVKQISSNNFLIDFPSEDARRQVTKSGGFAKKQEIIRAISDIVGEFKEVDEKSLKGEGAVRIKVGCLDPSAINYSVIIYINDIGYKIKWEAEVDTEGTGSIDWGGTMMMMMLMIWMMITLQEERKVGVRMPKGVQRKRNLLRMQIAKEGLSVENEVGVTAKGEDPIESITVEKKADKAVVLWKSEEFSQPELFEQVSQEEDKSGDLLKRMDVDLKLGGVRLFTDEEGEKCAIPADSDIELMRAEEDDDSEQLDLESEAEIQLKEVNFQKVRHKKKQVSLVKRQSSRVKDKEVSVHLKAELRKSKMNMTSGMSSKNSYAIFHSVSQDYLINIARARGISLGDNSVEVRCNLDAICARELAQATIFDADKSLQQMAEKASLEEEGGQEVPPNGNSVILGFSVVEMENDQFVEGLKEENRDELDDADKESSDNLGDFDLHD

SEQ ID NO: 18959 - protein, 1433 aa, Oryza sativa
  Clone ID: TF_OSC400225j.C1.p6.fg
MALVPAGAGADPARESSGSAFSYPQLTATNYTSWCIRVQAMMEDQGVWDAIEPAAGVAVDPRRDKKARSHLLQSLPEDLLMQVAKKRSAKEVWDCLKTRFVGADRVREARLQTLKGEFGAMVMEPGETLDQYAGRITAMSVRHSALGSTLGDSAMVKKLFDTVPEKFVSLVAGIEQFYDIDTMPFEEAVGRPKAYEERMRKKKAAAGGVTTDGQVLLTQAEWEAHFKKNGGESSPPQKNKPSGEGAGRGQGGRGRGRGRGAGGRGGTPRGDSGAGSGGGGRDKSHIKCFNCEEYGHYSNQCPHPKKKKGEAHLAQTEDAGPALLLAMTEDVPERASCGLVVREQRVWPKLLLVDAGGHAGDVWFLDNGASNHMTGDRSKFRELDESITGRVKFGDASTVQIKGKGSILFSCKNGDQWLLQDVYYIPSLQCNMVSLGQLTETGHRVVMDEDVLEVFDKSPWRLVMKVRRTVNRLYRIELKLAHPVSLLSSLDDPAWLWHARLGHVNFQAMKLLVDKEMAGGVPAIVHPNQLCQSCLVAKQARAPFPAAAHFRAEEPLELLHIDLCGPITPSTMSGNRYFFLIVDDYSRWMWVFVLKTKDQSLDAFVKFKPLAENTAGRRVKTLRSDRGGEFLSGEFAQVCEEAGIQRHLTAPYSPQQNGAVERRNRTVMAMARSLLKGMRVPGRFWGEAVRHAVHLLNRLPTKAMGDRTPFEAWTGRKPQLGHLKVFGCTAHAKNTQPHLKKLDDRSAPYVYLGVEEGSKAHRLFDPRRGRIHVSRDVVFEENVPWEWTSVAGQEPTDFTMEEEPGEQLPSPATAAGVVPSYQAPSPGRRAGKEAVVAAEEVPSPASPVAASPTLPGTPTPGSPSTNSAGVVPSPGTDDNIDTDDGPRRYRSLADVLREAPRVDLVEDECDGEALLAESEEPSSYREAAGQPAWEEAMQREMEAIEKNKTWELAMLPAGHRAIGLKWVYKLKKNTTGEIIKHKARLVAKGYVQKQGVDFEEVFAPVARLDTVRVVLAVAADRRWQVHHLDVKSAFLNGELEEEVYVAQPEGFARSGKEHLVLKLHKALYGLRQALRAWNIRLDRSLRELGFDRCTQEQAVYTRGRGSDGIIVGVYVDDLIVTGENPSELKVFKEQMMGEFEMSDLGLLTYYLGIEVDQDESATTLKQTAYAKKLLSQFGMMECNSVSIPIDPRSQLSKDPEGHPVDATEYRRIIGSLRYLLHTRPDLSYVVGVASRFMERPTVMHFKAVKQILRYIKGTMDYGLVYAAGTRALKITGYTDSDLAGDLDDRRSTGGMAFYINQSLVAWSSQKQKTVALSSCEAEFMAATTAACQALWLRVLLAEVAGVEEKAVKLFVDNRSAIALMKNPVFHGRSKHIDTRYHFIRECVDGGQIVVEFVRTEEQRADALTKGLPAAKLATARHLLGVRSLGPRQN

SEQ ID NO: 18960 - protein, 1394 aa, Oryza sativa
  Clone ID: TF_OSC400510j.C1.p22.fg
MALVLATSDPARGSSGSAFLYPQLTATNYTSWVIRVQAMMEDQGVWEAIEPAAGAAVDPRKDKKAKSHLLQSLPEDLLMQVAKKRSAKETLKGKFGAMVMEPGETLDQYAGRITAMSVRHSVLGSTLTDAAMVKKLFDTVPEKFVSLVAGIEQFYNVDDMPFEEAVGRLKAYEERVRKKKAAAGGVTADGQVLLTQAEWEARFKKDGGESSSPQKGKASGEGAKGGQSGRERGRGRGAGGRGGAARGNSASGSGGGGRDKSHIKCFNCEEYGHYSNQCPHPKKKKGEAHLAQTEDAGAVLLLAVTENAPARATQEMVVHEDRVWPKLLLADSGAMAGNVWYLDNGASNHMTGDRKKFRELDESITGSVRFGDASSVQIKGKGSILFSCKNGDQWLLQDVYYIPSLCCNMVSLGQLTETGHRVVMDEDVLEVFDKCPWRLVMKLCQACLVAKQIRASFLVVVNYRAEEPLELIHIDLCGPISPATMAGNKYFVLIVDDFTRWMWVFVIKSKDQAVEAFTKFKPLAENVAGRRIKTLRSDRGGKFLSGEFAQVCESAGIQRHLTAPYSPQQNGVVERRNRSVMVMARSLLKGMSVPGRLWGEAVRHAVYILNRLPTKAMGNRTPYEAWTGKKPHLAHLRVFGCTAHAKITTPHLKKLDDRSAPYVYLGVEEGSKAHRLFDPRRGRIHVSRDVIFEENAVWQWLGDAGEQVSVEFDVEEIVESPAGSATSLPGAVPRYQAPSPGRRLGKEPVVVEEEASSPAGTAEASPSLPTTPATPIGEQSTPHSAGEIDTDGAPVRYRHIADILRDAPRVDLVDDEQDGEALLAETEEPSAYREAAGHSAWEDAMAMEMDAIERNGTWELTTLPAGHRAIGLKWVYKLKKNTAGEVIKHKARLVAKGYVQRQGVDFDEVFAPVARLDTVHHLDVKSAFLNGELEEEEQAVYTWGIGSGGVIVGVYVDDLIVTGENPVELKMFKEQMMGEFEMSDLGLLSFYLGIEVDQGENGTTLKQTAYARKVLSQFGMLECNSTSIPIDPRMQLNKDADGHPVGYYWVYRQRPAGDVDDRRSTGGMAFYINGSLVAWSSQKQKTVALSSCEAEFMAATTAACHALWLRALLVEIVGGPAKVVKLFVDNKLAIALMKNPVFHGRSKHIDTRYHFIRECVDGGKVVIEFVRTEEQQADALTKVATVEGISLRLLADANDAVIESEEDRVGSVRYARKVFDRGSSTNTYGVRVVALHADTAAARTIDLPPGCVDRMLGCSNAKSMSELMLVMSRGGAVLSLVMAEREVISVWTLEEEAAAVERWSRQVVIARVAIDRSVEARRLYQTVFFEGFGERSGTVLMRIVNVGLVQLAVATKKAIVVRDSGAGKWWGRSMSRACLHEMNLYSLLQSMKPF

SEQ ID NO: 18961 - protein, 1433 aa, Oryza sativa
  Clone ID: TF_OSC400864j.C1.p6.fg
MALVPAGAGADPARGSSGSAFSYPQLTATNYTSWCIRVQAMMEDQGVWDAIEPVAGVAVDPRRDKKARSHLLQSLPEDLLMQVAKKRSAKEVWDCLKTRFVGADRVREARLQTLKGEFGAMVMEPGETLDQYAGRITAMSVRHSALGSTLGDSAMVKKLFDTVPEKFVSLVAGIEQFYDIDTMPFEEAVGRLKAYEERMRKKKAAAGGVTTDGQVLLTQAEWEAHFKKNGGESSPPQKNKPSGEGAGRGQGGRGRGRGRGAGGRGGTPRGDSGAGSGGGGRDKSHIKCFNCEEYGHYSNQCPHPKKKKGEAHLAQTEDAGPALLLAVTEDVPERASCGLVVREQRVWPKLLLADAGGHAGDVWFLDNGASNHMTGDRSKFRELDESITGRVKFGDASTVQIKGKGSILFSCKNGDQWLLQDVYYIPSLQCNMVSLGQLTETGHRVVMDEDVLEVFDKSPWRLVMKVRRTVNRLYRIELKLAHPVSLLSSLDDPAWLWHARLGHVNFQAMKLLVDKEMAGGVLAIVHPNQLCQSCLVTKQARAPFPAAAHFRAEEPLELLHIDLCGPITPSTMSGNRYFFLIVDDYSRWMWVFVLKTKDQSLDAFVKFKPLAENTAGRRVKTLRSDRGGEFLSGEFAQVCEEAGIQCHLTAPYSPQQNGVVERRNRTVMAMARSLLKGMRVPGRFWGEAVRHAVHLLNRLPTKAMGDRTPFEAWTGRKPQLGHLKVFGCTAHAKNTQPHLKKLDDKSAPYVYLGVEEGSKAHRLFDPRRGRIHVSRDVVFEENVPWEWTSAAGQEPTDFAMEEEPGEQLPSPATAAGVVPSYQAPSPGRRTGKEAVVAAEEVPSPASPVAASPTLPGTPTPGSPSTNSAGVVPSPGTDDNIDTDDGPRRYRSLADVLREAPRVDLVEDECDGEALLAESEEPSSYREAAGQPAWEEAMQREMEAIEKNKTWELAMLPAGHRAIGLKWVYKLKKNTAGEIIKHKAWLVAKGYVQKQGVDFEEVFAPVARLDTVRVVLAVAADRRWQVHHLDVKSAFLNGELEEEVYVAQPEGFARSGKEHLVLKLHKALYGLWQAPRAWNIRLDRSLRELGFDRCTQEQAVYTRGRGSDGIIVGVYVDDLIVTGENPSELKVFKEQMMGEFEMSDLGLLTYYLGIEVDQDESATTLKQTAYAKKLLSQFGMMECNSVSIPIDPRSQLSKDPEGHPVDATEYRRIIGSLRYLLHTRPDLSYAVGVASRFMERPTVMHFKAVKQILRYIKGTMDYGLVYAAGTGALKITGYTDSDLAGDLDDRRNTGGMAFYINQSLVAWSSQKQKTVALSSCEAEFMAATTAACQALWLRVLLAEVAGVEEKAVKLFVDNRLAIALMKNPVFHGRSKHIDTRYHFIRECVDGGQIVVEFVRTEEQRADALTKGLPAAKLATARHLLGVRSLGPRQN

SEQ ID NO: 18962 - protein, 1409 aa, Oryza sativa
  Clone ID: TF_OSC900029j.C1.p29.fg
MALVPAGAGADPARGSSGSAFSYPQLTATNYTSWCIRVQAMMEDQGVWDAIEPAAGVAVDPRRDKKARSHLLQSQPEDLLMQVAKKRSAKEVWDCLKTRFVGADRVREARLQTLKGEFGAMVMEPGETLDQYAGRITAMSVRHSALGSTLGDSAMVKKLFDTVPEKFVSLVAGIEQFYDIDTMPFEEAVGRLKAYEERMRKKKAAAGGVTTDGQVLLTQAEWEAHFKKNGGESSPPQKNKPSGEGAGRGQGGRGRGRGRGAGGRGGTPRGDSGAGSGGGGRDKSHIKCFNCEEYGHYSNQCPHPKKKKGEAHLAQTEDAGPALLLAVTEDVPERASCGLVVREQRVWPKLLLADAGGHAGDVWFLDNGASNHMTGDRSKFRELDESITGRVKFGDASTVQIKGKGSILFSCKNDDQWLLQDVYYIPSLQCNMVSLGQLTETGHRVVMDEDVLEVFDKSPWRLVMKPRRPGLAVACAAGTRKFSSNETAGGQGDGGGVPAIVHPNQLCQSCLVAKQARAPFPAAAHFRAEEPLELLHIDLCGPITPNTMSGNRYFFLIVDDYSRWIWVFVLKTKDQSLDAFVKFKPLAENTAGRRVKTLRSDRGGEFLSGEFAQVCEEAGIQRHLTAPYSPQQNGVVERRNRTVMAMARSLLKGMRVPGRFWGEAVRHAVHLLNRLPTKAMGDRTPFEAWTGRKPQLGHLKVFGCTAHAKNTQPHLKKLDDRSAPYVYLGVEEGSKAHRLFDPRRGRIHVSRDVVFEENVPWEWTSAAGQEPTDFAMEEEPGEQLPSPATAAGVVPPYQAPSPGRRAGKEAVVAAEEVPSPASPVAASPTLPGTPTPGSPSTNSAGVVPSPGTDDNIDTDDGPRRYRSLADVLREAPRVDLVEDECDGEALLAESEEPSSYREAAGQPAWEEAMQREMEAIEKNKTWELAMLPAGHRAIGLKWVYKLKKNTAGEIIKHKARLVAKGYVQKQGVDFEEVFAPVARLDTVRVVLAVAADRRWQVHHLDVKSAFLNGELEEEVYVAQPEGFARSGKEHLVLKLHKALYGLRQAPRAWNIRLDRSLRELGFDRCTQEQAVYTRGRGSDGIIVGVYVDDLIVTGENPSELKVFKEQMMGEFEMSDLGLLTYYLGIEVDQDESATTLKQTAYAKKLLSQFGMMECNSVSIPIDPRSQLSKDPEGHPVDATEYRRIIGSLRYLLHTRPDLSYAVGVASRFMERPTVMHFKAVKQILRYIKGTMDYGLVYAAGTGALKITGYTDSDLAGDLDDRRSTGGMAFYINQSLVAWSSQKQKTVALSSCEAEFMAATTAACQALWLRLLLAEVAGVEEKAVKLFVDNRSAIALMKNPVFHGRSKHIDTRYHFIRECVDGGQIVVEFVRTEEQRADALTKGLPAAKLVTARHLLGVRSLGSRQN

SEQ ID NO: 18963 - protein, 1360 aa, Oryza sativa
  Clone ID: TF_OSC900327j.C1.p10.fg
MALVPATSDPARGSSGSAFLYPQLTATNYTSWVIRVQAMMEDQGVWEVIEPAAGAAVDPQKDKKAKSHLLQSLPEDLLMQVAKKRLAKETLKGEFGAMVMEPGETLDQYAGRITTMSVRHSALGSTLSDAAMVKKLFDTVPEKFVNLVTGIEQFYNVDDMPFEEAVGRLKAYEERVRKKKAAAGGVTTDGQVLLTQAEWEARFKKDGGESSSPQKGKASGEGAKGGQSGRGRGRGRGAGGRGGAARGNSASGSGGGGRDKSHIKCFNCEEYGHYSNQCPHPKKKKGEAHLAQTEDAGAALLLAVTENAPVQATQEMFVHEDRVWPNLLLADGGAVAGNVWYLDNGASNHMTGDRKKFRELDESITGSIRFGDASSVQIKGKGSVLFSCKNGDQWLLQDMYYIPSLCCNMVSLGQLTKTGHRVVMDEDVLEVFDKCPWRLVMKVRHTTNRLYRIELNLAYPVSLLSSLDDPAWLWHARLGHVNFQAMKLLVDKGMEVDVPAIVHPNQLCQVCLVAKQIRASFPVVVNYRAEEPLELIHIDLCGPISPATMAGNKIKQWRPSPSFKPLAENVAGRRIKTLRSDRGGEFLSGEFAQVCESAGIQRHLTAPYSPQQNGVVERRNRSVMAMARSLLKGMSVAGRLWGEAVRYAVYILNRLPTKAMGNRTPYEAWMGKKPHLAHLRVFGCTTHAKITTPHLKKLDDRSAPYVYLGVEEGSKVQRLFDPRRGRIHWLGDAGEQVSVEFDVEEIVEPPAGSATSLPGAIPRYQAPSPGNRPGKEPVVVEEEASSPAGTMEASPSLPTTPATPIGEQSTPHSAGEIDTDGAPVRYRHIADIMRDAPRVDLVDDEQDGEALLAEMEELSAYHEAAGHPAWEDAMAMEMDAIECNGTWELTTLPAGHRAIGLKWVYKLKKNTAGEVHHLDVKSAFLNGELEEEVYVAQPEGFVKQGREHLVLRLNKALYELRQAPRAWNIRLDRCPKQLGFERCTQEQAVYTRGTGSGGVIVGVYVDDLIVTGENPVELKMFKEQMMGEFEMSDLGLLSFYLGIEVDQGENGTTLKQTAYARKVLSQFGMLECNSTSIPIDPRMQLNKVADGHPVDATEYRRVISCLRYLLHTRPDLSFAVGVASRFMERPTLMHFKAVKQILIYLKAGNGDMQITGYTDSDLAGDVDDRRSTGGMAFYINGSLVAWSSQKQKTVALSSCEAEFMAATAAACHALWLRALLVEIVGGPTKVVKLFVDNKSSIALMKNPVFHGRSKHIDTRYHFIRECFDGGQVVIEFVRTEEQRADALTKVATVEGISLRLLADANDAVIESEEDRVGSIRVREFSAVNENHRKLAPQISYLLLFSETSQFPVFLFCSVFL

SEQ ID NO: 18964 - protein, 1000 aa, Oryza sativa
  Clone ID: TF_OSC401564j.C1.p4.fg
MAGFADTLRPDKFTGVHFKRWQLRVTLWLTAMKCFWVSTGKPEEILTADQQKQFEEATTLFVGCILSVLGDRLVEVYMHMTDAKELWDALNNKFGAIDASNDLYIMEQFHDYKMADNHSVVEQAHEIQTMTKKLELLKCVLLDKFVASANVVHKAQNKSKGKYKAQQTTNFKKQKKNNNNPNQDERTCFVSGQPGHLARKCPQRKGMKAPAGQTSKSANVTIGNTGDGSGLVARGFTVLMGNGSHAYVMVLARFCYVYLLKTKDEALDYFKIYKAEIENQLDRKIKRLRSDRDGEFFSNEFDLFYEEHGIIHERTPPYSPESNGIAEKKNRTLTDLVNAMLDTAGLPKAWWGEALLTSNHVLNRAPNRNKDKTPYKIWIGRKPSLSYLRTWGCLAKVNVPITKKRKLGSKTVDCVFLGYAHHNIAYRFLIVKSKVPNMHVGTIMESRDATFFESFFPMKDTHSSSSQPSEVIPSSITPPEQTEHTHEHVTEEDESEAPRSSKRQRTAKSFGDDFTVYLVDDTPKSISEAYASSDVDYWKEAVRSEMDSIIANGTWEVTERPYGCKPVGCKWVFKKKLRPNGTIEKYKARLVAKGYTQKEGENFFHTYSPVARLTTIRVLLSLATSHGLLVHQMDVKIAFLNGELDEEIYMDQPDGFVVKGFAVNEADKCVYYRHGGGEGVILGLYVDDILIFGTSLEVINEVKSFLSQNFDMKDLGVADVILNIKLIRGENGITLLQSHYLEKILNRFGYIDSKPSPTPYDPSLLLRKNKRIARNQLEYSQIIGSLMYLASATRPDISFAVSKLSRFTSNSGDDHWHALERVMHYLKGTMELELHYSGYPAVLEGYSDSNWISDVDEIKATSGYVFTLGGGAVSWRSCKQTILTRSTMEAELTALDTATVEAEWLRDLLMDLPIVEKPVPAILMNCGNQTVIVKVNSSKDNMKSSRHVKRRLKSVRKLRNSGVITLDYIQTARNLADPFTKGLSQNVIDNASKEMGLRPM

SEQ ID NO: 18965 - protein, 1305 aa, Oryza sativa
  Clone ID: TF_OSC900422j.C1.p26.fg
MIRERKDFKRLTPNDILGRIVSHEMQEEEARKVRQMVKNAAMIKNQEVALKVKQEEESSCEESEDEEMAFIVKRFKHFLRKSGYGKGRKYDDKGKRQSKRACFNCDEYGHFVADCPRSNEAKAKGGKKKPERAHVAEAHMAEVWYSADEEDLEVKPKPKPKDKVEGEGGVATVTFKSSSSSKERLFNNLSNDDEDSYHYSCFMAQGCKVMTQKPSHTSLDVDSSDEESDNELDDVLKSFSKPAMQHLAKLMRALDSKKQSLERQEELLILEKKRNLALEESLAKECAKNEQLANELNLANGSLASLRDVNETLQEKFASLDKSHKDLEVQFDTLWNSTSQPNVVSNSSNPSTSNGCARCYNIDLNSHATNVDAMQALKKENERLGTLVRYGCMKTYHSKDALYKTITAHPNKDRHGLGFSGGSPVSKRVMVNGKECLMFVREGKAPQASEAYSSGGSSWVVDSGCTNHMTGEGSMFTSLDEKGGSRENIVIGDDGKGNVMGLGKIAIFKNQSLSNVLLVNSLSYNLLSVSQLCKLGFNCLFTDVDVTIFRRDDSCIAFKGVLKGDLCLVDFDVNRVNPEACLIAKSSMGWLWHRRLVHVGMRNLASLLKGEHILGLSNVSFEKDRVFSACQAGKQVGSPHPIKNIMTTTRPLELLHMDLFGPVAYISIGEGAKRQWRRIKNTQVEEFLDEEGIKHEFSAPYDPPQNGIVERKNRTLIEAARAILDEYKTLDVFWAEAVSTACHAINRLYPHKILKKTSYELLSGKKPNVSYFRVFGSKCFILSKRPRSSKFSPKVDEGFLLCYKSNAHAYRVFNKTSGIVEVTRDVTFDESNDSQGEQVVVHVVGDVDPNQAIGTKAIGDIRPVETQDDQEDRDQPPSSTSNSPTSAVSAEPEVLGPIDRNLRTSPGPEVPGSTVRNLRINGSEDVPTAQVDGIDAEGTLEHSDQAQVPPVHHPQGYITLSKEIIPVEDALGDPDWVMAMQEELNNFTRNQVWTLVERPKQNVIGTKWIFRNKQDEHGVVVRNKARLFQMDVKSDFLNGPISELVYVEQPPGFEDPKLPNHVYKLHKALYGLKQAPRAWYECLRDFLLKNGFEIGKADTTLFTKKFKSDLFICQIYVDDIIFGSTNASFCEEFSRIMTKSVCMCAHFQAEPKECHLIAVKRILRYLVHTPNLGLWYPKGCGFELLGYSDSDYAGCKVDRKSTTRTCQFLGRSLVSWSSKKQNSIALSTTEAEYVAAGSCCAQLLWMRQTLKDFGYNFTKIPLLCDNESAIKIAKNPVQHSRTKHIDIRHHFLRDHETKGTYALPM

SEQ ID NO: 18966 - protein, 1792 aa, Oryza sativa
  Clone ID: TF_OSC421503j.C1.p7.fg
MRGEHEGERFRPSTSTAAGVHSGIRQPPSKPQVGSWRDIIVGVGTQGAVGEKEREAAWIEVRRRKGSHSRGAHLSPPTRPAALKTTREVPRWLQGRCFKCLGLGHQKAHCTGQIRCFRCWYTGHLASSCAEKGERGEREEGEVRGAPKESVQGRAQVEGRRLPARRQEPRRAVPQARRQEETSTAEPGASRRPKSDQASASVKEMAGFQICTARPHEYMEEFWTGEPELRPAIGHCVLSWTAGMERNEAWLNQHTLMASVLKTRPSVSSGELLVAIVQQAGVREENLRVDVTHTEDFLLSFRTLRDRNSVFRRSHEIYVQEVPVSFKLWSRRSWADSSDLKFFTKISLDGLPAHLWERETVRNKGSWWRLSRLQMLDVWVFSLGSRTQTSFRSCFRSKCQRRLGQEVLGGKVLRAQLLLALLGHGQRFSMTLSFMSKRSSIPLPCTLRLRTQPVRLLVREGTVEAANSAAVELHHLAPEARGTSVKQPVAPDPLEAEVCSYGGKGSMLALSPVIEAVTGSAEPGRMVAGAMMAAGTEGMAPRPNVWFSPQQSQGSPALVDASTPVFQDVPLPLENLAHSPGSTVLPSPRIFRSISPLRLSEEDQVDGLMAQAMLPPPAQAFVLASPGTMDSLLVSPRLRSTADAVRGCAFRGSGHDPSPASTPGHVSSVQTLPPLARHLSFEDMGGDPPLMARAAVLEEIFEALSPGGNPVGARLPSPPADGQSHAGPSTADGPPSSADRLSPPWSPVRSALLVGPALGVAHFDRVYVCRKESVPAPQVVELAPSPQPARRSPLGAVILGQASPLRPVMSQSQASRVPDGSAVDAFIVTISTPPPCSLLGTPPASVPVTRSRRRVELPRDFTPWRSPRLALQGDGARRHTISKVQRVTMKKLGIIEEEDEATQETAEQYMCLFDNPLPPHHVEAMAELLQLDLAEPMDPLPAEPTMALFSVLVWNVRGLNNTAKRALVQESVVSSNASVVCFQESKLEVVNAVLIFELCGPGFNCFEVLPAEQTRGGVIIAWKGDLLQGTLVHTGRWSLIVNLSWGDRSWSLSSVYGPQADDEKLLFLDEMSAIRDLCLVEWIITGDFNLITAAADKNNLRINRRLMNAFRSKVNELELKEVYLFGRRYTWSSEQAVPTLVKLDRLFASTQWEDMFPEAHLQALSSSGSDHCPQLLTCGDRVPRQRRFRFESYWTRLEGFEEVVKETWQMARLSKFLSKWGQRHISSFRLQLQIANELILRSSNSIRFQDIHMPRLNLADLDAAFNEEAVWEAIKIMPNEKSPTPDGFTGLFYQKCWEIIKQDVMAALHKFCSGNNQNLELLNTAIITLLPKKEASSLLKDYRPISLIHSFAKLAAKVMALRLTPRMADLVACTQSAFIRGRSIHENFIFVKGLTKLFHCRKKAMILLKLDILKAFDSVSWPFLLDLLQFRGFGPNWRRINPTSVVPNMSFYADDAVIFFKPVHHEAATIKAVLNLFGDATGLLSNFAKSAITPIRCTEEQRLLVQEVLGCRMEDLPITYLGLPLSIRNPTKAELQPIMDRMAKKVAGWKPKLLSPDGRLCLIKSVLMAIPVHLLSVVQLPRWVIKDIERRCRGFLWKGQEEISGGHCLVAWREICMPIGNGGLGIKDIDSFGKALRLKWEFKRQEQRDRPWTMANWESEKDVGDLFNSLAIHILGDGSHTDFCRGNWLPRGGSIANNCPTLFSFVSRTKLMVAQGLISHRWVRDLQGSLSSRALAEYLSLWDELQSVAVQEGPMISSFLPQLSALLGKQFGRPKRQRESDFFFGWQQRVDV

SEQ ID NO: 18967 - protein, 236 aa, Oryza sativa
  Clone ID: TF_OSC13260j.C1.p1.np
INLQNKPNIHHNSKRLRSVKVLSLVSNLSLPFVFPLSLSKPLQQMADNEKGNKVRSQDIGTSSSRVNEAQDTSCAAVVQHLINQNKLLIEILQQHRMPILNPSQMQPQVQLEAVQALTPQVSAPPTSQKAPHAMPHVDPKEASIICFMCDEQGHYARNCPQQKRKAPMRTEGEVRKMIITSTEWPSPGMTRRQRRNTFRGAPQLTEHLLANGGRVSDSEDSDQVSKDEDEKSPQGF

SEQ ID NO: 18968 - protein, 292 aa, Oryza sativa
  unsure (1)..(292): unsure at all Xaa locations
  Clone ID: TF_OSC18671j.C1.p2.np
RWSRLYPRSACEDGRRPLVRCLLDGQVSEEEDIVSCLPKLRKTAGSASEMEEVVKPAVHNSKRLRSVKVLSLVSNLSLPFVFPLSLSKPLQQMADNEKGNKVRSQDIGTSSSRVNEAPDTSCVTLVQHLVNQNRLLIEILQQHQTPILNLSQIQPQVQLEAVQALTPQVSAPPTSQKAPHAMPHVDPKEASIICFMCDEQGHYARNCPQQKRKAPMRTEDEVRKMIITSTEWPPPGMTRRQRRNTFRGATQLTEHLLANGGRVSGSEDSDQVSSDDEDEKSPQGFNQXXATV

SEQ ID NO: 18969 - protein, 328 aa, Oryza sativa
  Clone ID: TF_OSC20369j.C1.p1.fg
MADNEKGNKVRSQDIGTSSSRVNEAPDTSCVAVVQHLINQNQLLIEILQQHRMPILNPSQMQPQVQLEAVQALTPQVSAPPTSQKAPHAMPHVDPKEASIICFMCDEQGHYARNCPQQKRKAPMRTEDEVRKMIITSTEWPPPGMTEHQRRNSFRGAQQLTEHLLANGGRVSDSEDSDQVSSDDEGMGHFADKCPKPRNVAASTSVHANPRNQKLAPQRIVIHASRSSPITRVATAPIPMSALPQGVNAQFQPQPPADKTEASICVVPLEVPIQQLRNQVQDEEPELKKGITPKTVPNQGKIDLHITANLHEADIPIVLWSLEQTPYP

SEQ ID NO: 18970 - protein, 199 aa, Oryza sativa
  Clone ID: TF_OSC25205j.C1.p1.fg
MADNEKGNKVRSQDIGTSSSRVNEAQDTSCAAVVQHLINQNKLLIEILQQHRMPILNPSQMQPQVQLEAVQALTPQVSAPPTSQKAPHAMPHVDPKEASIICFMCDEQGHYARNCPQQKRKAPMRTEGEVRKMIITSTEWPPPGMTRRQRRNTFRGAPQLTEHLLANGGRVSDSEDSDQVSSEDEDEKSPQGFNQDKME

SEQ ID NO: 18971 - protein, 1553 aa, Oryza sativa
  unsure (1)..(1553): unsure at all Xaa locations
  Clone ID: TF_OSC25668j.C1.p2.np
MASRPRRATRAPNRFGFEEGRVEPEADHESADEQSHHTNRSHHTASRDAEVEQSHGSHRSHHTVNRDPVGGMPSPPHVENNMQHLMAXPQPQILQGLATAIAGFQHNAHGNGHPHMGNNRSKLTDFLRSRPLEFSQTVVPVEADDWLKDVERKLNLVQCTPFEKTLYASHQLRGPAADWWENYCNAHPDPTNIAWDEFATAFRATHVPESTIDMKKEEFNRLKQGNNSVNXYLSQFNKLARYAPEEVDTDKKKIRKFLKGIAVGMRLQLLAHNFPTFHDMINKSLLFEDARKEATEEYKKRKSNHQGNSSRGAPRPRFGQPMQYHQSVTHANRQPSYAPRPQTNRLAPQPQQRAPSSNTAPNSVSSFKAPSGMASVQCFXCNQMRHYARQCPQDPANSNSGRSNGSTARTPTPAPAPSRPSSQASGQGSHVSNNFGRGRVNHIQAETAQDAPDVVMGMFSINSVPAIVLFDSGASHTFISQAFVKRNGWKTQKLQVPMIVHSPGRDIGATKICPEVNIRIEGIDFLAKPIILDSQSLDIILGMDWLAKHKGQIDCAERSITLQGPGGKQVRFTPNTLTASRSILTSLQAIPLEXVPIVCGYPDVFPEELTGMPPDREIEFAIELALGTAPIAKRPYRMAVNELAEVKKQIEELESKGYVRPSSSPWGAPVLLVKKKDGSERMVIDYRALNEVTIKNKYSLPRIDDLFDEIEGAKVFXKIDLRSGYHQLKIRSENIPKTAFSMRYGLYEFTVMSFGLTNAPAFFMNLINKIFMEYLDKFVVVFIDDILIYSRNAEEHAEHLRLIMEKLREHQLLANFSKCKFWLDRVAFLHVISSNGVEVDPRKVEAVLAWNSPKNVSEIRSFLGLAGYYRRFIEGFSKLARPMTELLKKEKKFEWSAACEDSFQEMKKRLTTAPVLTLPDIRKDFEIFCDASRQGLGILMQDRKVVAYASRQLRPHEVNYPTHDLELAAVIHALKIWRHYLIGYKCEVYTDHKSLKYIFTQTELNMRQRRWLELIKDYDLGIHYHPGKANVVADALSRKTYCNAVKVWPDQDRLCRELEKLRLIVVQSAIPASLTVQPTLESQIREAQKDDKGIKELIERIHEKKYTGFSIDDQGTVWCGSRICVPAKKELKDIILKEAHESAYSIHLGSTKMYQDIKGYFWWAGMKRDVAEYVALYDICQRVKAEHQRPAGLLQPLPISECKWEEIGMDFITGLPRTPSGYDSIXVIVDQFTKSAHFVPVKTTFDGKKLAELYMTHVVCRFGCPKKIVSDRGTQFTSRFWKQLHEALGTNLNFSTAYHPQTDGXTERVNQILEDMLRACALDFEGTWDRCLPYAEFSYNNSYQASIQMSPNEAMFGRKCRTPLCWNEVGEALVFGPILKAAEEQVKLIRERLKTAQNRQKNYADNRRRDLEFEKGDHVYLRVSPLHGMKRFGMSGKLAPRYIGPYHITARRGEVAYQLELPEGLADVHNVFHVSQLKKCLRVPEEQVPLGNIELENNLTYKERPIKVLQEAKRQTRRKTIKFYKVQWSNHSKDKATWEREDHLRAEFPELLP

SEQ ID NO: 18972 - protein, 468 aa, Oryza sativa
  Clone ID: TF_OSC33041j.C1.p1.np
MSWHRVGVLLLGSVLPACPGGSGRRGIGSVLLSMARMGWKLCHVFRPYTVVMFNREKGKNVSGYTSSNSSFQLNPPLAPRELTRAHPWSIPSMLFSSQLPLVGSQDQNQYVFDRAFATQVNELPMPEEQVPFCHDCREQGHYALNCPWVYVKEAPSGLAGQTSLNQPPHTKSSLQPSVQSRELNGENPLNPGKCFPPSLSYHVGSHTKQAKGKKSKNQKRKAPMRTEEEVRKMTITSTEWPPAGITIPRRQRGNTFRGARQLTQHLLSHGGRVSDSEGSDQVSSDDEDESPRHLGEEEMESKACTRCGEIEHVASVCLTLCTHCEEDHPPGECPTRKVTCFLCEGTNHVPKDCQLSVLLTKTAEIQRTTLRLSHQLVSSNSNIDDIIHSTNAPLAAPDSAVSHSDNTFSTNHSLHRPPQQRIVIDGRSCVSPRPTPGRAKDNQPPEGDTKQKTVIRLNQQSEGNFSCE

SEQ ID NO: 18973 - protein, 363 aa, Oryza sativa
  Clone ID: TF_OSC417491j.C1.p2.np
NRFSVFFPPKAGETRHVASSCATICVHCEEDHPPDRCPTSRITCFFCEGTDHVPKDCQFSFLLTKKMANQPASSNGEKHQGNTNPRQDYSFSLTPVPGQRNQNEKRKCRVREDICCFNCQGMGHFADKCPKPRNITASTSVHATPCNLKLAPQRIVIHASRSSPIARVATAPTPASALPQGVNAHFQPQQRIVVDGRSCVSPRPTPGQAKGNRPPEGDTKQKTVIRFNQQSEGSFSLAICSPITSSQNQSRMQSLEQCQLQGVKSSTRYQMLHGVKSASPGYQVDSEDMNHEKFWNGSIIELPQPSLSQPKGAPWSKSGEEKIPSATGGQAKQFRVVKFCWKFVKTQRKKSDKKRRPPNLSSC

SEQ ID NO: 18974 - protein, 488 aa, Oryza sativa
  Clone ID: TF_OSC21297j.C1.p9.fg
MDISRTNEGYTSCGPVVEMSWHRAGVLLLGAHSCLPVPEVPAVGGVGSVLLFMARMGWELCHVFRPYTVVMFNREKGKNVSGYASSNSSFQLNPPLASRELTRVHPWSIPSMLLGSQLPLVGSQDQNQYVFDRALATQVNELPMPEEDVPFCHDCREQGHYALNYPWVYVKEAPSFGLAGQTSLNQPPHTKSSLQPSVQSREPNGENPLNPGKCFPPSLSYHVGSRTKQAKGKKSKNQKKKAPMRTEEEVRKMTITSTEWPPAGITIPRRQRGNTFRGARQLTQHLLSHGGRVFDSEGSDQVSSDYEDESLRHLGEEEMESKACPRCGEIGHVASMCLTLCPHCEEDHPPGGCPTRKVTCFLCEGTNHVPKDCQLSVLLTKTAEIQRTTLRLSRQLVSSNSNIDDIIHSTNAPLAAPDSAINHSNNTFSTNHSLHRRPQQRIVVDGRSCVSPRPTPGRAKGNQPQEDDTKQKTVIRFNQQSEGSFSCE

SEQ ID NO: 18975 - protein, 1577 aa, Oryza sativa
  Clone ID: TF_OSC422890j.C1.p1.fg
MGVPRSEGYVIELHRLMRRLRYPRFPIYRVRWCGPVWEARVEVHTRVPLESDYSFPTRHRHDLPETAMQDAAREAFLRLSSIQRAELASTEFAHHPFQEESNSVCTVQDTPCCYNPIVTRLSRWAEAVDDFYEEALLEIDDQQRRVGELETEVTNLTVQQLQLEEEHQAWGSEIDSLKAQLQTEGTDTEPEIEPDITDPSEDETPVHRITFVGGPHTLSTARKSTRPPGKKPKPDPEMASRHRASTSNEETQVPDLTTLAGVMATQTQLLQAIANNQGNRGGSSFGEFMRTKPPTFATADEPMGAEDWLRNIKKKLTLVRMREADKVIFAVNQLEGPAGDWWDTYKEAREEDAGEPTWEEFTAAFRENFVPAAVMRMKKNEFRRLRQGNTTVQEYLNRFTQLARYAIGDLADEEEKIDKLENDQRTVEHNRKRRLAMNRPPQGVPQRLKGATSSGRKPTIVATNRPAAPSNFNRPVAVQNRTPTPTLAAPGVKKNVDCFNCGEYGHYANTCPHPRKTPVRTGANAMTVRGTATPAVGRGLFKTPQTNRTATGFGRGQVNHVRAEEAQEDKGVLMGMFSINSSPVKVLFDSGASHSFISLEASQKHNLTLVGLRKPMIVHSPGGEITVSHACINIPIRLRDVVFPSNLIVVIPQTLDVILGMDWLTKNRGVIDCRRREVTLTTPWGSDIRATMDQDPRLAERAGGIFTMLPMKGMPIVQRLPDVFPEDLPGMPPDRDIEFIIDLIPGTAPISKRPYRMPVNELEELKKQIRELQEKGFVCPSSSPWGAPVLFVKKKDGSMRMCVNYRSLNEVTIKNKYPLPRIDDLFDQLKGAKVFSKIDLRSGYHQLKIRTGDIPKTAFSTRYGLYEFTEEHAEHLRLVLEKLRKHKLYAKFSKCEFWLKEVAFLGHVISAGGVAVDPAKVEAVTEWKAPKSVTEIRSFLGLAGYYRRFIEGFSKIARPMTQLLKKEKEFVWSEQCKESFEQLKEKLTSAPILVLPDNRKDFVIYCDASRQGLGGVLMQDGKVVAYASRQLRPHEENYPTHDLELAAVVHALKIWRHYLIGNHCDIYTDHKSLKYIFTQSDLNLRQRRWLELIKDYDLEVHYHPGKANVVADALSRKSHCNHLRMEEMAPELKEEIAQLNLHIVLRGRINTLDIRPLLRTQIEEAQRENREIQEVKERLAAGFAKEFSTDEKDVLWYKKRIFVLEQGGLRGLILKEAHESAYSLHPGSTEMYQDLKEGYWWPNMKRDVAEYVALYDVCQKVKAEHQRPAGLLQPLRIPEWKWDEIGMDFIVGLPKTATGYDSIWVIVDRLTKTARFIPVKTNYSGAKLAELYMTRIVCLHGVPKRIISDRGTQFTSHFWEKVHEALRSYLAFSTAYHPQTDGQTKRTNQTVERAVFGPDIIKEAEEKVSLIRDHLKVAQSRQKSHADTRRRNLEFKEGDYVCLKVSPMRGTKRFKVKEKLAPRYVGPFQVMARRGEVAYQLQLPENIADVHPVFRVSQLKKCLRVPEEQAPLEEIHISNDLTYPEHPVRILDEAEKRTRSKVWRMYKVQWSNHTEDEATWESEEFLRTEYLHLFENW

SEQ ID NO: 18976 - protein, 1019 aa, Oryza sativa
  unsure (1)..(1019): unsure at all Xaa locations
  Clone ID: TF_OSC8199j.C1.p1.np
ALRSRPRAVIPTFPESPFSQEKNLKSSXASKATPGLEWYIPDLEIDLYSRDGCSEWLGLYNRMPRYKPEYLFGVEGFVQELRTMSFVIGFGTAPFYAQIPHDRHEEKCRVKVTLNSNSEDIPSVMFEAGGRNYIHACQEVARIAIGELRDRYSDRLADTEYRYHPRQPQGSDRGSYLKTEGIENDATTRHLVEMLWAMDESRAETVLAAQDREDRNRGKICKLEDKVDRLEKELAALKGEAPLQKARVRLTARKRALFVPRYQLAPKMVLTRSNRNGPNNNNNNNNGENPTLAQVLAQQAQLMNMMMQQLQNQQNQLNQGNNHAPPQNKLAEFLRVRPPIFSSTTNPVEAGDWLHAIEKKLDLLQCTDQEKVSFASHQLHGPASEWWDHFRLNRTTAEPITWLEFTAAFRKTHIPSGVVSLKKKEFRSLTQGSRSVTEYLHEFNRLARYAPEDVRTDEERQEKFLEGLNDELSYPLMTGDYPDFQKLVDKAIRQEDKYNRMEQKKRRIAQFKTQQENNQKPRLTLGPQSMPQGGSSSVVRPQRQFFNNNAGNNIHNQAPRPVAASTQQQPVKREQGSKPVVCFNCGDPGHYADKCLKPRRVKVVPAQSNSTAPASKARVNHVAAAEAQDAPNVILGTFFVNSVPATVLFDSGATHSFLSMSFAGNHGMEVEDLRRPLMVSTPSNQALSLQRSPSVRIEIQGVPFLANLILLESKDLDVILGMDWLARHKGVIDCANRKVTLTSNDGRVVTVHALSSESLRSRLNQITLKEIPIVREYPDVFPDDLPGMPPKRDIEFRIDLVPGTTPIHKRPCRMAANELAEVKRQVDDLLQKGYIRPSSSPWGARVIFVEKKDHTQRMCVDYRALNDVTIKNKYPLPRIDDLFDQLKGATVFSKIDLRSGYHQLRIKEEDIPKTAFTTRYGLFECTVMSFGLTNAPAFFMNLMNKAFMEYLDKFVVVFIDDILIYSRTKEEHEEHLCLALEKLREHQLYAKFSKCEFWLSEVKFLGHVISAGGVAVDPS

SEQ ID NO: 18977 - protein, 1381 aa, Oryza sativa
  unsure (1)..(1381): unsure at all Xaa locations
  Clone ID: TF_OSC900190j.C1.p15.np
DHPNLAQMLANQNQLIAALLHQMQNPXAPAAQAPINALPQSKLSEFFRVXPPTFSSTTNPVEANYWLHVVNKKLDLIQCNDEEKVAFAAHQLHGPASEWWDHFQATQPAGQIITWAFSTAFRRAHVPAGVVALKKKEFRELKQDGRTVTEFLHEFNRLARYAPKDVRTDEEKQEKFLEGLNDELSVQLISGEYEDFQKLVDKAIRLEDKHRKMESKKRKLANARMFQGPSQKPRYVFPPQVGSSSAAQRASCPQMNNKLQNSGWNNGQRSTPAQGGSTRKDSSGKILVCYNCYEPGHFADKCPKPKRPQAPAPARNANQSNNGNRNNNNLVRGRVNHVSAEEAQAAPEVILGATHSFISRDFVAKATHSFISRDFVAKHQIRIEDLSNPMIISTPGSQLPTKLFSPSVTIEIQGVTFLANLILLSSKNPDVILGMNWLTKHSGIIDCAIRSISLIGGTGQRVTFHAKLALPCKQVLNQVSMEEIPIVKEYPDVFPEELPGMPPKRDIEFRIDLVPGTAPISKRPYRMAANELAEVKKQLEELKGKGHIRPSTSPXGDPVIFVEKKDKTKRMCVDYRALNKVTIKNKYPLPRIDDLFDQLKGATVFSKIDLRSGYHQLRIREEDIPKTAFTTRYGLYECTVMSFGLTNAPAFFMNLMNKVFMEYLDKFVVVFIDDILIYSKIAEEHEQHLHLALEKLREHQLYAKFSKCEFWLLEVKFLGHVISAQGVAVDPTNVESVTNWNQPKSVTQVRSFLGLAGYYRRFIENFSRIARPMTQLLKKEEKFIWTSQCEDAFQFLKKKLDFQVYCDASKQGLGCVLDFQVYCDASKQGLGCVLMQEGQVVAYASRQLRPLESNYPTHDLELAAVVHALKIWRHYLIGNRCEIYTDQKSLKYIFTQPDLNLRQRRWLELIKDYDVGIRYHPGKANVVADALSRKSYCNAIIHEQCPPGLCRELEALNLGIVNYGYVATLEAKPLLLDHIREAQKGDSDIQEIKKNMRRGKAIGFSEHEHGTIWYGERVCVPNDPEIKKLILQEAHXSQYSIHPGSTKMYQDLKMKYWWVSMKHEIAEFVALCDVCXRVKAEHQRPVGLLQPLKILEWKWEEIGMDFITGLPRTNLDMTLFGLLSTAXPKLHISSXSKPLIPAEEMGTRLNFSTAYHPQTDGQIERVNQILEDMLRACAEFSYNNSYQASLQMAPFEALYGRKCRTPLLWDQTGERQVFGTDIIKEVEEKVKVIQANLKVAQSRQKSYADTRRRELAFEEGDFVYLRVTPLRGVRRFHTKGKLAPRFVGPYKVLGRRGEVAYQLELPASLGGVHDVFHVSQLKKCLRVPTEQADTEQIEIQEDLTYVEKPIRILETSERHTRSRVIRFCKVQWSNHSEEEAT

SEQ ID NO: 18978 - protein, 1621 aa, Oryza sativa
  unsure (1)..(1621): unsure at all Xaa locations
  Clone ID: TF_OSC400772j.C1.p71.np
MSNEVNHVGKAPMFNGTNYSTWKIKMSTHLKAMSFHIWSIVDVGFAITDTPLTEIDHRNLQLNAQAMNALFNSLSQEEFNRVSNLETAYEIWNKLAEIHEGTSEYKDTKLHFLKIQYETFSMLPHESVNDMYGRLNVIVNDLKGLGANYTDLEVAQKMLRALPEKYETLVTMLINCDMSRMTPASLLGKINTNDMYKLKKKEMEEASPSKKCIALQAEVEDKSKSKVNEVNEDLEEEMVLLARKFNDLLGRRMERGRDSNSNRRRNRRPNKTLSNLRCFECGEKGHFASKCPSKDDDGDKSSKKKSGGYKLMKKLKKEGKKIEAFIGEWDSNEESSTSSGSEEEGGDDASSKKKKMAVVAIKEAPSLFAPLCLMAKSSSKVTSLSDSESDDDCDDVSYDELVSIFEELHAYSEKEIVKFKALKKDHASLEVLYEELKTSHERLTISHEKLSSSSSCISICDASLVVENNELKEQVAKLNKSLERCFKGKNTLDKILSEQRCILNKEGLGFIPNKGKKPSHRATRFVKSNGKYCSKCREVGHLVNYRTDGSHWVLDSGCTQHMTGDRAMFTTFEVGGKEQEKVTFGDNSKGKVIGLVAKTSLGWLWHRRLAHVGMNQLSKLSKRDLVVVLKDVKFEKDKLCSACQAGKQVACSHPTKSIISTSRPLELLHMILFGPPTYKSIGGNSHWLVIVDDYSRYTWEFFLHDKSIVAELFKKFAKRAQNEFSCTLVKIRSDNGSEFKNTNIEDYCDDLGIKHELSATYSPQQNGVVERKNRTLIEMARTMLNEYGYASNSKAYRVYNKNKGIVXETADVQFDETNGSXEGHENLDDVGDEGLMRAMKNMSIGDVKPIEVEDKPSTSTQDEPSTSATPSQAQVEVEEEKAQDPPMPPRIHTALSKDHPIDQVLGDISKGVQTRSRVASICEHYLFVSCLEPKHVDEALCDPDWMNAMHEELNNFARNKVWTLVDRPRDHNVIGTKWVFRIKQDENGLVVRNKARLVAQGFTQEGLDFGETFAPVARLEAIRILLTFASCFDIKLFQMDVKSAFLNGEIAELVFVXQPPGFEDPKNPNHVYKLSKVLYGLKQAPRAWYERLRDFLLSKDFKIGKVDTTLFTKIIGDDFFLCQIYVDDIIFGSTNEVFCKEFGDMMFREFEMSMIGELSFFLGLQIKQLKNGTFVSQTKYIKDLLKRFGLEDAKPIKTPMATNGHLDLDEGGKPVDLKLYRSMIGSLLYLTASRPDIMFSVCMCAWFQAAPKECHLVAVKRILRYLKHSSTIGLWYPKGEARGVLRFAPIEGSFLXCLPALAMIVVHPLRIRVSLRNRAEMSTLKGDSEEESGDDVSGDSEEESGDDVSRSGEDEDEGSDDMHIDPSIQFVVNMRNPSQYTILRHHDQFLRPRDTPDPRFHTAFQKSVYEQVYAGKAFAEHKGISWRDICPEFEGLQDLFKTVSIDRIVTLKQDYNEDLIRQFYATFYEDGVRYTHGKVAGLRTIPSVVNRIVRATILPRLGNNDDIMGADWHVIDAIIQGRQFDIVSLMMQEIAISKGTFTXGIYYAPYIMRLIQDKLGAAGQNLKKHKQYKPRLXLGAPRAPRAAPSSHPGASSSSAPPPPPGYYPNAFILPLHLFTGS

SEQ ID NO: 18979 - protein, 417 aa, Oryza sativa
  Clone ID: TF_OSC414535j.C1.p20.fg
MATVSAANSASNISASINSIPVLTGANFKEWKENVLIVLGVMDLDLALRKEQPILSDKSTKDENMEHERWDRSNRMSLMIMKRSIPEAFRDSTSEEVTTAKVFLETLQKRFARNEKAETSTLLAKLISMRYKGKGNMREYIMEMSHLASKLKALKLDLSEDLLMHLILISLPTQFNQFKVSYNCQKDKWTVNKLISHCVQEEERLKQDRIESAHLSMTSNNKKRKSKEAVDVQPPLKKRENNCGEEPCYFCKKEGHMKKNCTKYHAWRAKKGETDEYKEIKCPKSYRCLRTDSYRYLWAIPYGFLEWSTIFYHVHRRFLKIWQLTTMATVSGDGWWKKQLEAGLGMGARRLTMEMFGGSTRPRLFSGWEWRRRLVAEAGLGMRAAAGARLAAGAVAGGGGQGGEAVIRTFSILIIRE

SEQ ID NO: 18980 - protein, 552 aa, Oryza sativa
  Clone ID: TF_OSC10744j.C1.p11.fg
MAPAQPAPPAQAKETGAKPGPCYNCGEHGHFADKCPKPCRAGPRFVLARVNHASAEEAQTAPEVVLDLDVIRGMDWLTMFKGVIDCVNRTVTLVNEKGETVVYKSPASPKQGASLNLVEAKSSVTAEEKSSTKLEDIPIVYQYPEVFPEDLTTMPPKREIEFRIDFALGTAPIYKRPYRMAANELAEVKNQVDEQQQKRYIRPSTSPWGAPIIFVEKKDMTKRMFVDYRALNEVTIKNKYPLPRIDDLFDQLKGAKVFSKIDLRSGYHQLRIREEDIPKSGEEHEQHLRLVLEKLQEYQLYAKFSKCDFWLSEVKFLGHVITAQGVAVDPSNVEPVTKWTPPKTVTQIRSFHGLMGYYRRFIENFSRIARPMTQLLKKDEKFKWTAECDKSFEELKRKLVSAQEELLQRLGFEDMSVKLQQELEHLNLGIVEHRYVAALKARPTLVDQVRAPQVNDPEIAELKKNMRFGKARDFHEDEHGTIWLGERFCVPEDKELKDLILTEAHQTQYSIHPGSTKMYQDLKEKFWWASMRREMAEFVAVCDVCQRVKAEH

SEQ ID NO: 18981 - protein, 1093 aa, Oryza sativa
  Clone ID: TF_OSC31822j.C1.p2.fg
MWDALEAKFGVLDAGSELYVMEQFCDYKMMLAKELENNNCELPDKFVAGGIIAKLPPSWLDFATSLKHKRQEFSVSDLIGSLGVEEKARIKDNRSKKVEGGSSANMVQKKNPHASHNNKKVKPDVKPKATTNFKKKGKGKAKGDYFVCGKSGHWAKDCPERKDRKSTNMVISEEGGGTSGYGKLLPTVLSVFHSPDWWVDTGANIHVGRGSFLLMGNGSLAAVHGVGTVDLKFTSGKAVQLKNVQHVPSIKKNLVSGSLLCREGFRLVFESNKCVVSKYGTFIRKGYDNGGLFCFSLDDMCNNNNVVNHISENDESNVWHSRLCHVNFGCMMRLANMSLIQKFTLVKGSKCHTCVQSKQPHKPHKASEARDLAPLELVHSDLCEMNGMLTKGGKKYFMTLIDDCTRFCYVYLLKTKDEALHYFKTYKAEVENQLERKIKRLRSNRGGEYFSNEFTSFCEEFGIIHERTPPYSPQSNGVAKRNNCTLTEMVNAMLDTAGHFKEWWGEAVLIACHVLNKIPMKHKEVNVPIAKKHKLGPNTVDCVFLGYAIHSVGYRFLIVNSGVPDMRVGTIIESRDATFFENEFPMKNTPSTSSQETVIPHEHFAPIEHNDQTLEGNPEEDKIVDTRKSKRQRVAKSFGDDYIVYLVDDTPRTIEEAYSSPDADYWKEAVRSEMDSIMSNGTWEVFERPYGCKPVGCKWVFKKKLRPDGTIEKYKARLVAKGYTQKEGEDFFDTYSLVARLTTIRVLLALAASHGLLVHQMDVKIAFLNGELEEEIYMDQPDGYVLEGQEGMVCKLLKSLYGLKQAPKQRHEKFDTTLTFAGFVVNEADKCVYYRYGGGEGVILCLYVDDILIFGTSLNVIEEVKDFLSKSFEMKDLGEADVILNIKLLRGDEGGITLVQSHYVDKALKRVMRYLKGTELWALSYGIHYTGYPKVLEGYSDSNWISDANEIKATSGYVFTLGGGAVSWKSCKKTILTRSTMEAELTALDTATVEAEWLRELLMDLPVVEKPVPAILINCDNQTVIIKVNSSKDNMKSSRHIKRRLKSVRKQKNSGVIALDYVQTAKNLADQFTKGLPRNVIDSASREMGLIPT

SEQ ID NO: 18982 - protein, 1649 aa, Oryza sativa
  Clone ID: TF_OSC400722j.C1.p47.fg
MKALVSSSCLPSSACGSRPSLPLFLVCLCVCWAFAAHMAGSVSRRGLDMTGFVLELRGMCVVLGYPPGVDYQARPLPEQEGDDAEPHAAWEVTAVILTGSPERTSLAVTAGGDSFPAACQNAALLAIGTLHQRYPDELQHSPYRYHPRCGGARDFATFRDASSEDDATIVHLARMVEAYDAARIDFQQMVRRGMVENNMKILELRQENLQLKKDLHALEAQLCQLKVAQGEMVMTRRSANTGDGNQPEGSNHNNHGSPPPPPPPPPPPPPDTNAILTQILAQQANMMTAFLHHLQNPPQHNAPPPPPQHSKLAEFLRIRPPTFSSSNNPVDALDWLHAVGKKLDTVQCSDEEKVVFAAHQLQGPASLWWDHLQATQPERQPITWARFTADFRRTHVPAGVVALKKREFRELKQGNRSDVREDEEKQEKFLAGMDPELSVRLVSGDYPDFQRLVDKSIRLEAKHKELESHKRRLANFRNQQGANQRVRYTNPYPGGSSSQQQQQQQQPRSAPRPQFVVRVPQPQQQQNQQGTRAPRPPTPTVQPGQGRRDAQGPQRLCFNCYEPGHFADKCPKPRRQQGKAPPRSNNGGNDVIRGRVNHVTAENVLTTPDVIVGTFLIHSIPATILFDSGASHSFISVPFVGRNQLGVERLRNPLLITTPGVVMTAKYYSPAVPIEIQGIPFPSDLILLDTKNLDVILGMNWLAQFQGVVDCARRTVTLYRGPEQPVVFFAPPTSVSSSELHQIGLSEIPIVREFGDVFPEELLGMPPKREIEFRIDLAPGTTPLYKRPYRMAANELAEVKKQLEELKGKGYIRPSTSPRGAPVIFVEKKDKTKRMCVDYRTLNEVTIKNKYPLPRIDDLFDQLKGATVFSKIDLRSGYHQLRIREEDIPKTAFTTRYGLNCEFWLSEVKFLGHMISAKGAAVDPETVTAVTDWKQPKTVTQIRSFLGLAGYYRRFIENFSQIARPMTQLLKKEEKFVWSPQCEKAFQTLKEMLVSSPVLVLPDTRKDFMVYCDASRQGLRCVLMQEGHVVAYASRQLRPHEGNYPTHDLELAAVVHALKIWRHYLIGNRCEIYTDHKSLKYIFTQSDLNLRQRRWLELIKDYDVGIHYHPGRANVVANALSRKSHCNTLNIRGIPPELNQQMAALKLSIVSRGFLAALEAKPTLLDQIREAQKNDPDMHGLLKNMKQGKAAGFTEDEHGTLWNGNRVCVPDNRELKQLILQEAHESPYSIHPGSTKMYLDLKEKYWWVSMKREIAEFVALCDVCQRVKAEHQRPAGLLQPLQVPEWKWDEIGMDFITGLPKTQGGYDSIWVVVDRLTKVARFIPVKTTYGGNKLAELYFARIVSLHGVPKKIVSDWGSQFTSHFWKKLQEELGTRLNFSTAYHPQTDGQTECLNQILEDMLRACVLDFGKTWDKSLPYAEFSYNNSYQASIQMAPYEALYGRKCRTPLLWDQVGESQVFGTDILREAEAKVRTIRDNLKVAQSRQKSYAYNRRRDLEFAMDDFVYLRVTPLRGVHRFQTKGKLAPRFVGPFRIIARRGEVAYQLELPASLGNVHDVFHVSQLKKCLRVPSEQADSEQIEVREDLTYVERPVKILDTMERRTRNRVIRFCKVQWSNHAEEEATWEREDELKAAHPDLFASSSESRGRDSV

SEQ ID NO: 18983 - protein, 2280 aa, Oryza sativa
  Clone ID: TF_OSC401013j.C1.p3.fg
MVNTEGTEEQRKAEEDAALQAGKKESVAGESSFFTKGMMGLRSGIGPSEIKLEVMPNEVRLEGTKNYLSWSRRARLMLRAKGVEHYLEETCVEPIDKSSVEWKMWNATNSTVVAWLMTSVSPSIARMIEAIQNATIIWKTLSNMYSGEGNVMMMVEAQDKVDNLKQEGRTVQEYASELQHLWADLDHYNPLQLKHDDDIVIGNKWLQRRRVIHFLKGLNKEFEDRRAAMFHQATLPNMEEAISAMVQEEMRQKVMKGSNPVRSAYITINDRECYNCGLKGHVSYNCPSPRNNNGRGVARGGARGGYGGFNGSRGGYGGYVGDRGGRGGERGGRGGSRGRGLGGPRANVVMGESSSITLTGEQAAQWEEWQKNKGPVDSNQQNSAKATTSHFGNFANYAHTGEGTQAHALASTYRHHVDWIIDSGASKHVTGLPNNFSSYSPIAPSETIQIADGSSQLIHGIGSVECTPSISLSSVLHVPSFLVNLLSVSSIIDQFKCIVIFDENSCLFQEKGTGRRIGTGVRRNGLWYINQEEMGLAVVVGDTEKEIILLHCQLGHPSFESLSKLYPDLFTKVDKSRLVCDACEFGKHTRSTYAGIGLRSCEPFILIHSDVWGPCPVTSVSGFKWFVTFIDCYTRMTWIYMLRHKNEVLRCFQDFHKLVTNQFDARVRIIRIDNGTEYINSEFVSYVSDHGIIHQTTCPGAPPQNGVAERKNRHLLEVARSLMFQMNVPKYLWSEAVMTAAYLINRMPSRILGMKSPAELLLGKREFKVPPKVFGCVCFVRDHRPFVGKLDPHAVKCVFVGYASNQKGYKCWDPIGKRLFVSMDVTFREFEPYYRSRGDLDQFLEEFSTVIEIDSRVGEIVEVDAHKQGDEDVVIGSIPSFVGDTIEKVVDIGEKVVDISCDKDEGVVVGTIPCPLERVEVQQTEMRVYQRRNKNQVDKVTGKEQVHQRSQIQNQGERSGEPMQEQDKESQQLQQFEYPVPDSSSSLSPTSSSLLETSVPIPKDWRCAKQDPRWKDAMKEELRALEKNKTWELVKLPMGKRAVGCKWVFTVKQTPEGKVDRYKARLVAKGYSQTYGIDYDETFAPVAKMSTMSRMLFYMVIYKRRFRRVLCNMGYSQCNGDHTVFYRHRGTHITILAVYVDDIVITGDDVEEIKCLKQRLGEAFEVKDLGPLRYFLGIEVARSSKGIVLSQRKYVLDLLTETGMLGCRTSATPIDRNHQLSAQSGDPVDRETYQRLVGRLIYLCHTRPDISYAVSVVSRYMHDPRTTHLEVVHRILRYLKGTPGKGLWFRKNQHLDVEGYCDADWASSVDDRRSTSGYCVFVGGNVVCWRSKKQAVVARSTAEAEYRAMALSLSEMLWVKNLLLELRLFRNNTVVLHCDNKSAINIANNPVQHDRTKHIEIDRFFIKEKIDSGALRLQYIKSSEQLADCLTKGLGPSERDECMITDYAITKISNMYSSLTEDKLISSFFTCDDSPSESSIGSPLKLCQICEATKANRRTQKKGDFFNPRCNSYLKPTVERTYIDLARITYYKLESLHTNARVVFQNVVNFASESACFTTLSTCILFQAQCFLSEDEGGSGPFRKPLCIALQAPGLSQYGPTGEEAAHETDSNKAQKSTCRSDLLTGEMPRVQTSRLGKNPIEVDSDGGEDFHVDYEVGNDVDEGPEHGEIDGLLSVVLRKMIVQEVKKNLVDTSSVNFHNPIDKKSKVHSKTEPSYSRFSTKYFSTVLSSLSPDQKRIIGDYGFNSLLMFDNAYVPNKFASWIANHVDVKSSQIVLKDKVIAINKECVHHILGLPIGGMEFPTDCDAGKSFILSKFGKSALPSVRFFGDMFIRKETLSDDEVITSFLIVAMACFLCPNSSLVPSTKYLTVFENVDELRSYDWSKFVYEWMMTSIKKIQKFNTLGGCWFLWAVLYLDYVEFGDKNVPIGFPRISHWKNNMITLYSDLDKVDEENFGLRPIKDFNDTTYFKVVPPENRINTFRDKLESAIGTMLPAFIKEKIYSMVVSHCSANHIVDSESCEDIAISIMLLLCEHAGSRDGGDPDENLIFDDINPGFQPNYAIDVENEIPCDAHNNGSTNKSVASKANETSFRHTPSHDKELGVNDDSVIVSKSAVRFSLSPNFKKDQGLLTPEVGYANNSNSRFEHSRSASGPTVSAVAAVRNVANKIKSRLSQLNNDDKRGPLFPDLIDSCEDEAVGYAKSLSCQKEYLNPRYVTSSSSQPGISFHCLDNSPVQVIGINNNEGTSRTHCIQNVKKRRFDDVTNSPDVEYLGHSTFPDCCK

SEQ ID NO: 18984 - protein, 1650 aa, Oryza sativa
  Clone ID: TF_OSC401018j.C1.p18.gm
MVMPMVTTRRNAATDDGNQPEGSNHNNHGSPPPPPPPPPPPPPDTNAILTQILAQQANMMTAFLHHLQNPPQHNAPPPPPQHSKLAEFLRIRPPTFSNSNNPVDALDWLHAVGKKQDTVQCSDEEKVIFAAHQLQGPASLWWDHFQATQPEGQPITWARFTAAFRRTHVPAGVVALKKREFRELKQGNHSVMEYLHEFNNLARYAPEDVREDEEKQEKFLAGMDPELSVRLVSGDYPDFQRLVDKSIRLEAKHKELESHKRRLANFRNQQGANQRVHYTNPYPGGSSSQQQQQQQQPRSAPRPQFVVRVPQPQQQQNQQGTRAPRPPTLAVQPGQGRRDAQGQQRLCFNCYEPGHFADKCPKPRRQQGQAPPRSNNGGKDVIRGRVNHVTAEDVLTTPDVIVGTFLIHSIPATILFDSGASHSFISVPFVGRNQLRVERLRNPLLITTPGGVMTAKYYSPAVPIEIQGIPFPSDLILLDTKNLDVILGMNWLAQFQGVVIGLSEIPIVREFGDVFPEELLGMLPKREIEFRIDLAPGTTPLYKRPYRMAANELAEVKKQLEELKEKGYIRPSTSPWGAPVIFVEKKDKTKRMCIDYRALNEVTIKNKYPLPRIDDLFDQLKGATVFSKIDLRSGYHQLRIREEDIPKTAFTTRYGLYEFTVMSFGLTNAPAFFMNLMNKVFMEYLDKFVVVFIDDILIYSQSEEDHQHHLRLVLGKLREHQLYAKLSKCEFWLSEVTFLGHVISAKGVAVDPETVTAVTDWKQPKTVTQVRSFLGLAGYYRRFIENFSKIARPMTQLLKKEEKFVWSPQCEKAFKTLEEKLVASPVLILPDTRKDFMVYCDASRQGLGCVLMQDGHVVAYASRQLRPHEGNYPTHDLELAAVVHALKIWRHYLIGNRCEIYTDHKSLKYIFTQSDLNLRQRRLLELIKDYDVGIHYHLGKANVVADALSRKSHCNTLNVCGIPPEPNQQMEALNLSIVSRGFLATLEAKPTLLDQIREAQKNDPDMHGLLKNMKQGKAASFTEDEHGTLWNGNREKYWWVSMKREIAEFVALCDVCQCVKAEHQRPAGLLQPLQVPEWKWDEIGMDFITGLPKTQGGHDSIWVVVDRLTKVARFIPVKTTYGGNKLAELYFARIVSLHGVPKKIVSDRGSQFTSHFWKKLQEELGTRLNFSTAYHPQTDGQTERLNQILEDMLCACVLDFGKTWDKSLPYAEFSYNNSYQASIQMAPYEALYGRKCRTPLLWDQVGESQVFGTDILREAEAKVRTIWDNLKVAQSRQKSYENNRRRDLEFAVGDFVYLRVTPLRGVHRFQTKEKLAPRYVGPFRIIARRGEVAYQLELPASLGNVHDVFHVSQLKKCLRVPSEQADSDQIEVCEDLTYVERPVKILDTMERRTRNRVIRFCKVQWSNHAEEEATWEREDELKAAHPDLFARPPPATIGARARRLPSAVSARPPSGAPRGCQVGPGRQPPAPSAPRPFKDRSSGLCCKALPYFHMSSGANEGYTSCGPVVEMSWHRAGVLLLGAQSCLPVPGVPAVGGIGWTIVAATNLVESGSHESCQSAIRERSRISKLRRILADLVHPSVSVADRRSTVDPVHPSRAAAFLRSGRRFRRRHRPGGRGRAASRRCAGVVAFGRTERVPRGGPLSAGPRP

SEQ ID NO: 18985 - protein, 663 aa, Oryza sativa
  Clone ID: TF_OSC401145j.C1.p2.fg
MTGFVLELRGMCVVLGYPHGVDYQARPLPEQEGEDAEPHAGWEVTAVILSGSPERTSLAVTAGGDSFPAACQNAALLAIGTLHQRYPDELQHSPYRYHPRRGGARDYATFRDASSEDDATVVHLARMVEAYDAARIDFHQMVRRGMVENNMKILELRQENLQLKKDLDALEAQLHQLKIAQGEDSRPKRRRVCRSQKITARKSTSRPELVRQSLAWTCFVETPRAEPAPVVPQEGEASGVGSSEAPSLFAGSGWGFQMVTTRRNVNTGEGNQPEGSNPNHQGNPPPPPPPDTNAILTQILAQQANLMNAFLHHLQNPPQQNAPPPPPQHSKLAEFLRIRPPTFSSSNNPVDALDWLHAVGKKLDTVQCSDEEKVTFAAHQLQGPASLWWDHFQATQPEGQPITWTRFTAAFRRTHVPAGVVALKKREFRELKQGNRSVMEYLHEFNNLARYAPEDVREDEEKQEKFLAGMDPELSVRLVSGDYPDFQRLVDKSIRLEAKHKELESHKRRLANFRNQQGANQRVRYTNPYPGGSSSQQQQQQQPRPAPRPQFVVRVPQQQQQQNQQGTRAPRPPTPTVQPVQGRRDASGPQRLCFNCFEPGHFADKCPEPRRQQGQAPPRSNNGGKDVIRGRVNHVTAEDVLTTPDVIVGRSCGSLCLTPATTS

SEQ ID NO: 18986 - protein, 772 aa, Oryza sativa
  Clone ID: TF_OSC401769j.C1.p8.gm
MARLELEPPEVVRQELEPRRAILPGAGAAGGGAPGAGAGAVNNNINGGNSASQSSGGPFSGVLADNIVDVYMHMPSGKDMWDALEAKFGVSDAGSELYVMEQFYDYKIVDDRSVVEQAHEIQMLANELENNNCELPDKFVASGIIAKLPPSWSDFATSVKHKRQEFSVSDLIGSMGVEEKAMAKDVRGKKVEGGSSANMVQKKNPHASHNNKKVKPNVKPKAATNFKKKGKGKAKGDYFVCGKSGHWAKDCPERKDRKSANMVISEGGGTSGDATFFENEFPMKHTPSTSSQETVMPHEHFAPIEHNDQMPEENPEEDNIVDTRKSKRQRVAKSFGDDYIVYLVDDTPRTIEEAYSSPDADYWKEAVRSEMDSIMSNGTWEVVERPYGCKPVGCKWVFKKKLRPNGTIEKYKARLVAKGYTQKEGEDFFDTYSPVARLTTIRVLLALAASHGLLVHQMDVKTAFLNGELEEEIYMDQPDGYVLEGFVVNEADKCVYYRYGGGEGVILCLYVDDILIFGTSLNVIEEVKDYLSKSFEMKDLGEADVILNIKLQREDEGGITLVQSHYVDKVLSRFGYSDCKLAPTPYDPSVLLRKNRRIARDQLRYSQIIGSLMYLASATRPDISFAVSKLSRFVSNPGDDHWQALERVMRYLKGTMSYGIHYTGYPKVLEGYSDSNWISDADEIKATSGYVFTLGGGAVFWKSCKQTILTRSTMEAELTALDTATVEAEWLRELLMDLPDGSCLNVIRVAFPSRDVDLQNISEGTHLYEFDC

SEQ ID NO: 18987 - protein, 2062 aa, Oryza sativa
  Clone ID: TF_OSC403382j.C1.p1.fg
MYSEEGNVMMMVEAQDKVENLKQEGRTVQEYASELQHLWADLDHYDPLQLKHDDDIVIGNKWLQRRRVIHFLKGLNKEFEDRRAAMFHQATLPNMEEAISAMVQEEMRQKVMKGSNPVRSAYITINDRECYNCGLKGHVSYNCPSPRNNNGRGVARGGARGGFGGFNGSRGGYGGYVGDRGGRGGERGGRGGSRGRGLGGPRANVVMGESSSITLTGEQAAQWEEWQKNKGPVDSNQQNSAKATTSHFGNFANYAHTGEGTQAHALASTYRHHVDWIIDSGASKHVTGLPNNFSSYSPIAPSETIQIADGSSQLIHGIGSVECTPSISLSSVLHVPSFPVNLLSVSSIIDQFKCIVIFDENSCLFQEKGTGRRIGTGVRRNGLWYINQEEMGLAVVVGDTEKEIILLHCQLGHPSFESLSKLYPDLFTKVDKSRLVCDACEFGKHTRSTYAGIGLRSCEPFILIHSDVWGPCPVTSVSGFEWFVTFIDCYTRMTWIYMLRHKNEVIRCFQDFHKLVTNQFDARVRIIRTDNGTEYINSEFVSYVSDHGIIHQTTCPGAPPQNGVAERKNRHLLEVARSLMFQMNVPKYLWSEAVMTAAYLINRMPSRILGMKSPAELLLGKREFKVPPKVFGCVCFVRDHRPFVGKLDPHAVKCVFVGYASNQKEEFSTVIEIDSREGEIVEVDAHKQGDEDVVIGSIPSFVGDTIEKVVDIGEKVVDISCDKDEGVVVGTIPCPLERVEVQQTKMRVYQRRNKNQVDKVTGKEQVHQRSQIQNQGERSGEPMQEQDKESQQLQQFEYPVPDSSSSLSPTSSSLLETSGNISPTFKQVELPLAQRRETRSNAGRPPIRLGFEHLSSRHDIANYISYSHISPAYKAFIASLQIVPIPKDWRCAKQDPRWKDAMKEELRALEKNKTWELVKLPMGKRAVGCKWVFTVKQTPEGKVDRYKARLVAKGYSQTYGIDYDETFAPVAKMSTVRILISCAVNFGWPLHQLDVKNAFLHGDLQEEVYMEIPPGFGNSQTVGKVCRLKKSLYGLKQSPRAWFDRFRRALCNMGYSQCNGDHTVFYRHRGAHITILAVYVDDIVITRDDVEEIKCLKQRLGEAFEVKDLGPLRYFLGIEVARSSKGIVLSQRKYVLDLLTETGMLGCRTSATPIDRNHQLSAQSGDPVDRETYQRLVGRLIYLCHTRPDISYAVSVVSRYMHDPRTTHLEVVHRILRYLKGTPGKGLWFRKNQHLDVEGYCDADWASSVDDRRSTSGYCVFVGGNVVCWRSKKQAVVARSTTEAEYRAMALSLSEMLWVKNLLLELRLFRNNTVVLHCDNKSAINIANNPVQHDRTKHIEIDRFFIKEKIDNGALRLQYIKSSEQLADCLTKGLGPSEKKIPKTELYYLRIVKGYFQELSLSNIISRFYHLRILDVRQCSGHFNLPSDMSNLIKLRHFLDPNDSFHSAIANVGKLKCLQELKRFEVKGQAEAFALRQIGQLEELKGSLCIYNLENAQTGEEANLLNKRHLHKLELLGIPQLAKWVGNDASHVFSLLEVFIIRDCPELMELPFSHSTCPRSGQEMNLTQFPTLRELEVVNCPKLSSFPHIPWTSSPCRVLIDEVGSDFQRLDYSKNNQSEFCLKVVGKDGHLDMSFWNVLAFSNLTELKVLYLKKCPPLPLKHLLVLSCLRSPTIHDSSNVLLNVEAENTVGYQFQIEGLSIDDCSCSGKELTLLLSLFPKLSMFSLQGCGKIRVLGVAKEQTMAMSALSSSPSGHKLEDAHIGQEQEQEQLRGEDEKAAADAGLLLLPHQLQDLYIENISKLILQFDSLVDGMAGGLRSIGGGLQGLHFLRTLTIRGCPNFLSSYYSSSSSSCFPFPSSLQYLHLDGVGGMETLAPLSNLSSLTRLTIRKCMDLRGEDLSSLLAHGQLTNLNIFETPKFFVGCGSDSLRLQCLQTDDITKVLAAPICSLLASSLTSLTISWNDEVERFTKEQSAALLLLSSLQDLEFWYCSELQSLPTGLHRLTSLKRLKIWSCPAIRSLPKGGLPSSLEVLDVRSSNNEELKRQCRDLRGTIPIIKDRRYY

SEQ ID NO: 18988 - protein, 1637 aa, Oryza sativa
  Clone ID: TF_OSC420787j.C1.p26.fg
MVHCFELCYAEGIVTISIRWYISGQSKTIQIAVPAVMAGLTMSFVISFTPLTIINDVVLGNNLFSSWFGTMPRFKPEYLFSTEGFVQELRTMSFAIGFGTAPLYAQIPHDRDEEKCRVKITLNSNREDIPSVARIAIGELRDRYNDQLADTEYRYHPRQPQGSDFGSYLEPAGIENDATTRHLVEMLWAMDESRAEVVIAAQDRENRNRGKICKLEDKVVRLEKELAALKGEAPPQKARVRLTARKRALFVPRYQLAPKVRVVEEEAVPVPANPPIVNMVLTRSNGNGPNNNNHNNNNGENPTLAQVLAQQAQLMNMMMQQLQNQQNQGNNHAPPQNKLAEFLRVRPPTFSSTTNPVEASDWLHAIEKKLDLLQCTDQEKVSFASHQLHGPTSEWWDHFRLNRTTAEPITWLEFTAAFRKSHIPSGVLSLKKKEFRKLTQGSRSITEYLHEFNRLACYAPEDVRTDEERQEKFLEGLNDELSYPLMTGDYHDFQKLVDKAIHQEDKYNRMEQKKRRIAHFKAQQGNSQRPRLAMGPQAVSQGGSSSVVRPQRQFFNNNAGNNNHNQAPRPVATPTQHQPAKREQGNKPGVCFNCGEPGHYSDKCLKPRRVKVVPAQNNSTTPASKSRVNHVAAAEAQGAPEVILGMFPVNSVPATVLFDSGTTHSILSMSFAGNHGMEIEDLRRPLMISTPSNQALSSQRSPSVRIEIQGVPFLANLILLESKYLEVILGMDWLARYKGVIDCANRKVTLTSNDGQVVTVHALPSEPLRSSLNQITLEEIPILRDYPDVFPDDLPGMPPKRDIEFRIDLVPGTTPIHKRPYRMAANELAEVKRQVDDLLQKGYIRPSSSPWGAPVIFVEKKDHTQRMCMDYRALNDVTIKNKYPLPRIDDLFDQLKGATVFSKIDLRSGYHQLRIKEEDIPKTAFTTRYGLFECTVMSFGLTNAPAFFMNLMNKVFMEYLDKFVVVFIDDILIYYRTKEEHEEHLRLALEKLREHQLYAKFSKCEFWLSEVKFLGHVISAGGVAVDPSNVESVTNWKQPKTVSKIRSFLGLAGYYRRFIENFSKIAKPMTRLLQKDVKYKWSEECEHCFQELKNRLLSAPILILPDPKKGLQVYCDASKLGLGCVLMQDGNVVAYASRQLRPHEKNYPTHDLELAAVVHALKIWCHYLFGTRTEVYTDHKSLKYIFTKPDLNMRQWRWLELIKDYDMRIHYHPGKVNVVADALSRKGYCNATEGRQLPWELCKEFERLNLGIVSRGFVAALEAKPTLIDQVREAQINDPDIQEIKKNMRRGKAIGYLEDEQGTVWLGERICVPENKELKDAILKEAHDTLYSIHPGSTKMYQDLKEKCWWAIKAEHQKPAGLLQPLKIPKWRWEEIGMDFITGLPTTSSGHDSIWVIVDRLTKVAHFISVRTTYSGSRLAELYMARIVCLHGVPKKIVSDRGSQFTSKFWKKLQEEMGSKLNFTTAYHPQTDRQTERVNQILEDMLRACALDFGGSWDKNLPYAEFSYNNSCQARLQMAPYEALYGRKCRTPLSWDQTGERQVFGTDILREAEEKLKKCLRVPTEEASLEQIEIQEDLTYVEKPIRILETDERRTRNRVMRFCKVQWSNHLEEEATWEREDELKSAHPHLFASSSQS

SEQ ID NO: 18989 - protein, 2013 aa, Oryza sativa
  unsure (1)..(2013): unsure at all Xaa locations
  Clone ID: TF_OSC874j.C1.p1.np
MEPESAAPVSFPSGRPLPLPTLYKPSPHLLRSFPPLAALPPRRNRACAVALSLRRRRRAPVRRRRRPGPPPTSAPPPSASPHPRRPRPPLRFARRPPERPRPRRPEPRRRLPPLRPPFSSPSTXGEPWTTASFPPFPPFSRPPLRRAYGRRRRPXGRARAASRRPRRRGRLRVHRAAAAWGPVVSRPRPRVRLTRGAHGAGRASPGAPGPPWTRLGHIRTGLRASVAKHYRFHMSSGTNEGYTSCGPVVEMSWHRAGVLLQGAQSCLPVPGVPAVGGIGSMYTSDQSIIYSNSRALGYGQAEQCTQMASSINRRGLDLTGFVLELRGMCVVLGYPHGVDYQGKQLPEQEGDDAEPHAAWEVTAVILTGSPERTSLAVTAGGDSFSAACQNAALLAIGTLHQRYPDELQHSPYRYHPRRGGARDYATFRDASSEDDATIMHLARMVEAYDVARIDFHQMVRRGLVENNMKILELRQENLQLKKDLDAVEAQLHQLKIAQGEVYRPKRRRVCRSLKITARKSTSRPELVRQSLAWTCFVETPRAEPAPVVPQEDGASGVGSTEDALLLTFHGETRRSAATGEGSHLEGSNHNNHGSPPPPPPPPPPPPPDTNAILTQILAQQANMMTGFLHHIQNPPQHNAPPPPPQHSKLAEFLRIRPPTFSSSNNPVDALDWLHAVGKKLDTVQCSDEEKVIFAAHQLQGPASIWRDHFQATQPEGQPITWARFTVAFRRTHVPAGVMALKKREFREMKQGNRSVMEYLHEFNNLARYAPEDVREDEEKQEKFLAGMDPELSVRLVSGDYPDFQRLVDKSIRLEAKHKELESHKRRLANFRNQQGANQRVRYTNPYPGGSSSQQQQQQQPRSAPRPQFVVRVPXPQQQQSQQGTRAPRPPMPAVQPGQGRRDVQGQQRLCFNCFKPGHFADKCPKPRRQQGQAHPRSNNGGKDVIRGRVNHVTAEDVLTTPDVIVGTFLIHSIPATILFDSGASHSFISVPFVGRNQLGVERLRNPLLITTPGGVMTAKYYSPAVPIEIQGIPFPSDLILLDTKNLDVILGMNWLAQFQCVVDCARCTVTLYRGTEQPVVFFAPPTSVGSSELHQIRLSEIPIVREFGDVFPEELPGMPPKREIEFRIDLALGTTPLYKRPYRMAANELAKVKKQLEELKEKGYIRPSTSPWGAPVIFVEKKDKTKRMCVDYRALNEVTIKNKYPLPRIDDLFDQLKGATVFSKIDLRSRYHQLRIREEDIPKTAFTTRYGLYDFTVMSFGLTNARAFFMNLMNKVFMEYLDKFVVVFIDDILVYSQSEDDHQHHLRLVLGKLREHQLYAKLSKCEFWLSEVKFLGHVISAKGVAVDPEIVTAVTDWKQPKTVTQIRSFLGLAGYYQRFIENFSKIARPMTQLLKKEEKFVWSPQCEKAFQTLKERLVSSPVLILPDTHKDFMVYCDASRQGLGCVLMQEGHVVAYASRQLRPHEGNYPTHDLELAAVVHALKIWRHYLIGNSCEIYTDHKSLKYIFTQSDLNLRQRRWLELIKDYDVGIHYHPGKANVVADALSRKSHCNTLGVRGIPPELNQQMEALNLSIVGRGFLATLEAKPTLLDQIREAQKNDPDIRGLLKNMKQGKAAGFTEDEHGTLWNGNRRVKAEHQRPAGLLQPLQVPEWKWDEIGMDFITGLPKTQGGYDSIWVVVDRLTKVARFIPVKTTCGGNKLADLYFARIVSLHGIPKKIVSDRGSQFTSHFWKKLQEELGTRLNFSTAYHPQTDGQTELNQILEDMLRACVLDFGKTWDKSLPYAEFSYNNSYQASIQMAPYEALYGRKCRTPLLWDQVGESQVFGTDILREAEAKVKTIRDNLKVAQSRQKSYADNRRRNLEFAVDDFVYLRVTPLRGVHRFQTKGKLAPRFVGPFRIIARRGEVAYQLELPASLGNVHDVFHVSQLKKCLRVPSEQADSEQIEVREDLTYEERPVKILDTMERRTRNRVIRFCKVQWSNHAEEEATWERQDELKAAYPDLFASSSESRGRDSV

SEQ ID NO: 18990 - protein, 761 aa, Oryza sativa
  Clone ID: TF_OSC874j.C1.p2.gm
MPMAAAGDRRGARAPPPAGRAAVAAFGRTERLPRGAWPSAARALGDVQGQQRLCFNCFKPGHFADKCPKPRRQQGQAHPRSNNGGKDVIRGRVNHVTAEDVLTTPDVIVGTFLIHSIPATILFDSGASHSFISVPFVGRNQLGVERLRNPLLITTPGGVMTAKYYSPAVPIEIQGIPFPSDLILLDTKNLDVILGMNWLAQFQCVVDCARCTVTLYRGTEQPVVFFAPPTSVGSSELHQIRLSEIPIVREFGDVFPEELPGMPPKREIEFRIDLALGTTPLYKRPYRMAANELAKVKKQLEELKEKGYIRPSTSPWGAPVIFVEKKDKTKRMCVDYRALNEVTIKNKYPLPRIDDLFDQLKGATVFSKIDLRSRYHQLRIREEDIPKTAFTTRYGLYDFTVMSFGLTNARAFFMNLMNKVFMEYLDKFVVVFIDDILVYSQSEDDHQHHLRLVLGKLREHQLYAKLSKCEFWLSEVKFLGHVISAKGVAVDPEIVTAVTDWKQPKTVTQIRSFLGLAGYYQRFIENFSKIARPMTQLLKKEEKFVWSPQCEKAFQTLKERLVSSPEGHVVAYASRQLRPHEGNYPTHDLELAAVRRWLELIKDYDVGIHYHPGKANVVADALSRKSHCNTLGVRGIPPELNQQMEALNLSIVGRGFLATLEAKPTLLDQIREAQKNDPDIRGLLKNMKQDDRELKQLILQEAHESPYSIHPGSTKIVSRQSTNDRPDFSNLSKYQNGNGMKLGWISSPDFQKPKADMILYG

SEQ ID NO: 18991 - protein, 1822 aa, Oryza sativa
  unsure (1)..(1822): unsure at all Xaa locations
  Clone ID: TF_OSC900012j.C1.p13.np
TAGPTWQPRGAPEGGLAGTADGRRRTRAPMVAAGDQRRDGAAPERGEGRGKKQRSSAHPGTTRTAETTTGAEEGGGAVRIDEDGGAPTVGGRNGGADEVDEDAAKPMEVTPRREEVRGDDGGELKLGGDGGERGRRREHESDGESPFFPPSLLGRLGPLPSLSLLSPAAQSASSPPRAADGRARPPPSLTGGAHPHARKERPLVILAGSPERTSLTVTAGGDSFPAACQSAALLAIGTLHQRYPDELQHSPYRYHPRRGGARDYATFRDASSEDDATIMHLARMVEAYDAARIDFHQMVRHGMVENNMKILELRQENLQLKKDLDAVEAQLHQLKIAQGEVCRPKRRRVCRSQKITARKSTSRPELVRQSLAWTCFVETPRAEPAPVVPQEGEASGVGSTEDALLLTFRPGPSQQRNAATGDGNQPEGSNHNHQGSPPPPPPPPPPPPPPDTNAILTQILAQQANMMTAFLHHLQNPPQHNAPPPPPQHSKLAEFLRIRPPTFSSSNNPVDALDWLHAVGKKLDTVQCSDEEKVIFAANQLQGPASLWXDHFQATQPEGQPITWARFTAAFRRTHVPAGVVALKKREFRELKQGNRSVTEYLHEFNNLARYAPEDVREDEEKQEKFLVGMDPELSVRLVSGDYPDFQRLVDKSIRLEAKHKELESHKRRLANFRNQQGANQRVRYTNPYPGGSSSQQQQQQQQPRSAPRPQFVVRVPQPQQQQNQQGTRAPHPPTPTVQPGQGSRHAQGPQRLCFNCFEPGHFADKCPNPRRQQGQAPPRSNNGGKDVIRGRVNHVTAEDMLTTPDVIVGTFLIHSIPATILFDSGASHSFISVPFVGRNQLGVERLRNPLLITTPGGVMTAKYYSPAVPIEIQGIPFPSDLILLDTKNLDVILGMNWLAQFQGVVDCARRTVTLYRGPEQPVVFFAPPTSVSSSELHQIGLSEIPIVREFGDVFPEELPGMPPKREIEFRIDLAPGTTPLYKRPYRMAANELAEVKKQLEELKEKGYIRPSTSPWGAPVIFVEKKDKTKRMCVDYRALNEVTIKNKYPLPRIDDLFDQLKGATLFSKIDLRSGYHQLRIREEDIPKTAFTTRYGLYEFTVMSFGLTNAPAFFMNLMNKVFMEYLDKFVVVFIDDILVYSQSEEDHQHHLRLVLGKLREHQLYAKLSKCEFWLSEVKFLGHVISAKGVAVDPETVTAVTDWKQPKTVTQVRSFLGLAGYYRRFIENFSKIARPMTQLLKKEEKFVWSPQCEKAFKTLKEKLVASPVLILPDTRKDFMVYCDASRQGLGCVLMQDGHVVAYDSRQLRPQEGNYPTHDLELAAVVHALKIWRHYLIGNRCEIYTDHKSLKYIFTQSDLNLRQRRWLELIKDYDVGIHYHPGKANVVADALSRKSHCNTLNVRGIPPELSQQMEAPDTSIVGRGFLAAWREFTETLCDVCQRVKAEHQRPAGLLQPLQVPEWKWDEIGMDFITGLPKTQGGYDSIWVVVDRLTKVARFIPVKTTYGGNKLAELYFARIVSLHGVPKKIVSDRGSQFTSHFWKKLQEELGTRLNFSTAYHPQTDEQTERLNQILEDMLRACVLDFGKTXDKSLPYAEFSYNNSYQASIQMAPYEALYGRKCRTPLLWDQVGESQVFGTDILREAEAKVRTIRDNLKVAQSRQKSYADNRRRNLEFAVDDFVYLRVTPLRGVHRFQTKGKLAPRYVGPFRIVARRGEVAYQLELPASLGNVHDVFHVSQLKKCLRVPSEQADSEQIEVREDLTYMERPVKILDTMERRTRNRVIRFCKVQWSNHAEEEAIWEREDELKAAHPDLFASSSESRGRDSV

SEQ ID NO: 18992 - protein, 593 aa, Oryza sativa
  Clone ID: TF_OSC900040j.C1.p2.gm
MALPLSGGITSVSTGSLRNQLLGLSSLLLSEDVRTDEERQEKFLEGLNDELSYPLMTGDYHDFQKLVDKAIRQEDKYNLSQGGSSSVVRPQRQFFNNNAGNNNRNQAPRPVATPTQHQLAKREQGNKPGVCFNCGEPGHYSDKCLKPRRVKVVPAQNNSTAPASKARVNHVAAAEAQCAPDVILANELAEVKRQVDDLLQKGYIRPSSSPWGAPVIFVEKKDHTKRMCVDYRALNDVTIKNKYPLPRIDDLFDQLKGATVFSKIDLRGSCVEVWRHYLFGTHTEVYTDHKSLKYIFTQPDLNMRQRRWLELIKDYDMGIHYHPGKANVVADALSRKGYCNAMEVRQLPWELCKEFERLNMGIVSRGFVAALEAKPTLIDQVREAQINDPDIQEIKKNMRRGKAIGYLEDEQGTIWLGERICVPESKELKDAILKEAHDTLYSIHPGSTKMYQDLKEKFWWASMKREIADRAPPPLWSSSSLGKAAVGIAKSSPSSSRPPFPSKITGAPSSPLQLVAVAVRCRSPSFKPSIPTFPESPNLQEKTLKSSKASKAKTPDVTGRLLAGGGARKEMGLGSPEDGFARGVYVLALFLTC

SEQ ID NO: 18993 - protein, 962 aa, Oryza sativa
  Clone ID: TF_OSC100369j.C1.p14.fg
MDAEDWLRAIEKKLTLVRTNEQEKITFATHQLEGPANEWWEAYQASIEDPTHIITWMEFTTAFRDAFIPTAVIRMKKNEFRRLRQGFMTGQEYLNKFTQLARYTASDIQDEKEKIERFIEGLHDELQGSMISQDHENFQSLVNKVVRLENDRRMVEGLRKRRMNLQRQSPTRSSLQVRRPYPFKPSLPNPKPGMPPILPRPGLKMEDSPCYVCGNIGHFARLCPNRQNMGGQTSYQKPSTTGFIKKNPPIIKSGPNIRRGQVHHIKAEEAQQDPNILMDIYMRIPKEEVPVVQEYLDIFPEELSSLPLDREIEFIIELLPGTTPISKRSYRMPINELEELKKQIAELQEKGFIRPSSSPWGAPVLFVKKKDGSLRMCVDYRVLNEVTIKNKYPLPRIDDLFDQLKGASIFSKIDLRSGYHQLKIRQEDIPKTAFVIRYGLYEFTVMAFGLTNAPAYFMNLMNKIFMEYLDQFVVVFIDDILIYSKNEEEHKQHLRLVLEKLRQHQLYAKLSKCEFWLDQVAFLGHIITKEGVAVDPQKIKAVMEWKTPTSVSEIRSFLGLAGYYRRFIKDFSAIAKPMTRLLKKDMKFERTPECQSSFQRLKHKLTTTPVLILPNIQKDFEIYCDASRQGLGCVLMQEDLNLRQRRWLELIKDYNLEILYHPGKANVVDDALSRKAYCNLQQEIISEQLQAEMLKLNLGIIKYGELSTLELKPTLMDQIKEYHKEDSEIQTFKEWKVHGKAADITEDLEGILWYGNRIIVPQSGNLRKIILKEAHDSPYSLHPGSTKMYHDLKDLYWWPNMKQHIAEYVALCHVCQQVKAEHQKPIGLLQPLQIPEWKWDEIGMDFITGLPKTSTGYDSIWVIIDRLTKTARFIPVKTTYTGAQLAELYMTRIVCLHGVPKTIISDRGTQFTSHFWQKQHYELGSYLDFSTTFHPQTGGQTKRLNQTLEDIIRACALDFAAS

SEQ ID NO: 18994 - protein, 785 aa, Oryza sativa
  Clone ID: TF_OSC32874j.C1.p1.fg
MAGSVTRRGLHMTGFVLELRGMCVVLGPLPEQEGEDAEPHAGWEVTAVILSGSPERTSLAVTAGGDSFPAACQNAALLAIGTLHPRYPDELQHSPYRYHPRRGGARDYATFRDASSEDDATVVHLARMVEAYDAARIDFHQMVRRGMVENNLKILELRQENLQLKKDLDALEAQLHQLKIAQGEDSRPKRRRVCRSQKITARKSTSRPELVRQSLAWTCFVETPRAEPAPVVPQEGEASGVGSSEVVWGMVTPMVTTRRNVNTGEGNQPEGSNHNHQGNPPPPPPPPPPPPPDTNAILTQILAQQANMMTAFLHHLQNPPQQNAPPPPPQHSKLAEFLRIRPPTFSSSNNPVDALDWLHAVGKKLDTVQCSDEEKVVFAAHQLQGPASLWWDHFQATQPEGQPITWARFTAAFRRTHVPAGVVALKKREFRELKQGNRSVMEYLHEFNNLARYAPEDVREDEEKQEKFLAGLDPELSVRLVSGDYPDFQRLVDKSIRLEAKHKELESHKRRLANFRNQQGANQRVRYTNPYPGGSSSQQQQQQQQQQPRSAPRPQFVVRIPQPQQQQGQQGTRAPRPPTPAVQPVQGRRDAQGQQRLCFNCFEPGHFADKCPQPRRQQGQAPPRSNNGGKDVIRGRVNHVTAEDVLTTPDVIVEKKDKTKRMCVDYRALNEVTIKNKYPLPRIDDLFDQLKGATVFSKIDLRSGYHQLRIREEDIPKTAFTTRYGLYEFTSLWLYVMCASVSRQNTNDRPDFSNLSKCQNGSGMKLGWISSPAFQKPKVDMILYG

SEQ ID NO: 18995 - protein, 1322 aa, Oryza sativa
  Clone ID: TF_OSC400697j.C1.p7.fg
MSNEVNHVGKAPMFNGTNYSTWKIKMSTHLKAMSFHIWSIVDVGFAITGTPLTEIDHRYLQLNAQAMNALFNSLSQEEFDRVSNLETAYEIWNKLAEIHEVTSEYKDAKLHFLKIQYETFSMLPHESVNDMYGRLNVIVNDLKGLGVNYTDLEVAQKILGALPEKYETLVTMLINSDISRMTPASLLGKINTNDMYKLKKKEMEEASSPSKKCIALQAEVEDKGKGKVNEANEDLEEEIALLARRFNDLLGRRKERGRGSNSNRRRNSRPNKTLSNFRCFECGEKGHFASKCPSKDDDGDKSSKKKSGGYKLLKKLKKEGKKIEAFIGEWDSNEESSASSGSEEEGGDDASSKKKKMTVVAIKEAPSLFAPLCLMAKGSSKVTSLSDSESNNDCDDVSYDELVSMFEELHAYSEKEIVKFKTLKKDHASLEVLYKELKTSHERLTISHEKLKEAHDNLLFTTQHGAHIDVGISCDLLDDSTTCHIAHVASSSISTSCDDLVDMPSSSSCVSICDTSLVVENNELKEQVAKLNKSLERCFKGRLMMVALLLDMWVPLYSVVNYRTGGSHWVLDSGCTQHMTGDRAMFTTFEVGGKEQEKVTFGDNSKGKVIELVAKTSLGWLWHRRLAHVGMNQLSKLSKRDLVVGLKDVKFEKDKLCSACQAEAINTACHATNRLYLHRLLKKTFYELIVGRKPNVAYFRIFGCKCYIYRKGVRLTKFESRCDEGFLLGNASNSKAYRVYNKNKGIVEETADVQFDETNGSQEGHENLDDVGDEGLMRAMKNMSIGDVKPIEVEDKPSTSTQDEPSTSATPSQAQVEVEEEKAQDPPMPPSIHTALSMDHPIDQVLGDISKGVQTRSRVASICEHYSFVSCLEPKHIDEALFDPDWMNAMHEELNSFARNKVWTLVERPRDHNVIGTKWVFRNKQDENGLVVRNKARLVAQLKDGTFVSQTKYIKDLLKRFGLEDAKPIKTPMATNGHLDLDEGVMPPRTRHSRRAPTPDPMSEPEESSGEDYAQSDEEVEANVEGASEEASRDDVSDSGEDEDEQSDEMKIDPSIQFVVNMRNPSQYTILRHHDQFLRPRVTPDPRFHTVFQKTVYEQVYVGKAFAEYKWISWRDINETPEFKSLQDLFKTVGIDRIVTLKQDYNEDLIRQFYATVWVAGDYSDMKWMSDTLQCSISRRQFRRLLNIRLDFGHDLHEAHTHNPLSIDYLSQFYEDGARYTHGKVAGLRTIPSVVNRIVRATILPRLGNNDDIWGVAWHVIDAIIQGRQFDIVSFMMQEIAISKGTFTQGIYYAPYIMRLIKDKLGAAGQNLKKHKQYKPRL

SEQ ID NO: 18996 - protein, 639 aa, Oryza sativa
  Clone ID: TF_OSC401826j.C1.p26.fg
MARALLRITRSYCPLSPSPRLPPPLHHRGAAPPLRFRFLSLSSSSAPSSSAAATANSSDGPGEKGGGGGGWDDYLGMSDDELMGQCEMGTFKASGPGGQHRNKRESAVRLRHRPTGIIAQAVEDRSQHMNRASALSRLRTLIALKGFAITGSPLTEADHHNLQLNAQAMNALFNSLSQEEFDRVNNLETAYEIWNKLSEIHEGTSEYKDAKLHFLKIQYEAFAMMLNAIVNDLKGLEAIYSDIKVAQKMLWALSDKYEHLVTFVINSDMSRMTPEEIALLARMFNDLLGRNERGKGSNSNRRRNRRPNKTFSNFRCFECGEKGHFASKCPSKDDDGDKSSKKKSGGYKLMNKLQKERKKIKAFIGQWDSNEESSASSGFEAEDSDDDASSKKKKMAVVAIKEAPSLFASLYLMAKGSFKLVSMIMRSEKEIVKFKALKKDHASFEVLYEELKTSHERLTISQEKIKEAHDTLLSITQHGAHIDVGISCDLLDDSTTCHITHVASSSISTSCDDLMDMPNSSSCDSICDASLVVENNELKDAEQYAQSEKEEEEEVKGAEEEENDDGNDDGEDDEGPLDPSIQFVLNLRNPTQYTILRHHDQFRVPRDSDDPRFHTVSEGRIIECYEVDVRAYAVFYHSA

SEQ ID NO: 18997 - protein, 463 aa, Oryza sativa
  Clone ID: TF_OSC27819j.C1.p1.fg
MASRRRASTSNEEASTPDLTTLARVMATETQLLQAIANNQGNRGGSSFGEFMRTKPPTFATVDEPMEAEDWLRIIENKLTLVRGPAGDWWDTYKEAREEDDGEPTWEEFTAAFRENFVPTAVMRMKRNEFRRLRQGNTTVQEYLNRFTQLARYAIGDLADEEEKIDKFIEGLNDELRGPMIGQDQESFQSLINKVVRLENDQRTVEHNRKRRLSMNRLPQGVPQRLKEATSSGWKTPIVATNRPAAPSKFNRSVAIQNRTPTPTLAAPGAKKNVDCLNCGEYGHYANNCPHPHKTPVRTGANAMIVRGTTTPTTGRGLFKTPQTNRTATGFGRGQVNHVRAEEAQEDQGVLMGMFSVNSTPVKVLFDSGASHSFISLKASQKHNLTLVGLRKPMIVHSPGGEITGCGVSLQPYGFDTPDPGCCHAQKFPNRIPSRMCIKIPVQDQPGYTNDNVDIQIHVLQTS

SEQ ID NO: 18998 - protein, 664 aa, Oryza sativa
  unsure (1)..(664): unsure at all Xaa locations
  Clone ID: TF_OSC420879j.C1.p2.np
MGVPRLEGYVIELHRLMRHLRYPRFPIYRVRQCGSVWEARVEVHTRVPSESDYRFPTRHRHDLPETAMQDAAREAFLRLSSIHRAELVSTEFAHHLFREESNSVCTVQDTPCCYNPIVTLLSRWAEAVDDFYEEALLEIDDQQRHMGELETEVTDLTVQQLQLEEEHQAWGSEIDSLKAQLQLGSSLETPIQVDSETEGTDTEPEIEPDITNPSEDETPVPRITFLGGPRTLSTARKSTRPPSKKPKPDPEATTSEPWGLRIIENKLTLVRVREADKVIFAVNXLEGPAGDWWDTYKEAREEDDGEPTWEEFTAAFRENFVPTAVMRMKRNEFRRLRQGNTTVQEYLNRFTQLARYAIGDLADEEEKIDKFIEGLNDELRGPMIGQDQESFQSLINKVVRLENDQRTVEHNRKRRLSMNRLPQGVPQRLKEATSSGWKTPIVATNRPAAPSKFNRSVAIQNRTPTPTLAAPGAKKNVDCLNCGEYGHYANNCPHPHKTPVRTGANAMIVRGTTTPTTGRGLFKTPQTNRTATGFGRGQVNHVRAEEAQEDQGVLMGMFSVNSTPVKVLFDSGASHSFISLKASQKHNLTLVGLRKPMIVHSPGGEITVSHACIDVPIRLRVVVFPSNLMVLIPQTLDVVIYLSKLTRRFSGIDSSRLESDLSSP

SEQ ID NO: 18999 - protein, 1052 aa, Oryza sativa
  Clone ID: TF_OSC25185j.C1.p23.fg
MSGQTGDGKDGDKGATFPYDYPSTSTSYVSTYSGKAPYFNGTDYAAWKHKMKMHLKSINPSIWRIVEKGYVLQKPEDPTKEDDENEHKNAQAANVILSALSGSEFNRVDDIESAKVIWDTLRNLHEGTDSVRESKVEILKGQFERFVMLDGESPSDMYDHLSKIVNEIKGLGSKDMTDEVVVKKMVRAITLRNSTLVTIIRERPDYKTLTPHDLLGRILAHDMLVQESKEVIQYINQSSTTSIKKEDLALKAKEEEEESRKSKSKEEIDDEEMTLFVKKFGKFMRRSGFFKGSSSKHHSNKLSGRHSARVCYVCKEPGHFIADCPYLKDGSHIKEDKMGEKKDEKKEKHKHSKRERYGQAHLGKIFGSDSESSSSDEEGIATFAVKPSSPPRLFNYSSDEDAPICLMAKEPKVPSSLKSFNVDLVSDEEDDVEDEVMDEELFKSITKESLPHLSELLGRIEDQYATLERQEALLIREKERSHELKGELAKEREKNEALVRLYKQTKESHANLEVTNAQLQERVDGLDKAYLSLEEKFETLKNSVSLPSEASCSKIVPSNEPCARCKDIDIDACATNSTSLSALQKQNEKLMGLLHNGLLKCHMGSKALKEYLGYQRDHFNHEGLGYVPPPKGKVDKSVLIKKPQGLSNFVKAKSILPNGHASHCFFDASYVLRKNASGRVVAKYVGPRGKNVSIKRVLWVPKALVTNMRGPKQEYHSGGRSWVIDSGCTNHMTGEESMFSSLDPNGSSQENIVFGDDGKGKVMGLGKITISNDLSISNVLLSLRVFSRTSFYLVDFSSTKAKHKTCLVAKSDMGWLWHRRLAYVGMRNLHKLLKHDHILGLTNVQFEKDRMCSACQAGKQIGAHHPVKNVMTTTRPLELLHMDLFGPIAYLSIGGNKYGLVIVDDFSRFTWVFFLHDKSETQAIFKKFERRAQNEFDLKIKNIRSDNGKEFKNTCIESFLDEEGIKHEFSAPYSPQQNGVAERKNWTLIEMARTMLDEYKTSDRFWAEAVNTACHAINCLYLHRLLKKTAYELLTGEEEDPSEAIKRLALGD

SEQ ID NO: 19000 - protein, 1473 aa, Oryza sativa
  Clone ID: TF_OSC29459j.C1.p2.fg
MTRRSANTGDGNQPEGSNHHHQGSPPPPPPPPPPPPPDTNAILTQILAQQANMMTAFLHHLQNPPQQNAPPPPPQHSKLAEFLRIRPPTFSSSNNPVDALDWLHAVGKKLDTVQCSDEEKVIFAAHQLQGPASLWWDHFQATQPEGQPITWARFTAAFRRTHVPAGVVALKKREFRELKQGNRSVMEYLHEFNNLARYAPEDVREDEEKQEKFLAGMDPELSVRLVSGDYPDFQRLVDKSIRLEAKHKELESHKRRLANFRNQQGANQRVRYTNPYPGGSSSQQQQQQQQPRSAPRPQFVVRVPQPPQQQSQQGTRAPRPPTPTVQPGQGRRDAQGPQRLCFNCFEPGHIADKCPKPRRQQGQAPPRPNNGGKDVIRGRVNHVTAEDMLTTPDVIVGTFLIHSIPATILFDSGASHSFISVPFVGRNQLGVERLRNPLLITTPGGVMTAKYYSPAVPIEIQGIPFPSDLILLDTKNLDVILGMNWLAQFQGVVDCARRTVTLYRGPEQPVVFFAPPTSVKSSELHQIGLSEIPIVREFGDVFPEELPGMPPKREIEFRIDLAPGTTPLYKRPYRMVANELAEVKKQLEELKEKGYIRPSTSPWGAPVIFVEKKDKTKRMCVDYRALNEVTIKNKYPLPRIDDLFDQLKGATVFSKIDLRSGYHQLRIREEDIPKTACTTRYGLYEFTVMSFGLTNAPAFFMNLMNKVFMEYLDKFVVVFIDDILIYSQSEEDHQHHLRLVLGKLREHQLYAKLSKCEFWLSEVKFLGHVISAKGVAVDPETVTAITDWKQPKTVTQVRSFLGLAGYYRRFIENFSKIARPMTQLLKKEEKFVWSPQCEKAFQTLKEKLVSSPVLILPDTHKDFMVYCDASRQGLGCVLMQDGHVVAYASRQLRPHEGNYPTHDLELAAVSDLNLRQRRWLELIKDYDVGIHYHPGKANVVADALSRKSHCNTLNIRGIPPELSQQMEALNLSIVSRGFLAALEAKPTLLDQIREAQKNDPDMHGLLKNMKQGKAVGFTEDEHGTLWNGNRVCVPDNGELKQLILQEAHESPYSIHPGSTKMYLDLKEKYWWVSMKREIAEFVALCDVCQRVKAEHQRPAGLLQPLQVPEWKWDEIGMDFITGLPKTQGGYDSIWVVVDRLTKVARFIPVKTTYGGNKLAELYFARIVSLHGVPKKIVSDRGSQFTSHFWKKLQEELGTRLNFSTAYHPQTDGQTERLNQILEDMLRACVLDFGKTWDKSLPYAEFSYNNSYQASIQMAPYEALYGRKCRTPLLWDQVGESQVFGTDILREAEAKVRTIRDNLKVAQSRQKSYADNRCRDLEFAVDDFVYLRVTPLRGVHRFQTKGKLAPRYVGPFRIVARRGEVAYQLELPASLGNVHDVFHVSQLKKCLRVPSEQADSEQIEVREDLTYVERPVKILDTMERRTRNRVIRFCKVQWNNHAEEEATWEREDELKAAHPDLFASSSESRGRDSV

SEQ ID NO: 19001 - protein, 1256 aa, Oryza sativa
  Clone ID: TF_OSC400261j.C1.p12.gm
MAGFSLISCAVGIIFFSVCYLPAAPAAALSFNYSTFSSDNQEDFTFEGNASIHDGCIDFVANGTWGRGYRPYSTGRVSYKLPVRLWDAATGEVASFTTTFSFNITPMNISDKGDGMAFFLVSYPSRMPLTADGDTLGLVSNKPENAPAGGDQFVAVEFDTYPNPGLDPNATGDHIGIDINSVRSLTTEPLTNSSLIGNMTAIVHYDSSSSILSVKLWINDTTKPPYNLSYEIVDLKKKLPENVTIGFSAATGASDELHQLTSWYFNSSSSFEHKHGRAGVVAGATVGATLFVVLLFTAAAILIRRRRIKNRKEAEDEQDISSDSEDNDGEPIVEIEMGTAPRRLPYYELVEATKNFAVEEKLGQGGFGSVYRGYLREQGLAVAIKRFAKDSSKQGRKEYKSEIKVISRLRHRNLVQLVGWCHGRNELLLVYELVPNRSLDVHLHGNGTFLTWPMRIKIVLGLGSALLYLHQEWEQCVVHRDIKPSNVMLDESFSAKLGDFGLARLIDHTIGIKTMTAMSGTPGYLDPECVITGRASAESYVYSFGIVLLEVACGRRPMSLLDSQNNGVFRLVEWAWDLYGKGDVLMAADKRLDGDYDSAEMERVIALGLWCVHPDPSVRPSIRDAMAILQSSGGQLPVLSAKMPVPMYAPPMASFDGLAVCVIYRDVVVLRCDAVVVHIDDERPCYSHLVFLDYSIPIVSVHRQSGEQVSGTSAFDVLHREKAAIRRCDFTMAGFADALRPDKFTGVHFKRWQIRVALWLTAMKCFWVSTGKPEGILAADQHKQFEKATTLFVGCILSVLGNRLVEVYMHMTNAKELWDALNTKFGATDASNDLYIMEQFHDYRMADNRSVVEQAHEEYSVEGLIVSLDVEEKAREKDAASKGDGGQSSANVVHKAQNKSKGKYKAQQTTNFKKQKKNNNNPNQDERTCFVCSQPSHLARKCPQRKGMKAPAGQTSKSANVTIGNTGDGSGYGRTGFHRPNGEWVTCFCSWCWHGRSEVYFGKDRAAEEHYWKEAVRSEMDSIIANGTWEVTERPYGCKPVGCKWVFKKKLRPDASHGLLVHQMDVKTTFLNGELDEEIYMDQPDRFVVEGQEDKASQSMRQINVYTIAMVGVKELFCASIAVAREDRRRGRQVVAVLVRPFAVAGDRRSFIAAVDPKVSSVSSSSPSPSVDLPPPFWSPVSSPCRPLRAGGLRLRPSAAVRRRACAARAVRSAEPPPLSVTSLPTSSGSSAVSRSWTVRSRPSVLDWIDLGRPSA

SEQ ID NO: 19002 - protein, 1907 aa, Oryza sativa
  Clone ID: TF_OSC400690j.C1.p5.fg
MSGQTGDGKDGDKGATFPYDYPSTSTSYVSTYSGKAPYFNGTDYAAWKHKMKMHLKSINPSIWRIVEKGYVLQKPEDPTKEDDENEHKNAQAANVILSALSGSEFNRVDDIESAKVIWDTLRNLHEGTDSVRESKVEILKGQFERFVMLDGESPSDMYDHLSKIVNEIKGLGSKDMTDEVVVKKMVRAITLRNSTLVTIIRERPDYKTLTPHDLLGRILAHDMLVQESKEVIQYINQSSTTSIKKEDLALKAKEEEEESRKSKSKEEIDDEEMTLFVKKFGKFMRRSGFFKGSSSKHHSNKLSGRHSARVCYVCKEPGHFIADCPYLKDGSHIKEDKMGEKKDEKKEKHKHSKRERYGQAHLGKIFGSDSESSSSDEEGIATFAVKPSSPPRLFNYSSDEDAPICLMAKEPKVPSSLKSFNVDLVSDEEDDVEDEVMDEELFKSITKESLPHLSELLGRIEDQYATLERQEALLIREKERSHELKGELAKEREKNEALVRLYKQTKESHANLEVTNAQLQERVDGLDKAYLSLEEKFETLKNSVSLPSEASCSKIVPSNEPCARCKDIDIDACATNSTSLSALQKQNEKLMGLLHNGLLKCHMGSKALKEYLGYQRDHFNHEGLGYVPPPKGKVDKSVLIKKPQGLSNFVKAKSILPNGHASHCFFDASYVLRKNASGRVVAKYVGPRGKNVSIKRVLWVPKALVTNMRGPKQEYHSGGRSWVIDSGCTNHMTGEESMFSSLDPNGSSQENIVFGDDGKGKVMGLGKITISNDLSISNVLLSLRVFSRTSFYLVDFSSTKAKHKTCLVAKSDMGWLWHRRLAYVGMRNLHKLLKHDHILGLTNVQFEKDRMCSACQAGKQIGAHHPVKNVMTTTRPLELLHMDLFGPIAYLSIGGNKYGLVIVDDFSRFTWVFFLHDKSETQAIFKKFERRAQNEFDLKIKNIRSDNGKEFKNTCIESFLDEEGIKHEFSAPYSPQQNGVAERKNWTLIEMARTMLDEYKTSDRFWAEAVNTACHAINCLYLHRLLKKTAYELLTGEEEDPSEAIKRLALGDVRPREPQQGASSSTQVEPRISTQADNPSTSSLDQGEEGEQVPPAPINLAHPRIHQSIQRDHPTNSILGDINKGVSTRSRIVNFCEHYSFVSSLEPLRVKEALNDPDWVMAMQEELNNFTWNEVWTLVERSRQNVIGTKWIFRNKQDEAGVVIRNKARMYFRVVLGRDKIGKADSTLFTKRHNNDIFVCQIYVDDIVFGSTNKSFSEEFSRMMTKRFEMSMMGELKFFLGLQIKQLKERTFICQTKYLKDMLKKFGMENAKPIHTPMPSNGHLDLNEQGKDVDQKGARFDLIGYADADYAGCKVDRKSTSGTCQFLGRSLVFWSSKKQNSVALSTAEAEYVSAGSCAQLLWMKQTLRDYGLNVSKIPLLCDNESAIKIANNLVQHSRTKHIDIRHHFLRDHSTSGDIDIQHCILMIKGQFKNQVYSRRGSMSSRGRSPSSKARHAIRRMSESRKDAIDAQAQASEQAAQVANVERGAPLTPRRSRVNGEGSSAPASKVRRGNPTGSSEQGQVYEELHDPIIDEVIEACAWQNLKELMGLQYPWCKEIIAQFYATVYFEPIKEKTIHWMTDGIIYSVTYAKFAAILGFPARSRTNHVKIHDEKPMDTNSLHFLYQDVDYELGTIKGLRPFYAYLNKLLHKTLYPKEGDASNVLAYTRNLLYKMKAHPQLFDAFDFIFEEIRLISMMPKRGLGYGPYIMKMIEIVSKRKFHKEVAHTGYQVRPIKAAAVPAGRTTRASSHAGPSTTVTTSDSNSSLRFFKSIFNLCKTISVWQAKERRARKKDTRRIKNLLHNANLPCSPDGSEVEDSGEDVIEDPFAAEASSSRADRGKAPLEEEEEEEGDYAEESSEEDEDSDEDE

SEQ ID NO: 19003 - protein, 1223 aa, Oryza sativa
  Clone ID: TF_OSC401006j.C1.p6.fg
MAFKAAHDRENWNGGRICKLESKVYHLQKELAELKGEAPPPAPKLRLTMVNTRTGSGSGSGSGHNEGDPTLAQVLAQQTQLINLLVHQAQNQQANNNNQPPPPQNKLADFQRVRPPTFSSTTNPPPQNKLADFQRVRPPTFSSTTNPVEAGDWLHAIEKKLDLIQCTEQEKVSFASHQLHGPAAEWWDHFRQNRAVGEPITWREFTAAFKKTHIPSGVVALKKREFRALNQGSCSVIEYLHDFNRLARYAPEDVRTDEERQEKFLEGLNDELSYALMAMEYRDFQQLVDKAIRQEDKYNRMEQKKRRAAHFKAQQAPTQNQPVRKEQGSKPGVCFNCGHPGHYADKCPKARRVKNAPVQNNSNATALKARVNHVAAAEAQNSPDVVLGTFPVSSVPATVLFDSVALQEIPIVQDYPDVFPEDLPGATVFSKINLCSGYHQLRIREEDIPKTAFTTRYGLFECIVMSFGLTNAPAFFMNLMNKVFMEYLEKFVVVFIDDILIYSKTKEEHEEHLRLALEKLREHQLYAKFSKCEFWLPEVKFLGHVISAGGVAVDPSNVESVLNWKQPKTVSEILLGLAGYYRRFIENFSKIARPVTRLLQKDVKYKWTEECEQSFQELKKRLVTALVLVLPDPRKGFQVYCDASRLGLGCVLMQDGKVVAYASRQLRSHENNYPTHDLELATVVHASKIWRHYLFGNRTEIYTDHKSLKYIFTQPDLNMRQHRWLELIKDYDMEIHYHPEAKPTLFDQVREAQVNDPDIQEIKKNMRRGKAIGYIEDEQGIVWLGERICLPDNKELNDTIMKEAHETLYSIHPGSTKMYQDLKQQFWWASMRREIAEYVALCDVCQRVKAEHRKPAGLLQPLKIPKWKWEEIGMDFITGLPRTSAGHDSIWVVVDRLTKVAHFIPVKTTYTGNKLAELYMARVVCLHGAPKKIVSDRGSQFTSKFWQKLQEEMGTRLNFSTAYHPQTDGQTERVNQILEDMLRACVLDFGGSWDKNLPYAEFSYNNSYQASLQMAPYEALYGRKCRTPLLWDQIGERQVFGTDILREAEEKVKIIQERLRIAQSRQKSYADNCRRDLTFEEGDYVYLWVTPLRGVHRFQTKGKLAPRFVGPFKRELKKCLRVPTEEADPKHIELQEDLTYVEKPIRILQFPMFRRRAFTFRKVQKRLKKVKVGCEHMVLMVVLMTIKDRFASYYCETFTMPTTSQCGQRLYLLYSMVHYGVPD

SEQ ID NO: 19004 - protein, 1535 aa, Oryza sativa
  Clone ID: TF_OSC900295j.C1.p18.fg
MAGFSLISCAVGIIFFSVCYLPAAPAAALSFNYSTFSSDNQEDFTFEGNASIHDGCIDFVANGTWGRGYRPYSTGRVSYKLPVRLWDAATGEVASFTTTFSFNITPMNISDKGDGMAFFLVSYPSRMPLTADGDTLGLVSNKPENAPAGGDQFVAVEFDTYPNPGLDPNATGDHIGIDINSVRSLTTEPLTNSSLIGNMTAIVHYDSSSSILSVKLWINDTTKPPYNLSYEIVDLKKKLPENVTIGFSAATGASDELHQLTSWYFNSSSSFEHKHGRAGVVAGATVGATLFVVLLFTAAAILIRRRRIKNRKEAEDEQDISSDSEDNDGEPIVEIEMGTAPRRLPYYELVEATKNFAVEEKLGQGGFGSVYRGYLREQGLAVAIKRFAKDSSKQGRKEYKSEIKVISRLRHRNLVQLVGWCHGRNELLLVYELVPNRSLDVHLHGNGTFLTWPMRIKIVLGLGSALLYLHQEWEQCVVHRDIKPSNVMLDESFSAKLGDFGLARLIDHTIGIKTMTAMSGTPGYLDPECVITGRASAESYVYSFGIVLLEVACGRRPMSLLDSQNNGVFRLVEWAWDLYGKGDVLMAADKRLDGDYDSAEMERVIALGLWCVHPDPSVRPSIRDAMAILQSSGGQLPVLSAKMPVPMYAPPMASFDGLAVCVIYRDVVVLRSNDVLLLVYICNVMIYLWNILNHYMPIFSTIQKPYYRRCDFTMAGFADALRPDKFTGVHFKRWQIRVALWLTAMKCFWVSTGKPEGILAADQHKQFEKATTLFVGCILSVLGNRLVEVYMHMTNAKELWDALNTKFGATDASNDLYIMEQFHDYRMADNRSVVEQAHEVQTMAKELELLKCVLPDKFVAGCIIAKLPLSWRSFGTALKYKRQEYSVEGLIVSLDVEEKAREKDAASKGDGGQSSANVVHKAQNKSKGKYKAQQTTNFKKQKKNNNNPNQDERTCFVCSQPSHLARKCPQRKGMKAPAGQTSKSANVTIGNTGDGSGFFYVYLLKTKDEALDYFKTYKAEVENQLDRKIKRLRSDRGGEFFSNEFDLFCEEHGIIHERTPPYSPESNGIAERNNRTLTDLVNAMLDTAGLPKAWWGEALLTSNHVLNRVPNRNKDKTPYEIWIGRKPSLSYLRTWGCLAKVNVLITKKRKLGPKTVDCVFLGYAHHNIAYRFLIVKSEVPDMHVGTIMESRDATFFESFFPMKDTHSSSSQPCEIIPSSITPPEQTEHTHEHVTEEDDSEAPRRSKRQRTAKSFGDDFTVYLVDDTPKSISEVYASPDADYWKEAVRSEMDSIIANGTWEVTERPYGCKPVGCKWVFKKKLRPDASHGLLVHQMDVKTTFLNGELDEEIYMDQPDRFVVEGQEDKVCKLLKSLYGLKQAPKQCHEKFDRTLTSVGFAVNEADKCVYYRHGGGEGVILCLYVDDILIFGTNFEVINEVKSFLSQKFDMKDLGVADVILNIKLIRGENGITLLQSHYVEKILNRFGYIDSKPSPISYDPSLLLRKNKRIARNQLEYSQIIGSLMYLASATSLISPLL

SEQ ID NO: 19005 - protein, 1786 aa, Oryza sativa
  Clone ID: TF_OSC400299j.C1.p17.fg
MARGVARAASFGGRAATARWCSYRRITVAVCLGNLVAALLVLRSLTSLAPTPPKREEVVEYTEEQIRKAEESIRIRREAEPVELVEAVKNLRKIFRREEKRRKELPLELKQKVSYEIVQLLLDLGDNSSFAQQRARLSSQPAAAPAAPPSPFPPPSPRSSPPEVRHFRRSVASSTRRQQDAELAAAEERRRATAQTAAAAARAARLAAAELAAARAEAEAEVAEDAARAAEVEVETLRSSINGSIAGDITADRELEELARGRARERAERWAAAHLHGGGGGQRDRAPADGNPDGRGRVGGSTEPARCPRRQRDSLSLDRRHGHHGVQTVVRDFGPGGGWPTLTKTNYIEWAAVMRVRLQVRHMWEAVWYGDVDYDEDRRALDALIATVPPEMQFSLSQKRTAKEAWDAIAAARICSDRARKSTLQALRKEWENMAFKPEKYRQIARSIESQLDLSTMSIEEALGRLKVVDGDEPQPLSGPITIGGKLHLTRDQWEASQGDGRKGESSSPTGGRKLRKVRGGVQLRWARRRAEGGARRGAQGGATGNHKPARDDAYRNCGKLGHWAKDCRQPRRGQAHVARVEEEEPALLLAHASIELPPTAPAAAVFLHLDEPKVLVSLCNGSSNDKADGWYLDTGATHHMTGRREFFTEFDSSVRGSVKFGDASGVEIKGVGSVTFTAKSGEHRLLTGVYYIPALRNSIISVGQLDENGSRVLVEDGLMRIWDRRRRLLAKVAQPVCLAARRDDEAWQWHERFGHLHFEALKRLNAKEMVRGMPCLDHVEQLCDVCVVTKQRRLPFPQQTSFRAKERLELVHGDLCGPVTPATPGGRRYFLLLVDDLSRYMWVMVLDSKGEAADAIRRAQAAAEAECGRKLRVLRTDNGGEFTAAEFASYCADEGIQRHYIAPYSPQQNDVVERRNQTVVGMARALLKQRGMPAIFWGEAVVTAVYILNRSPTKTLDGRTPYEAWHGRKPAVSHLRVFGYLAFAKELGHIGKLDDRSTPGVFIGYAEGSKAYRILDPETHRVRTARDVVFDEGRGWVWDKAVDDGSTPTYDDFTIEYVHFEGAGGVGSSSSPSVSTPVPEPPPTPTSTHPRATTSTTTSSSPTPPQPVTPRTPAPTATPPGTYTQTPARVERSPVEFATPLSHDGERIDAYHDGEQLRYRTMEDLLGDQPVPGLVPRDLEAQLHLACDDGEPRSFAEAEKHAAWRAAMQSEMDAVQENRTWELVDLPRGHRTITLKWVFKLKRDEAGAIVKHKARLVARGFVQQEGIDYDDAFAPVARMESVRLLALATQEGWGVHHMDVKSAFLNGDLKEEVYVHQPPGFVIPGKEGKDAEVAAFKEEMKATFQMSDLGPLSFYMGIETAYAKRIVELAGLTDCNPALTPMEERLKLSRDSTTEEVDATQYRHLVGSLRYLTHTRPDLAFSVGYVSRFMQRPTTEHQQAVKRIIRYVAGTLDHGLYYPRCPGKAHFIGCEAEYMAAFAASTQALWLARLLSDLLGRDTGAVELRVDSKSALALAKNPVFHEQSKHIRVRYHFIRSYLEEGSIKASYINTKDQLADLLTKPLGRIKLGGCSNRLAASYGYIYVSNLPREEAVESWRFEKLKDIKSASIQNSTKLDLSNEEARTLKRALQFNWHVLLEDIGLWIPSEVSHTEHDDKPENEPEEEEIIAGPPLPSQCNAELHTDYDGAAVRWGLTHPKESAADCCQACLDQAKNARPGELRCNIWVYCPSEFGCFSPDKYEHKHQECWLKQADHPKLNFKDKYSESYRDSHPTAPVVVPWMSGVISA

SEQ ID NO: 19006 - protein, 1515 aa, Oryza sativa
  Clone ID: TF_OSC400321j.C1.p53.fg
MSGQAGDGNDGDKGVKIPYDYPPTSTSYVSTYSGKAPYFNGTDYAAWKHKMKMHLKSINPSIWRIVEKVYVLQNPEDPTKEDDENEHKNAQAANAILSALSGSEFNRVDGIESAKMIWDTLRNLHEGTDSVRESKVEILKGQFERFVMLDGLGSKDMTDGVVVKKMVRAITPRNSTLVTIIRERPDYKTLTPHDLLGRILAHDMLMQESNDVIQYINQSSTTSIKKEDLALKAKEEEEENRKSKSKAEIDDEEMALLVKKFGKFMRRSGFFKGGSSKHYSNKSSGKHSARVCYVCKEPGHFIADCSHLKDGSHIKEDKKKGEKKEKHKHSKQEHYGQAHLGMIFGSESESSSSDEGVATFAVKPSSPPRLFDYSSDEDAPICLMAKKPKVPSPPKSFNVDLVSDEEDEVMDDELFKSITKESLPHLSELLGRIEDQYATLERQEVLLIREKERSHELKSELAKEREKNEALQNEKLMRLLHNGLLKCHMGSKALKKYLGYQRDNFNHEGLGKNDSGRVVAKYVGPRGENISIKRVLWVPKALVTNMRGPKQEYVSGGRSWVIDSGCTNHMTGEESMFSTLDPNGTSQDNIVFRDDGKGKVMGLVAKSNTRWLWHRRLAHVGMRNLHKLLKHDHILGLTNVQFEKDRVCSACQAGKQIGAHHPVKNVMTTSRPLELLHMDLFRPIAYLSIGGNKYGLVIVDDFSRFTWVFFLHDKSETQAIFKKFARRAQNEFDLKIKNIRSDNGKEFKNTCIESFLDEEGIKHEFSAPYSPQQNGVAERKNRTLIEMARTMLDEYKTSDRFWVEAVNTACHAINRLYLHRLLKKTLYELLTGNKPNVSYFRVFGSKCYILNKKARSSKFAPKVDEGFLLGYGSNECAYHVFNKTSGIVEIACDVTFDETNGSQVEQVDSHVLGEEDPSEAIKRLALGDVRPREPQQGASSSTQVEPPTSTQADDPSTSSLDQGEEGEQVPPSPINLACPRIHQSIQRDHPTDNILGDINKGVSTRSRIANFCEHYSFVSSLEPLRVEEALNDPDWVMAMQEELNNFTRNEWIFRNKQDEAEVVIRNKARLVAQGFTQIEGLDFGETFAPVARLESIRILLAFATNLNFKLYQMDVKSAFLNGPINELVYVEQPPGFKDPKYPNHVYKLHKALYGLKQAPRAWYECLRNFLVKNGFEIGKADSTLFTKRHDNDIFVCQIYVDDIIFGSTNKSFSEEFSRMMTKRFEMSMMGELKFFLGLQIKQLKEGTFICQTKYLKDMLKKFGMKNAKPIHTPMPSNGHLDLNEQGKDVDQKVYRSIIGSLLYLCASRPDIMLSVCMCARFQATPKECHLVAVKRILRYLVHTPNLGFWYPKGARFDLIGYADADYAGCKVDRKSTSGTCQFLGRSLVSWSSKKQNSVALSTAEAEYVSAGSCCAQLLWMKQTLRDYGLNVSKIPLLCDNESTIKIANNPVQHSQTKHIDIRHHFLRDHSTKGDIDIQHVRTDKQLADIFTKPLDETRFCELRSELNILDSRNVA

SEQ ID NO: 19007 - protein, 337 aa, Oryza sativa
  Clone ID: TF_OSC11150j.C1.p2.gm
MASVQQVRAAAVKNAPTVDIPIVPLATSKLPEFLRVRPPTFSSTTNPMEANDWLHAIEKKLNLLQCNDQEKVAFATHQLQGPASTWWDNHMATRPPGTEVTWAEFCRSFRKAQVPDGVVPQKKREFWALHQGNRTVTEYLHEFNRLARYAPEDVRIDAEKQEKFLAGLDDELTNQLISGDYADFEKLVDKAIRQEDQHNKMDRKRKAAQFRSNQGSHQRPRFAPGQQGGPTTMIVRQHRPFNTSSFHQGASGSQNHQGGQPNRSTAPRPPMAPAQSAPSAQAKKETGAKPGSCFNCGEHGHFADKCPKPSRAGARFAQARVNHASAEEAQAAPEVVL

SEQ ID NO: 19008 - protein, 1177 aa, Oryza sativa
  Clone ID: TF_OSC13105j.C1.p1.fg
MIVRQHRPFNSSSFHQGASGSQNHQGGQPNRSAAPRPPLAPAQSAPSAQAKKETGAKPGSCFNCGEHGHFADKCPKPRRAGPRFAQARVNHASAEEAQVAPEVVLGTFPVNSIPTTVLFDSGATHSFIGKKFVGIHGLIREELSTPMRVHTLGNSSTSVQFSPSITIEIQRSPFLANLILLESKDLDINLGMDWLTKFKGVIDCVNRTVTLTNEKGETVVYKSPVSPKQGVSLNQIEVEIPVVTEEKSSRKLEDIPIVCKYPEVFPEDLTTMPPKREIEFRIDLAPGTAPIYIRPYRMAANELAEVKKQVDEQLQKGYIRPSTSLWGAPVIFVEKKDKTKRMCVDYRTLNEVTFKNKYPLPRIDDLFNQLKGAKVFSIIDLRSGYNQLRIWEEDIPKSAFTTWYGLYECTVISFGLTNAPAFFMNLMNKVFMEFLDKFVVVFIDDILIYSKSEEEHEQHLLLVLEKLKEHQLYAKFSYYRRFIENFSRIARPMTQLLKKDEKFKWTAECDKSFEELKKRLVSAPVLILPDQTKDFQVYCDASRHGLGCVLMQDGRVVAYASRQLRPHEGNYPTHDLELAAVVHALKIWRQYLIGNHCEVYIDHKSLKYIFTQPDLNLRQRRWLELIKDYDMSIHYHPGKANVVADALSRKSYYNALCTEGMCKELQQELERLNMGIVEHGFVAALEARPTLVDQVRAAQVNDPEIAELKKNMWVGKARDFLEDEHGTICMGERLCVPDDKELKDLILTEAHQTQYSIHRGSTKMYQDLKENFWWASMRREIAEFVALCDVCQRVKAEHQRPAGLLQPLQIPEWKWEEIGIDFITGLPRTSSGHDSIWVVVDRLTKVAHFIPVHTTYTGKRLAELYLSRIMCLHGVPKKIVSDRGSQFTSKFWQKLQEELGTRLNFSTAYHPQTDGQTERVNQILEDMLRACALDFSGAWDKSLPYAEFSYNNSYQASLQMAPFEALYGRKCRTPLFWDQIGESQLFGTEVLTEAEEKVRTVRERLRIAQSRQKSYADNRRRELTFEAGDYVYFRVTPLRGVHRFQTKGKLAPRFVGPYKILERRGEVAYQLELPPKMISIHDVFHVSQLKKCLRVPEEQADSEEHIDIQEDLTYVEKPVCILETSERRTRNKVTRFCRVQWSHHSEEEATWEREDELKAAHPHLFTGSSESRGRDSV

SEQ ID NO: 19009 - protein, 913 aa, Oryza sativa
  Clone ID: TF_OSC13112j.C1.p1.fg
MIVRQHRPFNSSSFHQGASGSQNHQGGQPNRSAAPRPPLAPAQSAPSAQAKKETGAKPGSCFNCGEHGHFADKCPKPRRAGPRFAQARVNHASAEEAQVAPEVVLGTFPVNSIPTTVLFDSGATHSFIGKKFVGIHGLIREELSTPMRVHTLGNSSTSVQFSPSITIEIQRSPFLANLILLESKDLDINLGMDWLTKFKGVIDCVNRTVTLTNEKGETVVYKSPVSPKQGVSLNQIEVEIPVVTEEKSSRKLEDIPIVCKYPEVFPEDLTTMPPKREIEFRIDLAPGTAPIYIRPYRMAANELAEVKKQVDEQLQKGYIRPSTSLWGAPVIFVEKKDKTKRMCVDYRTLNEVTFKNKYPLPRIDDLFNQLKGAKVFSIIDLRSGYNQLRIWEEDIPKSAFTTWYGLYECTVISFGLTNAPAFFMNLMNKVFMEFLDKFVVVFIDDILIYSKSEEEHEQHLLLVLEKLKEHQLYAKFSYYRRFIENFSRIARPMTQLLKKDEKFKWTAECDKSFEELKKRLVSAPVLILPDQTKDFQVYCDASRHGLGCVLMQNGKVVAYASRQLRPHEGNYPTHDLELAAVVHALKIWRQYLIGNHCEVYIDHKSLKYIFTQPDLNLRQRRWLELIKDYDMSIHYHPGKANVVADALSRKSYYNALCTEGMCKELQQELERLNMGIVEHGFVAALEARPTLVDQVRAAQVNDPEIAELKKNMWVGKARDFLEDEHGTICMGERLCVPDDKELKDLILTEAHQTQYSIHRGSTKMYQDLKENFWWASMRREIAEFVALCDVCQRVKAEHQRPAGLLQPLQIPEWKWEEIGIDFITGKRLAELYLSRIMCLHGVPKKIVSDRGSQFTSKFWQKLQEELGTRLNFSTAYHPQTDGQTERVNQILEDMLRACALDFSGAWDKSLSIL

SEQ ID NO: 19010 - protein, 493 aa, Oryza sativa
  Clone ID: TF_OSC14148j.C1.p1.fg
MPRYKPEYLFGVEGFVQELRTMSFVIGFGTAPFYAQIPHDRHEEKCRVKVTLNSNSEEEVARIAIGELRDRYSDQLADTEYRYHPRQPQGSDRGSYLETEGIENDATTRHLVEMLWAMDESRAETVLAAQDREDRNRGKICKLEDKVDRLEKELAALKGEAPPQKARIRLTARKRALFVPRYQLAPKMVNTRSNGNGPNNPNNNNGENPTLAQVLAQQTQLMNMMMQQLQNQQNQGNNHVPPQNKLAEFLREKVSFASHQLHGPASEWWDHFRLNRTTAEPITWLEFTAAFRKTHIPSGVVSLKKKEFRSLTQGSRSVTEYLHEFNRLARYAPEDVRNDEERQEKFLEGLNDELSYPLMTGDYHDFQKLVDKAIRQEDKYNRMEQKKRRIAQFKTQQGNNQKPRLTLRPQSMPHGGSSFVVRPQRQFFNNNAGNNIRNQAPRPVAAPTQQQPAKREQGSKPVVCFNCGDPRHYADKCPKPRRVKAVPTQSNCT

SEQ ID NO: 19011 - protein, 1462 aa, Oryza sativa
  unsure (1)..(1462): unsure at all Xaa locations
  Clone ID: TF_OSC26121j.C1.p1.np
AMMQQMLQQHQQMHQRMXQQVEQXQQQFGPPPPQSKLPKFLRVSPPTFSSTTNPMEANDWHAIEKKLNLLQCNDQKKVTYATHQLQGPSSAWWDNHMATRPPGTEVTWAEFCRSFRKAQVPDGVVAQKKREFXALHQGNRAVTEYLHEFNRQARYAPEDVRTDAEKQEKFLAGLDDELTNQLISRDYADFEKLVDKAIRQEDQRNKMDRKRKAAQFRSNQGSHQRPRFTPGQQGGPTTMIVHQYRPFNSSSFHQVASGSQNHPGGQPNRSAAPRPPMATAQAAPSVQAKKETGVKPGSCFNCGEHGHFADKCPKLRRAGPRFAQARVNHASAEEAQAALEVVLGTFPVNSIYATVLFDSGATHSFISKKFIGEHGLIREELSTPIRVHTPGNSSTSVXFSPSVTIEIQISPFLANLVLLESKDLDVILGMDWLTKFKGIIDCANRTVTLTNERGETVVYKSPVALKQGISLNQIEVENSVVTAEKSSRKLEDIPIVCEYSEVFPEDLTTMPPKREIEFRIDLAPGTAPIYKRPYRMAANELAEVKKQVDEQLQKGYIRPSTSPWGAPVIFVEKKDKTKRMCVDYRALNEVTIKNKYPLPRIDDLFDQLKGAKVFSKIDLRSGYHQLRIREEDIPKTAFTTRYGLYECTVMSFGLTNAPAFFMNLMSKVFMEFLDKFVMVFIDDILIYSKSEEEHEQHLRLVLEKLKEHQLYAKFSKCDFWLSEVKFLGHVITAQGVAVDPSNVESVTKWTPPKTVSQIRSFLGRAGYYRRFIENFSRIARPMTQLLKKDEKFKWTAECDKGFEELKKKLVSALVLNLPDQTKDFQVYCDASRHGLGCILMGRVVAYASRQLRLHEGNYPTHDLELAAVVHALKIWRHYLIGDRCEVYTEHKSLKYIFTQPDLNLRQRRWLELIKDYDMSIHYHPGKANVVADALSRKSYCNALCTEGMCKELQQELKHLNLGIVEHGFVAALEARPTLVDQVRAAHVNPEIAELKKNMRVGKARDFHEDEHGTIWLGERLCVPDDKELKDLILTEAHQTQYSIHPGSTKMYQDLKEKFWWASMRREIAEFVALCDVCQRVKAEHKRPAGLLQPLQIPEWKWEEIGMDFITGLPRTSSSHDSIWVVMDRLTKVAHFIPVHATYTGKRLVELYLSRIMCLDGVPKKIVSDRGRXFTSKFWQKLQEELGTRLNFSTAYHPLTDGQTESVNQILEDMLRACALDFGGAWDKSLPYAEFSYNNNYQASLQMAPFEALYGRKCRTPLFWDQTGKRQLFGTEVLTEAEEKVRTIRERLRIAQSRQKSYADNRRRELTFEAGDYVYLRVTPLRGVHRFXMKGKLAPRFVGPYKIFERRGEVAYQLELPSNMVGIHDVFHVSQLKKCLTVPEEQADSEHIDIQEDLTYVEKPVHILETSERRTRNKVTRFCRVQWSHHSEEEATWEKEDELKAAHPHLFTSSSESRGRDSV

SEQ ID NO: 19012 - protein, 395 aa, Oryza sativa
  Clone ID: TF_OSC31965j.C1.p1.fg
MAPTAQQGVSKALKGVKPAKIEDDDWEEMQLQAAATIRLCLSDRVMYHVMEETSPKIIWKKLEAQFMSKTLTNKLYLKQKLYGLKMQEGADLTAHVNVFNQLVTDLVKMDVEVDDEDKAIVLLCSLPKSYEHVVTTLTYGKETIKTKDITSALLARDQMRKNKEGETSQAEGLLVKEDHAGHKVKKNKKKKMVQCFRCDEWGHISRECPTLKGKAKANTVTSSNDSDSDGCDFLTMSSAQSKDAEAWILDSASLFHMTPRKEWFSSYKSGEFGFVYLGDDTSYPAMGVGEVKIKLEDGGEHVLQGVRHVPGLKRNLISLGTLHEEGLIFRGNRNRKTIEIMNGKMAVMTGEKVESHLYKLRGCTVAGGVQEEAVAGIAIAFGGGGSGADSSGGLQ

SEQ ID NO: 19013 - protein, 1212 aa, Oryza sativa
  unsure (1)..(1212): unsure at all Xaa locations
  Clone ID: TF_OSC400481j.C1.p8.np
MINTRNGSRAAGEGSNGEERTDGGHPNSASSNGPPPLLENPILAQVMAHQTQMMEAMMQQMQHQHQXMHQRMQQQAEQQQQQFGPPPPLSKLPEFLRVRPPTFSSTTNPMEANDXLHAIEKKLNLLQCNDQEKVAFATHQLQGPASAWWDNHMATRPPGTEVTWAEFCCSFRKAQVPDGVMAQKKREFRALHQGNRTVTEYLHEFNRLARYAPEDVRTDALKQEKLLAGLDDERTNQLISRDYADFEKLVEKAIRQEDRRNKMDRKRKTAQFRSNPRSHQRPRFTSGQQGGPTIMIVHQHRPFNSSGFHQGASGSQNHQGGQPNCNAAPHPPMAPAQSAPSAQAKKETGAKPGSCFNCGEHGHFADKCPKPTRAGPRFAQARVNHASAEEAQAAPEVILGTFPVNTIPATVLFDSGATHSFISKKFAGVHGLRKEELSTPMRVHTPGNSSTSVSYSPSVLIEIQRSPFLANLILLESKDLDVILGMDWLTKFKGVIDCVNRTITLTNEKGEAVVYKSPVSLKQGISLNLIEVKNPVATEEKSSRKLEDIPIVCEYPEVFPEDLTTMPPKREIEFRIDLAPGTAPIYKRPYRMAANELVEVKKQVDEQLQKGYIRPSTSPWGAPVIFVEKDNTKRMCVDYLALNEVTIKNKYPLPRIDVLFDQLKGTKVFSKIELRSGYHQLRIREEDIPKTAFTTRYGLYECTVMSFGLTNAPAFFINLMNKVFTEFRDKFVVVFIDDILIYSKSEEEHEQHLRLVLEKLQEHQLYAKFSKCDFWLSEVKFLGHVITAQGVAVDLSNVESVTKXTPPKTVSQIRSFLGLASYYRRFIENFSRIARPRTQLLKKDEKFKWTAECDKSFEELKKKLVSAPVLILPDQTKDFQIYCDASRHGLGCVLMQEGRVVAYASRQLRPHEGNYPTHDLELAAVVHALKIWRLIGNRCEVYTDHKSLKYIFTQPDLNLRQRRWLELIKDYDMSIHYHPGKANVVADALSRKSYCNALCTEDMCKELQQELEHLNLGLVEHGYVAALEARPTLVDQVRAAQVNDPEIAELKKNMRVEKARDFHEDEHSTIWLGERLCIPDDKELKDLILTEAHQTHYSIHPGGTKMYQDLKEKFWWVSMRREIAEFVALCDVCQRVKAEHQRPAGLLQPLRIPEWKWEEIEMDFITGLPRTSSGHDSIXVVVDRLTKVAHFIPVHTTYTGKKLAELYLARIT

SEQ ID NO: 19014 - protein, 772 aa, Oryza sativa
  Clone ID: TF_OSC400588j.C1.p3.fg
MAAAGVPRAGTGGRRPEGPGEDKGKVRNGIGAPSGGNRQPEGRGGRTEPGRGGVGAATAGGVGGIVGCGWRFWKGEVGDEEDVGRRGPTAGGLVRGVEKEGGNGSVVGRLRRPWRREGYIRCILPARSISCLVGDIQDSHSSDEPNNWTVFWEGFISAHIPPGLMEIKKKEFLNLKQGNMTFMEFMERFNYLGRYVAADMNTEAKKVELCRDRLAPELNHAITAHEITSMKSLVEKALRVESSEKEVVEDRKRKWAAKKFASGSSSTRPRLAPSPVVRPMAPQPPRQMYVPPRPQTQIVRQVPRTVQAAGDASRNDNVACYNCGKKGHYSPNCPYPKTGKSGPHTQGAPQRRNVADEFAEHLPTWKWWQYVDYPRHGLQSELQSEYLSSCTQDLDSNWQLLDLYELENSERTHPSLACGVGNTQSLEMRPHALLRVHPNHKLESKGVIHGSKILVYTAQPYKLGEMNSVQEKRNDTPEKCEGFLIKLGSYWSKRVKSSPPHLDTLKKAAGKGKAIGKVQGTLLAPKKLDLGKTPSAHPKPPTEFTLDMPLVRDDVLVKMGPACKELHGYCMERSNARRKNRETSMTGYYDRQPFLGPEAFIAIDFKDLWDLYRVRLTWKHVCRHAPHVALLDLAVINETIINSDRANMVEYIKDCLWYHQDKEFIMCAYNQQRHWILLVIVRKWNLVYYLNSNIKKDICDWSAIEAALNNAWDQYVAKGGWHKEGHPTLGHKKDFPMHQQVGDQCGFHVWHNMRSFAKKVTLLDLEAWLAKA

SEQ ID NO: 19015 - protein, 255 aa, Oryza sativa
  Clone ID: TF_OSC400774j.C1.p33.fg
MTPTDLVKMDVEVDDEDKAIVLLCSLPESNEHVVTTLTYGKDTIKTKYITSVLLARDQLRKNKEGETSQAEGLLVKEDHVGRKVKKNKKKKMVQCFRCDEWGHISRECPTLKEKAKANAVTSSNDSDSDGCDLLTMSRDDISYPAVRVGEVKIKLEDGGEHILQGVRHVAGLKRNLISLGTLHKDGLIFHGNRNRKTMEIMMGKTTVMTGEKVESQLYKLRGCIVAGGVYEEAVAGIAIAFGGGGSGADSSGGLR

SEQ ID NO: 19016 - protein, 538 aa, Oryza sativa
  Clone ID: TF_OSC401054j.C1.p79.fg
MVCMRDNFIGSGSRQFHGSTQLNSISFPRQPLKDQPQPQVMANQTQTVEELLQQMRHRYQIYLMQQMQRQCQEPRQVHQPQMQVQVPARNLNQSQSQEFPTSAPKTPVKMRSRYPKITIAKSTSDQRKVSASCYDCGEQDHYVRNCPWKVFARSPEKYKKQCPGSNQAPSQSTDQKDEFTPEDAARIPKRQRGRNTFRGARQLTRHLIKYGPPRPEDDISGERFSTDDDDDDDDDDDDDDDEDEATLNSFMERGLEFKACTRCGIVEHTASLCLPTCRCGEYTHYSDECPLRKVTCFLCEGTDHVPKDCQRNSVLALTKKEQGTTVQPIRQPMAVDDISHNPSALPPIPAPVEANHGRSNVARDVHKSLLVPVSAVNVHNQKLAPQDQASRFCLNCLTSTAHDTNRHLNVQPPPQRIIVKGTVRGRIVPPAIVSSLQHQRQQGKQCQENNSSLQLQRGSTLLRQHPQQVLSAPGQPTAVNSSNAPCIAPIRRPICKSPLGNPMSKKIPSAIAVKRIAIPSLKINAQSNVSDATSGSRN

SEQ ID NO: 19017 - protein, 1044 aa, Oryza sativa
  Clone ID: TF_OSC401847j.C1.p5.fg
MAHCGELCCVRGIVTVPFQEIPGVTRSSSSTSRSSRSARSSSSGSGSRSSVSSGVRSLLLSSVSRQGSSQWQRRWSTSGMAAAQPVRAAMAKSTPTVDIPTAPLAMGNRAVTEYLHEFNRQARYAPEDVRTDAEKQEKFLAGLDDELTNQLISRDYADFEKLVDKAIRQEDQRNKMDRKRKAAQFRSNQGSHQRPRFTPGQQGGPTTMIVHQYRPFNSSSFHQVASGSQNHPGGQPNRSAAPRPPMATAQAAPSVQAKKETGVKPGSCFNCGEHGHFADKCPKLRRAGPRFAQARVNHASAEEAQAALEVVLEIQISPFLANLVLLESKDLDVILGMDWLTKFKGIIDCANRTVTLTNERGETVVYKSPVALKQGISLNQIEVENSVVTAEKSSRKLEDIPIVCEYSEVFPEDLTTMPPKREIEFRIDLAPGTAPIYKRPYRMAANELAEVKKQVDEQLQKGYIRPSTSPWGAPVIFVEKKDKTKRMCVDYRALNEVTIKNKYPLPRIDDLFDQLKGAKVFSKIDLRSGYHQLRIREEDIPKTAFTTRYGLYECTVMSFGLTNAPAFFMNLMSKVFMEFLDKFVMVFIDDILIYSKSEEEHEQHLRLVLEKLKEHQLYAKFSKCDFWLSEVKFLGHVITAQGVAVDPSNVESVTKWTPPKTVSQIRSFLGRAGYYRRFIENFSRIARPMTQLLKKDEKFKWTAECDKGFEELKKKLVSALVLNLPDQTKDFQVYCDASRHGLGCILMRAEWSLMPHGSCVCMKETIQHMTWNWQRGTAYARGSSQSSSCKYPEIAELKKNMRVGKARDFHEDEHGTIWLGERLCVPDDKELKDLILTEAHQTQYSIHPGSTKMYQDLKEKFWWASMRREIAEFVALCDVCQRVKAEHKRPAGLLQPLQIPEWKWEEIGMDFITDGQTESVNQILEDMLRACALDFGGAWDKSLPYAEFSYNNNYQASLQMAPFEALYGRKCRTPLFWDQTGKRQLFGTEVLTEAEEKVRTIRERLRIAQSRQKSYADNRRRELTFEAGDYVYLRVTPLRGVHRF

SEQ ID NO: 19018 - protein, 1558 aa, Oryza sativa
  Clone ID: TF_OSC418835j.C1.p1.fg
MADHPPNHREEGMDDFVAELARMTMVVGYHNAPEYSTVPPLSGELPYRVRLEVHGYVGTCLANMVVEASGGTADHACQEAAYLMMARLRERHNYIFCNTAYRFHPRRASGGGVSTFRPTAGENDTTFGHMCAVMRGMDRMHSDMHKASKALNDGKLVRIIALKDEIARLKKENAQLKGLPIPGGVRIRTTPRKSMTAPVRIQLAPRNPPPPAAPAAPLVPPAVPAAPAAPAPVPAPVPVSAPCVRSLLRSSISRQGSSQWQWRLVACYSQWQPRPQQQQFSGSESGSGETFVRLWMVNTRNGSRAVGEGSNGEERTNGGHPNSASGNGPPPLPENPTLAQVRRSLRQSSIVALGRRRCPTGSWHKRREFRALHQGNRTVTEYLHEFNRLARYAPEDARTDAEKQEKFLAGLDDELTNQLISGDYADFEKLVDKAIRKEDQRNKMDGKRKAAQFRSNQGTPSAQAKETGAKPGSCFNCGEHGHFADKCPKPRRARPRFSQARVNHASAEEAQAAPEVILGTFPVNLVPATVLFDSGATHCFISKKFVGMHGLRKEELSTPMRVHTPGNSSTSVSYSPSVLIEIHRSQFLANLILLESKDLDVILGMDWLTKFKGVIDCANRTVTLTNEKGETVVYKSLVSPKQRISLNQIEVEIPVTTEEKSSRKLEDIPIVCEYPEVFPEDLTSMPPKREIEFRIDLAPGTAPIYKRPYRMAANELAEVKKQVDEQLQKGYIRPSTSPWGAPVIFVEKKDKTKRICVDYRALNEVTIKNKYSLPRIDDLFHQLKGAKVFSKIDLQSGYHQLRIREENIPKTAFTTRYGLYECTVMSFGLTNAPAFFMNLMNKVFMEFLDKFVVVFIDDILIYSKSEEEHERHLCLVLEKLKEHQLYAKFSKCDFWLSEVKFLGHVITAQGVAVDPSNVESVTKWTPPKTVSQIRSFLGLCDKSFEELKKKLVSAPVLILPDQTKDFQVYCDASRHGLGCVLMQEGRVVAYASRQLRPHEGNYPTHDLELAAVVHALKIWRHYLIGNRCKVYTDYKSLKYIFTQPDLNLRQRRWLELIKDYDMSIHYHPGKANVVADALSRKSYCNALCTEGMCKELQQELEHLNLGLVEYGYVAALEARLTLVDQVGVAQVNDPEIAKLKKNMRVGKARDFHEDEHGTIWLGERWCVPDDKELKDLILIEAHQTQYSIHPGSTKMYQDLKEKFCWVSMRREIAEFVALCDVCQRVKAEHQRPAVHTTYTGKKLAELYLARIMCLHGVPKKIVSDRGSQFTSKFWQKLQEELGTRLNFSTAYHPQTDDQTERVNQILEDMLRACALDFGGAWDKSLPYAEFSYNNSYQASLQMAPFEALFGRKCRTPLFWDQTGERQLFGTEVLMEAEEKVRTVRERLRVAQSQQKSYADNRRRELTFEAGDYVYLRVTPLRGVHSFQTKGKLALRFVGPYKILERRGEVAYQLELPSNMIGNHDVFHVPQLKKCLRVPEEQADSEHIDIQEDLTYVEKPVRILETNERRTRNKVTRFCRVQWSHHSKEEATWEREGELKAAHPHLFTSSSESRGRDSV

SEQ ID NO: 19019 - protein, 402 aa, Oryza sativa
  Clone ID: TF_OSC900205j.C1.p17.fg
MALTDHGQRFVSSTRSFKGFEGVKQAKMEDDDWEEMQLQAAATIRLCLSDQVMYHVMEKTSPKIIWEKLEAQFMSKTLTNKLYLKQKLYGLKMQEGADLTAHVNVFNQLVTNLVKMDVEVDDEDKAIVLLCSLPESYQHGVTTLTYDKETIKTKDITSALLARDQMRKNREGETSQAEGLLVKEDHAGHKIKKNKKKKMVQCFRCDEWGHISRECPTLKGKAKANTVNSSNDSDSDGCDLLTMSSAQYKDAEACILDSASSFHVTPRKEWFSSYKSDEFGFVYLGDDTSYPAVGVGEVKIKLEDGGEHVLQGVRHVPGLKRNLISLGTLHEEGLIFRGNRNKNTMEIMKGKTTMMTGEKVESQLYKLRGCTIAGGVQEEAVAGIAIVFEDGRSGADSSSGLW

SEQ ID NO: 19020 - protein, 841 aa, Oryza sativa
  unsure (1)..(841): unsure at all Xaa locations
  Clone ID: TF_OSC900213j.C1.p8.np
TASENDTTFSHMCAVMRGMDRMHSDLHKASKALNDGKLVRIIALKDEIARLKKENAXLKGLPAPGGVQIRTTPRKSTNAPVRIQLAPRNPPPPAAPPAPPAVPAAPAAPAPAPASALSFAPASAAPASALSFAPASAARGPASGNRGCSLQMVNTRNGSRVAGEGSNGKECTDGGYPNSASGNGPPPLPENLTLAQVMAHQTQMMAAMMQQMQQQHQQMHQRMXQQAEQQQQQFGPPPPQSKLPEFLRVRPPTFSSTTNPMEANDWLHDIEKKLNLLQCNDQEKVAFATHQLQGPASAWWDNHMATRPPGTEVTWAEFCRSFRKAQVPDGVVAQKKREFRALHQGNRTVTEYLHEFNRLAXYAPEDVRTDAEKQEKFLAGLDDELTNQLISGDYADFEKLHRPFNSSSFHQGASGSQNHPGGQPNRSASPRPPMATAQAAPSVQAKKETGAKPGSCFNCGEHGHFADKCPKPRRAEPRFAQARINHASVEEAQAAPEVVLGTFPVNSISAKVLLDSGATHSFISKKFVGVHGLIREELSTPMQVHTPGNSSTSVQFSPSVTIEIQRSPFLANLILLESKDLDVILGMDWLTKFKGVIDCANRTVTLTNEKGETVVYKSPVALKQGISLNQIEVENPVVTEEKSSRKLEDIPIVCEYLEVFLKDLTTMPPKREIEFRIDLAPGTAPIYKRPYRMAANELAEVKKQVDEQLQKGYIXPSTSPWGAPVIFVEKKDKTKRMCVDYRALNEVTIKNKYPLPQIDDLFDQLKGARVFSKIDLXSGYHQLMIREEDILKTAFTTRYGLYECTVMSFGLTNTPAFFMNLMNKVFMEFXDEXKIIFIVDR

SEQ ID NO: 19021 - protein, 1112 aa, Oryza sativa
  Clone ID: TF_OSC900247j.C1.p12.fg
MIVRQHRPFNSSSFHQGASGSQNHQGGQPNCSAAPRPPTAPAQSAPSAEAKKETGTKPGSCFNCGEHGHFADKCPKPRRAGPRFVQAHVNHASAEEAQPAPEVVLGTFPINSVPATVLFDSGATHSFISKKFVGIHGLRKEELSTPMRVHTPGNSSTLVSYSPSVLIEIHRSRFLANLILLESKDLDVILGMDWMTKFKGVIDCANRTVTLTNEKGETVVYKSPVSRKQGISLNQIEVENPVAIEEKSSRKLEDISIVCEYPEVFPEDLTTMPPKREIEFRIDLAPGTAPIYKRPYRMVANELAEVKKQVDEQLQKGYIRPSTSPWGAPVIFVQKKDKTKRMCVDYRALNEVTIKNKYPLPRIDDLFEQLKGAKVFSKIDLRSGYHQLRIREEDISKTAFTTRFGLYECTVMSFGLTNAPAFFMNLMNKVFMEFLDKFVVVFIDDILIYSKSEEEHEQHLRLVLEELKEQQLYAKFSKCDFWLSEDKFLGHVITAQGIAVDPANVESVTKWTPPKTVSQIRSFLGLAGYYRRFIEIFSRIARPMTQLLKKDEKFKWTAECDKSFEELKKKLVSAPVLILPDQTKDFQVYCDASRHGLGCVLMQEGRVVAFASRNRCEVYTDHKSLKYIFTQPDLNLRQRRWLELIKDYDMSIHYHPGKANVVADALSRKSYCNALCTEGMCKELQQELERLNMGIVEHGFVAALEARPTLVDQVRAAQVNDPEIAELKKNMRVRKARDILEDEHGMIWMGERLCVPDDKELNDLILTEAHQTQYSIHPGSTKMYQDLKEKFWWASMKREIAEFVALCDVCQRVKAEHQRPAGLLQPLQIPEWKWEEIGMDFITGLPRTSSGHDSIWVVVDRLTKVAHFIPVHTTYTGKSSLTTTAIRPVYIWRRSKRCTVGSVNRSIVRPLFWDQTGERQLFGTEVLTEAEEKVRTVRERLRIAQSRQKSYADNLRRELTFEAGDYVYLRVTPLRGVHRFQTKGKLAPRFVGPYRILERRGEVAYQLELPSNMIGIHDVFHVSQLKKCLRVPEEQADSEHINIQEDLTYVEKPVRILETSERRTRNKVTRFCRVQWSHHSDEEATLEREDELKAAHPHLFTSSSESRGRDSV

SEQ ID NO: 19022 - protein, 868 aa, Oryza sativa
  unsure (1)..(868): unsure at all Xaa locations
  Clone ID: TF_OSC900257j.C1.p11.np
TLSSXHVLILVRIFHACIIFXKLQKPYAAQILTPHLASPPPPAGSGQSPLVARXIRKRQRPSQGPLLHHAHPCLDASTREKLHFKAGSYPFPLVASVVCLLVHPANRSLIAMGATSKTMHPQPAIQSYFSWIIMTMKHGQMSRAVAHHNTNMSNTAIIPSTELVVISIAKHIVLARSSKXHKREAGADTRAPHVSGTKGRRTVDQVRTWPRVRVHHVDGPNRPEPIERPRGAAARGTGAAQSRPGRAKARRRRPATAWRAAATARLEVARSGGRRRLEHADEWWGEGAPWGGGFGDTMGKRRGCRGMARRGEAADGGRAERRRQEQRCGWRIARGAAVAAWFSCTGGLGREGKMEGGAGNVFIGEGRSDRARERRSRRQPPAAWAASWGVGGGFGRRWGMRRTWGGGVPAGGLVRGVEKEGGNGSVVGRLRRPWRRLEPEKGPAPPSAKGERKGRKKDFLRGRIGGRPREGKGRPAXPGKTPSKLADVQRTHPPHFSSAADPLAADDWLRDIKIKLNLCQCDPVEKATFAAYYLQGASAAWWETYKTLIPPDEPNNWTVFWEGFISAHIPPGLMEIKKKEFLNLKQGNMTFMEFMERFNYLGRYVAADMNTEAKKVELCRDRLAPELNHAITAHEITSMKSLVEKALRVESKKEVVEDRKRKWAAKKFASGSSSTRPRLAPSPVVRPMAPQPPRLPRTVQAAGDASRNDNVACYNCGPRLPRTVQAAGDASRNDNVACYNCGKKGHYSPNCPYPKTGKSGPHTQGADAALAGCRPTHRSSSPGAQPASGQTFTISATNKSIKVTNNASSIYFSINFTGYRQNQLDDADSAAMSSTILNRAVSSDKSPTSHVEAQTTTFLSLALLLRRL

SEQ ID NO: 19023 - protein, 469 aa, Oryza sativa
  Clone ID: TF_OSC900321j.C1.p7.fg
MAENDRKTGPGVAEGDWRDLRGSAMDGAPDARAEERAEPKQQSGSDFWAARQDIGQTWYKGLNRLAVQRLVTKCARMGRPSQADEIMRSRGTSRVEDWSHRIIANTTRVKDLLAQQGGSKALKGVKPAKMEDDDWEEMQLQAAATIRLCLSDQKLYGLKMQEGADLTVHVNVFNQLVTDLVKMDVEVDDEDKAIVFLCSLPESYEHVVTTLTYGKETIKTKDITSALLARDQMRKNKEGETSQAEGLLVKEDHAGHKVKKNKKKKMVQCFRCDEWGHISRECPTLKGKAKANTVTSSNDSDSDGCDLLTMSSAQSKDAEAWILDSASSFHVTPRKEWFSSYKSGEFGFVYLGDDTSYPAVGVGEVKIKLEDGGEHVLQGVRHVPGQKRNLISLETLHEEGLIFRGNRNRKTMEIMKGKMTVMTGEKVESHLYKLRGCTVVGGVQEEAVAGIAIVFGGGGSGADSSCGLR

SEQ ID NO: 19024 - protein, 1791 aa, Oryza sativa
  unsure (1)..(1791): unsure at all Xaa locations
  Clone ID: TF_OSC900337j.C1.p10.np
MADHPPNHRGEGMDDFVAELARMTLVVGYPNAPEYSTVPPLNGELPHRVRLEVHGYVGTCLANMVVEASGGTADHACXEAAYLMMARLRERHNYIFCNTAYHFHPRRASGDDVNTFRPTAGENDTTFGHMCAVMRGMDRMHSDLHKASKALNDRKLVRIIALKDEIARLKKENAXLKGLSALGGVRIRTTPRKSTTAPVRIQLAPRNPPPPAAPPAAPPAVPVAPVSAPASALSFAPASAARGLASGSHDRVAPVSAPASALSFAPASAARGLASGSHDRSSSMVNTRNGSRAAGEDSNSEERTDGGHPNSASGNGPPLLPENPTLAQVMTHQTQMMAAMMQQQHQQMHQRMQQQTEQQQQXQFGPPLPQFKLPEFLRVRLPTFSSTTNPMEANDXLHAIEKKLNLLQCNDQEKVAFATHQLQGPTSAWWDNHMATRSLGTEVTWAEFCRSFRKAQVPDGVVVQKKREFRALHQGNRTVTEYLYEFNRLARYAPEDVRTDAEKQEKFLAGLDDELTNQLISGDYADFEKLVDKAIHQEDQRNKMDRKRKAAQFRSNQGSHQRPRFFPGQQGGPTTMIVRQHRPFNSSSFHQGANGSQNHQGGQPNRSAAPRPPMAPAXSAPSAQAKKETGTKPGSCFNCGEHGHFADKCPKPRRAGPRFVQARVNNATVFDSAPEVVLGTFPVNSIPATVLFDSGATHSFISKKFVGIHGLIREELSTPMRVHTPGNSSTSVQFSPSIRIEIQRSPFLANLILLESKDLDVILGMDWLTKFKGVIDCANRTVTLTSEKGETLVYKSPVSPKQGASLNQIEVEIPAVTEEKSSRKLEDIPIVCEYPEVFPEDLTTMPPKREIEFRIDLTPRTAPIXKRPYRMAANELAEVKKQVDEQLQKGYIRPSTSPWGAPVIFVEEKDKTKRMCVDYRALNEVTIKNKYLLPRIDDLFDQLKGAKVFSKIDLRSGYHQLRIQEENIPKTAFTTRYGLYECTVMSFGLTNAPAFFMNLMNKVFMEFLDKFVVVFIDDILIYSKSEEEHEKLKEHQLYAKFSKCDFXLSEVKFLGHVITAQGVAVNPLNVESVTKWTPPKTVSQIRSFLGLAGYYCRFIENFSRIARPMTQLLKKDEKFKWTAECDKSFEELKERLVSAPVLILPDQTKDFQVYCNTSRHGPGCVLMQEGRVVVYASWQLCPHEGNYPTHDLELAAVVHDLKIWRRYLIGNRCEVYTDHKSLKYIFTQPDLNLRQRRWLELIKDYDMSIHYHPGKANVVADALSRTSYCNALCTEGMCKELQQELEHFNLELVEHGYVAALEARPTLVDQVRAAQVNDPEIAELKKNTRVGKARDFLEDEHGTIWMGERLCVPDDKELKDLILTEAHQTQYSIHPGSTKMYQDLKEKFXXASMRREIAEFVALCDVCQLVKAEHQRLVGLLQPLQIPEWKWEEIGMDFITGLPRTSSGHNSIWVVVDRLTKVAHFIPVHTTYTGKRLAELYLSRIMCLHGVPKKISDRGSQFTSNFWQKLQEELGTRLNFSTTYHPQTDGQTERVNQILEDMLKACALDFGGAWDKNLPYVEFSYNNSYQASLQMAPFEALYGRKCRTPLFWDQTGERQLFGTEVLTEAEEKVRTVRERLRIAQSRXKSYTENRRRELTFEAGDYVYLRVTPLRGVHRFQSKGKLAPRFVGPYKILERRGEVAYQLELPSNMIGIHDVFHVSQLKKCLRVPEEQADSEHIDIQEDLTYVEKPVRILETSERRTRNKVTRFCRVQWSHHSEEETTWEREDELKAAHPHLFASSSESRGRDSV

SEQ ID NO: 19025 - protein, 854 aa, Oryza sativa
  Clone ID: TF_OSC900388j.C1.p21.gm
MATRPPGTEVTWAEFCRSFRKAQVPDGVVAQKKREFRALHQGNRTVTEYLHEFNRLVRYAPEDVRTNAEKQEKFLVGLDNELTNQLISRDYADFEKLGGPTTMIVRQHRPFNSSSFHQGASGSQNHPGGQPNRSAAPRPPMAPTQSAPSAQAKETRAKPGSCFNCGEHGHFADKCPKPRRAGPRFAQARVNHASAEEAQAAPEVVLVTLTNEKVEAVVYKSPVSLKQGISLNQIEVENPVATEEKSSRKLEDIPIVCKYPEVFPKDLTTMPTKREIEFRIDLAPGTAPIYKRPYRMAANELAEVKKKVDEQLQKGYIRPSTSPWGAPVIFVEKKDKTKRMCVDYRALNEVTIKNKYPLPRIDDLFDQLKGAKVFSKIDLRSGYHQLRIREEDIPKIAFTTRYGLYECTVMSFGLTNAPTFFMNLMNKVFMEFLDKFVVVFIDDILIYSKSEEEHEQHLRLVLEKLQEHQLYAKFSKGDFWLSEVKFLGHVITAQGVAVDPSNVESVTKWTPPKTVSQIRSFLGLAELKKNMRVGKARDFHEDEHGTIWLGERLCVPDDKELKDLILTEAHQTQYSIHPGSTKMYQDLKEKFWRASMRREIAEFVALCDVCQRVKKSYADNRRREFTFEAGDYVYLRVTPLRGVHRFQTKGKLAPRFLGPYKILERRGEVAYQLELPSNMIGIHDVFHVSQLMKCLRSSLAAARRRSPPLSAVGRSPPCVTVASRCAAARHCRRVGLGPARARPAASRLRRPIYRAVDRGRSTPPPTWLPRGRHVCAASAPRVHHVVRRSSPHDPAETKGYKVGFLDLNHDPAETKGYKVGFLDLNNCLHWCCRLVRHLLLLAHQPLPLRVRHHQ

SEQ ID NO: 19026 - protein, 256 aa, Oryza sativa
  Clone ID: TF_OSC100133j.C1.p1.gm
AMQPEGQPVTWARFTAAFRRTHVPAGVVALKKREFRELKQGNRSVMEYLHEFNNLARYTPEDVRKDEEKQEKFLAGMDPELSVRLVSGDYPDFQRLVDKSIRLEAKHKELESHKRRLANFRNQQGANQRVRYTNPYPGGSSSQQQQQQQQPRSAPRPQFVVRVPQPQQQQNQQGTRAPRPPTPTVQPGQGRRDASGPQRLCFNCFEPGHFADKCPKPRRQQGQAPPRPNNGGKDVSRGRVNHVTAEDVLTTPDVIV

SEQ ID NO: 19027 - protein, 1737 aa, Oryza sativa
  Clone ID: TF_OSC100292j.C1.p6.fg
MSWHRAGVLLLGAQSCLPVPGVPAVGGIGSVLLSMARMGWKLCHVFRLYTVVMAGSVTRRGLDMTGFVLELRGMCVVLGYPHGVDYQGRPLPEQEGDDAEPHAAWEVTAVILAGSPERTSLAVTAGGDSFPATCQSAALLAIGTLHQRYPDELQHSPFRYHPRRGGARDYATFRDASSEDDATIMHLARMVEAYDAARIDFHQMVRRGMVENNMKILELRQENLQLKKDLDAVEAQLHQLKIAQGEVCRPKRRRVCRSQKITARKSTSRPELVRQSLAWTCFVETPRAEPAPVVPQEGEASGVGSTEDALLLTFRPGPSQRRSAATGDGNQPEGSNHHHQGSPPPPPPPPPPPPPDTNAILSQILAQQANMMTAFLHHLQNPPQHNAPPPPPQHSKLAEFLRIRPPTFSSSNNPVDALDWLHAVGKKLDTVQCSDEEKVIFAAHQLQGPASLWWDHFQATQPEGQPITWARFTAAFRRTHVPAGVMALKKREFRELKQGNRSVMEYLHEFNNLARYAPEDVREDEEKQEKFLAGMDPELSVRLVSGDYPDFQRLVDKSIRLEAKHKELESHKCRLANFRNQQGANQRVRYTNPYPGGSSSQQQQQQQQPRSAPRPQFVVRVPQPQQQQNQQGTRAPRPPTPTVQPGQGRRDAQGPQRLCFNCFEPGHFADKCPKPRRQQGQAPPRSNNGGKDVIRGRVNHVTAEDVLTTPDVIVGTFLIHSIPATILFDSGASHSFISVPFVGRNQLGVERLRNPVLITTPGGVMTAKYYSPAVPIEIQGIPFPSDLILLDTKNLDVILGMNWLAQFQGVVDCARRTVTLYRGPEQPVVFFAPPTSVSSSELHQIGLSEIPIVREFGDVFPEELPGMPPKREIKFRIDLAPGTTPLYKRPYRMAANELAEVNKQLEELALNEVTIKNKYPLPRIDDLFDQLKGATVFSKIDLRSGYHQLRIRDEDIPKTAFTTRYGLYEFTVMSFEEDHQHHLRLVLGKLREHQLYAKLSKCEFWLSEVKFLGHVISAKGVAVDPETVTAVTDWKQPKTVTQVRSFLGLAGYYRRFIENFSKIARPMTQLLKKEEKFVWSPQCEKAFKTLKERLVSSPVLILPDTRKDFMVYCDASRQGLGCVLMQDGHVVAYASRQLRPHEGNYPTHDLELAAVVHALKIWWHYLIGNRCEIYTDHKSLKYIFTQSDLNLRQRRWLELIKDYDVGIHYHPGKANVVADALSRKSHCNTLNVRGIPPELNQQMEALNLSIVGRGFLAALEAKLTLLDRIREAQKNDPDMHGLLKNMKQGKAVGFTEDEHGTLWNGNRVCVPDNRELKQLIFQEAHESPYSIHPGSTKMYLDLKEKYWWVSMKREIAEFVALCDVCQRVKAEHQRPAGLLQPLQVPEWKWDEIGMDFITGLPKTQGGYDSIWVVVDRLTKVARFIPVKTTYGGNKLAELYFARIVSLHGVPKKIVSDRGSQFTSHFWKKLQEELGTRLNFSTAYHPQTDGQTERLNQIQEDMLRACVLDFGKTWDKSLPYAEFSYNNSYQASIQMAPYEALYGRKCRTPLLWDQVGESQVFGTDILREAEAKVRTIRDNLKVAQSRQKVMQITDAVTWNSQWTILCTFGSRHCGVYTGFRQKGSSHLEVAYQLELPASLGNMHDVFHVSQLKKCLRVPSEQADSEQIEVREDLTYVERPVKILDTMERRTRNRVIRFCKVQWSNHAEEEATWEREDELKAAHPDLFASSSESWGRDSV

SEQ ID NO: 19028 - protein, 1532 aa, Oryza sativa
  Clone ID: TF_OSC100644j.C1.p4.fg
MSWHRAGVLLLGAQSCLPILEVPAVGRVGSVLLSMARMGWKLCHVFRPYTVVMAGSLNRRGLDLTGFVLELRGMCVVLGYPHGVDYQGKQLPEQEGDDAEPHAAWEVTAVILTGSPERTSLAVTAGGDSFSAACQNAALLAIGTLHQRYPDELQHSPYRYHPCRGGARDYATFRDASSEDDATIMHLARMVEAYNAARIDFHRMLKKDLDAVEAQLCQLKIAQGEMVTTRRSAVTGEGNHPEGSNHSNHGSPPPPPPPPPPPPPDTNPILTQILAQQANMMAAFLHHIQNPPQHNAPPPPPPPQHSKLAEFLRIRPPTFSSSNNPVDALDWLHAAGKKLDTVQCNDEEKVIFATHQLQGPASLWTHVPAGVMALKKREFRELKQGNHSVMEYLHEFNSLARYAPEDVWEDEEKQEKFLAGMDPELSVRLVSGDYPDFQRLVDNSIRLEAKHKELESHKRRLANFRNQQGANQMIRYTNPYPGGSSSQQQQQPRSAPRPQFVVRVPQSQQQQSQQGTRAPRPPAPAVQLGQGRRDAQGQQRLCFNCFEPGHFADKCPKPRRQQGQAPPRPNNGGKDVTRGRVNHVTAEDVLTTPDVIVDTKNLDVILGMNWLAQFQGVVDRARRTVTLYRGPDQPVVFFAPPTSAGSSVLNQLGLPEIPIVSEFGDVFPEELPSMPPQREIEFQIDLAPGTTPLYKRPYRMAAHELAEVKKQLEELKEKGYIRPSTSPWGSPVIFVEKKDKTKRICVDYRALNEVTIKNKYALPRIDDLFDQLKGATVFSKIDLRSGYHQLRIREEDIPKTAFTTHYGLYEFTVMSFGLTNAPAFFMNLMNKVFMEYLDKFVVVFIDDILVYLQSEEDHQQHLRLALGKLREHPLYAKLSKCEFWLSEVKFLGHVISAKGVAVDPETVTAVTDWKQPKTVTQVRSFLGLAGYYRRFIENFSKIARPMTQLLKKEEKFVWSPQCEKAFQTLKEKLVSSPVLILLDTRKDFLVYCDASRQGLGCVLMQEGHVVAYASRQPRPHEGNYPTHDLELAAVRRWLELIKDYDVGIHYHPGKANVVADALSRKSSCNTLGVRGIPPELNQQLEALNLSIVSHGFLATLEAKPTLLDQIREAQKNDLDMHGILKNMKQGKAAGFTEDEHGTLWNGNRCVKAEHQRPARLLQPLQVPEWKWDEIGMDFITGLPKTQGRYDSIWVVVDRLTKVARFIPVKTTYGGNKLAELYFARIVSLHGVPKKIVSDQGSQFTSDIWKKLQEELGTRLNFSTAYHPQTDGQTERLNQILEDMLHACVLDFGKTWDKSLPYAEFSYNNSYQASIQMAPYEALYGRKCQTPLLWDQVGESQVFGTDILREAEAKVRTIRDNLKVAQSRQKSYADTRRRNLEFAVDDFVYLRVTPLRGVHRFQMKGKLAPRFVGPFRIIARRGEVAYQLELPTSLGNVHDVFHVSQLKKCLRVPSEQADSEQIEVHEDLTYVERPVKILDTMEHRTRNRVIRFCKVQWSNHAEEEATSEREDELKAAHLDLFASSSESRGRDSV

SEQ ID NO: 19029 - protein, 2333 aa, Oryza sativa
  Clone ID: TF_OSC101104j.C1.p16.fg
MAGSVTRRGLDMTGFVLELRGMCVVLEYPHGVDYQARPLPEQEGEDAEPHAGWEVTAVILSGSPERTSLAVTAGGDSFPAACQNAALLAIGTLHQRYPDELQHSSYRYHPRRGGARDFATFRDASSEDDATVVHLARMVEAYDAARIDFHQMVRRGMVENNMKILELRQENLQLKKDLDALEAQLHQLKIAQGEISRPKRRRVCRSQKITARKSTSRPELVRQSLAWTCFVETPRAEPAPVVPQEGEASGVGSSEGALLLTFRPGPSQRRNVNTGEGNQPEGSNPNPQGNPPPPPPPDTNAILTQILAQQANMMNAFLHHLQNPPQQNAPPPPPQHSKLAEFLRIRPPTFSSSNNPVDALDWLHAVGKKLDTVQCSDEEKVIFAAHQLQGPASIWWDHFQATQPAGQPITWARFTSAFRRTHYLHEFNNLARYAPEDVREDEEKQEKFLAGMDPELSVRLVSGDYPDFQRLVDKSIRLEAKHKELESHKRRLANFRNQQGANQRVRYTNPYPGGSSSQQQQQQQQPRSAPRPQFVVRVPQPQQQQNQQGTRAPRPPTPAVQPVQGRRDAQGQQRLCFNCFEPGHFADKCPKPRRQQGQAPPRSNNGGKDVIRGRVNHVTAEDVLTTPDVIVGTFLVQSIPATILFDSGASHSFISVPFVGRNQLGVERLRNPLLITTPGGVMTAKYYSPAVPIEIQGIPFPSDLILLDTKNLDVILGMNWLAQFQGVVDCARRTVTLYRGPEQPVVFFAPPTSVRSSELHQIELSEIPIVREFGDVFPEELPGMPPKREIEFRIDLAPGTTPLYKRPYRMAANELAEVKKQLEELKEKGYIRPSTSPWGAPVIFVEKKDKTKRMCVDYRALNEVTIKNKYPLPRIDDLFDQLKGATVFSKIDLRSGYHQLRIREEDIPKTAFTTRYGLYEFTVMSFGLTNAPAFFMNLMNKVFMEYLDKFVVVFIDDILIYSQSEEDHQHHLRLVLGKLREHQLYAKLSKCEFWLSEVKFLGHVISAKGVAVDPETVTAVTDWKQPKTVTQIRSFLGLAGYYRRFIENFSKIARPMTQLLKKEEKFVWSPQCEKAFQTLKEKLVSSPVLILPDTRKDFMVYCDASRQGLGCVLMQDGHVVAYASRQLRPHEGNYPTHDLELAAVVHALKIWRHYLIGNRCEIYTDHKSLKYIFTQSDLNLRQRRWLELIKDYDVGIHYHPGKANVVADALSRKSHCNTLNVRGIPPELSQQMEALNLSIVGRGFLAALEAKPTLLDQIREAQKNDPDMHGLLKNMKQGKAAGFTEDEHGTLWNGKRVCVPDSRELKQLILQEAHESPYSIHPGSTKMYLDLKEKYWWVSMKREIAEFVALCDVCQRVKAEHQRPAGLLQPLQVPEWKWDEIGMDFITGLPKTQGGYDSIWVIVDRLTKVARFIPVKTTYGGNKLAELYFARIVSLHGVPKKIVSDRGSQFTSHFWKKLQEELGTRLNFSTAYHPQTDGQTERLNQILEDMLRACVLDFGKTWDKSLPYAEFSYNNSYQASIQMAPYEALYGRKCRTPLLWDQVGESQVFGTDILREAEAKVRIIRDNLKVAQSRQKSYADNRRRDLEFAVDDFVYLRVTPLRGVHRFQTKGKLAPRYVGPFRIIARRGEVAYQLELPASLGNVHDVFHVSQLKKCLRVPSEQADSEQIEVREDLTYVEKPVKILDTMERRTRNRVIRFCKVQWSNHAEEEATWEREDELKAAHPDLVEVEAVDWENEQGKTHHLDHIESQTSWDPGSGCQFGLNHHRPWVKAAARAEEAAKEEAARARQAEATAAAGASTGPTPSGNPQATASGEARDVAAGTSPGPTSPGDAQDQTGPGDIPEPSTSSGGPSRIAFSPRRLFSSSSVAPLSAEPILQALAAANTAVLDGFSAQVEALRAERAELEAAWARVEEGRRSVDAMVEVGRKAHRRHISELEARKAALAEIAREVEEEREAALIATTAMIEAQDTLRLQHASWEAELKKKLDAAQGVLDSAAARERRVTETEAASRRREEALEARAMALEEHAGAVERGLTDREAAAVLREATLAAHEAACAEEECALRLREDALAERERALEEAEATTKRLADSLSLREAAQEEQARRNLECVRAERAALEQRAADLEAREKELDARARVGGAAAGESDLAARLAAAEHTVADMQRALDSSIGEAEALRLAGEMGPDMLWDSVSRMDRAGRQAGLWKGQTRMRPANLEGLAPHLNRMAWVLEQLPEELEKTIKSSSRDLARGAVELVLASYQARDPNFSPWMALEEFPPGTEDDARARVRDAADHIVNGFEGSAPRLAFAPSSDEEGDASGEDDGGDEAGDPGASE

SEQ ID NO: 19030 - protein, 2014 aa, Oryza sativa
  unsure (1)..(2014): unsure at all Xaa locations
  Clone ID: TF_OSC101199j.C1.p15.np
MAAGSSRPVSFLPGRALPLPLLYIRCPSSALPFPPLAARSRRRNRASAVLLSLRRRRRPSVRRRRRSGLPPGSAPPPSASPHRRRPRPRLRFARRPPEHRRPRHPEPRRRLPPLRPPFPPPSPSRGEPWTVPFVSPFPPLSRVPLRRAVGRRRRPSGRGCAPSRRPRRRGRPRARPRGCQVGPAVSRPRPRVRLTRGTHGADRRQPRAPGPPWTHPGHIRTKARASVAKHYRFHMSNGANEGYTANEGYTSCGPVVEMSKHRVGALLRGAQFRLPVPGVPAVGGIGSMYTSDQSKYSNSRALGYGQAEQCTQMAGSVTRRGLDMTGFVLELRGMCVVLEYPHGVDYQARPLPEQEGEDAEPHAGWEVTAVILSGSPERTSLAVTAGGDSFPAACQNAALLAIGTLHQRYPDELQHSSYRYHPRRGGARDFATFRDASSEDDATVVHLARMVEAYDAARIDFHQMVRRGMVENNMKILELRQENLQLKKDLDALEAQLHQLKIAQGEISRPKRRRVCRSQKITARKSTSRPELVRQSLAWTCFVETPRAEPAPVVPQEGEASGVGSSEGALLLTFHGETRRNVNTGEGNQPEGSNPNPQGNPPPPPPPDTNAILTQILAQQANMMNAFLHHLQNPPQQNAPPPPPQHSKLAEFLRIRPPTFSSSNNPVDALDWLHAVGKKLDTVQCSDEEKVIFAAHQLQGPASIWWDHFQATQPAGQPITWARFTSAFRRTHVPAGVVALKKREFRXLKQGNRSVMEYLHEFNNLARYAPEDVREDEEKQEKFLAGMDPELSVRLVSGDYPDFQRLVDKSIRLEAKHKELESHKRRLANFRNQQGANQRVRYTNPYPGGSSSQQQQQQQQPRSAPRPQFVVRVPQPQQQQNQQGTRAPRPPTPAVQPVQGRRDAQGQQRLCFNCFEPGHFADKCPKPRRQQGQAPPRSNNGGKDVIRGRVNHVTAEDVLTTPDVIVGTFLVQSIPATILFDSGASHSFISVPFVGRNQLGVERLRNPLLITTPGGVMTAKYYSPAVPIEIQGIPFPSDLILLDTKNLDVILGMNWLAQFQGVVDCARRTVTLYRGPEQPVVFFAPPTSVRSSELHQIELSEIPIVREFGDVFPEELPGMPPKREIEFRIDLAPGTTPLYKRPYRMAANELAEVKKQLEELKEKGYIRPSTSPWGAPVIFVEKKDKTKRMCVDYRALNEVTIKNKYPLPRIDDLFDQLKGATVFSKIDLRSGYHQLRIREEDIPKTAFTTRYGLYEFTVMSFGLTNAPAFFMNLMNKVFMEYLDKFVVVFIDDILIYSQSEEDHQHHLRLVLGKLREHQLYAKLSKCEFWLSEVKFLGHVISAKGVAVDPETVTAVTDWKQPKTVTQIRSFLGLAGYYRRFIENFSKIARPMTQLLKKEEKFVWSPQCEKAFQTLKEKLVSSPVLILPDTRKDFMVYCDASRQGLGCVLMQDGHVVAYASRQLRPHEGNYPTHDLELAAVVHALKIWRHYLIGNRCEIYTDHKSLKYIFTQSDLNLRQRRWLELIKDYDVGIHYHPGKANVVADALSRKSHCNTLNVRGIPPELSQQMEALNLSIVGRGFLAALEAKPTLLDQIREAQKNDPDMHGLLKNMKQGKAAGFTEDEHGTLWNGKRRVKAEHQRPAGLLQPLQVPEWKWDEIGMDFITGLPKTQGGYDSIWVIVDRLTKVARFIPVKTTYGGNKLAELYFARIVSLHGVPKKIVSDRGSQFTSHFWKKLQEELGTRLNFSTAYHPQTDGQTERLNQILEDMLRACVLDFGKTWDKSLPYAEFSYNNSYQASIQMAPYEALYGRKCRTPLLWDQVGESQVFGTDILREAEAKVRIIRDNLKVAQSRQKSYADNRRRDLEFAVDDFVYLRVTPLRGVHRFQTKGKLAPRYVGPFRIIARRGEVAYQLELPASLGNVHDVFHVSQLKKCLRVPSEQADSEQIEVREDLTYVEKPVKILDTMERRTRNRVIRFCKVQWSNHAEEEATWEREDELKAAHPDLVKSKPSIGKTSK

SEQ ID NO: 19031 - protein, 1777 aa, Oryza sativa
  Clone ID: TF_OSC101199j.C1.p8.fg
MDEVGGRWTFSRANEGYTSCGPMAGSVTRRGLDMTGFVLELRGMCVVLEYPHGVDYQARPLPEQEGEDAEPHAGWEVTAVILSGSPERTSLAVTAGGDSFPAACQNAALLAIGTLHQRYPDELQHSSYRYHPRRGGARDFATFRDASSEDDATVVHLARMVEAYDAARIDFHQMVRRGMVENNMKILELRQENLQLKKDLDALEAQLHQLKIAQGEISRPKRRRVCRSQKITARKSTSRPELVRQSLAWTCFVETPRAEPAPVVPQEGEASGVGSSEGALLLTFRPGPSQRRNVNTGEGNQPEGSNPNPQGNPPPPPPPDTNAILTQILAQQANMMNAFLHHLQNPPQQNAPPPPPQHSKLAEFLRIRPPTFSSSNNPVDALDWLHAVGKKLDTVQCSDEEKVIFAAHQLQGPASIWWDHFQATQPAGQPITWARFTSAFRRTHYLHEFNNLARYAPEDVREDEEKQEKFLAGMDPELSVRLVSGDYPDFQRLVDKSIRLEAKHKELESHKRRLANFRNQQGANQRVRYTNPYPGGSSSQQQQQQQQPRSAPRPQFVVRVPQPQQQQNQQGTRAPRPPTPAVQPVQGRRDAQGQQRLCFNCFEPGHFADKCPKPRRQQGQAPPRSNNGGKDVIRGRVNHVTAEDVLTTPDVIVGTFLVQSIPATILFDSGASHSFISVPFVGRNQLGVERLRNPLLITTPGGVMTAKYYSPAVPIEIQGIPFPSDLILLDTKNLDVILGMNWLAQFQGVVDCARRTVTLYRGPEQPVVFFAPPTSVRSSELHQIELSEIPIVREFGDVFPEELPGMPPKREIEFRIDLAPGTTPLYKRPYRMAANELAEVKKQLEELKEKGYIRPSTSPWGAPVIFVEKKDKTKRMCVDYRALNEVTIKNKYPLPRIDDLFDQLKGATVFSKIDLRSGYHQLRIREEDIPKTAFTTRYGLYEFTVMSFGLTNAPAFFMNLMNKVFMEYLDKFVVVFIDDILIYSQSEEDHQHHLRLVLGKLREHQLYAKLSKCEFWLSEVKFLGHVISAKGVAVDPETVTAVTDWKQPKTVTQIRSFLGLAGYYRRFIENFSKIARPMTQLLKKEEKFVWSPQCEKAFQTLKEKLVSSPVLILPDTRKDFMVYCDASRQGLGCVLMQDGHVVAYASRQLRPHEGNYPTHDLELAAVVHALKIWRHYLIGNRCEIYTDHKSLKYIFTQSDLNLRQRRWLELIKDYDVGIHYHPGKANVVADALSRKSHCNTLNVRGIPPELSQQMEALNLSIVGRGFLAALEAKPTLLDQIREAQKNDPDMHGLLKNMKQGKAAGFTEDEHGTLWNGKRVCVPDSRELKQLILQEAHESPYSIHPGSTKMYLDLKEKYWWVSMKREIAEFVALCDVCQRVKAEHQRPAGLLQPLQVPEWKWDEIGMDFITGLPKTQGGYDSIWVIVDRLTKVARFIPVKTTYGGNKLAELYFARIVSLHGVPKKIVSDRGSQFTSHFWKKLQEELGTRLNFSTAYHPQTDGQTERLNQILEDMLRACVLDFGKTWDKSLPYAEFSYNNSYQASIQMAPYEALYGRKCRTPLLWDQVGESQVFGTDILREAEAKVRIIRDNLKVAQSRQKSYADNRRRDLEFAVDDFVYLRVTPLRGVHRFQTKGKLAPRYVGPFRIIARRGEVAYQLELPASLGNVHDVFHVSQLKKCLRVPSEQADSEQIEVREDLTYVEKPVKILDTMERRTRNRVIRFCKVQWSNHAEEEATWEREDELKAAHPDLVEVEAVDWENEQGKTHHLDHIESQFIKLC

SEQ ID NO: 19032 - protein, 2014 aa, Oryza sativa
  unsure (1)..(2014): unsure at all Xaa locations
  Clone ID: TF_OSC101263j.C1.p2.np
MEPEIAAPISFPSGRPLSLPTLFKRSPCLPPPFPPSAARSPRRIRARAVVLSLRRRRRAPVRRRRRPGPPPASASPPSASPRSRRPRPLLRFARRPPEHHRPRRPEPRRRLSPLRSPFPSSPSTRGEPRTHFVSPFPPLSRPPLRRAYGRIYLNSRVITVLFSHAYLPLLRPYYCYCYYYLVHPRTNKTPTSEHSTHGTGFRRARGAWFXXXHLGHIRTGLRASVAKHYRFHMSSGANEGYTSCGPVVEMSWHRAGVLLLGAQSCLPVPGVPAVGGIGSMYTSDQSIIYSNSRALGYGQAEQCTQMAGSVTRRGLDMTGFVLELRGMCVVLGYPHGVDYQARPLPEQEGDDAEPHAAWEVTAVILAGSPERTSLTVTAGGDSFPAACQSAALLAIGTLHQRYPDELQHSPYRYHPRRGGARDHATFRDASSEDDATIVHLARMVEAYDAARIDFHQMVRRGMVENNLKILELRQENLQLKKDLDAVEAQLHQLKIAQGEICRPKRRRVCRSQKITARKSTSRPELVRXSLAWTCFVETPRAEPAPVVPQEGEASGVGSTEDALLLTFHGETRRNANTGDGNQPEGSNHNHQGNPPPPPPPPPPPPPDTNAILTQILAQQANMMTAFLHHLQNPPQLNPPPPPPQHSKLAEFLRIRPPTFSSSNNPVDALDWLHAVGKKLDTVQCSDEEKVIFAAHQLHGPASLWWDHFQAMQPEGQPVTWARFTAAFRRTHVPAGVVALKKREFRELKQGNRSVMEYLHEFNNLARYTPEDVRKDEEKQEKFLAGMDPELSVRLVSGDYPDFQRLVDKSIRLEAKHKELESHKRRLANFRNQQGANQRVRYTNPYPGGSSSQQQQQQQQPRSAPRPQFVVRVPQPQQQQNQQGTRAPRPPTPTVQPGQGRRDASGPQRLCFNCFEPGHFADKCPKPRRQQGQAPPRPNNGGKDVSRGRVNHVTAEDVLTTPDVIVGTFLIHSIPATILFVSGASHSFISVPFVGRNQLGVQCLRNPLLITTRGGVMPAKYYSPAVPIEIQGIPFPSDLILLDTKILDVILGMNWLAQFQGVVDCARRTVTLYRGPEQPVVFFAPPTSVRSSELHQIGLSEIPIVREFGDVFPEELPGMPPKREIEFRIDLAPGTTPLYKRPYRMAANELAGVKKQLEELKEKGYIRPSTSPWGAPVIFVEKKDKTKRMCVDYRALNEVTIKNKYPLPRIDDLFDQLKGATVFSKIDLRSGYHQLRIREEDIPKTAFTTRYGLFEFTVMSFGLTNAPAFFMNLMNKVFMEYLDKFVVVFIDDILIYSQSEEDHQHHLRLVLGKLREHQLYAKLSKCEFWLSEVKFLGHVISAKGVAVDPETVTAVTDWKQPKTVTQVRSFLGLAGYYRRFIENFSKIARPMTQLLKKEEKFVWSPQCEKAFQTLKEKLVSSPVLILPDTRKDFMVYCDASRQGLGCVLMQDGHVVAYASRQLRPHEGNYPTHDLELAAVVHALKIWRHYLIGNRCEIYTDHKSLKYIFTQSDLNLRQRRWLELIKDYDVGIHYHPGKANVVADALSRKSHCNTLNVRGIPLELNQQMEALNLSIVGRGFLTTLEAKPTLLDQIREAQKNDPDMHGLLKNMKQGKAAGFTEDEHGTLWNGNRRVKAEHQRPAGLLQPLQVPEWKWDEIGMDFITGLPKTQGGYDSIWVVVDRLTKVARFIPVKTTYGGNKLAELYFARIVSLHGVPKKIVSDRGSQFTSHFWKKLQEELGTRLNFSTAYHPQTDGQTERLNQILEDMLRACVLDFGKTWDKSLPYAEFSYNNSYQASIQMAPYEALYGRKCRTPLLWDQVGESQVFGTDILREAEAKVRTIRDNLKVAQSQQKSYADNRRRDLEFAVDDFVYLRVTPLRGVHRFQTKGKLAPRYVGPFRIVARRGEVAYQLELPASLGNVHDVFHVSQLKKCLLVPSEQADSEQIEVREDLTYVERPVKILDTMERRTRNRVIRFCKVQWSNHAEEEATWEREDELKAAHPDLFDSSSESRGRDSV

SEQ ID NO: 19033 - protein, 808 aa, Oryza sativa
  Clone ID: TF_OSC101694j.C1.p1.fg
MAGSVTRRGLHMTGFVLELRGMCVVLGYPHGVDYQARPLPDQEGEDAEPHAGWEVTAVILSGSPERTSLAVTAGGDSFPAACQNAALLAIGTLHQRYPDELQHSPYRYHPRRGGARDYATFRDASSEDDATVVHLARMVEAYDAARIDFHQMVRRGMVENNMKILELRQENLQLKKDLDALEAQLHQLKIAQGEICRPKRRRVCRSQKITARKSTSRPELVRQSLAWTCFVETPRAEPAPVVPQEGEASGVGSSEGALLLTFRPGPSQRRNVNTGEGNQPEGSNPNPQGNPPPPPPPDTNAILTQILAQQANMMNAFLHHLQNPPQQNAPPPPPQHSKLAEFLRIRPPTFSSSNNPVDALDWLHAVGKKLDTVQCSDEEKVIFAAHQLQGPASLWWDHFQATQPEGQPITWARFTAAFRRTHVPAGVVALKKREFRELKQGNRSVMEYLHEFNNLARYAPEDVREDEEKQEKFLAGMDPELSVRLVSGDYPDFQRLVDKSIRLEAKHKELESHKRRLANFRNQQGANQRVRYTNPYPGGSSSQQQQQQQNQQGTRAPRPPTPTVQPVQGRRDASGPQRLCFNCFEPGHFADKCPKPRRQQGQAPPRSNNGGKDVIRGRVNHVTAEDVLTTPDVIVAPPFRFRRSPLALAVGIVLAPCSSLSAVAAELRSVAAVLRLAAAAAPLFLPTRRHLPRHRRIAVDPVRASTSPADRRSTVVIVFPNRAAAFFRFGRHSRRRRCPGVSRRPPFAFPLSSSFSGATPPRRWSPAATIGARVRAVPVGRAGEAALGRALAATKWARQSAARARGFG

SEQ ID NO: 19034 - protein, 1434 aa, Oryza sativa
  Clone ID: TF_OSC101694j.C1.p2.gm
MVTTRRNVNTGEGNQPEGSNPNPQGNPPPPPPPDTNAILTQILAQQANMMNAFLHHLQNPPQQNAPPPPPQHSKLAEFLRIRPPTFSSSNNPVDALDWLHAVGKKLDTVQCSDEEKVIFAAHQLQGPASLWWDHFQATQPEGQPITWARFTAAFRRTHVPAGVVALKKREFRELKQGNRSVMEYLHEFNNLARYAPEDVREDEEKQEKFLAGMDPELSVRLVSGDYPDFQRLVDKSIRLEAKHKELESHKRRLANFRNQQGANQRVRYTNPYPGGSSSQQQQQQQNQQGTRAPRPPTPTVQPVQGRRDASGPQRLCFNCFEPGHFADKCPKPRRQQGQAPPRSNNGGKDVIRGRVNHVTAEDVLTTPDVIVEIPIVREFGDVFPEELPGMPPKREIEFRIDLAPGTTPLYKRPYRMAANELAEVKKQLEELKEKGYIRPSTSPWGAPVIFVEKKDKTKRMCVDYRALNEVTIKNKYPLPRIDDLFDQLKGATVFSKIDLRSGYHQLRIREEDIPKTAFTTRYGLYEFTVMSFGLTNAPAFFMNLMNKVFMEYLDKFVVVFIDDILIYSQSEEDHQHHLRLVLGKLREHQLYAKLSKCEFWLSEVKFLGHVISAKGVAVDPETVTAVTDWKQPKTVTQIRSFLGLAGYYRRFIENFSKIARPMTQLLKKEEKFVWSPQCEKAFQTLKQKLDGHVVAYASRQLRPHEGNYPTHDLELAAVVHALKIWRHYLIGNRCEIYTDHKSLKYIFTQSDLNLRQRRWLELIKDYDVGIHYHPGKANVVADALSRKSHCNTLNVRGIPPELSQQMEALNLNIVGRGFLAALEAKPTLLDQIREAQKNDPDMHGLLKNMKQGKAAGFTEGEHGTLWNGKRVCVPDSRELKQLILQEAHESPYSIHPGSTKMYLDLKEKYWWVSMKREIAEFVALCDVCQRVKAEHQRPAGLLQPLQVPEWKWDEIGMDFITGLPKTQGGYDSIWVIVDRLTKVARFIPVKTTYGGNKLAELYFARIVSLHGVPKKIVSDRGSQFTSHFWKKLQEELGTRLNFSTAYHPQTDGQTERLNQILEDMLRACVLDFGKTWDKSLPYAEFSYNNSYQASIQMAPYEALYGRKCRTPLLWDQVGESQVFGTDILREAEAKVRIIRDNLKVAQSRQKSYADNRRRDLEFAVDDFVYLRVTPLRGVHRFQTKGKLAPRYVGPFRIIARRGEVAYQLELPASLGNVHDVFHVSQLKKCLRVPSEQANSEQIEVREDLTYVERPVKILDTMERRTRNRVIRFCKVQWSNHAEEEATWEREDELKAAHPDLFATAAAAPLFLPTRRHLPRHRRIAVDPVRASTSPADRRSTVVIVFPNRAAAFFRFGRHSRRRRCPGVSRRPPFAFPLSSSFSGATPPRRWSPAATIGARVRAVPVGRAGEAALGRALAATKWARQSAARARGFG

SEQ ID NO: 19035 - protein, 1864 aa, Oryza sativa
  Clone ID: TF_OSC101804j.C1.p1.np
MDEVGGRWTFSRANEGYTSCGPVVEMSKHRVGALLLGAQFRLPVPGVPAVGGIGSMYTSDQSIIYSNSRALGYGQAEQCTQMAGSVTRRGLDMTGFVLELRGMCVVLGYPHGVDYQARPLPDQEGDDAEPHAGWEVTAVILSGSPERTSLAVTAGGDSFPAACQNAALLAIGTLHQRYPDELQHSPYRYHPRRGGARDYATFRDASSEDDATIVHLARMVEAYDAARIDFHQMVRRGMIENNMKILELRQENLQLKKDLDAVEAQLHQLKIAQGEDCRPKRRRVCRSQKITARKSTSRPELVRQSLAWTCFVETPRAEPAPVVPQEGEASGVGHGGCAVAHLPSWPVAAVDEQLVGLRMVTTRRNAVTGEGNQPEGSNHNHQGNPPPPPPPPPPPPPDTNAILTQILAQQANMMTAFLHHLQNPPQHNAPPPPPQHSKLAEFLRIRPPTFSSSNNPVDALDWLHAVGKKLDTVQCSDEEKVIFAAHQLQGPASLWWDHFQATQPEGQPITWARFTAAFRRTHVPAGVVALKKREFRELKQGNRSVMEYLHEFNNLARYAPEDVREDEEKQEKFLAGMDPELSVRLVSGDYPDFQRLVDKSIRLEAKHKELESHKRRLANFRNQQGANQRVRYTNPYPRGSSSQQQQQQQQPRSAPRPQFVVRVPQPQQQQNQQGTRAPRPPTPAVQPVQGRRDASGPQRLCFNCFEPGHFADKCPKPRRQQGQAPPRSNNGGKDVIRGRVNHVTAEDVLTTPDVIVGTFLVHSIPATILFDSGASHSFISVPFVGRNQLGVERLRNPLLITTPGGVMTAKYYSPAVPIEIQGIPFPSDLILLDTQNLDVILGMNWLAQFQGVVDCARRTVTLYRGPEQPVVSFASPTSVRSSELHQIGLSEIPIVKEFGDVFPEELPGMPPKREIEFRIDLAPGTTPLHKRPYRMAANELAEVKKQLEGLKEKGYIRPSTSPWGAPVIFVEKKDKTKRMCVDYRALNEVTIKNKYPLPRIDDLFDQLKGATVFSKIDLRSGYHQLRIREEDIPKTAFTTRYGLYEFTVMSFGLTNAPAFFMNLMNKVFMEYLDKFVVAFIDDILIYSQSEEDHQHHLRLVLGKLREHQLYAKLSKCEFWMSEVKFLGHVISAKGVAVDPETVTAVTDWKQPKTVTQIRSFLGLAGYYRRFIENFSKIAQPMTQLLKKEEKFLWSPQCEKAFQTLKEKLVSSPVLILPDTRKDFMVYCDASRQGLGCVLMQDGHVVAYASRQLRPHEGNYPTHDLELAAVVHALKIWRHYLIGNRCEIYTDHKSLKYIFTQSDLNLRQRRWLELIKDYDVGIHYHPGKANVVADALSRKSHCNTLNVRGIPPELNQQMEALNLSIVGRGFLAALEAKPTLLDQIREAQKNDPDMHGLLKNMKQGKAAGFTEDEHGTLWNGKRVCVPDNRELKQLILQEAHESPYSIHPGSTKMYLDLKEKYWWVSMKREIAEFVALCDVCQRVKAEHQRPAGLLQPLQVPEWKWDEIGMDFITGLPKTQGGYDSIWVVVDRLTKVARFIPVKTTYGGNKLAELYFARIVSLHGIPKKIVSDRGSQFTSHFWKKLQEELGTRLNFSTAYHPQTDGQTERLNQILEDMLRACVLDFGKTWDKSLPYAEFSYNNSYQASIQMAPYEALYGRKCRTPLLWDQVGESQVFGTDILREAEAKVRTIRDNLKVAQSRQKSYADNRRRDLEFAVDDFVYLRVTPLQGVHRFQTKGKLAPRYVGPFRIIARRGEVAYQLELPASLGNVHDVFHVLQLKKCLRVPSEQADSEQIEVREDLTYVERPVKILHTMERRTRNRVIRFCKVQWSNHAEEEATWEREDELKAAHPDLFASSSESRGRDSV

SEQ ID NO: 19036 - protein, 1417 aa, Oryza sativa
  Clone ID: TF_OSC10946j.C1.p2.fg
MTGCILESFWDATKHKELESHKRRLANFRNQQGANQRVRYTNPYPGGSSSQQQQQQQQPRSAPRPQFVVRVPQPQQQQNQQGTRAPRPPTPTVQSGQGRRDAQGQQRLCFNCFEPGHFADKCPKPRRQQGQAPPHSNNGGKDVIRGRVNHVTAEDVLTTPDVIVGTFLVHSIPATILFDSGASHWFISVPFVGRNQLGVERLRNPLLITTPGGVMTAKYYSPAVPIEIQGIPFPSDLILLDTKNLDVILGMNWLAQFQGVVDCARRTVTLYRGPEQPVVFFAPPTSVSSSELHQIGLSEIPIVREFGDVFPEELPGMPPKREIEFRIDLAPGTTPLHKRPYRMAANELAEVKKQLEELKEKGYIRPSTSPWGAPVIFVEKKDKTKRMCVDYRALNEVTIKNKYPLPRIDDLFDQLKGATVFSKIDLRSGYHQLRIREEDIPKTAFTTRYGLYEFTVMSFGLTNAPAFFMNLMNKVFMEYLDKFVVVFIDDILVYSQSEEDHQHHLRLVLGKLREHQLYAKLSKCEFWLSEVKFLGHVISAKGVSVDPETVTTVTDWKQPKTVTQVRSFLGLAGYYRRFIENFSKIARPMTQLLKKEEKFVWSPQCEKAFQTLKEKLVSSPVLILPDTRKDFLVYCDASRQGLGCVLMQDGHVVAYASRQLRPHEGNYPTHDLELAAVVHALKIWRHYLIGNRCEIYTDHKSLKYIFTQSDLNLRQRRWLELIKDYDVGIHYHPGKANVVADALSRKGHCNTLNVRGIPPELNQQMEALNLSIVGRGFLAALEAKPTLLDQIRKAQKNDPDMHGLLKNMKQGKAAGFTEDEHGTLWNGKRVCVPDNRELKQLILQEAHESPYSIHPGSTKMYLDLKEKYWWVSMKREIAEFVALCDVCQRVKAEHQRPAGLLQPLQVPEWKWDEIGMDFITGLPKTQGGYDSIWVVVDRLTKVARFIPVKTTYGGNKLAELYFARIVSLHGVPKKIVSDRGSQFTSHFWKKLQEELGTRLNFSTAYHPQTDGQTEHLNQILEDMLRACVLDFGKTWDKSLPYAEFSYNNSYQASIQMAPYEALYGRKCRTPLLWDQVGESQVFGTDILREAEAKVRIIRDNLKVAQSRQKSYADNRRRDLEFAVGDFVYLRVTPLRGVHRFQTKGKLAPRVHTHMPRYKPEYLFGVEGFVQELRTMSFVIGFGTAPFYAQIPHDRHEEKCRVKVTLNSNSEEVPSVMFEAGGRNYIHACQEVARIAIGELRDRYSDQLADTEYRYHPRQPQGSDRGSYLETEGIENDATTRHLVEMLWAMDESRAETVLAAQDREDRNRGKICKLEDKVDRLEKELAALKGEAPPQKARIRLTARKRALFVPRYQLAPKVRVVEKEVAPADPPVIIISSDEDEESKRTHSKIEWVATQDDEDEPNEPSIDLRCSEELE

SEQ ID NO: 19037 - protein, 642 aa, Oryza sativa
  Clone ID: TF_OSC11167j.C1.p1.fg
MSWHRAGVLLLGAQSCLPVPGVPAVGGLVTAGGDSFPAACQSAALLAIGTLHQRYPDELQHSPYRYHPRRGGARDYATFRDASSEDDATIVHLAHMVEAYDAARIDFHQMVRRGMVENNMKILELRQENLQLKKDLDAVEAQLHQLKIAQGEICRPKRRRVCRSQKITARKSTSRPELVRQSLAWTCFVETPRAEPAPVVPQEGEASCVGSTEDALLLTFRPGPSQRRNAATGDGNQPEGSNHNHQGNPPQPPPPPPPPPPDTNAILTQILAQQANMMTAFLHHLQNPPQLNAPLPPPQHSKLAEFLRIRPPTFSSSNNPVDALDWLHAVGKKLDTVQCSDEEKVIFAAHQLQGPASLWWDHFQATQPEGQPITWARFTAAFRRTHVPAGVVALKKREFRELKQGNRSVMEYLHEFNNLAGYAPEDVREDEEKQEKFLVGMDPELSVRLVSGDYPDFQRLVDKSIRLEAKHKELESHKRRLANFRNQQGANQRVRYTNPYPGGSSSQQQQQQQPRSAPRPQFVVRVPQPQQQQGQQGTRAPRPPTPTVQPGQGHRDAQGQQRLCFNCFEPGHFADKCPKPRRQQGQAPPRPNNGGKDVIRGRVNHVTAEDVLTTPDVIVGSSETCFRKNYPVCRPSERLSSG

SEQ ID NO: 19038 - protein, 179 aa, Oryza sativa
  Clone ID: TF_OSC11420j.C1.p1.fg
MDPELSVRLVSGDYPDFQRLVDKSIRLEAKHKELESHKRRLANFRNQQGANQRVRYTNPYPGGSSSQQQQQQQQPRPAPRPQFVVRVPQPQQQNQQGTRASRPPTPAVQPVQGRRDASGPQRLCFNCFEPGHFADKCPKPRRQQGQAPPRSNNGGKDVIRGRVNHVTAEDVLTTPDVTV

SEQ ID NO: 19039 - protein, 716 aa, Oryza sativa
  Clone ID: TF_OSC11437j.C1.p2.fg
MTGFVLELRGMCVVLGYPHGVDYQARPLPDQEGDDAEPHAAWEVTAVILSGSPERTSLAVTAGGDSFPAACQNAALLAIGTLHQRYPDELQHSPYRYHPRRGGARDHATFRDASSEDDATVVHLARMVEAYDAARIDFHQMVRRGMVENNLKILELRQENLQLKKDLDALEAQLHQLKIAQGEDSRPKRRRVCRSQKITARKSTSRPELVRQSLAWTCFVETPRAEPAPVVPQEGEASGVGSSEAPSLFAGSVWGFQMVTTRRNVNTGEGNQPEGSNPNPQGNPPPPPPPDTNAILTQILAQQANMMTAFLHHLQNPPQQNAPPPPPQHSKLAEFLRIRPPTFSSSNNPVDALDWLHAVGKKLDTVQCSDEEKVIFAAHQLQGPASLWWDHFQATQPEGQPITWARFTAAFRRTHVPAGVVALKKREFRELKQGNRSVMEYLHEFNNLARYAPEDVREDEEKQEKFLAGMDPELSVRLVSGDYPDFQRLVDKSIRLEAKHKELESHKRRLANFRNQQGANQRVRYTNPYPGGSSSQQQQQQPRSAPRPQFVVRVPQPQQQQNQQGTRAPRPPTPAVQPVQGRRDASGPQRLCFNCFEPGHFADKCPKPRRQQGQAPPRSNNGGKDVIRGRVNHVTAEDVLTTPDVIVEKKDKTKRMCVDYRALNEVTIKNNVSRQNTNDRPDFSNLFKYQNGSGMKLGWISSPDFQKPKADMILYG

SEQ ID NO: 19040 - protein, 2006 aa, Oryza sativa
  Clone ID: TF_OSC11437j.C1.p2.np
MESESSARDSSLSGRSFLPPALFKPSPSSALSFPPLAAHSRRRNRARAVLSPRRRRRASVSRRRRSALPPDSATPPSASPHRRRPRPPLRFARRPPEHRRHRHPEPRRRLLPLRPPFSSSPLSRGEPKTVPFVSPFPPLSRVPLRRAVGRRRRPSGRGCALSRRPRRRGRPRARPRGCQVGPAVSRPRPRVRLTRGTHGADRRQPRAPGPPWTHLGRIRTGLRASVAKHYRFHMSSGTNEGYTSCGPVVEMSWRRVGAMLGAQFCLPVPGIPAVGRIGSMYTSDQSIIYSNSRALGYGQAEQCTQMAGSITRRGLDMTGFVLELRGMCVVLGYPHGVDYQARPLPDQEGDDAEPHAAWEVTAVILSGSPERTSLAVTAGGDSFPAACQNAALLAIGTLHQRYPDELQHSPYRYHPRRGGARDHATFRDASSEDDATVVHLARMVEAYDAARIDFHQMVRRGMVENNLKILELRQENLQLKKDLDALEAQLHQLKIAQGEDSRPKRRRVCRSQKITARKSTSRPELVRQSLAWTCFVETPRAEPAPVVPQEGEASGVGSSEGALLLTFHGETRRNVNTGEGNQPEGSNPNPQGNPPPPPPPDTNAILTQILAQQANMMTAFLHHLQNPPQQNAPPPPPQHSKLAEFLRIRPPTFSSSNNPVDALDWLHAVGKKLDTVQCSDEEKVIFAAHQLQGPASLWWDHFQATQPEGQPITWARFTAAFRRTHVPAGVVALKKREFRELKQGNRSVMEYLHEFNNLARYAPEDVREDEEKQEKFLAGMDPELSVRLVSGDYPDFQRLVDKSIRLEAKHKELESHKRRLANFRNQQGANQRVRYTNPYPGGSSSQQQQQQPRSAPRPQFVVRVPQPQQQQNQQGTRAPRPPTPAVQPVQGRRDASGPQRLCFNCFEPGHFADKCPKPRRQQGQAPPRSNNGGKDVIRGRVNHVTAEDVLTTPDVIVGTFLVHSIPATILFDSGASHSFISVPFVGKNQLGVERLRNPLLITTPGGVMTAKYYSPAVPIEIQGIPFPSDLILLDTKNLDVILGMNWLAQFQGVVDCARRTVTLYRGPEQPVVFFAPPTSVRSSELHQIGLSEIPIVREFGDVFPEELPGMPPKREIEFRIDLAPGTTPLYKRPYRMAANELAEVKKQLEELKEKGYIRPSTSPWGAPVIFVEKKDKTKRMCVDYRALNEVTIKNKYPLPRIDDLFDQLKGATVFSKIDLRSGYHQLRIREEDIPKTAFTTRYGLYEFTVMSFGLTNAPAFFMNLMNKAFMEYLDKFVVVFIDDILIYSQSEEDHQHHLRLVLGKLREHQLYAKLSKCEFWLSEVKFLGHVISAKGVAVDPETVTAVTDWKQPKTVTQIRSFLGLAGYYRRFIENFSKIARPMTQLLKKEEKFVWSPQCEKAFQTLKEKLVSSPVLILPDTRKDFMVYCDASRQGLGCVLMQDGHVVAYASRQLRPHEGNYPTHDLELAAVVHALKIWRHYLIGNRCEIYTDHKSLKYIFTQSDLNLRQRRWLELIKDYDVGIHYHPGKANVVADALSRKSHCNTFNVRSIPPELSQQMEALNLNIVGRGFLAALEAKPTLLDQIREAQKNDPDMHGLLKNMKQGKAAGFTEDEHGTLWNGKRRVKAEHQRPAGLLQPLQVPEWKWDEIGMDFITGLPKTQGGYDSIWVIVDRLTKVARFIPVKTTYGGNKLAELYFARIVSLHGIPKKIVSDRGSQFTSHFWKKLQEELGTRLNFSTAYHPQTDGQTERLNQILEDMLRACVLDFGKTWDKSLPYAEFSYNNSYQASIQMAPYEALYGRKCRTPLLWDQVGESQVFGTDILREAEAKVRIIRDNLKVAQSRQKSYADNRRRDLEFAVDDFVYLRVTPLRGVHRFQTKGKLAPRYVGPFRIIARRGEVAYQLELPASLGNVHDVFHVSQLKKCLRVPSEQANSEQIEVREDLTYVERPVKILDTMERRTRNRVIRFCKVQWSNHAEEEATWERENELKAAHPDLFANSSESRGRDSV

SEQ ID NO: 19041 - protein, 344 aa, Oryza sativa
  Clone ID: TF_OSC11441j.C1.p1.fg
MMNAFLHHLQNPPQQNAPPPPPQHSKLAEFLRIRPPTFSSSNNPVDALDWLHAVGKKLDTVQCSDEEKVIFAAHQLQGPASLWWDHFQATQPEGQPITWTRFTAAFRKTHVPAGVVALKKREFRELKQGNRSVMEYLHEFNNLARYAPEDVREDEEKQEKFLAGMDPELSVRLVSGDYPDFQRLVDKSIRLEAKHKELESHKRRLANFRNQQGANQRVRYTNPYPGGSSSQQQQQQQQPRPAPRPQFVVRVPQPQQQQNQQGTRAPRPPTPAVQPVQGRRDAQGQQRLCFNCFEPGHFADKCPKPRRQQGQAPPRSNNGGKDVIRGRVNHVTAEDVLTTPDVIV

SEQ ID NO: 19042 - protein, 1396 aa, Oryza sativa
  unsure (1)..(1396): unsure at all Xaa locations
  Clone ID: TF_OSC11805j.C1.p2.np
LLHLSSKSNLXNVAFLFCFCLXMAGSINRRGLDLRGMCVVLGYPHGVDYQGKQLPEQEGDDAEPHAAWEVTVVILTGSPERTSLAVTAGGDSFSAACQNAAPLAIGTLHQRYPDELQHSPYRYHPRRGGAHDYATFRDASSEDDATIMHLARMVDTYDAARIDFHQMVRRGLVENNMKILELRQENLQLKKDLDVVEAQLCQLKIAQGEVCRPKRRRVYRSLKITARKSTSRPELVRQSLAWTCFVETPRAEPAPVVPQEEGASGVGSMEDALLLTFRPGPSQNLFSLLAGSVWDFQMVTTRRSAATGDDNQPEGSNPNIQGSPPPPPPPPPPPPPDTNSILTQILAQQANMMAAFLHHIQNPPQHNAPPPPPPPQHSKLAEFLRICPPTFSSSNNPVDALDWLHAVGKKLDTVQCNDEEKVIFAAHQLQPASLGWHFQATQPEGQPITWARFTAAFRRTHVPAGVMALKKREFRELKQGNRSVMEYLHEFNNLARYAPEDVREDEEKQEKFLAGMDPDLSVRLDSGDYPDFQHLVDKSICLEAKHKELESHKHRLANFHNQQVANQRVRYTNPYPGGSSSQQQQQQPRSAPRPQFVVRVPQPQQQQSQQGTHAPRPPAPVVQPGQGRRDIQGQQRLCFNCFEPGHFADKCPKPRRSXGQAPPRPNNGGKDVIRDRVNHVTAEDVLTTPDVIVGTFLIHSIPATILFDSGASHSFMSVPFVGRNQLGVERLRNPLLITTPRGVMTAKYYSPTIPIEIQGIPFPSDLILLDTKNLDVIIGMNWLAQFQGVVDCARRTVTLYRGPDQLVVFFAPPTSVGSSELHQIGLSEIPIVSEFGDVFPEELPGMPPKREIEFWIDLAPGTTPLYKRPNRMAANELAEVKKQLEELKEKGYIRPSTSPXGAPVIFVEKKDKTKRMCVDYRALNEVTIKNKYPLPQIDDLFDQLKGATVFSKIDLRSRYHQLCIREEDIPKTAFTTRYGLYEFTVMSFGLTNAPAFFMNLMNKVFMEYLDKFVVVFIDDILVYSQSEEDHQQHLRLVLGKLREHQLYAKLSKCEFWLSEVKFLGHVISAKGVAMDPETVTAVTDGKQPKTVTQVRSFLGLAGYYRRFIENFSKIARPMTQLLKKEEKFVWSPQCEKAFQTLKEKLVSSPVLILPDTRKDFMVYCDASRQGLGCVLMQEGHVVAYASRQLRPHEGNYPTHDLELAAVVHALKIWRHYLIGNRYEIYTDHKSLKYIFTQSDLNLRQRRWLELIKDYDVGIHYHPGKANVVADALSRKSRCNTLGVRGIPPELHQQMEALNLSIVGHGFLATLEAKPTLLDQIREVQKNDPDMHGILKNMKQGKAAGFTEDEHGTLWNGNRVCVPDDKELKQLILQEAHESPYSIHPGSFHPLRPLSPP

SEQ ID NO: 19043 - protein, 1594 aa, Oryza sativa
  unsure (1)..(1594): unsure at all Xaa locations
  Clone ID: TF_OSC12550j.C1.p1.np
MAAGSSAADSPSSGRSLPLPTLFKRSPCLPPPFPPLAALSPRRNRARAVALFLRRRRRAPVRRRRRPGPPPASASPPSASRRSPERRRPRRPEPRRRLPPLRSPFPSSPSTRGEPWTRFTSPFPPLSRAPLRRAGGRRRRPSGRGRVASRRLCRRGRLRARPAAAMWGPAVSRPRPRVRLTRGTHGAGRRKPRAPGPSWTHLGHIRTGLRASVAKHYRFHMSSGANEGYTSCGPVVEMSWHRAGVLLLGAQSYLPVPGVPAVGGIVSMYTSDQSTTYSNSRALGYGQAEQCTQKAGSVTRRGLDMTGFVLELRGMCVVLGYPHGVDYQARPLPEQEGDDAEPHAGWEVTAVILSGSPERTSLAVTAGGDSFPAACQSAALLAIGTLHQRYPDELYNWHYRYHPCCGXARYYSTFRDASSKDDATIMHLARMVEAYDAARIDFHQMVRRGMVENNMKIQELRQENLQLKKDLDAVEAQLHQLKIAQGEVCRPKRRRVCRSQKITARKSTSRPELVRQSLAWTCFVETPRAEPAPVVPQEGEASGVGSTEDALLLTFHGETRRNAATSDGNQPEGSNHNNHGSPPPPPPPPPPPPPPPDTNAILTQILAQQANMMTAFLHHLQNPPQHNAPPPPPQHSKLAEFLRIRPPTFSSSNNPVDALDWLHAVGKKLDTVQCSDEEKVIFAAHQLQGPASLWWDHFQATQPEGQPITWARFTAAFRRTHVPAGVVALKKREFRELKQGNRSVMEYLHEFNNLARYAPEDVREDEEKQEKFLAGMDPELSVRLVSVDYPDFQCLVDKSIRLEAKHKELESHKRRLANFRNQQGANQRVRYTNPYPGGSSSQQQQQQQQPRSAPRPQFMVRVPQPQQQQSQQGTRAPRPPTPTVQPGQGRRDVQGPQRLCFNCFEPGHFADKCPKPRRQQGQVPPRSNNGGKDVIRGRVNHVTAEDVLTTPDVIVGTFLIHSIPATILFDSGASHSFISVPFVGRNQLGVERLRNPLLITTPGGVMTAKYYSPAVPIEIQGIPFPSDLILLDTKNLDVILGMNWLAQFQGVVDCARRTVTLYRGPEQPVVFFAPPTSVRSSELHQIGLSEIPIVREFGDVFPEELPGMPPKREIEFRIDLAPGTIPLYKRPYRMAANELAEVKKQLEELTEKGYIRPSTSPWGAPVIFVEKKDKTKRMCVDYRALNEVTIKNKYPLPRIDDLFDQLKGATVFSKIDLRSGYHQLRIREEDIPKTAFTTRYGLYEFTVMSFGLTNAPAFFMNLMNKVFMEYLDKFVVVFIDDILIYSQSEEDHQHHLRLVLGKLREHQLYAKLSKCEFWLSEVKFLGHVISAKGVAVDPETVTAVTDWKQSKTVTQVRSFLGLAGYYRRFIENFSKIARPMTQLLKKEEKFVWSPQCEKAFKTLKEKLVASPVLILPDTRKDFMVYCDASRQGLGCVLMQDGHVVAYASRQLRPHEGNYPTHDLELAAVVHALKIWRHYLIGNRCEIYTDHKSLKYIFTQSDLNLRQRRWLELIKDYDVGIHYHPGKANVVADALSRKSHCNTLNICGIPPELNQQMAARNLSIVSRGFLAALEAKPTLLDQIREAQKNDPDMHG

SEQ ID NO: 19044 - protein, 1735 aa, Oryza sativa
  Clone ID: TF_OSC12557j.C1.p1.fg
MTGFVLELRGMCVVLGYPHGVDYQARPLPEQEGEDAEPHAGWEVTAVILSGSPERTSLAVTAGGDSFPAACQNAALLAIGTLHQRYPDELQHSPYRYHPRRGGASDHATFRDASSEDDATVVHLARMVEAYDAARIDFHQMVRRGMVENNMKILELRQENLQLKKDLDALEAQPHQLKVAQGEISRPKRRRVCRSQKITARKSTSRPELVRQSLAWTCFVETPRAEPAPVVPQEGEASGVGSSEGALLLTFRPGPSQRRNVNTGEGNQPEGSNPNPQGNPPPPPPPDTNAILTQILAQQANMMNAFLHHLQNPPQQNAPPPPPQHSKLAEFLRIRPPTFSSSNNPVDALDWLHAVGKKLDTVQCSDEEKVIFAAHQLQGPASLWWDHFQAAQPEGQPITWTRFTAAFRRTHVPAGVVALKKKEFRELKQGNRSVMEYLHEFNNLARYAPEDVREDEEKQEKFLAGMDPELSVRLVSGDYPDFQRLVDKSIRLEAKHKELESHKRRLANIRNQQGANQRVRYTNPYPGGSSSQQQQQQQQQPRSAPRPQFVVRVPQQQPQQNQQGTRAPRPPTPAGQPVQGRRDASGPQRLCFNCFEPGHFADKCPKPRRQQGQAPPRPNNGGKDVIRGRVNHVTAEDVLTTPDVIVGTFLVHSIPATILFDSGASHSFISVPFVGKNQLGVERLRNPLLITTPGGVMTAKYYSPAVPIEIQGIPFPSDLILLDTKNLDVILGMNWLAQFQGVVDCARRTVTLYRGPEQPVCQKSPSSESSEIFPEELPGMPPKREIEFRIDLAPGTTPLYKRPYRMAANELAEVKKQLEELKEKGYIRPSTSPWGAPVIFVEKKDKTKRMCVDYRALNEVTIKNKYPLPRIDDLFDQLKGATVFSKIDLRSGYHQLRIREEDIPKTAFTTRYGLYEFTVMSFGLTNAPAFFMNLMNKVFMEYLDKFVVVFIDDILIYSQTEEDHQHHLRLVLGKLREHQLYAKLSKCEFWLSEVKFLGHVISAKGVAVDPETVTAVTEWKQPKTVTQIRSFLGLAGYYRRFIENFSKIARPMTQLLKKEEKFVWSPQCEKAFQTLKEKLVSSPVLILPDTRKDFMVYCDASRQGLGCVLMQDGHVVAYASRQLRPHEGNYPTHDLELAAVVHALKIWRHYLIGNRCEIYTDHKSLKYIFTQSDLNLRQRRWLELIKDYDVGIHYHPGKANVVADALSRKSHCNTLNVRGIPPELNQQMEALNLSIVGRGFLAALEAKPTLLDQIREAQKNDPDMHGLLKNMKQGKAAGFTEDEHGTLWNGKRVCVPDNRELKQLILQEAHESPYSIHPGSTKMYLDLKEKYWWVSMKREIAEFVALCDVCQRVKAEHQRPAGLLQPLQVPEWKWDEIGMDFITGLPKTQGGYDSIWVVVDRLTKVARFIPVKTTYGGNKLAELYFARIVSLHGIPKKIVSDRGSQFTSHFWKKLQEELGTRLNFSTAYHPQTDGQTERLNQILEDMLRACVLDFGKTWDKSLPYAEFSYNNSYQASIQMAPYEALYGRKCRTPLLWDQVGESQVFGTDILREAEAKVRIIRDNLKVAQSRQKSYADNRRRDLEFAVDDFVYLRVTPLRGVHRFQTKGKLAPRYVGPFRIIARRGEVAYQLELPASLGNVHDVFHVSQLKKCLRVPSEQANSEQIEVREDLTYVERPVKILDTMERRTRNRVIRFCKVQWSNHAEEEATWEREDELKAAHPDLFASSSESRGRDSV

SEQ ID NO: 19045 - protein, 670 aa, Oryza sativa
  Clone ID: TF_OSC12919j.C1.p6.fg
MTGFVLELRGMCVVLGYPHGVDYQVRPLPEQEGEDAEPHAAWEVTAVILSGSPERTSLTVTAGGDSFPAACQNAALLAIGTLHQRYPDELQHSPYRYHPRRGGARDYATFRDASSEDDATVVHLARMVEAYDAARIDFHQMVRRGMVENNMKILELRQENLQLKKDLDALEAQLHQLKIAQGEISRPKRRRVCRSQKITARKSTSRPELVRQSLAWTCFVETPCAEPAPVVPQEGEASGVGSSEGALLLTFRPGPSQRSSSLFAGSVWGFQMVTTRRNVNTGGGNQPEGSNPNPQGNPPPPPPPDTNAILTQILAQQANMMNAFLHHLQNSPQQNAPPPPPQHSKLAEFLRIRPPTFSSSNNPVDALDWLHAVGKKLDTVQCSDEEKVIFAAHQLQGPASLWWDHFQATQPEGQPITWTRFTAAFRRTHVPAGVVALKKREFRELKQGNRSVMEYLHEFNNLARYAPEDVREDEEKQEKFLAGMDPELSVRLVSGDYPDFQRLVDKSIRLEAKHKELESHKRRLANFRNQQGANQRVRYTNPYPGGSSSQQQQQQQQPRSAPRPQFVVRVPQQQQQQNQQGTRAPRPPTPTVQPVQGRRDASGPQRLCFNCFEPGHFADKCPKPRRQQGQAPPRSNNGGKDVIRGRVNHVTAEDVLTTPDVIVEVQNCIR

SEQ ID NO: 19046 - protein, 1405 aa, Oryza sativa
  Clone ID: TF_OSC13213j.C1.p4.gm
MVMPLSLFAGSVWGFQMVTTRRNAATSDGNQLEGSNHNNHGSPPPPPPPPPPPPPDTNAILTQILTQQANMMAAFLHHIQNPPQHNAPPPPPQHSKLAEFLRIRPPTFSSSNNPVDVLDWLHAVGKKLDTVQCSDEEKVVFAAHQLQGPASLWWDHFQATQPEGQPITWARFTAAFRRTHVPAGVMALKKREFRELKQGNRSVMEYLHEFNNLARYAPEDVREDEEKQEKFLAGMDPELSVRLVSGDYPDFQRLVDKSIRLEAKHKELESHKRRLANFRNQQGANQRIRYTNPYPGGSSSQQQQPRSAPRPQFVVRVPQPQQQQSQQGTHAPRPPTPAAQSGQGRRDVQGPQRLCFNCFEPGHFADKCPKSRRQQGQAPPCSNNGGKDVIRGRVNHVTAEDVLTTPDVIVGTFLIHSIPATILFDSGASHSFISVPFVGRNQLGVERLRNPLLITTPGGVMTAKYYSPAVPIEIQGIPFPSDLILLDTKNLDVILGMNWLAQFQGVVDCARRTVTLYRGPEQPVVFFAPPTSVSSSELHQIGLSEIPIVREFGDVFPEELPGMPPKREIEFRIDLAPGTTPLYKRPYRMAANELAEVKKQLEELKEKGALNEVTIKNKYPLPRIDDLFDQLKGATVFSKIDLRSGYHQLRIREEDIPKTAFTTRYGLYEFTVMSFGLTNAPAFFMNLMNKVFMEYLDKFVVVFIDDILVYSQSEEDHQHHLRLVLGKLRKHQLYAKLSKYEFWLSEVKFLGHVISAKGVAVDPETVTAVTDWKQPKTVTQIRSFLGLAGYYRRFIENFSKIARPMTQLLKKEEKFVWSPQCEKAFKTLKEKLVSSLVLILPDTRKDFMRRWLELIKDYDVGIHYHPGKANVVADAQSRKSHCNTLNVRGIPPELNQQMEALNLSIVGRGFLAALEAKPTLLDQIREAQKNDPDMHGLLKNMKQGKAAGFTEDEHGTLWNGNRSSWPFVMCASVSRQSTNDRPDFSNLSKYQNGNGMKLGWISSPDFQKPKVDMILYGTAYHPQTDGQTERLNQILEDMLRACVLDFGNTWDKSLPYAEFSYNNSYQASIQMAPYEALYGRKCRTPLLWDQVGESQVFGTDILREAEAKVRTIRDNLKVAQSRQKSYADNRRRDLEFAVDDFVYLRVTPLRGVHRFQTKGKLAPRFVGPFRIIARRGEVAYQLELPASLGNVHDVFHVSQLKKCLRVPSEQADSEQIEVREDLTYVERPVKILDTMERRTRNRSAAVVAPDLLPLRRRLLRFRRNLADLVHPSVSLADRRNAAVPVYPSRAAAFLRSGRRSRCRRRPGVSCGPPIRFPLPFPLSGAAPPRRWSPAATIVARVRRLPSAVPAWPPSGAPRGCHVGPGRQPPAPSDAAASEDPLFVKVEATFGKVSKASHIILEHIES

SEQ ID NO: 19047 - protein, 590 aa, Oryza sativa
  Clone ID: TF_OSC13237j.C1.p1.fg
MSWHRAGVLLLGAQSCLPVPGVPAMAGSVSRRGLDMTGFVLELRGMCVVLGYPHGLDYQGRPLPEQEGDDAEPHASWEVTAVILTGSPERTSLAVTAGGDSFSAACQSAALLAIGTLHQRYPDELQHSPYRYHPRRGGARDYATFRDASSEDDATIMHLARMVEAYDAARIDFHQMVRRGMVENNLKILELRQENLQLKKDLDAVEAQLHQLKIAQGEMVTTRRNAATSDGNQLEGSNHNNHGSPPPPPPPPPPPPPDTNAILTQILTQQANMMAAFLHHIQNPPQHNAPPPPPQHSKLAEFLRIRPPTFSSSNNPVDVLDWLHAVGKKLDTVQCSDEEKVVFAAHQLQGPASLWWDHFQATQPEGQPITWARFTAAFRRTHVPAGVMALKKREFRELKQGNRSVMEYLHEFNNLARYAPEDVREDEEKQEKFLAGMDPELSVRLVSGDYPDFQRLVDKSIRLEAKHKELESHKRRLANFRNQQGANQRIRYTNPYPGGSSSQQQQPRSAPRPQFVVRVPQPQQQQSQQGTHAPRPPTPAAQSGQGRRDVQGPQRLCFNCFEPGHFADKCPKSRRQQGQAPPDVIVVAHP

SEQ ID NO: 19048 - protein, 523 aa, Oryza sativa
  Clone ID: TF_OSC13264j.C1.p2.gm
MVTPMVTTRRNVNTGEGNQPEGSNPNPQGNPPPPPPPDTNAILTQILAQQANMMNAFLHHLQNPPQQNAPPPPPQHSKLAEFLRIRPPTFSSSNNPVDALDWLHAVGKKLDTVQCSDEEKVVFAAHQLQGPASLWWDHFQATQPEGQPITWTRFTAAFRKTHVPAGVVALKKREFRELKQGSRSVMEYLHEFNNLARYAPEDVREDEEKQEKFLAGMDPELSVRLVSGDYPDFQRLVDKSIRLEAKHKELESHKRRLANFRNQQGANQRVRYTNPYPGGSSSQQQQQQQQQPRSAPRPQFVVRIPQPQQQQNQQGTRAPRPPTPTVQPVQGRRDAQGPQRLCFNCFEPGHFADKCPKPRRQQGQVPPRSNNGGKDVIRGRVNHVTAEDVLTTPDVIVELHQIGLSEIPIVREFGDVFPEELPGMPPKREIEFRIYLAPGTTPLYKRPYRMAANELAEVKKQLEELKEKGYIRPSTSPWGAPVIFVEKKDKTKRMCVDYRALNEVTIKNKYPLPRIDDLFDQLK

SEQ ID NO: 19049 - protein, 447 aa, Oryza sativa
  Clone ID: TF_OSC13325j.C1.p1.fg
MMTAFLHHLQNPPQQNAPPPPPQHSKLAEFLRIRPPTFSSSNNPVDALDWLHAVGKKLDTVQCSDEEKVIFAAHQLQGPASLWWDHFQATQPEGQPITWARFTAAFRRTHVPAGVVALKKREFRELKQGNRSVMEYLHEFNNLARYAPEDVREDEEKQEKFLAGMDPELSVRLVSGDYPDFQRLVDKSIRLEAKHKELESHKRRLANFRNQQGANQRVRYTNPYPGGSSSQQQQQQQQPRSAPRPQFVVRVPQPQQQQNQQGTRAPRPPTPAVQPVQGRRDAQGQQRLCFNCFEPGHFADKCPKPRRQQGQAPPRSNNGGKDVIRGRVNHVTAEDVLTTPDVIVEKKDKTKRMCVDYRALNEVTIKNKYPLPRIDDLFDQLKGATVFSKIDLRSGYHQLRIREEDIPKTAFTTRYGLYEFTRKTINTISVWCWESCGNINCMPSLAS

SEQ ID NO: 19050 - protein, 646 aa, Oryza sativa
  Clone ID: TF_OSC13698j.C1.p1.fg
MGTLHQRYPYELQHSPYRYHPRRGGARDYATFRDASSEDDATIVHLARMVEAYNAARIDFHQMVRRGMVENNMKILELRQENLQLKKDLDAVEAQLHQLKIAQGKVCRPKRRRVCRSQKITARKSTSRPELVRQSLAWTCFIETPRAEPAPVVPQEGEASGVALSLFAGSVWGFQMVTTRRNAVTGDGNQPEGSNHNHQGNPPSPSPPPPPPPPDTNAILTQILAQQANMMTAFLHHLQNPPQQNAPPPPPQHSKLAEFLRIRPPTFSSSNNPVDALDWLHAVGKKLDTVQCSDEEKVIFAAHQLQGPASLWWDHFQATQPEGQPITWARFTAAFRRTHVPAGVVALKKREFRELKQGNRSVMEYLHEFNNLARYAPEDVREDEEKQEKFLAGMDPELSVRLVSGDYPDFQRLVDKSIRLEAKHKELESHKRRLANFRNQQGANQRVRYTNPYPGGSSSQQQQQQQQPRSAPRPQFVVRVPQPQQQQNQQGTRAPRPPTQTVQPGQGRRDAQGQQRLCFNCFEPGHFADKCPKPRRQQGQAPPRPNNGGKDVIRGRVNHVMAEDVLTTPDVIVVTAVPDWKQPKTVTQVRSFLGLAGYYRSVSRQSTNDRPDFSNLSKYQNGNGMKLGWISSPDFQKPKVDMILYG

SEQ ID NO: 19051 - protein, 1744 aa, Oryza sativa
  Clone ID: TF_OSC13791j.C1.p1.fg
MSWHRAGVLLLGAQSCLPVPGVPAVGGVGSVLLSMARMGWKLCHVFRPYTVVMAGSINRRGLDLTGFVLELRGMCVVLGYPHGVDYQGKQLPEQEGDDAEPHAAWEVTAVILTGSPERTSLAVTAGGDSFSAACQNAALLAIGTLHQRYPDELQHSPYRYHPRRGGARDYATFRDASSEDDATIMHLARMVEVYDAARIDFHQMVRRGLVENNMKILELRQENLQLEKDLDAVEAQLRQLKIAQGEVCRLKRRRVYRSLKITARKSTSRPELVRQSLAWTCFVETPRAEPAPVVPQEDGASGVGSTKDALLLTFRPGPSEQVVWGMVMPMVTTRRRANTGDGNQPEGSNHNNHGSPPPPPPPPPPPPPDTNAILTQILAQQANMMPAFLHHIQNPPQHNAPPPPPQHSKLVEFLRIRPPTFSSSNNPVDALDWLHAVGKKLDTVQCSDEEKVIFAAHQLQGPASLWWDHFQATQPEGQPFTWARFTAAFRRTHVPAEVMALKKREFRELKQGNRSVMEYLHEFNNLARYAPEDVREDKEKQEKFLAGMDPELSMRLVSGDYPDFQRLVDKSIRLEAKHKKLESHKRCLANFRNQQGANQRVRYTNPYLGGSSSQQQQQQQPRSAPRPHFVVRVPQPQQQQSQQGTRAPRPPTPAVQPGQGRRDVQGQQRLCFNCFEPGHFADKCPKPRRQQGQPPPRPNNDGKDVIWGRVNHVTAEDVLTTPNVIVGTFLIHSIPTTILFDSGASHSFISVPFVGRNQLGVERLRNSLLITTPRGVMTAKYYSPAVPIEIQGIPFPSDLILLDTKNLDVILGMNWLAQFQGVVDCARRTVTLYRGPEQPVVFFAPPTSVGSSELHQIGLSEIPIVREFGDVFPEELPGMPPKREIEFRIDLAPGTTPLYKRPYRMASNELAELKGATVFSKIDLRSGYHQLRIREEDIPKTAFTTRYGLYEFTVMSFGLTNAPTFFMNLMNKVFMEYLDKFVVVFIDDILVYSQSEEDHQHHLRLVLGKLREHQLYAKLSKCEFWLSEVKFLGHVISAKGVAVDPETVTAVTGWKQSKTVTQIRSFLGLAGYYRRFIENFSKIARPMTQLLKKEEKFVWSPQCEKAFQTLKEKLVSSPVLILPDTRKDFMVYCDALRQGLGCVLMQEGHVVAYASRQLRPHEGNYPTHDLELAAVVHALKIWRHYLIGNRCEIYTDHKSLKYIFTQSDLNLRQRRWLELIKDYDVGIHYHPGKANVVANALSRKSHCNTLDVRGIPPELNQQMEALNLSIVGRGFLATLEAKPTLLDQIREAQKNDPDMRGLLKNMKQGKAAGFTEDEHGTLWNGNRVCVPDDRELKQLKLQEAHESPYSIHPGSTKMYLDLKEKYWWVSMQREIAEFVALCDVCQRVKAEHQRPAGLLQPLQVPEWKWDEIGMDFITGLPKTQGGYNSIWVVVDRLTKVARFIPVKTTYGGNKLAELYFARIVSLHGVPKKIVSDRGSQFTSHFWKKLQEELRTRLNFSTAYHPQTDGQTERLNQILEDMLRACVLDFGKTWDKSLPYAEFSYNNSYQASIQMAPYEALYGRKCRTPLLWDQVGESQVFGTDILREAEAKVRTIRDNLKVAQSRQKSYADNRRCNLEFAVDDFVYLRVTPLRGVHRFQTKGKLAPRFVGPFRIIARRGEVAYQLELPASLGNVHDVFHVSQLKKCLRVPSEQADSEQIEVREDLTYVERPVKILDTMERRTRNRVIRFCKVQWSNHAEEEATW

SEQ ID NO: 19052 - protein, 996 aa, Oryza sativa
  Clone ID: TF_OSC13812j.C1.p4.gm
ANMMTAFLHHLQNPPQQNAPPPPPQHSKLAEFLRIRPPTFSSSNNPVDALDWLHAVGKKLDTVQCSDEEKVIFAAHQLQGPASLWWDHFQATQPEGQPITWARFTAAFRRTHVPAGVVALKKREFRELKQGNRSVMEYLHEFNNLARYAPEDVREDEEKQEKFLAGMDPELSVRLVSGDYPDFQRLVDKSIRLEAKHKELESHKRRLANFRNQQGANQRVRYTNPYPGGSSSQQQQQQQQPRSAPRPQFVVRVPQPQQQQNQQGTRAPRPPTQTVQPGQGRRDAQGQQRLCFNCFEPGHFADKCPKPRRQQGQAPPRPNNGGKDVIRGRVNHVMAEDVLTTPDVIVEKKDKTKRICVDYRALNEVTIKNKYPLPRIDDLFDQLKGATVFSKIDLRSGYHQLRIREEDIPKTAFTTRYGLYEFTVMSFGLTNAPAFFMNLMNKVFMEYLDKFVVVFIDDILIYSQSEEDHQHHLRLVLGKLREHQLYAKLSKCEFWLSEVKFLGHVISAKGVAVDPKTVTAVTDWKQPKTVTQVRSFLGLAGYYRRFIENFSKIARPMTQLLKKEEKFVWSPQCEKAFQTLKEKLVSSPVLILPDTRKDFMVYCDASRQGLGCVLMQDGHVVAYASRQLRPHEGSYPTHDLELAAVVHALKIWRHYLIGNRCEIYTDHKSLKYIFTQSDLNLRQRRWLELIKDYDVGIHYHPGKANVVADALSRKSHCNTLNVRGIPLELNQQMEALNLSIVSRGFLTALEAKPTLLDQIRKAQKNDPDMHGLLKNMKQGKAAGFTEDEHGTLWNGNRVCVPDNRELKQLILQEAHESPYSIHPGSTKMYLDLKEKYWWVSMKREIAEFVALCDVCQRVKAEHQRPAGLLQPLQVPEWKWDEIGMDFITGLPKTQGGYDSIWVVVDRLTKVARFIPVKTTYGGNKLAELYFARIVSLHGVPKKIISDRGSQFTSHFWKKLQEELGTRLNFSTAYHPQTDGQTERLNQILEDMLRALY

SEQ ID NO: 19053 - protein, 401 aa, Oryza sativa
  Clone ID: TF_OSC13849j.C1.p2.fg
MVTTRRSAATGEGSHPEGSNHNNHGSPPPPPPPPPPPPPPDTNSILTQILAQQANMMAAFLHHIQNPPQHNVPPPSPPPQHSKLAEFLRIRPPTFSSSNNPVDALDWLHAVGKKLDTVQCNDEEKVIFAAHQLQGPASLWWDNFQAMQPEGQPITWARFTAAFRRTHVPAGVMALKKREFRELKQGNRSVMEYLHEFNDLARYAPEDVREDEEKQEKFLAGMDPELSVRLVSGDYPDFQRLVDKSIRLEAKHKELESHKRRLANFRNQQGANQRIRYTNPYPGGSSSQQQQQQQPRSAPRPQFVVRVPQPQQQQSQQGTRAPRPHVPAVQPGQGRRDAQGQQRLCFNCFEPGHFADKCPKPRRQQGQAPPRPNNGGKDVIRGRVNHVTAEDVLTTPDVIVA

SEQ ID NO: 19054 - protein, 670 aa, Oryza sativa
  Clone ID: TF_OSC14703j.C1.p1.fg
MTGFVLELRGMCVVLGYPHGVDYQARPLPEQEGEDAEPHAGWEVTAVILSGSPERTSLAVTAGGDSFPAACQNAALLAIGTLHQRYPDELQHSPYRYHPRRGEARDFATFRDASSEDDATVVHLARMVEAYDAARIDFHQMVRRGMVENNMKILELRQENLQLKKDLDALEAQLHQLKIAQGEDSRPKRRRVCRSQKITARKSTSRPELVRQSLAWTCFVETPRAEPAPVVPQEGEASGVGSTEDALLLAFRPGPSQRRNVSTGEGNQPEGSNPNPQGNPPPPPPPDTNAILTQILAQQANMMTAFLHHLQNPPQQNAPPPPPQHSKLAEFLRIRPPTFSSSNNPVDALDWLHAVGKKLDTVQCSDEEKVIFAAHQLQGPASLWWDHFQATQPEGQPITWARFTAAFRRTHVPAGVVALKKREFRELKQGNRSVMEYLHEFNNLARYAPEDVREDEEKQEKFLAGMDPELSVRLVSGDYPDFQRLVDKSIRLEAKHKELESHKRRLANFRNQQGANQRVRYTNPYPGGSSSQQQQQQQQSRSAPRPQFVVRVPQPQQQQNQQGTRAPRPPTPTVQPVQSRRDAQGQQRLCFNCFEPGHFADKCPKPRRQQGQAPPRSNNGGKDVIRGRVNHVTAEDVLTTPDVIVVRRRPSAPSPSGVGKVAGTSIVCQA

SEQ ID NO: 19055 - protein, 400 aa, Oryza sativa
  Clone ID: TF_OSC14706j.C1.p1.fg
MVTTRRNVNTGEGNQPEGSNPNPQGNPPPPPPPDTNAILTQILAQQANMMNAFLHHLQNPPQQNAPPPPPQHSKLAEFLRIRPPTFSSSNNPVDALDWLHAVGKKLDTVQCSDEEKVVFAAHQLQGPASLWWDHFQAAQPEGQPITWARFTAAFRRTHVPAGVVALKKREFRELKQGNRSVMEYLHEFNNLARYAPEDVREDEEKQEKFLAGMDPELSVRLVSGDYPDFQRLVDKSIRLEAKHKELESHKRRLANFRNQQGANQRVRYTNPYPGGSSSQQQQQQQQPRPAPRPQFVVRVPQPQQQQNQQGTRAPRPPTPAVPPVQGRRDAQGQQRLCFNCFEPGHFADKCPKPRRQQGQAPPRSNNGGKDVIRGRVNHVTAEDVLTTPDVIVVVGLNFKE

SEQ ID NO: 19056 - protein, 1319 aa, Oryza sativa
  Clone ID: TF_OSC15024j.C1.p1.fg
MSWHRAGVLLLGGSILAGCPGGSGRLKRLCNNATQPEGQPITWARFTAAFRRTHVPAGVMALKKREFRELKQGNRSVMEYLHEFNNLARYAPEDVREDEEKQEKFLAGMDPELSVRLVSGDYPDFQRLVDKSIRLEAKHKELESHKRRLANFRNQQGANQRIRYTNPYPGGSSSQQQQPRSAPRPQFVVRVPQPQQQQSQQGTRAPRPPTPAAQSGQGRRDVQGPQRLCFNCFEPGHFADKCPKPRRQQGQAPPRSNNGGKDVIWGRVNHVTAEDVLTTPDVIVGTFLIHSIPATILFDSGASHSFISVPFMGRNQLGVERLRNPLLITTPGGVMTAKYYSPAVPIEIQGIPFPSDLILLDTKNLDVILGMNWLAQFQGVVDCARRTVTLYRGPEQPVVFFAPPTSVSSSELHQIGLSEIPIVREFGDVFPEELPGMPPKREIEFRIDLAPGTTPLYKRPYRMAANELAEVKKQLEELKEKGYIRPSTSPWGAPVIFVEKKDKTKRMCVDYRALNEVTIKNKYPLPRIDDLFDQLKGATVFSKIDLRSGYHQLRIREEDIPKTAFTTRYGLYEFTVMSFGLTNAPAFFMNLMNKVFMEYLDKFVVVFIDDILVYSQSEEDHQHHLRLVLGKLREHQLYAKLSKCEFWLSEVKFLGHVISAKGVAVDPETVTAVTDWKQPKTVTQIRSFLGLAGYYRRFIENFSKIARPMTQLLKKEEKFVWSPQCEKAFQTLKEKLVSSPVLIMPDTRKDFTVYCDASRQGLGCVLMQDGHVVAYASRQLRPHEGNYPTHDLELAAVVHALKIWRHYLIGNRCEIYTDHKSLKYIFTQSDLNLRQRRWLELIKDYDVGIHYHPGKANVVADALSRKSHCNTLNVRGIPPELNQQMEALNLSIVGRGFLAALEAKPTLLDQIREAQKNDPDMRGLLKNMKQGKAAGFTEDEHGTLWNGNRVCVPDNREHKELILQEAHESPYSIHPGSTKMYLDLKEKYWWVSMKREIAEFVALCDVCQRVKAEHQRPAGLLQPLQVPEWKWDEIGMDFITGLSKTQGGYDSIWVVVDRLTKVARFIPVKTTYGGNKLAELYFARIVSLHGVPKKIVSDRGSQFTSHFWKKLQEELGTRLNFSTTYHPQTDGQTERLNQILEDMLRACVLDFGKTWDKSLPYAEFSYNNSYQASILMAPYEALYGRKCRTPLLWDQVGESQVFGTDILREAEAKVRTIRDNLKVAQSRQKSYADNRRRDLEFAVDDFVYLRVTSLRGVHRFQTKGKLAPRFVGPFRIIARRGEVAYQLELPASLGNVHDVFHVSQLKKCLRVPSEKADSE

SEQ ID NO: 19057 - protein, 1436 aa, Oryza sativa
  unsure (1)..(1436): unsure at all Xaa locations
  Clone ID: TF_OSC15024j.C1.p3.np
HRRRPSGRGPPPVGCAGVAAFGRPRLPCGGRPVREKAIFSVATKKLDTVQCSDEEKVVFAAHQLQGPASLWWDHFQATQPEGQPITWARFTAAFRRTHVPAGVMALKKREFRELKQGNRSVMEYLHEFNNLARYAPEDVREDEEKQEKFLAGMDPELSVRLVSGDYPDFQRLVDKSIRLEAKHKELESHKRRLANFRNQQGANQRIRYTNPYPGGSSSQQQQPRSAPRPQFVVRVPQPQQQQSQQGTRAPRPPTPAAQSGQGRRDVQGPQRLCFNCFEPGHFADKCPKPRRQQGQAPPRSNNGGKDVIWGRVNHVTAEDVLTTPDVIVGTFLIHSIPATILFDSGASHSFISVPFMGRNQLGVERLRNPLLITTPGGVMTAKYYSPAVPIEIQGIPFPSDLILLDTKNLDVILGMNWLAQFQGVVDCARRTVTLYRGPEQPVVFFAPPTSVSSSELHQIGLSEIPIVREFGDVFPEELPGMPPKREIEFRIDLAPGTTPLYKRPYRMAANELAEVKKQLEELKEKGYIRPSTSPWGAPVIFVEKKDKTKRMCVDYRALNEVTIKNKYPLPRIDDLFDQLKGATVFSKIDLRSGYHQLRIREEDIPKTAFTTRYGLYEFTVMSFGLTNAPAFFMNLMNKVFMEYLDKFVVVFIDDILVYSQSEEDHQHHLRLVLGKLREHQLYAKLSKCEFWLSEVKFLGHVISAKGVAVDPETVTAVTDWKQPKTVTQIRSFLGLAGYYRRFIENFSKIARPMTQLLKKEEKFVWSPQCEKAFQTLKEKLVSSPVLIMPDTRKDFTVYCDASRQGLGCVLMQDGHVVAYASRQLRPHEGNYPTHDLELAAVVHALKIWRHYLIGNRCEIYTDHKSLKYIFTQSDLNLRQRRWLELIKDYDVGIHYHPGKANVVADALSRKSHCNTLNVRGIPPELNQQMEALNLSIVGRGFLAALEAKPTLLDQIREAQKNDPDMRGLLKNMKQGKAAGFTEDEHGTLWNGNRVCVPDNREHKELILQEAHESPYSIHPGSTKMYLDLKEKYWWVSMKREIAEFVALCDVCQRVKAEHQRPAGLLQPLQVPEWKWDEIGMDFITGLSKTQGGYDSIWVVVDRLTKVARFIPVKTTYGGNKLAELYFARIVSLHGVPKKIVSDRGSQFTSHFWKKLQEELGTRLNFSTTYHPQTDGQTERLNQILEDMLRACVLDFGKTWDKSLPYAEFSYNNSYQASILMAPYEALYGRKCRTPLLWDQVGESQVFGTDILREAEAKVRTIRDNLKVAQSRQKSYADNRRRDLEFAVDDFVYLRVTSLRGVHRFQTKGKLAPRFVGPFRIIARRGEVAYQLELPASLGNVHDVFHVSQLKKCLRVPSEKADSEXIEVREDLTYVERPVKILDTMERRTRNRVIRFCKVQWSNHAEEEATWEREDELKAAHPDLFVSSSESRGRDSV

SEQ ID NO: 19058 - protein, 398 aa, Oryza sativa
  Clone ID: TF_OSC15153j.C1.p1.fg
MVTTRRNAATGDGNQPEGSNHNHQGNPPPPPPPPPPPPPDTNAILTQILAQQANMMTVFLHHLQNPPQQNAPPPPPQHSKLAEFLRIRPPTFSSSNNPVDALDWLHAVGKKLDTAQCSDEEKVIFAAHQLQGPASLWWDHFQATQPEGQPITWARFTAAFRRTHVPAGVVALKKREFRELKQGNRSVMEYLHEFNNLARYAPEDVREDEEKQEKFLAGMDLELSVRLVSGDYPDFQRLVDKSIRLEAKHKELESHKRRLANFRNQQCANQRVRYTNPYPGGSSSQQQQQQQQPRSAPRPQFVVRVPQPQQQQNQQGTRAPRPPTPTVQPGQGRRDAQGQQRLCFNCFEPGHFADKCPKPRRQQGQAPPRSNNGGKDVIRGRVNHVTAEDVLTTPDVIV

SEQ ID NO: 19059 - protein, 1925 aa, Oryza sativa
  unsure (1)..(1925): unsure at all Xaa locations
  Clone ID: TF_OSC15185j.C1.p1.np
MAAGSSTTDSPSSGRSLLLPTLHKHSPCLPPSFPPLAALSPRRNRARNVVLSLRRRRRAPVRRRRRTGPPPVSASPSSGSPRPRQSRPPLRFARRPPERRRPRRPEPRRPLSPLRSPFPSSPSTRGEPWTAHFASPFPPLSRAPLRRAGGRRRRPSGRGRAASRRLCRRGRLRARPAAAMWGPVVSRPRPRVRLTRGTHGAGRRKPRAPGPPWTHLGHIRTGVRASVAKHYRFHMSSGANEGYTSCGPVVEMSWHRAGVLLLGAQSCLPVPGVPAVGGIGSMYTSDQSKIYSNSRALGYGQAEQCTQMAGSVSRRGLDMTGFVLELRGMCVVLGHPHGVDYQARPLPEQEGDDAEPHAAWEVTAVILAGSPERTSLTVTAGGDSFPAACQSAALLAIGTLHQRYPDELQHSPYRYHPRRGGARDYATFRDASSEDDATIVHLARMVEAYDAARIDFHQMVRRGMVENNMKILELRQENLQLKKDLDAVEAQLHQLKIAQGEICRPKHRRVYRSQKITARKSTSRPELVRQSLAWTCFVETPRAEPAPVVPQEGEASGVGSTEDALLLTFHGETRRNAATSDGNQPEDSNHNNHGSPPPPPPPPPPPPPDTNAILTQILAQQANMMTAFLHHLQNPPQHNAPPPPPQHSKLAEFLRICPPTFSSSNNPVDALDWLHAVGKKLDTVQCSDEEKVIFAAHQLQGPASLWWDHFQATQPEGQPITWARFTAAFRRTHVPAGVVALKKREFRELKQGNRSVMEYLHEFNNLARYAPEDVREDEEKQEKFLAGMDPELSVCLVSGDYPDFQRLVDKSIRLEAKHKELESHKRRLANFHNQQGANQRVRYTNPYPGGSSSQQQQQQQQPRSAPRPQFVVRVPQPQQEQNQQGTRAPRPPPPTVQPGQGRRDAQGPQRLCFNCFEPGHFADKCPKPRRQQGQAPPRPNNGGKDVIRGRVNHVTAEDVLTTPDVIVGTFLIHSIPATILFDSGASHSFISVPFVGRNQLGVERLRNPLLITTPGGVMTAKYYSPAVPIEIQGIPFPSDLILLGTKNLDVILGMNWLAQFQGVVDCARRTVTLYRGPEQPVVFFAPPTSVRSSELHQIELSEIPIVREFGDVFPEELPGMPPKREIEFRIDLAPGTAPLYKRPYRMAANELAEVKKQLEELKEKGYIRPSTSPWGAPVIFVEKKDKTKRMCVDYRALNEVTIKNKYPLPRIDDLFNQLKGATVFSKIDLRSGYHQLRIREEDIPKTAFTTRYGLYEFTVMSFGLTNAPAFFMNLMNKVFMEYLDKFVVVFIDDILIYSQSEEDHQHHLRLVLGKLREHQLYAKLSKCEFWLSEVKFLGHVISAKGVAVDPETVIAVTDWKQPKTVTQVRSFLGLAGYYRRFIENFSKIARPMTQLLKKEEKFVWSPQCEKAFQTLKEKLVSSPVLILPDTHKDFMVYCDASRQGXGCVLMQDGYVVAYASRQLRPHEGNYPTHDLELAAVVHALKIWWHYLIGNRCEIYTDHKSLKYIFTQSDLNLRQRRWLELIKDYDVGIHYHPGKANVVADALSRKSHCNTLNVRGIPPELNQQMEALNLSIVSRGFLATLEAKPTLLDQICKAQKNDPDMHGLLKNMKQGKAAGFTEDEHGTLWNGNRRVKAEHQRPAGLLQPLQVPEWKWDEIGMDFITGLPKTQGGYDSIWVVVDRLTKVARFIPVKTTYGGNKLAELYFARIVSLHGVPKKIVSDRGSQFTSHFWKKLQEELGTRLNFSTAYHPQTDGQTERLNQILEDMLRACVLDFGKTWDKSLPYAEFSYNNSYQASIQMAPYEALYGRKCRTPLLWDQVGESQVFGTDILREAEAKVRTIRDNLKMAQSRQKSYADNRRRDLEFAADDFVYVRVTPLRGVHRFRTKGKLAPRYVGPFRITARRGEVVTTGNNPTGIPYVGALIL

SEQ ID NO: 19060 - protein, 685 aa, Oryza sativa
  Clone ID: TF_OSC15186j.C1.p2.gm
MMTAFLHHLQNPPQHNAPPPPPQHSKLAEFLRIRPPTFSSSNNPVDALDWLHAVGKKLDTVECSDEEKVIFAAHQLQGPASLWWDHFQATQPEGQPITWARFTAAFRRTHVPAGVVALKKREFRELKQGNRSVMEYLHEFNNLARYAPEDVREDEEKQEKFLAGMDPELSVRLVSGDYLDFQRLVDKSIRLEAKHKELESHKRRLANFRNQQGANQRVRYTNPYPGGSSSQQQQQQQQPRSAPRPQFVVRVPQPQQQQSQQGTRAPRPPTPTVQPGQGRRDASGPQRLCFNCFEPGHFADKCPKPRHQQGQAPPCSNNGGKDVIRGRVNHVTAEDVLTTPDVIVGTFLIHSIPATILFDSGASHSFISVPFMGRNQLGIERLRNPLLITTPGGVMTAKYYSPAVPIEIQGIPFPSDLILLDTKNLDVILGMNWLAQFQGVVDCARRTVTLYRGPGQPVVFFAPPTSVSSSELHQIGLSEIPIVREFGDVFPEELPGMPPKREIEFQIDLAPGTTPLCKRPYRMAANELAEVKKQLEELKEKGYIRPSTSPWGAPVIFVEKKDKTKRMCVDYRALNEVTIKNKYPLPRIDDLFDQLKGATVFSKIDLRSGYHQLRIRDEDIPKTAFTTRYGLYEFTVMSFGLTNAPAFFMNLMNKVFMEYLDKFVVVFIDDILIYSQSEEDHQHHL

SEQ ID NO: 19061 - protein, 1670 aa, Oryza sativa
  unsure (1)..(1670): unsure at all Xaa locations
  Clone ID: TF_OSC15467j.C1.p1.np
LLHLSSKSDLLKCCFSFVCLXMAGSVTRRGLDMTGFVLELRGMCVVLGYPHGVDYQARPLPEQEGEDAEPHAGWEVTAVILSGSPERTSLAVTAGGDSFPAACQNAALLAIGTLHQRYPDELQHSPYRYHPRRGGASDHATFRDASSEDDATVVHLARMVEAYDAARIDFHQMVRRGMVENNLKILELRQENLQLKKDLDALEAQLHQLKVAQGEISRPKRRRVCRSQKITARKSTSRPELVRQSLAWTCFVETPRAEPAPVVPQEGEASGVGSSEGALLLTFRPGPSQRSSSLFAGSMWGFQMVTTRRNVNTGEGNQPEGSNPNHQGNPPPPPPPPPPPPPDTNAILTQILAQQANMMNAFLHHLQNPPQQNAPPPPPQHSKLAEFLRIRPPTFSSSNNPVDALDWLHAVGKKLDTVQCSDEEKVVFAAHQLQGPASLWWDHFQATQPEGQPITWARFTAAFRRTHVPAGVVALKKREFRELKQGNRSVMEYLHEFNNLARYAPEDVREDEEKQEKFLAGMDPELSVRLVSGDYPDFQRLVDKSIRLEAKHKELESHKRRLANFRNQQGANQRVRYTNPYPGGSSSQQQQQQSRSAPRPQFVVRVPQPQQQQNQQGTRAPRPPTPTVQPVQGRRDAQGQQRLCFNCFEPGHFADKCPKPRRQQGQAPPRSNNGGKDVIRGRVNHVTAEDVLTTPDVIVGTFLVHSIPATILFDSGASHSFISVPFVEKNQLGVERLRNPLLITTPGGVMTAKYYSPAVPIEIQGILFPSDLILLDTKNLDVILGMNWLAQFQGVVDCARRTVTLYRGPEQPVVFFAPPTSVRSSELHQIGLSEIPIVREFGDVFPEELPGMPPKREIEFRIDLAPGTTPLYKRPYRMAANELAEVKKQLEELKEKGYIRPSTSPWGAPVIFVEKKDKTKRMCVDYRALNEVTIKNKYPLPRIDDLFDQLKGATVFSKIDLRSGYHQLRIREEDIPKTAFTTRYGLYEFTVMSFGLTNAPAFFMNLMDKVFMEYLDKFVVVFIDDILIYSQSEEDHQHHLRLVLGKLREHQLYAKLSKCEFWLSEVKFLGHVISAKGVAVDPETVTAVTDWKQPKTVTQIRSFLGLAGYYRRFIENFSKIARPMTQLLKKEEKFVWSPQCEKAFQTLKEKLVSSPVLILPDTRKDFMMYCDASRQGLGCVLMQDGHVVAYASRQLRPHEGNYPTHDLELAAVVHALKIWRHYLIGNRCEIYTDHKSLKYIFTQSDLNLRQRRWLELIKDYDVGIHYHPGKANVVADALSRKGHCNTLNVRGIPPELNQQMEALNLSIVGRGFLAALEAKPTLLDQIREAQKNDPDMHGLLKNMKQGKAAGFTEDEHGTLWNGKRVCVPDNRELKQLILQEAHESPYSIHPGSTKMYLDLKEKYWWVSMKREIAEFVALCDVCQRVKAEHQRPAGLLQPLQVPEWKWDEIGMDFITGLPKTQGGYDSIWVIVDRLTKVARFIHVKTTYGGNKLAELYFARIVSLHGVPKKIVSDRGSQFTSHFWKKLQEELGTRLNFSTAYHPQTDGQTERLNQILEDMLRACVLDFGKTWDKSLPYAEFSYNNSYQASIQMAPYEALYGRKCRTPLLWDQVGESQVFGTDILREAEAKVRIIRDNLKVAQSRQKSYADNRRRDLEFAVDDFVYLRVTPLR

SEQ ID NO: 19062 - protein, 1756 aa, Oryza sativa
  Clone ID: TF_OSC15719j.C1.p1.fg
MSWHRAGVLLLGAQSCLPVPGVPAVGGIGSVLLSMARMGWKLCHVFRLYTVVMAGSVTRRGLDMTGFVLELRGMCVVLGYPHGVDYQGRPLPEQEGDDGEPHAAWEVTAVILAGSPERTSLAVTAGGDSFPAASQSAALLAIGTLHQRYPDELQHSPYRYHPRRGGARDYATFRDASSEDDATIVHLARMVEAYDAARIDFHQMVRRGMVENNLKILELRQENLQLKKDLDAVEAQLHQLKIAQGEVCRPKRRRVCRSQKITARKSTSRPELVRQSLAWTCFVETPRAEPAPVVPQEGEASGVGSTEDALLLTFRPGPSQRRSANTGDGNQPEGSNHHHQGSPPPPPPPPPPPPPDTNAILTQILAQQANMMTAFLHHLQNPPQHNAPPPPPQHSKLAEFLRIRPPTFSSSNNPVDALDWLHAVGKKLDTVQCSDEEKVIFAAHQLQGPASLWWDHFQATQPEGQPITWARFTAAFRRTHVPAGVVALKKREFRELKQGNRSVMEYLHEFNNLARYAPEDVREDEEKQEKFLAGMDPELSVRLVSGDYPDFQRLVDKSIRLEAKHKELESHKRRLANFRNQQGANQRIRYTNPYPGGSSSQQQQQQQQPRFAPRPQFVVRVPQPQQQQNQQGTRAPRPPTPTVQPGQGRRDAQGPQRLCFNCFEPGHFADKCPKLRRQQGQAPSRSNNGEKDVIWGRVNHVTAEDVLTTPDVIVGTFLIHSIPATILFDSGASHSFISVPFVGRNQLGVERLRNPLLITTPGGVMTAKYYSPAVPIEIQGIPFPSDLILLDTKNLDVILGMNWLAQFQGVVDCARRTVTLYRGPEQPVVFFAPPTSVSSSELHQIELLEIPIVREFGDVFPEELPGMPPKREIEFRIDLAPGTTPLYKRPYRTAANELAEVKKQLEELKEKGYIRPSTSPWGAPVIFVEKKDKTKRMCVDYRALNELKGATVFSKIDLRSGYHQLRIREEDIPKTAFTTRYGLYEFTVMSFGLTNAPAFFMNLMNKVFMEYLDKFVVVFIDDILVYSQSEEDHQHHLRLVLGKLREHQLYAKLSKCEFWLSEVKFLGHVISAKGVAVDPETVTAVTDWKQPKTVTQVRSFLGLAGYYRRFIENFSKIARPMTQLLKKEEKFVWSPQCEKAFKTLKEKLVSSPVLILPDTRKDFMDGHVVAYASRQLRPHEGNYPTHDLELAAVVHALKIWRHYLIGNRCEIYTDHKSLKYIFTQSDLNLRQRRWLELIKDYDVGIHYHPGKANVVADALSRESHCNTLNVRGIPPELSQQMEALNLSIVGRGFLAALEAKPTLLDQIREAQKNDPDMHGLLKNMKQGKAAGFTEDEHGTLWNGNRVCVPDNRELKQLILQEAHESPYSIHPGSTKMYLDLKEKYWWVSMKREIAEFVALCDVCQRVKAEHQRPAGLLQPLQVPEWKWDEIGMDFITGLPKTQGGYDSIWVVVDRLTKVARFIPVKTTYGGNKLAELYFARIVSLHGVPKKIVSDRGSQFTSHFWKKLQEELGTRLNFSTAYHPQTDGQTERLNQILEDMLRACVLDFGKTWDKSLPYAEFSYNNSYQASIQMAPYEALYGRKCRTPLLWDQVGESQVFGTDILREAEAKVRTIRDNLKVAQSRFRTKGKLAPRYVGPFRIVARRGEVAYQLELPASLGNVHDVFHVSQLKKCLRVPSEQTDPEQIEVREDLTYVERPVKILDTMERRTRNRVIRFCKVQWSNHAEEEATWEREDELKAAHPDLFASSSESRGRDSV

SEQ ID NO: 19063 - protein, 1689 aa, Oryza sativa
  Clone ID: TF_OSC15723j.C1.p1.fg
MPSLGQIRLTHLRPGIQVVMHKGGCLVLGAQSCLPVRGVPAVGGIESVLLSMARMGWKLCHVFRLYTVVMAGSVSRRGLDMTGFVLELRGMCVVLGYPHGVDYQGRPLPEQEGDDAEPHAAWEVTAVILTGSPERTSLAVTAGGDSFPAACQNAALLAIGTLHQRYPDELQHSPYRYHPRRGGARDYAIFRDASSEDDATIMHLARMVEAYDAARIDFHQMVRRGMVGNNMKILELRQENLQLKKDLDAVEAQLHQLKIAQGEMVKTRRNAATGDGNQPEGSNHNHQGSPPPPPSPPPPPPPDTNAILTQILAQQANMMTAFLHHLQNPPQQNAPPPPPQHSKLAEFLRIRPPTFSSSNNPVDALDWLHAVGKKLDTVQCSDEEKVIFAAHQLQGPASLWTHVPAGVVALKKREFRELKQGNRSVMEYLHELNNLARYAPEDVREDEEKQEKFLAGMDPELSVRLVSGDYPDFQRLMDKSIRLEAKHKELESHKRRLANFRNQQGANQRVRYTNPYPGGSSSQQQQQQQQPRSAPRPQFVPGQGRRDAQGPQRLCFNCFEPGHFADKCPKPRRQQGQAPPRSNNGGKDVIRGRVNHVTAEDVLTTPDVIVGTFLIHSIPATILFDSGASHSFIFVPFVGRKQLGVERLRNPLLITTPGGVMTAKYYSHAVPIEIQGIPFPSDLILLDTKNLDVILRMNWLAQFQGVVDCARRTVTLYRGPEQPVVFFAPPTSVSSSELHQIGLSEIPIVREFGDVFPEELPGMPPKREIEFRIDLAPGTTPLYKRPYRMAANELAEKKDKMKRMCVDYRALNEVTIKNKYPLPRIDDMFDQLKGATVFSKIDLRSGYHQLRIREEDIPKTAFTTRYGLYEFTVMSFGLTNAPAFFMNLMNKVFMEYLDKFVVVFIDDILIYSQSEEDHQHHLRLVLGKLREHQLYAKLSKCEFWLSEVKFLGHVISAKGVAVDPETVTAVTDWKQPKTVTQVRSFLGLAGYYRRFIENFSKIARPMTQLLKKEEKFVWSPQCEKAFQTLKEKLVSSPVLILPDTRKDFMVYCDASRQGLGCVLMQDGHVVAYASRQLRPHEGNYPTHDLELAAVVHALKIWRHYLIGNRCEIYTDHKSLKYIFTQSDLNLRQRRWLELIKDYDVGIHYHPGKANVVADALSRKSHCNTLDVRGIPPELNQQMEALNLSIVGRGFLATLEAKPTLLDQIREAQKNDPDMRGLLKNMKQGKAAGFTEDEHGTLWNGNRVCVPDDRELKQLILQEAHESPYSIHPGSTKMYLDLKEKYWWVSMKREIAEFVALCDVCQRVKAEHQRPAGLLQPLQVPEWKWDEIGMDFITGLPKTQGGYDSIWVVVDRLTKVARFIPVKTTYGGNKLAELYFARIVSLHGVPKKIVSDRGSQFTSHFWKKLQEELGTRLNFSTAYHPQTDGQTERLNQILEDMLRACVLDFGKTWDKSLPYAEFSYNNSYQPSIQMAPYEALYGRKCRTPLLWDRVGESQVFGTDILREAEAKVRTIRDNLKVAQSRQKSYADNRRRNLEFAVDDFVYLRVTPLRGVHRFQTKGKLAPRYVGPFRIIARCGEVAYQLELPASLGNVHDVFHVSQLKKCLRVPSEQADSEQIEVREDLTYVERPVKILDTMERRTRNRVIHFCKVQWSNHAEEEATWEREDELKAAHPDLFASSSESRGRDSV

SEQ ID NO: 19064 - protein, 894 aa, Oryza sativa
  Clone ID: TF_OSC15765j.C1.p1.fg
MAGSVSRRGLDMTGFVLELRGMCVVLGYPHGVDYQARPLPDQEGDDAEPHAAWEHSPYRYHPRRGGARDYATFRDASSEDDATIVHLARMVEAYDAARIDFHQMVRRGMVENNLKILELHQENLQLKKDLDAVEAQLHQLKIAQGEVCRPKRHRVYRSQKITARKSTSRPELVRQSLAWTCFVETPRAEPAPVVPQEGEASGVGSTEDALLLTFRPGPSQRRSANTGDGNQPEGSNHNHQGSPPPPPPPPPPPPPDTNAILTQILAQQANMMTAFLHHLQNPPQQNAPPPPPQHSKLAEFLRIRPPTFSSSNNPVDALDWLHAVGKKLDTVQCSDEEKVIFAAHQLQGPASLWWDHFQATQPEGQPITWARFTAAFRRTHVPAGVMALKKREFRELKQGNRSVMEYLHEFNNLARYAPEDVREDEEKQEKFLAGMDPELSVRLVSGDYPDFQRLVDKSIRLEAKHKELESHKRRLANFRNQQDANQRVRYTNPYPGGSSSQQQQQQQQPRSAPRPQFVVRVPQPQQQQNQQGTRAPRPPTPTVQPGQGRRDAQGPQRLCFNCFEPGHFADKCPKPRRQQGQAPPRSNNGGKDVIRGRVNHVTAEDVLTTPDVIVGHVISAKEVAVDPETVTAVTDWKQPKTVTQIRSFLGLAGYYRSVSRQSTNDRPDFSNLSKYQNGNGMKLGWISSPDFQKPKVARFIPVKTTYGGNKLAELYFARILRSAAVVTPDRLPPRGRLLRLRRILADLVHLSVSVADRRSAAAPVYPSRAATFLRSGRRSRRRRRPGVSRGPPFHFPLPSPLSGAAPPRRWSPAATIRARVRRLPSAVPAWPPSGAPRGCHVGPGRQPPAPSGAADAWDPRRRPAQAACTRSTVDREAAAWAPLPWTRSARPSLG

SEQ ID NO: 19065 - protein, 1632 aa, Oryza sativa
  unsure (1)..(1632): unsure at all Xaa locations
  Clone ID: TF_OSC15868j.C1.p2.np
MAAGSSAPVSPSSGRPLPLPTLYKPSPCLPPPFPPLAALSPRRNRARAIALSLRRRRRAPVRRRRRPGPSPASASPSSGSPQPRRPRPPLRFGRRPPERRRPRRPEPRRRLYPLRSPFPSSPSTRGEPWIAFVSPFPPLSRAPLRRAGGRRRRPSGHECAASRRLCRRGRLRARPAAAAWGPAVSRPRPRVRLTRGTHGAGRASPGAPGPPWTHLGHIRTGLRASVAKHYRFHMSSGTNEGYTSYGPVVEMSWHRAGVLLLGAQSCLPVPEVPAVGGIGSMYTSDQSIIYSNSRALGYGQAEQCTQMAGSISRRGLDLTGFVLELRGMCVVLGYPHGVDYQGRPLPEQEGDDAEPHAAWEVTAVILTGSPERTSLAVTAGGDSFPAACQNAALLAIGTLHQRYPDELQHSPYRYHPRRGGARDFATFRDASSEDDATIMHLARMVEAYDAARIDFHQMVRRGMVENNMKILELRQENLQLKKELDAVEAQLHQLKIAQGEVCRPKRRRVCRSQKITARKSTSRPELVRQSLAWTCFVETPRAEPAPVVPQEGEASGVGSTEDALLLTFHGETRRSANTGDGNQPEGSNHNNHGSPPPPPPPPPPPPPDTNAILTQILAQQANMMTAFLHHLQNPPQQNAPPPPPQHCKLAEFLRIRPPTFSSSNNPVDALDWLHAVGKKLDTVQCSDEEKVIFAAHQLQGPASLWWDHFQATQPEGQPITWARFTAAFRRTHVPAGVVALKKREFRELKQGNRSVMEYLHEFNNLARYALEDVREDEEKQEKFLAGMDPELSVRLVSGDYPDFQRLVDKSIRLEAKHKELESHKRRLANVRNQQGANQRVRYTNPYPGGSSSQQQQQQQPRSAPRPQFVVRVPQPQQQQSQQGTRVPRPPTPAAQSGQGRRDASGPQRLCFNCFEPGHFADKCPKPRRQQGQAPPRSNNGGKDVIRGRVNHVTAEDVLTTPDVIVGTFLIHSIPATILFDSGASHSFISVPFVGRNQLGVERLRNPLLITTPGGVMTAKYYSPAVPIEIQGIPFPSDLILLDTKNLDVILGMNWMAQFQGVVDCARRTVTLYRGPEQSVVFFAPPTSVSSSELHQIGLSEIPIVREFGDVFPEELPGMPPKREIEFRIDLAPGTTPLYKRPYRMAANELAEVKKQLEELKEKGYIRPSTSPXGAPVIFVEKKDKTKRMCVDYRALNEVTIKNKYPLPRIDDLFDQLKGATVFSKIDLRSGYHQLRIREEDIPKTAFTTRYGLYEFTVMSFGLTNAPAFFMNLMNKVFMEYLDKFVVVFIDDILVYSQSEEDHQHHLRLVLGKLREHQLYAKLSKCEFWLSEVKFLGHVISAKGVAVDPETVTAVTDWKQPKTVTQVRSFLGFAGYYRRFIENFSKIARPMTQLLKKEEKFVWSPQCEKAFQTLKEKLVSSPVLTLPDTRKDFMVYCDASRQGLGCVLMQDGHVVAYASRQLRPHEGNYPTHDLELAAVVHALKIWRHYLIGNRSEIYTDHKSLKYIFTQSDLNLRQRRWLELIKDYDVGIHYHPGKANVVADALSRKSHCNTLNVRGIPPELNQQMEALNLSIVGRGFLVALEAKPTLLDQIREAQCRDRNCLFPNASNGSTEGRTPRRPGTTRGRRRRRRP

SEQ ID NO: 19066 - protein, 702 aa, Oryza sativa
  Clone ID: TF_OSC16514j.C1.p1.fg
DPRWLSRADFAGSHRGWRFFPRRLQNAAFLAIGTLHQRYPDELQHSPYRYHPRRGGARDYATFRDASSEDDATIMHLARMVEAYDAARIDFHQMVRRGMVENNMKILELRQENLQLKKDLDAVEAQLHQLKIAQGEVCRPKRRRVCRSQKITARKSTSRPELVRQSLAWTCFVETPRAEPAPVVPQEGEASGVGSTEDALLLTFRPGPSQRRSAATGDGNQPEGSNHHQGSPPPPPPPPPPPPPDTNAILTQILAQQANMMTAFLHHLQNPPQHNAPPPPPQHSKLAEFLRIRPPTFSSSNNPVDALDWLHAVGKKLDTVQCSDEEKVIFAAHQLQGPASLWWDHFQATQPEGQPITWARFTAAFRRTHVPAGVVALKKREFRELKQGNRSVMEYLHEFNNLARYAPEDVREDEEKQEKFLAGMDPELSVRLVSGDYLDFQRLVDKSIRLEAKHKELESHKRRLANFRNQQGANQRVRYTNPYPGGSSSQQQQQQQQPRSAPRPQFVVRVPQPQQQQNQQGTRAPRPPTPTVQPGQGRRDAQGPQRLCFNCFEPGHFADKCPKPRRQQGQAPPRSNNGGKDVIRGRVNHVTAEDVLTTPDVIVGTFLIHSIPATILFDSGASHSFMSVPFVGRNQLGVERLRNPLLITTPGGVMTANVSRQSTNDRPDFSNLSKYQNGNGMKLGWISSPDFQKPKVDMILYG

SEQ ID NO: 19067 - protein, 391 aa, Oryza sativa
  Clone ID: TF_OSC16518j.C1.p1.fg
MVTTRRNVNTGEGNQPEGSNPNPQGNPPPPPPPDTNAILTQILAQQANMMNTFLHHLQNPPQQNAPPPPPQHSKLAEFLRIRPPTFSSSNNPVDALDWLHAVGKKLDTVQCSDEEKVIFAAHQLQGPASLWWDHFQATQPEGQPITWARFTAAFRRTHVPAGVVALKKREFRELKQGNRSVMEYLHEFNNLARYAPEDVREDEEKQEKFLAGMDPELSVRLVSGDYPDFQRLVDKSIRLEAKHKELESHKRRLANFRNQQGANQRVRYTNPYPGGSSSQQQQQQQPRPAPRPQFVVRVPQPQQQQNQQGTRAPRPPTPTVQPVQGRRDASGPQRLCFNCFEPGHFADKCPKPRRQQGQAPPRSNNGGKDVIRGRVNHVTAEDVLTTPDVIV

SEQ ID NO: 19068 - protein, 757 aa, Oryza sativa
  Clone ID: TF_OSC1667j.C1.p1.fg
MSWHRAGVLLLGAQSCLPVPGVPAMAGSVSRRGLDMTGFVLELRGMCVVLGYPHGVDYQGRPLPEQEGDDAEPHAAWEVTAVILTGSPERTSLAVTAGGDSFPAACQSAALLAIGTLHQGYPDELQHSPYRYHPRRGGARDFATFRDASSEDDATIMHLARMVEAYDAARIDFHQMVRRGMVENNMKILELRQENLQLKKDLDAVEAQLHQLKITQGEVCRPKCRRVCRSQKITARKSTSRPELVRQSLAWTCFVETPRAEPAPVVPQEGEASGVGSMEDALLLTFRPGPSQRRSAATGEGNQSEGSNHNHQGSPPPPPPPPPPPPPDTNAILTQILAQQANMMTAFLHHLQNPPQQNAPPPPPQHSKLAEFLRIRPPTFSSSNNPVDALDWLHAVGKKLDTVQCSDEEKVIFAAHQLQGPASLWWDHFQATQPEGQPITWARFTAAFRRTHVPAGVVALKKREFRELKQGNRSVMEYLHEFNNLARYAPEDVREDEEKQEKFLAGMDPELSVRLVSGDYPDFQRLVDKSIRLEDKHKELESHKRRLANFRNQQGANQRVRYTNPYPGGSSSQQEQQQQQPRSAPRPQFVVRVPQPQQQQSQQGTRAPRPPMPTVQPGQSRRDAQGPQRLCFNCFEPGHFADKCPKLRRQQGQAPPRSNNGGKDVIRGRVNHVTAEDVLTTPDVIVVGPESSAKEMVRTHQGLRCGNSLSSCVSRQSTNDRPDFSNLSKYQNGNGMKLGWISSPDFQKPKVDMILYG

SEQ ID NO: 19069 - protein, 1768 aa, Oryza sativa
  Clone ID: TF_OSC16834j.C1.p1.np
VDEVGGRWTFSRANEGYTSCGPVVEMSWHRAGVLLLGAQSCLPVPGVPAVDGIGSMYTSDQSKIYSNSRALGYGQAEQCTQMAGSVSRRGLDMTGFVLELRGMCVVLGYPHGVDYQARPFPEQEGDDAEPHAAWEVTAVILAGSPERTSLTVTAGGDSFPAACQSAALLAIGTLHQRYPDELQHSPYRYHPRRGGARDYATFRDASSEDDATIVHLARMVEAYDAARIDFHQMVRRGMVENNMKILELRQENLQLKKDLDAVEAQLHQLKIAQGEVCRPKRRRVCRSQKITARKSTSRPELVRQSLAWTCFVETPRAEPAPVVPQEGEASGVGHGGCAVAHLPSWPVAAVDEQLVGLRVCSTRRNAGTSDGNQPEGSNHNNHGSPPSPPSPPPPDTNAILTQILAQQANMMTAFLHHLQNPPQHNAPPPPPQHSKLAEFLRICPPTFSSSNNPVDALDWLHAVGKKLDTVQCSDEEKVIFAAHQLQGPASLWWDHFQATQPEGQPITWARFTPAFRRTHVPAGVVALKKREFRELKQGNRSVMEYLHEFNNLARYAPEDVREDEEKQEKFLAGMDPELSVCLVSGDYPDFQRLVDKSIRLEAKHKELESHKRRLANFHNQQGANQRVRYTNPYPGGSSSQQQQQQQQPRSAPRPQFVVRVPQPQQEQNQQGTRAPRPPPPTVQPGQGRRDAQGPQRLCFNCFEPGHFADKCPKPRRQQGQAPPRPNNGGKDVIRGRVNHVTAEDVLTTPDVIVGTFLIHSIPATILFDSGASHSFISVPFVGRNQLGVERLRNPLLITTPGGVMTAKYYSPAVPIEIQGIPFPSDLILLGTKNLDVILGMNWLAQFQGVVDCARRTVTLYRGPGQPVVFFAPPTSVSSSELHQIGLSEIPIVREFGDVFPEELPGMPPKREIEFQIDLAPGTTPLCKRPYRMAANELAEVKKQLEELKEKGYIRPSTSPWGAPVIFVEKKDKTKRMCVDYRALNEVTIKNKYPLPRIDDLFDQLKGATVFSKIDLRSGYHQLRIRDEDIPKTAFTTRYGLYEFTVMSFGLTNAPAFFMNLMNKVFMEYLDKFVVVFIDDILIYSQSEEDHQHHLRLVLGKLREHQLYAKLSKCEFWLSEVKFLGHVISAKGVAVDPETVIAVTDWKQPKTVTQVRSFLGLAGYYRRFIENFSKIARPMTQLLKKEEKFVWSPQCEKAFRTLKEKLVASPVLILPDTRKDFIVYCDASRQGLGCVLMQDGHVVAYASRQLRPHEGNYPTHDLELAAVVHALKIWRHYLIGNRCEIYTDHKSLKYIFTQSDLNLRQRRWLELIKDYDVGIHYHPGKANVVADALSRKSHCNTLNVRGIPPELNQQMEALNLSIVSRGFLAALEAKPTLLDQIREAQKNDPDMHGLLKNMKQGKAAGFTEDEHGTLWNGNRVCVPDIRELKQLILQEAHESPYSIHPGSTKMYLDLKEKYWWVSMKREIAEFVALCDVCQRVKAEHQRPAGLLQPLQVPEWKWDEIGMDFITGLPKTQGGYDSIWVVVDRLTKVARFIPVKTTYGGNKLAELYFARIVSLHGVPKKIVSDRGSQFTSHFWKKLQEELGTRLNFSTAYHPQTDGQTERLNQILEDMLRACVLDFGKTWDKSLPYAEFSYNNSYQASIQMAPYEALYGRKCRTPLLWDQVGESQVFGTDILRQAEAKVRTIRDNLKMAQSRQKSYADNRRRDLEFAADDFVYVRVTPLRGVHRFRTKGKLAPRYVGPFRITARRGEVVTTGNNPTGIPYVRAL

SEQ ID NO: 19070 - protein, 1663 aa, Oryza sativa
  Clone ID: TF_OSC16878j.C1.p1.fg
MAGSVTRRGLSMTGFVLELRGMCVVLGYPHGVDYQARPLPEQEGEDAEPHAGWEVTAVILSGSPERTSLAVTAGGDSFPAACQNAALLAIGTLHQRYPDELQHSPYRYHPRRGGASDHATFRDASSEDDATVVHLARMVEAYDAARIDFHQMVRRGMVENNMKILELRQENLQLKKDLDALEAQPHQLKVAQGEISRPKRRRVCRSQKITARKSTSRPELVRQSLAWTCFVETPRAEPAPVVPQEGEASGVGSSEGALLLTFRPGPSQRQPPEGSNPNPQGNPPPPPPPDTNAILTQILAQQANMMNAFLHHLQNPPQQNAPPPPPQHSKLAEFLRIRPPTFSSSNNPVDALDWLHAVGKKLDTVQCSDEEKVIFAAHQLQGPASLWWDHFQAAQPEGQPITWTRFTAAFRRTHVPAGVVALKKKEFRELKQGNRSVMEYLHEFNNLARYAPEDVREDEEKQEKFLAGMDPELSVRLVSGDYPDFQRLVDKSIRLEAKHKELESHKRRLANIRNQQGANQRVRYTNPYPGGSSSQQQQQQQQQPRSAPRPQFVVRVPQQQPQQNQQGTRAPRPPTPAGQPVQGRRDASGPQRLCFNCFEPGHFADKCPKPRRQQGQAPPRPNNGGKDVIRGRVNHVTAEDVLTTPDVIVGVVDCARRTVTLYRGPEQPVVFFAPPTSVRSSELHQIGLSEIPIVREFGDVFPEELPGMPPKREIEFRIDLAPGTTPLYKRPYRMAANELAEVKKQLEELKEKGYIRPSTSPWGAPVIFVEKKDKTKRMCVDYRALNEVTIKNKYPLPRIDDLFDQLKGATVFSKIDLRSGYHQLRIREEDIPKTAFTTRYGLYEFTVMSFGLTNAPAFFMNLMNKVFMEYLDKFVVVFIDDILIYSQTEEDHQHHLRLVLGKLREHQLYAKLSKCEFWLSEVKFLGHVISAKGVAVDPETVTAVTEWKQPKTVTQIRSFLGLAGYYRRFIENFSKIARPMTQLLKKEEKFVWSPQCEKAFQTLKEKLVSSPVLILPDTRKDFMVYCDASRQGLGCVLMQDGHVVAYASRQLRPHEGNYPTHDLELAAVVHALKIWRHYLIGNRCEIYTDHKSLKYIFTQSDLNLRQRRWLELIKDYDVGIHYHPGKANVVADALSRKSHCNTLNVRGIPPELNQQMEALNLSIVGRGFLAALEAKPTLLDQIREAQKNDPDMHGLLKNMKQGKAAGFTEDEHGTLWNGKRVCVPDNRELKQLILQEAHESPYSIHPGSTKMYLDLKEKYWWVSMKREIAEFVALCDVCQRVKAEHQRPAGLLQPLQVPEWKWDEIGMDFITGLPKTQGGYDSIWVVVDRLTKVARFIPVKTTYGGNKLAELYFARIVSLHGIPKKIVSDRGSQFTSHFWKKLQEELGTRLNFSTAYHPQTDGQTERLNQILEDMLRACVLDFGKTWDKSLPYAEFSYNNSYQASIQMAPYEALYGRKCRTPLLWDQVGESQVFGTDILREAEAKVRIIRDNLKVAQSRQKSYADNRRRDLEFAVDDFVYLRVTPLRGVHRFQTKGKLAPRYVGPFRIIARRGEVAYQLELPASLGNVHDVFHVSQLKKCLRVPSEQANSEQIEVREDLTYVERPVKILDTMERRTRNRVIRFCKVQWSNHAEEEATWEREDELKAAHPDLFASSSESRGRDSV

SEQ ID NO: 19071 - protein, 1287 aa, Oryza sativa
  Clone ID: TF_OSC16878j.C1.p2.gm
MMNAFLHHLQNPPQQNAPPPPPQHSKLAEFLRIRPPTFSSSNNPVDALDWLHAVGKKLDTVQCSDEEKVIFAAHQLQGPASLWWDHFQAAQPEGQPITWTRFTAAFRRTHVPAGVVALKKKEFRELKQGNRSVMEYLHEFNNLARYAPEDVREDEEKQEKFLAGMDPELSVRLVSGDYPDFQRLVDKSIRLEAKHKELESHKRRLANIRNQQGANQRVRYTNPYPGGSSSQQQQQQQQQPRSAPRPQFVVRVPQQQPQQNQQGTRAPRPPTPAGQPVQGRRDASGPQRLCFNCFEPGHFADKCPKPRRQQGQAPPRPNNGGKDVIRGRVNHVTAEDVLTTPDVIVEIPIVREFGDVFPEELPGMPPKREIEFRIDLAPGTTPLYKRPYRMAANELAEVKKQLEELKEKGYIRPSTSPWGAPVIFVEKKDKTKRMCVDYRALNEVTIKNKYPLPRIDDLFDQLKGATVFSKIDLRSGYHQLRIREEDIPKTAFTTRYGLYEFTVMSFGLTNAPAFFMNLMNKVFMEYLDKFVVVFIDDILIYSQTEEDHQHHLRLVLGKLREHQLYAKLSKCEFWLSEVKFLGHVISAKGVAVDPETVTAVTEWKQPKTVTQIRSFLGLAGYYRRFIENFSKIARPMTQLLKKEEKFVWSPQCEKAFQTLKEKLDGHVVAYASRQLRPHEGNYPTHDLELAAVVHALKIWRHYLIGNRCEIYTDHKSLKYIFTQSDLNLRQRRWLELIKDYDVGIHYHPGKANVVADALSRKSHCNTLNVRGIPPELNQQMEALNLSIVGRGFLAALEAKPTLLDQIREAQKNDPDMHGLLKNMKQGKAAGFTEDEHGTLWNGKRVCVPDNRELKQLILQEAHESPYSIHPGSTKMYLDLKEKYWWVSMKREIAEFVALCDVCQRVKAEHQRPAGLLQPLQVPEWKWDEIGMDFITGLPKTQGGYDSIWVVVDRLTKVARFIPVKTTYGGNKLAELYFARIVSLHGIPKKIVSDRGSQFTSHFWKKLQEELGTRLNFSTAYHPQTDGQTERLNQILEDMLRACVLDFGKTWDKSLPYAEFSYNNSYQASIQMAPYEALYGRKCRTPLLWDQVGESQVFGTDILREAEAKVRIIRDNLKVAQSRQKSYADNRRRDLEFAVDDFVYLRVTPLRGVHRFQTKGKLAPRYVGPFRIIARRGEVAYQLELPASLGNVHDVFHVSQLKKCLRVPSEQANSEQIEVREDLTYVERPVKILDTMERRTRNRVIRFCKVQWSNHAEEEATWEREDELKAAHPDLFASSSESRGRDSV

SEQ ID NO: 19072 - protein, 180 aa, Oryza sativa
  Clone ID: TF_OSC16881j.C1.p1.fg
MDPELSVRLVSVDYPDFQCLVDKSIRLEAKHKELESHKRRLANFRNQQGANQRVRYTNPYPGGSSSQQQQQQQQPRSAPRPQFMVRVPQPQQQQSQQGTRAPRPPTPTVQPGQGRRDVQGPQRLCFNCFEPGHFADKCPKPRRQQGQVPPRSNNGGKDVIRGRVNHVTAEDVLTTPDVIV

SEQ ID NO: 19073 - protein, 1299 aa, Oryza sativa
  unsure (1)..(1299): unsure at all Xaa locations
  Clone ID: TF_OSC16923j.C1.p1.np
MEPESAAPVSFSSGRPLSLPTLYKPSPCLPPPFPPLAALSPRRNRARAVALSLRRRRRAPVCRRRRPGPSPVSASPSSGSPQHRRPRPPLRFARRPPERRRPRRPEPRRRLFPLRSPFPSSPSTRGEPWTAHFVSPFPPLSRPPLRRAYGRRRRPXGRGRAASRRLCRRGRLRARPAAAMWGPAVSRPPRVRLTRGTHGAGRRKPRAPVPPWTHLGHIRTGLRASVAKHYRFHMSSGANEGYTSCGPVVEMSWHRAGVLLLGAQSCLPVPGVPAVGGIGSMYTSDQSIIYSNSRALGYGQAEQCTQMAGSVTRRGLDMTGFVLELRGMCVVLGYPHGVDYQARPLPKQEGDDAEPHAAWEVTAVILAGSPERTSLAVTAGGDSFPAACQNAALLAIGTLHQRYPDELQHSPYRYHPHRGGARDYATFRDASSEDDATIVHLARMVEAYDAARIDFHQMVRRGMVENNLKILELRQENLQLKKDLDAVEAQLHQLKIAQGEVCRPKRRRVCRSQKITARKSTSRPELVRQSLAWTCFVETPRAEPAPVVPQEGEASGVGSTEDALLLTFHGETRRSANAGDGNQPEGSNRNHHGSPPPPPPPPPPPPPDTNAILTQILAQQANMMTAFLHHLQNPPQQNAPPPPPQHSKLAEFLRIRPPTFSSSNNPVDALDWLHAVGKKLDTVQCSDEEKVIFAAHQLQGPASLWWDHFQATQPEGQPITWARFTAAFRRTHVPAGVVALKKREFXELKQGNRSVMEYLHEFNNLARYAPEDVREDEEKQEKFLAGMDPELSVRLVSGDYPDFQRLVDKSIRLEAKHKELESHKRRLANFRNQQGANQRVRYTNPYPGGSSSQQQQQQQQPRSVPRPQYVVRVPQPQQQQSQQGTRAPRPPTPAVQSGQGCRDAQGQQRLCFNCFEPGHFADKCPKPRRQQGQAPPRSNNGGKDVIQGRVNHVTAEDVLTTPDVIVGTFLIHSIPATILFDSGASHSFISVPFVGRNQLGVERLRNPLLITTPGGVMTAKYYSPAVPIEIQGIPFPSDLILLDTKNLDVILGMNWLAQFQGVVDCARRTVTLYRGPEQPVVFFAPPTSVSSSELHQIGLSEIPIVREFGDVFPEELPGMPPKREIEFRIDLAPGTTPLYKRPYRMAANELAEVKKQLEELKEKGYIRPSTSPWGAPVIFVEKKDKTKRRCVDYRALNEVTIKNKYPLPRIDDLFDQLKGATVFSKIDLRSGYHQLRIREEDIPKTAFTTRYGLYEFTVMSFGLTNAPAFFMNLMNKVFMEYLDKFVVVFIDDILIYSQS

SEQ ID NO: 19074 - protein, 612 aa, Oryza sativa
  Clone ID: TF_OSC17346j.C1.p1.gm
SFWDATKHKELESHKRRLANFRNQQGANQRVRYTNPYPGGSSSQQQQQQQQPRSAPRPQFVVRVPQPQQQQNQQGTRAPRPPTPTVQSGQGRRDAQGQQRLCFNCFEPGHFADKCPKPRRQQGQAPPHSNNGGKDVIRGRVNHVTAEDVLTTPDVIVGTFLVHSIPATILFDSGASHWFISVPFVGRNQLGVERLRNPLLITTPGGVMTAKYYSPAVPIEIQGIPFPSDLILLDTKNLDVILGMNWLAQFQGVVDCARRTVTLYRGPEQPVVFFAPPTSVSSSELHQIGLSEIPIVREFGDVFPEELPGMPPKREIEFRIDLAPGTTPLHKRPYRMAANELAEVKKQLEELKEKGYIRPSTSPWGAPVIFVEKKDKTKRMCVDYRALNEVTIKNKYPLPRIDDLFDQLKGATVFSKIDLRSGYHQLRIREEDIPKTAFTTRYGLYEFTVMSFGLTNAPAFFMNLMNKVFMEYLDKFVVVFIDDILVYSQSEEDHQHHLRLVLGKLREHQLYAKLSKCEFWLSEVKFLGHVISAKGVSVDPETVTTVTDWKQPKTVTQVRSFLGLAGYYRRFIENFSKIARPMTQLLKKEEKFVWSPQCEKAFQTLKKSWFPR

SEQ ID NO: 19075 - protein, 1734 aa, Oryza sativa
  Clone ID: TF_OSC17984j.C1.p1.fg
MAGSVTRRGLDMTGFVLELRGMCVVLGYPHGVDYQGRPLPEQEGDDAEPHAAWEVTAVILAGSPERTSLTVTAGGDSFPAACQSAALLAIGTLHQRYPDELQHSPYRYHPRRGGARDYATFRDASSEDDATIMHLARMVEAYDAARIDFHQMVRRGMVENNMKILELRQENLQLKKDLDAVEAQLHQLKIAQGEVCRPKRRRVCRSQKITARKSTSRPELVRQSLAWTCFVETPRAEPAPVVPQEGEASGVGSTEDALLLTFRPGPSQRRSAATGDSNQPEGSNHHHQGSPPPPPPPPPPPPDTNAILTQILAQQADMMAAFLHHIQNPPQHNAPPPPSQHSKLAEFLRIRPLTFSSSNNPVDALDWLHAVGKKLDTVQCSDEEKVIFAAHQLQGPASLWWDHFQATQPEGQPITWARFTAAFRRTHVPAGVVALKKREFRELKQGNRSVTEYLHEFNNLARYAPEDVREDEEKQEKFLAGMDPELSVRLVSGNYPDFQRLVDKSIRLEAKHKELESHKRRLANFRNQQGANQRVRYTNPYPGGSSSQQQQQQQQPRSAPRPQFVVRVPQPQQQQNQQGTRAPRPPTPTVQPGQGRRDAQGPQRLCFNCFEPGHFADKCPKPRRQQGQAPPRSNNGGKDVIRGRVNHVTAEDVLTTPDVIVGTFLIHSIPATILFDSGASHSFISVPFVGRNQLGVERLRNPLLITTPGGVMTAKYYSPAVPIEIQGIPFPSDLILLDTKNMDVILGMNCSSELHQIGLSEIPIVREFGDVFPDELPGMPPKREIEFRIDLAPGTTPLYKRPYRMAANELAEVKKQLEELKEKGYIRPSTSPWGAPVIFVEKKDKTKRMCVDYRALNEVTIKNKYPLPRIDDLFDQLKGATVFSKIDLRSGYHQLRIRDEDIPKTAFTTRYGLYEFTVMSFGLTNAPAFFMNLMNKVFMEYLDKFVVVFIDDILVYSQSEEDHQHHLCLVLGKLREHQLYAKLSKCEFWLSEVKFLGHVISAKGVAVDPETVTAVTDWKQPKTVTQVRSFLGLAGYYRRFIENFSKIAQPMTQLLKKEEKFVWSPQCEKAFKTLKEKLVASPVLILPDTRKDFMVYCDASRQGLGCVLMQDGHVVAYASRQLRPHEGNYPTHDLELAAVVHALKIWRHYLIGNRCEIYTDHKSLKYIFTQSDLNLRQRRWLELIKDYDVGIHYHPGKANVVADALSRKSHCNTLNVRGIPPKLSQQMEALNLSIVGRGFLAALEAKPTLLDQIREAQKNDPDMHGLLKNMKQGKAAGFTEDEHGTLWNGNRVCVPDNRELKQLILQEAHESPYSIHPGSTKMYLDLKEKYWWVSMKREIAEFVALCDVCQRVKAEHQRPAGLLQPLQVPEWKWDEIGMDFITGLPKTQGGYDSIWVVVDRLTKVARFIPVKTTYGGNKLAELYFARIVSLHGVPKKIVSDRGSQFTSHFWKKLQEELGTRLNFSTAYHPQTDGQTERLNQILEDMLRACVLDFGKTWDKSLPYAEFSYNNSYQASIQMAPYEALYGRKCRTPLLWDQVGESQVFGTDILREAEAKVRTIRDNLKVAQSRQKSYADNRRRNLEFAVDDFVYLRVTPLRGVHRFQTKGKLAPRYVGPFRIVARHGEVAYQLELPASLGNVHDVFHVSQLKKCLRVPSEQADSEQIEVREDLTYVERPVKILDTMERRTRNRVIRFCKVQWSNHAEEEATWEHEDELKAAHPDLFASSSESRGRDSV

SEQ ID NO: 19076 - protein, 456 aa, Oryza sativa
  Clone ID: TF_OSC17991j.C1.p1.fg
MAINLKAATTTTRATHLHLLLPPPPPPPDTNAILTQILAQQANMMTTFLHHLQNPPQQNAPPPPPQHSKLAEFLRIRPPTFSSSNNPVDALDWLHAVGKKLDTVQCSDEEKVIFAAHQLQGPASLWWDHFQATQPEGQPITWARFTAAFRRTHVLAGVVALKKREFRELKQGNRSVMEYLHEFNNLARYAPEDVREDEEKQEKFLAGMDPELSVRLVSGDYPDFQRLVDKSIRLEAKHKELESHKRRLANFRNQQGANQRVRYTNPYPGGSSSQQQQQQQQPRSAPRPQFVVRVPQPQQQQNQQGTRAPRPPTPAVQPGQGHRDAQGQQRLCFNCFEPGHFADKCPKPRRQQGQAPPRSNNGGKDVIRGRVNHVTAEDVLTTPDVIVEKKDKTKRMCVDYRALNEVTIKNNVSRQSTNDRPDSSNHSKYPNGNGMKLGWISSPDFQRPKVDMILYG

SEQ ID NO: 19077 - protein, 1511 aa, Oryza sativa
  Clone ID: TF_OSC18069j.C1.p1.fg
MVEAYDAARIDFHHMVRRGMVVNNMKILELRQENLQLKKDLDALEAQLCQLKMVTTRRTAAIGDGNQPEGSNPNIQGGPPPPPPPPPPPPPDTNPILTQILAQQANMMAAFLHHIQNPPQHNAPPPPPPPQHSKLAEFLRIRPPTFSSSNNPVDALDWLHAVGKKLDTVQCNDEEEVIFATHQLQGPASLWWDHFQATQPEGQPITWARFTAAFRRTHVPAGVMALKKREFRELKQGNRSVMEYLHEFNNLARYAPEDVREDEEKQEKFLAGMDPELSVRLVSGDYPDFQRLVDKSIRLEAKHKELESHKRRLANFRNQQGANQRVRYTNPYLGGSSSQQQQQQPRSAPRPQFVVRVPQPQQQQGRRDAQGQQRLCFNCFEPGHFADKCPKPRRQQGQAPPRPNNGGKDVAQGRVNHVTVEDVLTTPDVIVGTFLIHSIPATILFDSGASHSFISVPFVGRNQLGVERLRNPLLITTPGGDMTAKYYSPAVPIEIQGIPFPSDLILLDTKNLDVILGMNWLAQFQGVVDCVRRTVTLYRGPEQPVVFFAPPTSVGSSELHQIGLSEIPIASEFGDVFPEELPGMPPKREIEFRIDLAPGTTPLYKRPYRMAANELAEVKKQLEELKEKGYIRPSTSPWGAPVIFVEKKDKTKRMCVDYRALNEVTIKNKYPLPRIDDLFDQLKGATVFSKIDLRSGYHQLRIREEDIPKTAFTTRYGLYEFTVMSFGLTNAPAFFMNLMNKVFMEYLDKFVVVFIDDILVYSQSEEDHQQHLRLVLGKLREHQLYAKLSKCEFWLSEVKFLGHVRSAKGVAVDPETVTAVTDWKQPKTVTQVRSFLGLAGYYRSVRKHSKLKEKLVSSPVLILPDTRKDFLVYYDASRQGLGCVLMQEGHVVAYASRQLRPHEGNYPTHDLELAAVVHALKIWRHYLIGNRCEIYTDHKSLKYIFTQSDLNLRQRRWLELIKDYDVGIHYHPGKANVVADALSRKSHCNTLGVRGIPPELNQQLEALNLSIVGRGFLAMLEAKPTLLDQIREAQKNDPDMHGLLKNMKQGKAAGFTEDEHGTLWNGNRVCVPDVRELKQLILQEAHESPYSIHPGSTKMYLDLKEKYWWVSMKREIAEFVALCDVCQRVKAEHQRPAGLLQPLQVLEWKWDEIGMDFITGLPKTQGGYDSIWVVVDRLTKVARFIPVKTTYGGNKLAELYFARIVSLHGVPKKIVSDRGSQFTSHFWKKLQEELGTRLNFSTAYHPQTDGQTERLNQILEDMLRACVLDFGKTWDKSLPYAEFSYNNSYQASIQMAPYEALYGRKCRTPLLWDQVGESQVFGTDILREAEAKVRTIRENLKVAQSRQKSYADNRRRDLEFAVDDFVYLRVTPLRGVHRFQAKGKLAPRFVGPFRIIARRGEVAYQLELPASLGNVHDVFHVSQLKKCLRVPSEQADSEQIEVREDLTYVERPVKILDTMERRTRNRVIRFCKVQWSNHAEEEATWEREDELKAAHPDLFASSSESRGRDSV

SEQ ID NO: 19078 - protein, 656 aa, Oryza sativa
  Clone ID: TF_OSC18168j.C1.p1.fg
MTGFVLELRGMCVVLGYPHGVDYQARPLPEQEGEDAEPHAGWEVTAVILSGSPERTSLAVTAGGDSFPAACQNAALLAIGTLHQRYPDELQHSPYRYHPRRGGARDYATFRDASSEDDATVVHLARMVEAYDAARIDFHQMVSRGMVENNLKILELRQENLQLKKDLDALEAQLHQLKIAQGEICRPKRRRVCRSQKITARKSTSRPELVRQSLAWTCFVETPRAEPAPVVPQEGEASGVGSSEAPSLFAGSGWGFQMVTTRRNVNTGEGNQPEGSNPNHQGNPPPPPPPDTNAILTQILAQQANMMNAFLHHLQNPPQQNAPPPPPQHSKLAEFLRIRPPTFSSSNNPVDALDWLHAVGKKLDTVQCSDEEKVIFAAHQLQGPASLWWDHFQATQPEGQPITWARFTAAFRKTHVPAGVVALKKREFRELKQGNRSVMEYLHEFNNLARYAPEDVREDEEKQEKFLAGMDPELSVRLVSGDYPDFQRLVDKSIRLEAKHKELESHKRRLANFRNQQGANQRVRYTNPYPGGSSSQQQQQQQQPRPAPRPQFVVRVPQQQQQQNQQGTRAPRPPTPAGQPVQGRRDASGPQRLCFNCFEPGHFADKCPKPRRQQGQAPPRPNNGGQDVIRGRVNHVTAEDVLTTPDVIVEVQNCSR

SEQ ID NO: 19079 - protein, 648 aa, Oryza sativa
  Clone ID: TF_OSC1822j.C1.p3.fg
MTGFVLELRGMCVVLGYPHGVDYQARPLPEQEGEDAEPHAGWEVTAVILSGSPERTSLAVTAGGDSFPAACQNAALLAIGTLHQRYPDELQHSPYRYHPRRGGARDYATFRDASSEDDATVVHLARMVEAYDAARIDFHQMVRRGMVENNMKILELRQENLQLKKDLDALEAQLHQLKIAQGEDSRPKRRRVCRSQKITARKSTSRPELVRQSLAWTCFVETPRAEPAPVVPQEGEASGVGSSEVVWGMVMPMVTTRRNVNTGEGNQPEGSNPNHQGNPPPPPPPDTNAILTQILAQQANMMNAFLHHLQNPPQQNAPPPPPQHSKLAEFLRIRPPTFSSSNNPVDALDWLHAVGKKLDTVQCSDEEKVTFAAHQLQGPASLWWDHFQATQPEGQPITWTRFTAAFRRTHVPAGVVALKKREFRELKQGNRSVMEYLHEFNNLARYAPEDVREDEEKQEKFLAGMDPELSVRLVSGDYPDFQRLVDKSIRLEAKHKELESHKRRLANFRNQQGANQRVRYTNPYPGGSSSQQQQQQQQPRSAPRPQFVVRVPQQQQQQNQQGTRAPRPPTPTVQPVQGRRDASGPQRLCFNCFEPGHFADKCPKPRRQQGQAPPRSNNGGKDVIRGRVNHVTAEDVLTTPDVIVENDF

SEQ ID NO: 19080 - protein, 1982 aa, Oryza sativa
  unsure (1)..(1982): unsure at all Xaa locations
  Clone ID: TF_OSC20764j.C1.p3.np
MAAGSSAVSPSSGRSVPLPTLYKPSPCLPPPFSPLAALSPRRNRARAVALSLRRRRRAPVRRRCRPGPPLPSAPPPSASPHPRRPCPPLRFARRPPEHRRPHPPEPRHRLPPHRSPFPSLPSTRGESWTRFFSPFPPLSRPPLRRAYGRRRRPXGRGRAASRLRRRGRLRAHRAATAWGPAISRPRPRVRLTRGTHGAGRCEPGAPGPPWTHLGHIRTGLRASVAKHYRFHMSSGTNEGYTSCGPVVEMSWHRAGVLLLGAQSCLPVPEVPAVGGIGSMYTSDQSIIYSNSRALGYGQAKQCTQMAGSVSRRGLDMTGFVLELRGMCVVLGYPHGLDYQGRPLPEQEGDDAEHAAWEVTAVILTGSPERTSLAVTAGGDSFSAACQSAALLAISTLHQRYPDELQHSPYRYHPRRGGARDYATFRDASSEDDATIMHLARMVEAYDAARIDFHQMVRRGMVENNLKILELRQENLQLKKDLDAVEAQLHQLKIAQGEVCHPKRRRVCRSQKITARKSTSRPELVRQSLAWTCFVETPRAEPAPVVPQEGEASGVGSTEDALLLTFHGETRRNAATSDGNQPEGSNHNNHGSLPPPPPPPPPPPPDTNAILTQILAXQANMMAAFLHHIQNPPQHNAPPPPPQHSKLAEFLRIRPPTFSSSNNPVDVLDWLHAVGKKLDTVQCSDEEKVVFAAHQLQGPASLWWDHFQATQPEGQPITWARFTAAFRRTHVPAGVMALKKREFRELKQGNRSVMEYLHEFNNLARYAPEDVREDEEKQEKFLAGMDPELSVRLVSGDYPDFQRLVDKSIRLEAKHKELESHKRRLANFRNQQGANQRIRYTNPYPGGSSSQQQQPRSAPRPQFVVRVPQPQQQQSQQGTHAPRPPTPAAQSGQGRRDVQGPQRLCFNCFEPGHFADKCPKSRRQQGQAPPDVIVGTFLIHSIPATILFDSGASHSFISVPFVGRNQLGVERLRNPLLITTPGGVMTAKYYSPAVPIEIQGIPFPSDLILLDTKNLDVILGMNWLAQFQGVVDCARRTVTLYRGPKQPVVFFAPPTSVSSSELHQIGLSEIPIVREFGDVFPEELPGMPPKREIEFRIDLAPGTTPLYKRPYRMAANELAEVKKQLEELKEKGYIRPSTSPWGAPVIFVEKKDKTKRMCVDYRALNEVTIKNKYPLPRIDDLFDQLKGATVFSKIDLRSGYHQLRIREEDIPKTAFTTRYGLYEFTVMSFGLTNAPAFFMNLMNKVFMKYLDKFVVVFIDDILVYSQSEEDHQHHLRLVLGKLRKHQLYAKLSKYEFWLSEVKFLGHVISAKGVAVDPETVTAVTDWKQPKTVTQIRSFLGLAGYYRRFIENFSKIARPMTQLLKKEEKFVWSPQCEKAFKTLKEKLVSSPVLILPDTRKDFMVYCDASRQGLGCVLMQDGHVVAYASRQLQPHEGNYPTHDLELAAVVHALKIWRHYLIGNRCEIYTDHKSLKYIFTQSDLNLRQRRWLELIKDYDVGIHYHPGKANVVADAQSRKSHCNTLNVRGIPPELNQQMEALNLSIVGRGFLAALEAKPTLLDQIREAQKNDPDMHGLLKNMKQGKAAGFTEDEHGTLWNGNRRVKAEHQRPAGLLQPLQVPEWKWDEIGMDFITGLPKTQGGYDSIWVVVDRLTKVARFIPVKTTYGGNKLAELYFARIVSLHGVPKKIVSDRGSXFTSHFWKKLQEELGTRLNFSTAYHPQTDGQTERLNQILEDMLRACVLDFGKTWDKSLPYAEFSYNNSYQASIQMAPYEALYGRKCRTPLLWDQVGESQVFGTDILREAEAKVRTIRDNLKVAQSRQKSYADNRRRDLEFAVDDFVYLRVTPLRGVHRFQTKGKLAPRFVGPFRMIARRGEVAYQLELPASLGNVHDVFHVSQLKKCLRVPSQQADSEQIEVREDLTYVERPVKILDTMERRTRNRVIRFCKVQWSNHAEEEATWEREDELKAAHPDLFISSSESRGRDSV

SEQ ID NO: 19081 - protein, 182 aa, Oryza sativa
  Clone ID: TF_OSC2192j.C1.p1.fg
MALKKREFRELKQGNRSVMEYLHGFNNLARYAPEDVREDEEKQEKFLARMDPELSVRLVSGDYPDFQRLVDKSIRLEAKHKELESQKRRLANLRNQQGANQRVRYTNPYPGGSSSQPQQQQSQQGTRVPRPPAPVVQPGQGRREVQGQQRLCFNCFEPGHFADKCPKPRRQQGQAPPRPNNG

SEQ ID NO: 19082 - protein, 1979 aa, Oryza sativa
  unsure (1)..(1979): unsure at all Xaa locations
  Clone ID: TF_OSC22607j.C1.p1.np
YKPSPCLLLRFPPLAALSPGRNRACVALSFRRRRRDPVCRRRRPGPSPVSASSSGSPQHRRPRPPLRFARRPPERRRPRRPEPRRRLFPLRSPFPSSPSTRGEPWTAHFVSPFPPLSRPPLRRAYGRRRRPKGRGRAASRRLCRRGRLRARPAAAMWGPAVSRPPRVRLTRGTHGAGRRKPRAPVPPWTHLGHIRTGLRASVAKHYRFHMSSGANEGYTSCGANEGYTSCGPVVEMSWHRAGVLLLGAQSCLPVPGVPAVGGIGSLYTSDQSIIYSNSRALGYGRAEQCTQMAGSVTRRGLDMTGFVLELRGMCVVLGYPHGVDYQARPLPKQEGDDAEPHAAWEVTAVILAGSPERTSLAVTAGGDSFPAACQNAALLAIGTLHQRYPDELQHSPYRYHPHRGGARDYATFRDASSEDDATIVHLARMVEAYDAARIDFHQMVRRGMVENNLKILELRQENLQLKKDLDAVEAQLHQLKIAQGEVCRPKRRRVCRSQKITARKSTSRPELVRQSLAWTCFVETPRAEPAPVVPQEGEASGVGSTEDALLLTFHGETRRSANAGDGNQPEGSNRNHHGSPPPPPPPPPPPPPDTNAILTQILAQQANMMTAFLHHLQNPPQQNAPPPPPQHSKLAEFLRIRPPTFSSSNNPVDALDWLHAVGKKLDTVQCSDEEKVIFAAHQLQGPASLWWDHFQATQPEGQPITWARFTAAFRRTHVPAGVVALKKREFXELKQGNRSVMEYLHEFNNLARYAPEDVREDEEKQEKFLAGMDPELSVRLVSGDYPDFQRLVDKSIRLEAKHKELESHKRRLANFRNQQGANQRVRYTNPYPGGSSSQQQQQQQQPRSVPRPQYVVRVPQPQQQQSQQGTRAPRPPTPAVQSGQGCRDAQGQQRLCFNCFEPGHFADKCPKPRRQQGQAPPRSNNGGKDVIQGRVNHVTAEDVLTTPDVIVGTFLIHSIPATILFDSGASHSFISVPFVGRNQLGVERLRNPLLITTPGGVMTAKYYSPAVPIEIQGIPFPSDLILLDTKNLDVILGMNWLAQFQGVVDCARRTVTLYRGPEQPVVFFAPPTSVSSSELHQIGLSEIPIVREFGDVFPEELPGMPPKREIEFRIDLAPGTTPLYKRPYRMAANELAEVKKQLEELKEKGYIRPSTSPWGAPVIFVEKKDKTKRRCVDYRALNEVTIKNKYPLPRIDDLFDQLKGATVFSKIDLRSGYHQLRIREEDIPKTAFTTRYGLYEFTVMSFGLTNAPAFFMNLMNKVFMEYLDKFVVVFIDDILIYSQSEEDHQHHLRLVLGKLREHQLYAKLSKCEFWLSEVKFLGHVISAKGVAVDPETVTAVTDWKQPKTVTQVRSFLGLAGYYRRFIENFSKIARPMTQLLKKEEKFVWSPQCEKAFQTLKEKLVSSPVLVLPDTRKDFMVYCDASRQGLGCVLMQDGHVVAYASRQLRPHEGNYPTHDLELAAVVHALKIWRHYLIGNRCEIYTDHKSLKYIFTQSDLNLRQRRWLELIKDYDVGIHYHPGKANVVADALSRKSHCNTLNVRGIPPELNQQMEALNLGIVSRGFLAALEAKPTLLDQIREAQKNDPDMHGLLKNMKQGKAAGFTEDEHGTLWNGNRRVKAEHQRPAGLLQPLQVPEWKWDEIGMDFITGLPKTQGGYDSIWVVVDRLTKVARFIPVKTTYGGNKLAELYFARIVSLHGVPKKIVSDRGSQFTSHFWKKLQEELNQILEDMLRACVLDFGKTWDKSLPYAEFSYNNSYQASIQMAPYEALYGRKCRTPLLWDQVGESQVFGTDILREAEAKVRTIRDNLKVAQSRQKSYADNRRRDLEFAVGDFVYLRVTPLRGVHRFQTKGKLAPRYVGPFRIIARRGEVAYQLELPASLGNVHDVFHVSQLKKCLRVPSEQADSAQIEVREDLTYVERPVKILDTMERRTRNRVIRFCKVQWSNHAEEEATWEREDELKAAHPDLFASSSESRGRDSV

SEQ ID NO: 19083 - protein, 1790 aa, Oryza sativa
  Clone ID: TF_OSC23004j.C1.p1.fg
MDEVGRRWTFSRANEGYTSCGPMAGSVTRRGLDMTGFVLELRGMCVVLGYPHGVDYQARPLPEQEGEDAEPRAGWEVTAVILAGSSERTSLTVTAGGDSFPAACQNAALLAIGTLHQRYPDELQHSPYRYHPRRGGARDYATFRDASSEDDATVVHLARMVEAYDAARIDFHQMVRRGMVENNMKILELRQENLQLKKDLDALEAQLHQLKIAQGEDSRPKRRRVCRSQKITARKSTSRPELVRQSLAWTCFVETPRAEPAPVVPQEGEASGVGSSEVVWGMVTPMVTTRRNVNTGEGNQPEGSNHNHQGNPPPPPPPPPPPPPDTNAILTQILAQQANLMNAFLHHLQNPPQQNAPPPPPQHSKLAEFLRIRPPTFSSSNNPVDALDWLHAVGKKLDTVQCSDKEKVVFAAHQLQGPASLWWDHFQATQPEGQPITWARFTAAFRKTHVPAGVVALKKREFRELKQGNRSVMEYLHEFNNLARYAPEDVREDEEKQEKFLAGMDPELSVRLVSGDYPDFQRLVDKSIRLEAKHKELESHKRRLANFRNQQGANQRVRYTNPYPGGSSSQQQQQQQPRPAPRPQFVVRVPQPQQQQNQQGTRAPRPPTPAVQPVQGRRDAQGQQRLCFNCFEPGHFADKCPKPRRQQGQAPPRSNNGGKDVIRGRVNHVTAEDVLTTPDVIVGTFLVHSIPATILFDSGASHSFISVPFVGRNQLGVERLRNPLLITTPGGVMTAKYYSPAVPIEIQGIPFPSDLILLDTKNLDVILGMNWLAQFQGVVDCARRTVTLYRGPEQPVVFFAPPTSARSSELHQIELSEIPIVREFGDVFPEELPGMPPKREIEFRIDLAPGTTPLYKRPYRMAANELAEVKKQLEELKEKGYIRPSTSPWGAPVIFVEKKDKTKRMCVDYRALNEVTIKNKYPLPRIDDLFDQLKGATVFSKIDLRSGYHQLRIREEDIPKTAFTTRYGLYEFTVMSFGLTNAPAFFMNLMNKVFMEYLDKFVVVFIDDILIYSQSEEDHQHHLRLVLGKLREHQLYAKLSKCEFWLSEVKFLGHVISAKGVAVDPETVIAVTDWKQPKTVTQIRSFLGLAGYYRRFIENFSKIARPMTQLLKKEEKFVWSPQCEKAFQTLKEKLVSSPVLILPDTRKDFMVYCDASRQGLGCVLMQDGHVVAYASRQLRPHEGNYPTHDLELAAVVHALKIWRHYLIGNRCEIYTDHKSLKYIFTQSDLNLRQRRWLELIKDYDVGIHYHPGKANVVADALSRKSHCNTLNVRGIPPELNQQMEALNLSMVGRGFLAALEAKPTLLDQIREAQKNDPDMHGLLKNMKQGKAAGFTEDEHGTLWNGKRVCVPDSRELKQLILQEAHESPYSIHPGSTKMYLDLKEKYWWVSMKREIAEFVALCDVCQRVKAEHQRPAGLLQPLQVPEWKWDEIGMDFITGLPKTQGGYDSIWVIVDRLTKVARFIPVKTTYGGNKLAELYFARIVSLHGIPKKIVSDRGSQFTSHFWKKLQEELGTRLNFSTAYHPQTDGQTERLNQILEDMLRACVLDFGKTWDKSLPYAEFSYNNSYQASIQMAPYEALYGRKCRTPLLWDQVGESQVFGTDILREAEAKVRIIRDNLKVAQSRQKSYADNRRRDLEFAVDDFVYLRVTPLRGVHRFQTKGKLAPRYVGPFRITARRGEVAYQLELPASLGNVHDVFHVSQLKKCLRVPSEQADSEQIEVREDLTYVERPVKILNTMERRTRNRVIRFCKVQWSNHAEGEATWEREDELKAAHPDLFASSSESRGRDSV

SEQ ID NO: 19084 - protein, 1202 aa, Oryza sativa
  Clone ID: TF_OSC23023j.C1.p2.fg
MVTAGDHRRGGAAPERAERRGKREGRSTAHPGTTRTAETTAGVEKGGGAVRDAEGDGAPAVGGRSGAADGVDGDAATRKEVTPSREEDRSDDGGETELGGDGGERGARREHESDGESERRAAETEERSTGDDFIAPRGREGGRGGRKPAAEFSGSIDDAGEDCGRDSNESEGEREGKEGETGEGITGDVTLRRGKPPALVARRMVTTRRNVNTGEGNQPEGSNPNHQGNPPPPPPPDTNAILTQILAQQANMMTAFLHHLQNPPQQNAPPPPPQHSKLAEFLRIRPPTFSSSNNPVDALDWLHAVGKKLDTVQCSDEEKVIFAAHQLQGPASLWWDHFQATQPEGQPITWARFTAAFRRTHVPAGVVALKKREFRELKQGNRSVMEYLHEFNNLARYAPEDVREDEEKQEKFLAGMDPELSVRLVSGDYPDFQRLVDKSIRLEAKHKELESHKRRLANFRNQQGANQRVRYTNPYPGGSSSQQQQQQQQPRSAPRPQFVVRVPQPQQQQNQQGTRAPRPPTPAVQPVQGRRDAQGQQRLCFNCFEPGHFADKCPKPRRQQGQAPPRSNNGGKDVIRGRVNHVTAEDVLTTPDVIVGTFLVHSIPATILFDSGASHSFISVPFVGRNQLGVERLRNPLLITTPGGVMTAKYYSPAVPIEIQGIPFPSDLILLDTKNLDVILGMNWLAQFQGVVDCARRTVTLYRGPEQPVVFFAPPTSVRSSELHQIGLSEIPIVREFGDVFPEELPGMPPKREIEFRIDLAPGTTPLHKRPYRMAANELAEVKKQLEELKGKGYIRPSTSPWGASVIFVEKKDKTKRMCVDYRALNEVTIKNKYPLPRIDDLFDQLKGATVFSKIDLRSGYHQLRIREEDIPKTAFTTRYGLYEFTVMSFGLTNAPAFFMNLMNKVFMEYLDKFVVVFIDDILIYSQSEEDHQHHLRLVLGKLREHQLYAKLSKCEFWLSEVKFLGHVISAKGVAVDPETVTAVTEWKQPKTVTQIRSFLGLAGYYRRFIENFSKIARPMTQLLKKEEKFVWSPQCEKAFQTLKEKLVSSPVLILPDTRKDFMVYCDASRQGLGCVLMQDGHVVAYASRQLRPHEGNYPTHDLELAAVVHALKIWRHYLIGNRCEIYTDHKSLKYIFTQSDLNLRQRRWLELIKDYDVGIHYHPGKANVVACHVLINSSRIKNHSLKGIIELIKIRKEIGKH

SEQ ID NO: 19085 - protein, 1677 aa, Oryza sativa
  Clone ID: TF_OSC23671j.C1.p1.fg
MEVDEVGGRWTFSRANEGYTSCGPVVEMSWHRAGVLLLGAQSCLPVPGVPAVGGIGSVLLSMARMGWKLCHVFRLYTVVMAGSVTRRGLDMTGFVLELRGMCVVLGYPHGVDYQARPLPEQEGEDAEPHAGWEVTAVILSGSPERTSLAVTAGGDSFPAACQNAALLAIGTLHQHYPDELQHSPYRYHPRRGGARDYATFRDASSEDDATIVHLARMVEAYDAARIDFHQMVRRGMVENNMKILELRQENLQLKKDLDAVEAQLHQLKIAQGEDCRPKRLPQPEDHRPQEHLQARACSSVPGVDLLRRDPSCRACARGSPGGGNLRRWRNVNTGDGNQPEGSNPNHQGNPPSPSASPPPPPPDTNAILTQILAQQANMMTAFLHHLQNPPQQNAPPPPPQHSKLAEFLRIRPPTFSSSNNPVDALDWLHAVGKKLDTVQCSDEEKVIFAAHQLQGPASLWWDHFQATQPEGQPITWARFTAAFRRTHVPAGVVALKKREFRELKQGNRSVMEYLHEFNNLARYAPEDVREDEEKQEKFLAGMDPELSVRLVSGDYPDFQRLVDKSIRLEAKHKELESHKRRLANFRNQQGANQRVRYTNPYPGGSSSQQQQQQPRSAPRPQFVVRVPQPQQQQNQQGTRVPRPPTPAVQPGQGRRDAQGQQRLCFNCFEPGHFADKCPKPRRQQGQAPPRSNNGGKDVTRGRVNHVTAEDVLTTPDVIVGTFLIHSVPATTLFDSGASHSFISVPFVGRNQLGVERLRNPLLITTPGGVMTAKYYSPAVPIEIQGIPFPSDLILLDTKNLDVILGMNWLAQFQGVVDCARRTVTLYRGPEQPVVFFAPPTSVRSSELHQIGLSEIPIVGEFGDVFPEELPGMPPKREIEFRIDLAPGTTPLYKRPYRMAANELAEKKDKTKRMCVDYRALNEVTIKNKYPLPRIDDLFDQLKGATVFSKIDLRSGYHQLRIREEDIPKTAFTTRYGLYEFTVMSFGLTNAPAFFMNLMNKVFMEYLDKFVVVFIDDILIYSQSEEDHQHHLRLVLGKLREHQLYAKLSKCEFWLSEVKFLGHVISAEGVAVDPETVTAVTDWKQPKTVTQIRSFLGLAGYYRRFIENFSKIARPMTQLLKKEEKFVWSPQCEKAFQTLKEKLVSSPVLILPDTRKDFMVYCDASRQGLGCVLMQDGHVVAYASRQLRPHEGNYPTHDLELAAVVHALKIWRHYLIGNRCEIYTDHKSLKYIFTQSDLNLRQRRWLELIKDYDVGIHYHPGKANVVADALSRKSHCNTLNARGIPPELNQQMEALNLSIVGRGFLAALEAKPTLLDQIREAQKNDPDMHGLLKNMKQGKAAGFTEDEHGTLWNGNRRVKAEHQRPAGLLQPLQVPEWKWDEIGMDFITGLPKTQGGYDSIWVVVDRLTKVARFIPVKTTYGGNKLAELYFARISQTAGMELGTRLNFSTAYHPQTDGQTERLNQILEDMLRACVLDFGKTWDKSLPYAEFSYNNSYQASIQMAPYEALYGRKCRTPLLWDQVGESQVFGTDILREAEAKVRIIRDNLKVAQSRQKSYADNRRRDLEFAVGDFVYLRVTPLRGVHRFQTKGKLAPRYVGPFRIIARRGEVAYQLELPASLGNVHDVFHVSQLKKCLRVPSEQADSEQIEVREDLTYVERPMKILDTMERRTRNRVIRFC

SEQ ID NO: 19086 - protein, 1701 aa, Oryza sativa
  Clone ID: TF_OSC25209j.C1.p1.fg
MDEVGGRWTFSRANEGYTSCGPMAGSVTRRGLDMTGFVLELRGMCVVLGYPHGVDYQARPLPEQEGEDAEPHAGWEAYDAARIDFHQMVRRGMVENNMKILELRQENLQLKKDLDALESQLHQLKLAQGEDSRPKRRRVCRSQKITARKSTSRPELVRQSLAWTCFVETPRAEPAPVVPQEGEASGVGSTEDALLLAFRPGPSQRRNVSTGEGNQPEGSNPNPQGNPPPPPPPDTNAILTQILAQQANMMTAFLHHLQNPPQQNAPPPPPQHSKLAEFLRIRPPTFSSSNNPVDALDWLHAVGKKLDTVQCSDEEKVIFAAHQLQGPASLWWDHFQATQPEGQPITWAHFTAAFRRTHVPAGVMALKKREFRELKQGNRSVMEYLHEFNNLARYAPEDVREDEKKQEKFLAGMDPELSVRLVSGDYPDFQRLVDKSIRLEAKHKELESHKRRLANFRNQQGANQRVRYTNPYPGGSSSQQQQQQQQSRSAPRPQFVVRVPQPQQQQNQQGTRAPRPPTPTVQPVQGRRDAQGQQRLCFNCFEPGHFADKCPKPRRQQGQAPPRPNNGGKDVIRGRVNHVTAEDVLTTPDVIVGTFLIHSIPATILFDSGASHSFISVPFVGKNQLGVERLRNPLLITTPGGVMTAKYYSPAVPIEIQGIPFSSDLILLDTKNLDVILGMNWLAQFQGVVDCARRTVTLYRGPEQPVVFFAPPTSVRSSELHQIGLSEIPIVREFGDVFPEELPGMPPKREIEFRIDLAPGTTPLHKRPYRMAANQNLAEFKKQLEELKEKGYIRPSTSPWGAPVIFVEKKDKTKRMCVDYRALNEVTIKNKYPLPRIDDLFDQLKGATVFSKIDLRSGYHQLRIREEDIPKTAFTTRYGLYEFTVMSFGLTNAPAFFMNLMNKVFMEYLDKFVVVFIDDILIYSQSEEDHQHHLRLVLGKLREHQLYAKLSKCEFWLSEVKFLGHVISAKGVAVDPETVTAVTDWKQPKTVTQVRSFLGLAGYYRRFIENFSKIARPMTQLLKKEEKFVWSPQCEKAFQTLKKKLVSSPVLILPDTRKDFMVYCDASRQGLGCVLMQDGHVVAYASRQLRPHEGNYPTHDLELAAVVHALKIWRHYLIGNRCEIYTDHKSLKYIFTQSDLNLRQRRWLELIKDYDVGIHYHPGKANVVADALSRKSHCNTLNVRGIPPELNQQMEALNLSIVGRGFLAALEAKPTLLDQIREAQKNDPDMHGLLKNMKQGKAAGFTEDEHGTLWNGKRVCVPDNRELKQLILQEAHESPYSIHPGSTKLYLDLKEKYWWVSMKREIAEFVALCDVCQRVKAEHQRPAGLLQPLQVPEWKWDEIGMDFITGLPKTQGGYDSIWVIVDRLTKVARFIPVKTTYGGNKLAELYFARIVSLHGIPKKIVSDRGSQFTSHFWKKLQEELGTRLNFSTAYHPQTDGQTERLNQILEDMLRACVLDFGKTWDKSLPYAEFSYNNSYQASIQMAPYEALYGRKCRTPLLWDQVGESQVFGTDILREAEAKVRIIRDNLKVAQSRQKSYADNRRRDLEFAVGDFVYLRVTPLRGVHRFQTKGKLAPRYVGPFRIIARRGEVAYQLELPASLGNVHDVFHVSQLKKCLRVPSEQADSEQIEVREDLTYVERPVKILDTMERRTRNRVIRFCKVQWSNHAEEEATWEREDELKAAHPDLFASSSESRGRDSV

SEQ ID NO: 19087 - protein, 642 aa, Oryza sativa
  Clone ID: TF_OSC25210j.C1.p1.fg
MSWQRVGALLLGAQSCLPVPGVPAMAGSVTRRGLDMTGFVLELRGMCVVLGYPHGVDYQARPLPEQEGEDAEPHAGWEVTTVILSGSPERTSLAVTAGGDSFPAACQNAALLAIGTLRQRYPDELQHSPYRYHPRRGGARDYATFRDASSENDATIVHLAGMVEAYDAARIDFHQMVHRGMVENNMKILELRQENLQLKKDLDAVEAQLQQLKIAQGEDCRPKRRRVCRSQKITARKSTSRPELMVTTRRTAVTGDGNQPEGSNHNHQGNPPPPPPPPPPPPPDTNAILTQILAQQANMMTAFLHHLQNPPQQNAPPPPPQHSKLAEFLRIRPPTFSSSNNPMDALDWLHAVGKKLDTVQCSDEEKVIFAAHQLQGPASLWWDHFQATQPEGQPITWARFTAAFRRTHVPAGVVALKKREFRELKQGNRSVMEYLHEFNNLARYAPEDVREDEEKQEKFLAGMDPELSVRLVSGDYPDFQRLVDKSIRLEAKHKELESHKRRLANFRNQQGANQRVRYTNPYPGGSSSQQQQQQQQSRSAPRPQFVVRVPQPQQQQNQPGTRAPRPPTPTVQPVQVRRDAQGQQRLCFNCFEPGHFADKCPKPRRQQGQAPPRPNNGGKDVIRGRVNHVTAEDVLTTPDVIV

SEQ ID NO: 19088 - protein, 495 aa, Oryza sativa
  Clone ID: TF_OSC25222j.C1.p1.fg
MKILELRQENLQLKKDLDALESQLHQLKLAQGEDSRPKRRRVCRSQKITARKSTSRPELVRQSLAWTCFVETPRAEPAPVVPQEGEASGVGSTEDALLLAFRPGPSQRRNVSTGEGNQPEGSNPNPQGNPPSPPPPDTNAILTQILAQQANMMTAFLHHLQNPPQQNAPPPPPQHSKLAEFLRIRPPTFSSSNNPVDALDWLHAVGKKLDTVQCSDEEKVIFAAHQLQGPASLWWDHFQATQPEGQPITWAHFTAAFRRTHVPAGVVALKKREFRELKQGNRSVMEYLHEFNNLARYAPEDVREDEEKQEKFLAGMDPELSVRLVSGDYPDFQRLVDKSIRLEAKHKELESHKRRLANFRNQQGANQRVRYTNPYPGGSSSQQQQQQQQSRSAPRPQFVVRVPQPQQQQNQQGTRAPRPPTPTVQPVQGRRDAQGQQRLCFNCFEPGHFADKCPKPRRQQGQAPPRSNNGGKDVIRGRVNHVTAEDVLTTPDVIV

SEQ ID NO: 19089 - protein, 652 aa, Oryza sativa
  Clone ID: TF_OSC25596j.C1.p1.fg
MTGFVLELRGMCVVLGYPHGVDYQARPLPEQEGEDAEPHAGWEVTAVILSGSPERTSLAVTAGGDSFPAACQNAALLAIGTLHQRYPDELQHSPYRYHPRRGGACDYATFRDASSEDDATVVHLARMVEAYDAARIDFHQMVRRGMVENNLKILELRQENLQLKKDLDALEAQLHQLKIAQGEISRPKRRRVCRSQKITARKSTSRPELVRQSLAWTCFVETPRAEPAPVVPQEGEASGVGSSEGALLLTFRPGPSQRRNVNTGEGNQPEGSNPNPQGNPPSPPPPDTNAILTQILAQQANMMNAFLHHLQNPPQQNAPPPPPQHSKLAEFLRIRPPTFSSSNNPVDALDWLHAVGKKLDTVQCSDEEKVIFAAHQLQGPASLWWDHFQATQPEGQPITWARFTAAFRRTHVPAGVVALKKREFRELKQGNRSVMEYLHEFNNLARYAPEDVREDEEKQEKFLAGMDPELSVRLVSGDYPDFQRLVDKSIRLEAKHKELESHKRRLANFRNQQGANQRVRYTNPYPGGSSSQQQQQQQQPRPAPRPQFVVRVPQPQQQQNQQGTRAPRPPTPAVPPVQGRRDAQGQQRLCFNCFEPGHFADKCPKPRRQQGQAPPRSNNGGKDVIRGRVNHVTAEDVLTTPDVIVEVQNCIR

SEQ ID NO: 19090 - protein, 1417 aa, Oryza sativa
  Clone ID: TF_OSC25709j.C1.p1.fg
MMTAFLHHLQNPPQQNAPPPPPQHFKLAEFLRIRPPTFSSSNNPVDALDWLHAVGKKLDTVQCSDEEKVVFAAHRLQGPASLWWDHFQATQPEGQPITWARFTAAFRRTHVPAEVMALKKREFRELKQGNRSVMEYLHEFNNLARYAPEDVREDEEKQEKFLAGMDPELSVRLVSGDYPDFQRLVDKSIRLEAKHKELESHKRRLANFRNQQGANQRVRYTNPYPGGSSSQQQQQQQPRSAPRPQFVVRVPQPQQQQSQQGTRATRPPMPAVQPGQGRRDVQGPQRLCFNCFEPGHFADKCPKPRRQQGQPPPRSNNGGKDVIRDRVNHVTAEDVLTTPDVIVGTFLIHSIPATILFDSGASHSFISVPFVGRNQLGVERLRNPLLITTPGGVMTAKYYSPAVPIEIQGIPFPSDLILLDTKNLDVILGMNWLAQFQGIVDCARRTVTLYRGPEQPVVFFAPPTSISSSELHQIGLSEIPIVREFGDVFPEELPGMPPKREIEFRIDLSPGTTPLYKRPYRMAANELAKVKKQLEELKEKGYIRPSTSPWGAPVIFVEKKDKTKRMCVDYRALNEVTIKNKYPLPRIDDLFDQLKGATVFSKIDLRSGYHQLRIREEDIPKTAFTTRYGLYEFTVMSFGLTNAPAFFMNLMKKVFMEYLDKFVVVFIDDILVYSQSEEDHKHHLRLVLGKLREHQLYAKLSKCEFWLSEVKFLGHVISAKGVAVDPETVTAVTDWKQPKTVTQIRSFLGLAGYYRRFIENFSKIARPMTQLLKKEEKFVWSPQCEKAFQTLKEKLVSSPVLILQDTRKDFMVYCDASRQGLGCVLMHDGHVVAYASRQLRPHEGNYPTHDLELAAVVHALKIWRHYLIGNHCEIYTDHKSLKYIFTQSDLNLRQRRWLELIKDYDVGIHYHPGKANVVADALSRKSHCNTLNVRGIPPELNQQMEALNLSINMKQGKAAGFTEDEHGTLWNGNRVCVPDNRELKQLILQEAHESPYSIHPGSTKMYLDLKEKYWWVSMKREIAEFVALCDVCQRVKAEHQRPAGLLQPLQVPEWKWDEIGMDFITGLPKTQGGYDSIWVVVDRLTKVARFIPVKTTYGGNKLAELYFARIVSLHGVPKKIVSDRGSQFTSHFWKKLQEELGTRLNFSTAYHPQTDGQTEHLNQILEDMLRACVLDFGKTWDKSLPYAEFSYNNSYQASIQMAPYEALYGRKCRTPLLWDQVGESQVFGTDILRKAEAKVRTIRDNLKVAQSRQKSYADNRRRDLEFAVDDFVYLRVTPLRGVHRFQTKGKLAPRFVGPFRIIARRGEVAYQLELPASLGNVHDVFHVSQLKKCLRVPSEQADSEQIEVREDLTYVERPVKILDTMERRTRNRVIRFCKVQWSNHAEEEATWEREDELKAAHPDLFASSSESRGRDSV

SEQ ID NO: 19091 - protein, 397 aa, Oryza sativa
  Clone ID: TF_OSC25970j.C1.p1.fg
MVTTRRSAATGEGSHPEGSNHNNHDSPPPPPPPPPPPPPDTNSILTQILAQQANMMAAFIHHIQIPPQHNAPPPPPPPQHSKLAEFLRIRPPTFSSSNNPVDALDWLHAVGKKLDTVQCNDEEKVIFAAHQLQGPASLWWDHFQATQLEGQPITWARFTAAFRRTHVPAGVMALKKRKFRELKQGNRSVMEYLHEFNNLARYAPEDVHEDEEKQEKFLAGMDPELSVRLVSGDYPDFQRLVDKSIRLEAKHKELESHKRRLANFRNQQGANQRVRYTNPYPGGSSSQQQQQQPRSAPRPQFVVRVSQPQQQQSQQGTRAPRPPAPAVQPGQGRRDAQGQQRLCFNCFEPGHFADKCPKPRRQQGQAPPRPNNGGKDVIPGRVNHVTAEDVLTTPDVI

SEQ ID NO: 19092 - protein, 1865 aa, Oryza sativa
  unsure (1)..(1865): unsure at all Xaa locations
  Clone ID: TF_OSC26157j.C1.p1.np
MDEVGGRWTFSRANEGYTSCGPVVEMSWQRVGALLLGAQSCLPVPGVPAVGGIGSMYTSDQSIIYSNSRALGYGQAEQCTQMAGSVTRRGLDMTGFVLELRGMCVVLGYPHGVDYQARTLPDQEGDDAEPHAGWEVTAVILSGSPERTSLAVTAGGDSFPAACQNAALLAIGTLHQRYPDELQHSPYRYHPRRGGACDHATFRDASSEDDATIVHLARMVEAYDAARIDFHQMVRRGMVENNMKILELRQENLQLKKDLDAVEAQLHQLKIAQGEICRPKRRRVCRSQKITARKSTSRPELVRQSLAWTCFVETPRAEPAPVVPQEGEAFRRWXHGGCAVAHLPSWPVAAVDEQLVGLRMVTTRRNAATGDGNQPEGSNHNHQGNPPPPPPPPPPPPPDTNAILTQILAQQANMMTAFLHHLQNPPQQNAPPPPPQHSKLAEFLRIRPPTFSSSNNPVDALDWLHAVGKKLDTVQCSDEEKVVFAAHQLRGPASLWWDHFQATQPGEQPITWARFTAAFRRTHVPAGVVALKKREFRELKQGNRSVMEYLHEFNNLARYAPEDVREDEEKQEKFLAGMDPELSVRLVSGDYPDFQRLVDKSIRLEAKHKELESHKRRLANFRNQQGANQRVRYTNPYPGGSSSQQQQQQQQPRSAPRPQFVVRVPQPQQQQNQQGTRAPRPLTPTVQPGQGRRDASGPQRLCFNCFEPGHFADKCPKPRRQQGQAPPRSNNGGKDVIRGRVNHVTAEDVLTTPDVIVGTFLVHSIPATILFDSGASHSFISVPFVGRNQLGVERLRNPLLITTPGGVMTAKYYSPAVPIEIQGIPFPSDLILLDTKNLDVILGMNWLAQFQGVVDCARRTVTLYRGPEQPVVFFAPPTSVRSSELHQIELSEIPIVREFGDVFPEELPGMPPKREIEFRIDLAPGTTPLHKRPYRMAANELAEVKKQLEELKEKGYIRPSTSPWGAPVIFVEKKDKTKRMCVDYRALNEVTIKNKYPLPRIDDLFDQLKGATVFSKIDLRSGYHQLRIREEDIPKTAFTTRYRLYEFTVMSFGLTNAPAFFMNLMNKVFMEYLDKFVVVFIDDILIYSQSEEDHQHHLRLVLGKLREHQLYAKLSKCEFWLSEVKFLGHVISAKGVAVDPETVTAVTDWKQPKTVTQVRSFLGLAGYYRRFIENFSKIARPMTQLLKKEEKFVWSPQCEKAFQTLKEKLVSSPVLILPDTRKDFMVYCDASRQGLGCVLMQDGYVVAYASRQLRPHEGNYPTHDLELAAVVHALKIWRHYLIGNRCEIYTDHKSLKYIFTQSDLNLRQRRWLELIKDYDVGIHYHPGKANVVADALSRKGHCNTLNVRGIPPELNQQMEALNLSIVGRGFLAALEAKPTLLDQIREAQKNDPDMHGLLKNMKQGKAAGFTEDEHGTLWNGKRVCVPDNRELKQLILQEAHESPYSIHPGSTKMYLDLREKYWWVSMKREIAEYVALCDVCQRVKAEHQRPAGLLQPLQVPEWKWDEIGMDFITGLPKTQGGYDSIWVVVDRLTKVARFIPVKTTYGGNKLAELYFARIVSLHGVPKKIVSDRGSQFTSHFWKKLQEELGTRLNFSTAYHPQTDGQTERLNQILEDMLRACVLDFGKTWDKSLPYAEFSYNNSYQASIQMAPYEALYGRKCRTPLLWDQVGESQVFGTDILREAEAKVRIIRDNLKVAQSRQKSYADNRRRDLEFAVDDFVYLRVTPLRGVHRFQTKGKLAPRYVGPFRIVARRGEVAYQLELPASLGNVHDVFHVSQLKKCLRVPSEQADSEQIEVREDLTYVERPVKILDIMERRTRNRVIRFCKVQWSNHAEEEATWEREDELKAAHPGLFASSSESRGRDSV

SEQ ID NO: 19093 - protein, 1349 aa, Oryza sativa
  Clone ID: TF_OSC26367j.C1.p1.np
HLGHIRTGLRASVAKHYRFHMSSGTNEGYTGCGSVVEMSWHRAGVLLLGAQSCLPVPGVPAVGGIGSMYTSDQSIIYSNSRALGYGQAEQCTQAGSVSRRGLDMTGFVLELRGMCVVLGYPHGVDYQARPLPEQDCDDAEPHAGWEVTAVILSGSPERTSLAVTTGGDSFPAACQSAALLAIGTLHQRYPDELQHSPYRYHPRRGGARDYATFRDASSEDDATLVHLACMVEAYDAARIDFHQMVRRGMVENNMKILELRQENLQLKKDLDAVEAQLHQLKIAQGEVCRPKRRRVCRSQKITARKSTSRPELVRQSLAWTCFVETPRAEPAPVVPQEGEASSVGSTEDALLLTFHGETRRSANTGDGNQPEGSNHHHQGSPPSPSSSPSPPPPDTNAILTQILTQQANMMTAFLHHIQNPPQHNAPPPPPQHSKLAEFLRIRPPTFSSSNNPVDALDWLHAVGKKLDTVQCSDEEKVIFAAHQLQGPASLWWDHFQATQPEGQPITWTRFTAAFRRTHVPAGVVALKKREFRELKQGNRSVMEYLHDFNNLARYAPEDVREDEEKQEKFLAGMDPELSVRLVSGDYPDFQRLVDKSIRLEAKHKELEWHKRRLANFRNQQGANQRVRYTNPYPGGSSSQQQQQQQQPRSAPRPQFVVRVPQPQQQQSQQGTRAPRPPTPTVQPGQGRRDASGPQRLCFNCFEPGHFADKCPKPRRQQGQAPPRSNNGGKDVIRGRVNHVTAEKVLTTPDVIVGTFFIHSIPATILFDSGASHSFISVPFVGRNQLGIERLRNPLLITTPGGVMTAKYYSPAVPIEIQGIPFPSDLILLDTKNLDVILGMNWLAQFQGVVDCARRTVTLYRGPEQPIVFFAPPTSVRSSELHQIGLSEIPIVREFGDVFPEELPGMPPKREIEFRIDLAPGTTPLYKRPYRMAANELAEVKKQLEELKEKGYIGPSTSPWGAPVIFVEKKDKTKRMCVDYRALNEVTIKNKYPLPRIDDLFDQLKGATVFSKIDLRSGYHQLHIREEDIPKTAFTTRYGLYEFTVMSFGLTNAPAFFMNLMNKVFMEYLDKFVVVFIDDILIYSQSEEDHQHHLRLVLGKLREHQLYAKLSKCEFWLSEVKFLGHVISAKGVAVDPETVTAVTDWKQPKTVTQVRSFLGLAGYYRRFIENFSKIARPMTQLLKKEEKFVWSPQCEKAFKTLKEKLVSSPVLILPDTRKDFMVYCDASRQGLGCVLMQDGHVVAYASRQLRPHEGNYPTHDLELAAVVHALKIWRHYLIGNRCEIYTDHKSLKYIFTQSDLNLRQRRWLELIKDYDVGICHRPGSRDVMAQGLLLLGAQSCLPVPGVPAVG

SEQ ID NO: 19094 - protein, 1009 aa, Oryza sativa
  Clone ID: TF_OSC27415j.C1.p3.gm
MEPRSPRRFPSPPAALSHSQHYLSTPCASLLRFRPLPLSFPVGIELAPSSSLSAVAAELRFAAVVAPDLLPLRHRLLWLRRVLVDLVHPFVSPADRRNAAVLVDPSRAAASLRFGRRSRRRSRPGVSRGPPFRFPLPSPLSGAAPSRRRSPPVTIGARARRLPSAVPARPPSGAPCGCHVGPGRQPPAPSGAADAWDPRRRPAQAACTRSTVDREAAAWAPLPWTRANEGYTSCGPVVEMSWHRAGVLLLGAQSCLPVLGVPAVGGIGSMAGSVTRRGLDMTGFVLELRGMCVALGYPHGVDYQARPLPEQEGDDAEPHAAWEVTAVILAGSPERTSLTVTAGGDSFPAACQSAALLAIGTLHQRYPDELQHSPYRYHPRRGGARDHTTFRDASSEDDATIVHLARMVEAYDAARIDFHQMVRRGMVEDNLKILELRQENLQLKKDLDAVEAQLHQLKIAQGEICRPKRRRVCRSLKITARKSTSRPELVRQSLAWTCFVETPRAEPAPVVPQEGEASGVDGDDQRSANTGDGNQPEGSNHNHQGNPPPPPPLPPPPPPDTNAILTQILAQQANMMTAFLHHLQNPPQLNAPPPPPQHSKLAEFLRIRPPTFSSSNNPVDALDWLHAVGKKLDTVQCSDEEKVIFAAHQLQGPASLWWDHFQATQPEGQPITWARFTAVFRRTHVPAGVVALKKREFREWKQGNRSVMEYLHEFNNLARYAPEDVREDEEKQEKFLAGMDPELSVRLVSGDYPDFQRLVDKSIRLEAKHKELESHKRRLANFRNQQGANQRVRYTNPYPGGSSSQQQQQQQQPRSAPRPQFVVRVPQPQQQQNQQGTRAPRPPPPTVQPGQGRRDAQGPQRLCFNCFEPGHFADKCPKPRRQQGQAPPRPNNGVKDVIRGRVNHVTAEDVLTTPDVIVEIPIVREFGDVFPEELPGMPPKREIEFRIDLAPGTAPLYERPYRMAANELAEVKKQLEELKEKGALNEVTIKNKYPLPRIDDLFDQLKACH

SEQ ID NO: 19095 - protein, 1190 aa, Oryza sativa
  Clone ID: TF_OSC28701j.C1.p1.gm
MEYLHEFNNLARYAPEDVWEDEEKQEKFLAGMDPELSVRLVSGDYPDFQRLVDKSIRLEAKHKELESHKRRLANFRNQQGANQRVRYTNPYPGGSSSQQQQQQQQPRSAPRPQFVVRVPQPQQQTNQQGTRAPRPPPPTVQPGQGRRDAQGPQRLCFNCFEPGHFADKCPKPRHQQGQAPPRPNNGGKDVIRGRVNHVTAEDVLTTPDVIVGTFLIHSIPATILFDSGASHSFISVPFVGRNQLGVERLRNPLLITTPGGVMTAKEFGDVFPEELPGMPPKREVEFRIDLAPGTAPLYKRPYRMAANELAEVKEQLEELKEKGYIRPSTSPWGAPVIFVEKKDKTKRMCVDYRALNEVTIKNKYPLPRIDDLFDQLKGATVFSKIDLRSGYHQLRIREEDIPKTAFTTRYRLYEFTVKSFGLTNAPAFFMNLMNKVFMEYLDKFVVVFIDDILIYSQSEEDHQHHLRLVLGKLREHQLYAKLSKCEFWLSEVKFLGHVISAKGVAVDPETVTAVTDWKQPKTVTQVRSFLGLAGYYRRFIENFSKIARPMTQLLKKEEKFVWSPQCEKTFKTLKEKLDGHVVAYASRQLRPHEGNYPTHDLELAAVVHALKIWRHYLIGNRCEIYTDHKSLKYIFTQSDLNLRQRRWLELIKDYDVGIHYHPGKANVVADALSRKSHCNTLNVRGVPPELNQQMEALNLSIVSRGFLAALEAKPTLLDQIREAQKNDPDMHGLLKNMKQGKAAGFTEDEHGTLWNGNRVCVPVNRELKQLILQEAHESPYSIHPGSTKMYLDLKEKYWWISMKREIAEFVALCDVCQCVKAEHQRPAGLLQPLQVPEWKWDEIGMDFITGLPKTQGGYDSIWVVVDRLTKVARFIPVKTTYGGNKLAELYFARIVSLHGVPKKIVSDRGSQFTSHFWKKLQEELGTRLNFSTAYHPQTDGQTERLNQILEDMLRACVLDFGKTWDKSLPYAEFSYNNSYQASIQMAPYEALYGRKCRTPLMWDQVGESQVFGTDILREAEAKVRTIRDNLKVAQSRQKSYADNRRRDLEFAVDDFVYLRVTPLRGVHRFRTKGKLAPRYVGPFRIVARRGEVAYQLELPASLGNVHDVFHVSQLKKCLRVPSEQADSEQIEVREDLTYVERPVKILDTMERRTRNRVIRFCKVQWSNHAEEEATWEREDELKAAHPDLFA

SEQ ID NO: 19096 - protein, 990 aa, Oryza sativa
  unsure (1)..(990): unsure at all Xaa locations
  Clone ID: TF_OSC28999j.C1.p1.np
MAAGPPAPVSSLPRPPSLDPALFKPSPLLLLQFPPLAALPPRRNQGRAVALSLRRRHRAPVRRRRRPGSPPTSAPPPSALPHPRRPRPPLRFGRRPPERRRPRRLEPRRRLPPLRPPFSSSPSTXGEPWTRFFSPFPPLSRPPLRRAYGRRRRPXGRAASRRPHRLGRPRAHRVAAAWGPAVSRPRPXVRLTRGTHGAGRCEPGAPGPPWTHLGHIRTGLRASVAKHYRFHMSSGTNEGYTSCGPVVEMSWHRAGVLLLGAQSCLPVPGVPAVGGIGSMYTSDQSIIYSNSRALGYGQAEQCTQMAGSINRRGLDLTGFVLELRGMCVVLGYPHGVDYQGKQLPEQEGDDAEPHAAWEVTAVILTGSPERTSLAVTAGGDSFSAACQNAALLAIGTLHQRYPDELQHSPYRYHPRRGGARDYATFRDASSEDDATIMHLARMVEAYDAARMDFHQMVRRGLVENNMKILELRQENLQLKKDLDVVEAQLCQLKIAQGEVCRPKRRRVCRSLKITARKSTSRPELVRQSLAWTCFVETPRAEPAPVVPQEDGVSGVGSTEDALLLTFHGETRRSAATGDGNQPVGSNHNNHGSPPPPPPPPPPPPLDTNTILTQIIAQRANMMAAFLHHIQNPPQHNAPPPPPQHSKLAEFLRIRPPTFSSSNNPVDALDWLHAVGKKLDTVQCNDEEKVIFAAHXLQGPASLWWDHFQATXPEGQPITWARFTASFQRTHVPVGVMALKKREFXELKQGNRSMMEYLHEFNNLARYAPEDVREDEEKQEKFLAGMDPELSVRLVSGDYPDFQRLVDKSIRLEAKHKELESHKRRLANFRNQQGANQRVRYTNPYPGGSSSQQQQQQQPRSTSRPQFVVHVPQPQQQQSQQGTRAPRPPTPAVQPVQGRRDAQGQQRLCFNCFEPGHFADKCPKPRCQQGQAPPRSNNGGKDVIRGRVNHVTAENVLTTPDVIVGTFLIHSIPATIFFKXIFANFFIXILI

SEQ ID NO: 19097 - protein, 1538 aa, Oryza sativa
  Clone ID: TF_OSC29926j.C1.p5.fg
MSWHRAGVLLLGVQSCLPVPGVPAVGGIGSVLLSMARMGWKLCHVFRLYTVVMLTTRRSAATGDGNQPEGSNHHHQGRPPSPPPTPPPPPPDTNAILTQILAQQANMMTAFLHHLQNSPQHNAPPPPPQHSKLAEFLRIRPPTFSSSNNPVDALDWLHAVGKKLDTVQCSDEEKATQPEGQPITWARFTAAFRRTHVPAGVMALKKREFRELKQGNRSVMEYLHEFNNLARYAPEDVREDEEKQEKFLAGMDPELSVRLVSGDYPDFQRLVDKSIRLEAKHKELESHKRRLANFRNQQGANQRVRYTNPYPGGSSSQQQQQQQQPRSAPRPQFVVRVPQPQQQQNQQGTRAPRPPTPTVQPGQGRRDAQGPQRLCFNCFEPGHFADKCPKPRRQQGQAPPRSNNGGKDVIRGRVNHVTAEDVLTTPDVIVGTFLIHSIPATILFDSGASHSFISVPFVGRNQLGVERLRNPLLITTPGGVMTAKYYSPAVPIEIQGIPFPSDLILLDTKNLDVILGMNWLAQFQGVVDCARRTVTLYRGPEQPVVFFAPPTSVSSSELHQIGLSEIPIVREFGDVFPEELPGMPPKRQIEFRIDLAPGTTPLYKRPYRMAANELAEVKKQLEELKEKGYIRPSTSPWGAPVIFVEKKDKTKRMCVDYRALNEVTIKNKYPLPRIDDLFDQLKGATVFSKIDLRSGYHQLRIRDEDIPKTAFTTRYGLYEFTVMSFGLTNAPAFFMNLMNKVFMEYLDKFVVVFIDDILVYSQSEEDHQHHLRLVLGKLREHQLYAKLSKCEFWLSEVKFLGHVISAKGVAVDPETVTAVIDWKQPKIVTQVRSFLGLAGYYRRFIENFSKIARPMTQLLKKEEKFVWSPQCEKAFKTLKEWLVSSPVLILPDTRKDFMVYCDASRQGLGCVLMQDGHVVAYASRQLRPHEGNYPTHDLELAAVVHALKIWRHYLIGNRCEIYTDHKSLKYIFTQSDLNLRQRRWLELIKDYDVGIHYHPGKANVVADALSRKSHCNTLNVRGIPPELNQQMEALNLSIVGRGFLAALEAKPTLLDRIREAQKNDPDMHGLLKNMKQGKAAGFTEDEHGTLWNGNRVCVPDNRELKQLILQEAHESPYSIHPGSTKMYLDLKEKYWWVSMKREIAEFVALCDVCQRVKAEHQRPAGLLQPLQVPEWKWDEIGMDFITGLPKTQGGYDSIWVVVDRLTKVARFIPVKTTYGGNKLAELYFARIVSLHGVPKKIVSDRGSQFTSHFWKKLQEELGTRLNFSTAYHPQTDGQTERLNQILEDMLRACVLDFGKTWDKSLPYAEFSYNNSYQASIQMAPYEALYGRKCRTPLLWDQVGESQVFGTDILREAEAKVRTIRDNLKVAQSRQKSYADNRRRNLEFAVDDFVYLRVTPLRGVHRFQTKGKLAPRYVGPFRIVARRGEVAYQLDLPASLGNVHDVFHVSQLKKCLRVPSAQADSEQIEVREDLTYVERPVKILDTMERRTRNRVIRFCKVQWSNHAEEEATWEREDELKAAHPDLFASSSESRGRDSV

SEQ ID NO: 19098 - protein, 877 aa, Oryza sativa
  Clone ID: TF_OSC29969j.C1.p1.gm
RRDASGPQRLCFNCFEPGHFADKCPKPRRQQGQAPPRSNNGGKDVIRGRVNHVTAEDVLTTPDVIVEKKDKTKRMCVDYRALNEVTIKNKYPLPRIDDLFDQLKGATVFSKIDLRSGYHQLRIREEDIPKTAFTTRYGLYEFTVMSFGLTNAPAFFMNLMNKVFMEYLDKFVVVFIDDILIYSQTEEDHQHHLRLVLGKLREHQLYAKLSKCEFWLSEVKFLGHVISAKGVAVDPETVTAVTDWKQPKTVTQIRSFLGLAGYYRRFIENFSKIARPMTQLLKKEEKFVWSPQCEKAFQTLKEKLVSSPVLILPDTRKDFMVYCDASRQGLGCVLMQDGHVVAYASRQLRPHEGNYPTHDLELAAVVHALKIWRHYLIGNRCEIYTDHKSLKYIFTQSDLNLRQRRWLELIKDYDVGIHYHPGKANVVADALSRKSHCNTLNVRGIPPELNQQMEALNLSIVGRGFLAALEAKPTLLDQIREAQKNDPDMHGLLKNMKQGKAAGFTEDEHGTLWNGKRSLWPYVMCASVSRQNTNDRPDFSNLSKCRNGNGMKLGWISSPAFQKPKTTYGGNKLAELYFARIVSLHGIPKKIVSDRGSQFTSHFWKKLQEELGTRLNFSTAYHPQTDGQTERLNQILEDMLRACVLDFGKTWDKSLPYAEFSYNNSYQASIQMAPYEALYGRKCRTPLLWDQVGESQVFGTDILREAEAKVRIIRDNLKVAQSRQKSYADNRRRDLEFAVDDFVYLRVTPLRGVHRFQTKGKLAPRYVGPFRIIARRGEVAYQLELPASLGNVHDVFHVSQLKKCLRVPSEQADSEQIEVREDLTYVEKPVKILDTMERRTRNRVIRFCKVQWSNHAEEEATWEREDELKAAHPDLFA

SEQ ID NO: 19099 - protein, 1745 aa, Oryza sativa
  Clone ID: TF_OSC30011j.C1.p3.fg
MDEVGGRWTFSRANEGYTSCGPMAGSVTRRGLDMTGFVLELRGMCVVLGYPHGEDYQARPLPDQEGDDAEPHAGWEVTAVILSGSPERTSLAVTAGGDSFPAACQNAALLAIGTLHQRYPDELQHSPYRYHPRRGGARDYATFWDASSEDDATIVHLARMVEAYDAARIDFHQMVRRGMVENNMKILELRQENLQLKKDLDAVEAQLHQLKVAQGEICRPKRRRVCRSQKITARKSTSRPELVRQSLAWTCFVETPRAEPAPVVPQEGEASGVGSSEAVDEQLVGLRVCSFSFVFFGVVWGMVMPMVTTRRNAVTGDGNQPEGSNPNHQGNPPPPPPPPPPPPPDTNAILTQILAQQANMMNAFLHHLQNPPQQNAPPPPPQHSKLAEFLRIRPPTFSSSNNPVDALDWLHAVGKKLDTVQCSDEEKVVFAAHQLQGPASLWWDHFQATQPEGQPITWARFTAAFRRTHVPAGVVALKKREFRELKQGNRSVMEYLHEFNNLARYAPEDVREDEEKQEKFLAGMDPELSVRLVSGDYPDFQRLVDKSIRLEAKHKELESHKRRLANFRNQQGANQRVRYTNPYPGGSSSQQQQQQQQPRPAPRPQFVVRVPQPQQQQNQQGTRAPRPPTPTVQPVQGRRDAQGQQRLCFNCFEPGHFADKCPKPRRQQGQAPPRSNNGGKDVIRGRVNHVTAEDVLTTPDVIVGTFLVHSIPATILFDSGASHSFISVPFVGKNQLGVERLRNPLLITTPGGVMTAKFYSPAVPIEIQGIPFPSDLILLDTKNLDVILGMNWLAQFQGVVDCARRTVTLYRGPEQPVVFFAPPTSVRSSELHQIELSEIPIVREFGDVFPEELPGMPPKREIEFRIDLAPGTTPLHKRPYRMAANELAEVKKQLEELKEKGYIRPSTSPWGAPVIFVEKKDKTKRMCVDYRALNEVTIKNKYPLPRIDDLFDQLKGATVFSKIDLRSGYHQLRIREEDIPKTAFTTRYGLYEFTVMSFGLTNAPAFFMNLMNKVFMEYLDKFVVVFIDDILIYSQSEEDHQHHLRLVLGKLREHQLYAKLSKCEFWLSEVKFLGHVISAKGVAVDPETVTAVTDWKQPKTVTQVRSFLGLAGYYRRFIENFSKIARPMTQLLKKEEKFVSSPQCEKAFQTLKEKLVSSPVLILPDTRKDFMVYCDASRQGLGCVLMQDGHVVAYASRQLRPHEGNYPTHDLELAAVVHALKIWRHYLIGNRCEIYTDHKSLKYIFTQSDLNLRQRRWLELIKDYDVGIHYHPGKANVVADALSRKGHCNTLNVRGIPPELSQQMEALNLNIVGRGFLAALEAKPTLLDQIREAQKNDPDMHGLLKNMKQGKAAGFTEDEHGTLWNGNRVCVPDNRELKQLILQEAHESPYSIHPGSTKMYLDLKEKYWWVSMKREIAEFVALCDVCQRVKAEHQRPAGLLQPLQVPEWKWDEIGMDFITGLPKTQGGYDSIWVVVDRLTKVARFILVKTTYGGNKLAELYFARIVSLHGVPKKIVSDRGSQFTSHFWKKLQEELGTRLNFSTAYHPQTDGQTERLNQILEDMLRACVLDFGKTWDKSLPYAEFSYNNSYQSSIQMAPYEALYGRKCRTPLLWDQVGESQVFGTDILREAEAKVRIIRDNLKVAQSRQKSYADNRRRDLEFAVDDFVYLRVTPLRGVHRFQTKGKLAPRYVGPFRIVARRGEVAYQLELPASLGNVHDVFHVSQLKKCLRVPSSRPTQSKLKFAKI

SEQ ID NO: 19100 - protein, 1382 aa, Oryza sativa
  Clone ID: TF_OSC30068j.C1.p1.fg
ANSSSVPGDPLESTCRHAVGKKLDTVQCSDEEKVIFAAHQLQGPASLWWDHFQATQPEGQPITWARFTAAFRRTHVPAGVVALKKREFRELKQGNRSVMEYLHEFNNLARYAPEDVREDEEKQEKFLAGMDPELSVRLVSGDYPDFQRLVDKSIRLEAKHKELESHKRRLANFRNQQGANQRVRYTNPYPGGSSSQQQQQQQQPRPAPRPQFVVRVPQPQQQNQQGTRASRPPTPAVQPVQGRRDASGPQRLCFNCFEPGHFADKCPKPRRQQGQAPPRSNNGGKDVIRGRVNHVTAEDVLTTPDVTVGTFLVHSIPATILFDSGASHSFISVPFVGKNQLGVERLRNPLLITTPGGVMTAKYYSPAVPIEIQGIPFPSDLILLDTKNLDVILGMNWLAQFQGVVDCARRTVTLYRGPEQPVVFFAPPTSVRSSKLHQIELSEIPIVREFGDVFPEELPGMPPKREIEFRIDLAPGTTPLYKRPYRMAANELAEVKKQLEELKEKGYIRPSTSPWGAPVIFVEKKDKTKRMCVDYRALNEVTIKNKYPLPRIDDLFDQLKGATVFSKIDLRSGYHQLRIREEDIPKTAFTTRYGLYEFTVMSFGLTNAPAFFMNLMNKAFMEYLDKFVVVFIDDILIYSQSEEDHQHHLRLVLGKLREHQLYAKLSKCEFWLSEVKFLGHVISAKGVAVDPETVTAVTDWKQPKTVTQIRSFLGLAGYYRRFIENFSKIARPMTQLLKKEEKFVWSPQCEKAFQTLKEKLVSSPVLILPDTRKDFMVYCDASRQGLGCVLMQDGHVVAYASRQLRPHEGNYPTHDLELAAVVHALKIWRHYLIGNRCEIYTDHKSLKYIFTQSDLNLRQRRWLELIKDYDVGIHYHPGKANVVADALSRKSHCNTLNVRGIPPELNQQMEALNLNIVGRGFLAALEAKPTLLDQIREAQKNDPDMHGLLKNMKQGKAAGFTEDEHGTLWNGKRVCVPDSRELKQLILQEAHESPYSIHPGSTKMYLDLKEKYCVSRQSTSDRLDFSNLSKYQNGNGMKLGWISSPDFQKPKVARFIPVKTTYGGHKLAELYFARIVSLHGVPKKIVSDRGSQFTSHFWKKLQEELGTRLNFSTAYHPQTDGQTERLNQILEDMLRACVLDFGKTWDKSLPYAEFSYNNSYQASIQMAPYEALYGRKCRTPLLWDQVGESQVFGTDILREAEAKVRIIRDNLKVAQSRQKSYADNRRRDLEFAVDDFVYLRVTPLRGVHRFQTKGKLAPRYVGPFRITARRGEVAYQLELPASLGNVHDVFHVSQLKKCLRVPSEQADSEQIEVREDLTYVEKPVKILDTMERRTRNRVIRFCKVQWSNHAEEEATWEREDELKAAHPDLFASSSESRGRDSV

SEQ ID NO: 19101 - protein, 387 aa, Oryza sativa
  Clone ID: TF_OSC30470j.C1.p1.fg
MAINLKAATTTTRATHLHLFLRPPPPPPDTNAILTQILAQQANMMTTFLHHLQNPPQQNAPPPPPQHSKLAEFLRIRPPTFSSSNNPVDALDWLHAVGKKLDTVQCSDEEKVIFAAHQLQGPASLWWDHFQATQPEGQPITWARFTAAFRRTHVPAGVVALKKREFRELKQGNRSVMEYLHEFNNLARYAPEDVREDEEKQEKFLAGMDPELSVRLVSGDYPDFQRLVDKSIRLEAKHKELESHKRRLANFRNQQGANQRVRYTNPYPGGSSSQQQQQQQQPRSAPRPQFVVRVPQPQQQQNQQGTRAPRPLTPAVQPGQGHRDAQGQQRLCFNCFEPGHFADKCPKPRRQQGQAPPRSNNGGKDVIRGRVNHVTAEDVLTTPDVIV

SEQ ID NO: 19102 - protein, 651 aa, Oryza sativa
  Clone ID: TF_OSC30764j.C1.p2.gm
MMNAFLHHLQNPPQQNAPPPPPQHSKLAEFLRIRPPTFSSSNNPVDALDWLHAVGKKLDTVQCSDEEKVVFAAHQLQGPASLWWDHFQATQPEGQPITWARFTAAFRRTHVPAGVVALKKREFRELKQGNRSVMEYLHEFNNLARYAPEDVREDEEKQEKFLAGMDPELSVRLVSGDYPDFQRLVDKSIRLEAKHKELESHKRRLANFRNQQGANQRVRYTNPYPGGSSSQQQQQQQQPRSAPRPQFVSGQGRRDASGPQRLCFNCFEPGHFADKCPKPRRQQGQAPPRSNNGGKDVIRGRVNHVTAEDVLTTPDVIVGTFLVHSIPATILFDSGASHSFISVPFVGRNQLGVERLRNPLLITTPGGVMTANTAYHPQTDGQTERLNQILEDMLRACVLDFGKTWDKSLPYAEFSYNNSYQASIQMAPYEALYGRKWRTPLLWDQVGESQVFGTDILREAEAKVRIIRDNLKVAQSRQKSYADNRRRDLEFAVDDFVYLRVTPLRGVHRFQTKGKLAPRYVGPFRIVARRGEVAYQLELPASLGNVHDVFHVSQLKKCLRVPSEQADSEQIEVREDLTYVERPVKILDTMERRTRNRVIRFCKVQWSNHAEEEATWEREDELKAAHPVVTANQGHSVADDYEMLLGEYWQT

SEQ ID NO: 19103 - protein, 181 aa, Oryza sativa
  Clone ID: TF_OSC31097j.C1.p1.fg
MDPELSVRLVSGDYPDFQRLVDKSIRLEAKHKELESHKRRLANFRNQQGANQRVRYTNPYPGGSSSQQQQQQQPPRSAPRPQFVVRVPQQQQQQNQQGTRAPHPPTPAGQPVQGRRDASGPQRLCFNCFEPGHFADKCPKPRRQQGQAPPRPNNGGQDVIRGRVNHVTAEDVLTTPDVIVA

SEQ ID NO: 19104 - protein, 643 aa, Oryza sativa
  Clone ID: TF_OSC31430j.C1.p1.fg
MTGFVLELRGMCVVLGYPHGVDYQARPLPEQEGEDAEPHAGWEVTAVILSGSPERTSLAVTAGGDSFPAACQNAALLAIGTLHQRYPDELQHSPYRYHPRRGGARDFATFRDASSEDDATVVHLARMVEAYDAARIDFHQMVRRGMVENNMKILELRQENLQLKKDLDALEAQLHQLKIAQGEVSRPKRRRVCRSQKITARKSTSRPELVRQSLAWTCFVETPRAEPAPVVPQEGEASGVGSSEGALLLTFRPGPSQRRNVNTGEGNQPEGSNPNPQGNPPPPPPPDTNAILTQILAQQANMMNAFLHHLQNPPQQNAPPPPPQHSKLAEFLRIRPPTFSSSNNPVDALDWLHAVGKKLDTVQCSDEEKVVFAAHQLQGPASLWWDHFQATQPEGQPITWARFTAAFRRTHAPEDVREDEEKQEKFLAGMDPELSVRLVSGDYPDFQRLVDKSIRLEAKHKELESHKRRLANFRNQQGANQRVRYTNPYPGGSSSQQQQQQQPRPAPRPQFVVRVPQPQQQQNQQGTRAPRPPTPTVQPVQGRRDAQGQQRLCFNCFEPGHFADKCPKPRRQQGQAPPRSNNGGKDVIRGRVNHVTAEDVLTTPDVIVEKKDKTKRMCVDVTTGNNPTGIPYVRALILVPGGK

SEQ ID NO: 19105 - protein, 310 aa, Oryza sativa
  Clone ID: TF_OSC31430j.C1.p3.fg
MALKKREFRELKQGNRSVMEYLHEFNNLARYAPEDVREDEEKQEKFLAGMDPELSVRLVSGDYPDFQRLVDKSIRLEAKHKELESHKRRLANFRNQQGANQRVRYTNPYPGGSSSQQQQQQQQPRPAPRPQFVVRVPPPQQQQNQQGTRAPRPPTPTVQPVQGRRDAQGQQRLCFNCFEPGHFADKCPKPRRQQGQAPPRSNNGGKDVIRGRVNHVTAEDVLTTPDVIVGVAVDPETVTAVTEWKQPKTVTQIRSFLGLAGYYRSVSRQNTNDRLDFSSLSKCRNGNGMKLGWISSPAFQKPKVDMTLYG

SEQ ID NO: 19106 - protein, 1934 aa, Oryza sativa
  unsure (1)..(1934): unsure at all Xaa locations
  Clone ID: TF_OSC31890j.C1.p1.np
MSARRPGRFPSSPGRPLPLPTLFKPSXHLLRSFPPFAVPSPRRNRARAVALSLLRRRRRPAGLLRSPGPSPAPASPPPASRHRRRPRPPPRRARRPPKHRHPRRPEPRRRLPPLRPPFSSSPSTXGETWTTASFPPSLPLSRPPLRRAYGRRRRPXGRAASRRLRRRGHLRARRVATAWGPAVSRPCPRVRQTRGAHGAGRASPGAPGLPWTHLGHIRTGLQASVAKHYRFHMSSGANEGYTSCGPANEGYTSCGPVVEMSWHRAGVLLLGAQSCLPILEVPAVGRVGSMYTSDQSITYSNSRALGYGQAXQCTQMAGSLNRRGLDLTGFVLELRGMCVVLGYPHGVDYQGKQLPEQEGDDAEPHAAWEVTAVILTGSPERTSLAVTAGGDSFSAACQNAALLAIGTLHQRYPDELQHSPYRYHPCRGGARDYATFRDASSEDDATIMHLARMVEAYNAARIDFHRMVRRGLVENNMKILELRXENLQLKKDLDAVEAQLCQLKIAQGEVCRPKRRRVCRSLKITARKSTSRPELVRQSLAWTCFVETPRAEPTPSVPQEEGASGVGSTEDVLLLTFHGETRRSAVTGKGNHPEGSNHSNHGRPPSPSSPPPPPPPDTNPILTQILAQQANMMAAFLHHIQNPPQHNAPPPPPPPQHSKLAEFLRIRPPTFSSSNNPVDALDWLHAAGKKLDTVQCNDEEKVIFATHQLQGPASLWWDHFQATQPEGXPITWACFTAAFRRTHVPAGVMALKKREFRELKQGNHSVMEYLHEFNSLARYAPEDVWEDEEKQEKFLAGMDPELSVRLVSGDYPDFQRLVDNSIRLEAKHKELESHKRRLANFRNQQGANQMIRYTNPYPGGSSSQQQQQPRSAPRPQFVVRVPQSQQQQSQQGTRAPRPPAPAVQLGQGRRDAQGQQRLCFNCFEPGHFADKCPKPRRQQGQAPPRPNNGGKDVTRGRVNHVTAEDVLTTPDVIVGTFLIHSIPATILFDSGASHSFISVPFVERNXLRVERLRNPLLITTLGGVMTAKYYSPAVPIEIQGIPFPSDLILLDTKNLDVILGMNWLAQFQGVVDRARRTVTLYRGPDQPVVFFAPPTSAGSSVLNQLGLPEIPIVSEFGDVFPEELPSMPPQREIEFQIDLAPGTTPLYKRPYRMAAHELAEVKKQLEELKEKGYIRPSTSPWGSPVIFVEKKDKTKRICVDYRALNEVTIKNKYALPRIDDLFDQLKGATVFSKIDLRSGYHQLRIREEDIPKTAFTTHYGLYEFTVMSFGLTNAPAFFMNLMNKVFMEYLDKFVVVFIDDILVYLQSEEDHQQHLRLALGKLREHPLYAKLSKCEFWLSEVKFLGHVISAKGVAVDPETVTAVTDWKQPKTVTQVRSFLGLAGYYRRFIENFSKIARPMTQLLKKEEKFVWSPQCEKAFQTLKEKLVSSPVLILLDTRKDFLVYCDASRQGLGCVLMQEGHVVAYASRQPRPHEGNYPTHDLELAAVVHALKIXRHYLIGNRCKIYTDHKSLKYIFTQSDLNLRQRRWLELIKDYDVGIHYHPGKANVVADALSRKSSCNTLGVRGIPPELNQQLEALNLSIVSHGFLATLEAKPTLLDQIREAQKNDLDMHGILKNMKQGKAAGFTEDEHGTLWNGNRCVKAEHQRPARLLQPLQVPEWKWDEIGMDFITGLPKTQGRYDSIWVVVDRLTKVARFIPVKTTYGGNKLAELYFARIVSLHGVPKKIVSDQGSQFTSDIWKKLQEELGTRLNFSTAYHPQTDGQTERLNQILEDMLHACVLDFGKTWDKSLPYAEFSYNNSYQASIQMAPYEALYGRKCQTPLLWDQVGESQVFGTDILREAEAKVRTIRDNLKVAQSRQKSYADTRRRNLEFAVDDFVYLRVTPLRGVHRFQMKGKLAPRFVGPFRIIARRGEVAYQLELPTSLGNVHDVFHVS

SEQ ID NO: 19107 - protein, 1070 aa, Oryza sativa
  Clone ID: TF_OSC32968j.C1.p2.fg
MSWHRAGVLLLGAQSCLPVPGVPAVGGIGSVLLSMARMDWKLCHVFRLYTVVMAGSVTRRGLDMTGFVLELRGMCVVLGYPHGVDYQARPLPEQEGDDAEPHAGWEVTAVILSGSPERTSLAVTAGGDSFPAACQNAALLAIGTLHQRYPDELQHSPYRYHPRRGGARDYATFRDASSEDDATIVHLARMVEAYDAARIDFHQMVRRGMVENNLKILELRQENLQLKKDLDAVEAQLHQLKIAQGEDCRPKRRCVCRSQKITARKSTSRPELVRQSLAWTCFVETPRAEPAPVVPQEGEASGVGSTEDALLLTFRPGPSQRRNANTGDGNQPEGSNHNHQGNPPPPPPPPPPPPPDTNAILTQILAQQANMMTAFLHHLQNPPQHNAPPPPPQHSKLAEFLRIRPPTFSSSNNPVDALDWLHAVGKKLDTVRCSDEEKVVFAAHQLQGPASLWWDHFQATQPEGQPITWARFTAAFRRTHVPAGVVALKKREFRELKQGNRSVMEYLHEFNNLARYAPEDVREDEEKQEKFLAGMDPELSVRLVSGDYPDFQRLVDKSIRLEAKHKELESHKRRLANFRNQQGANQRVRYTNPYPGGTSSQQQQQQQPRPAPRPQFVVRVPQPQQQQNQQGTRAPRPPTPTVQPVQGRRDAQGPQRLCFNCFEPGHFADKCPKPRRQQGQAPPRSNNGGKDVIRGRVNHVTAEDVLTTPDVIVGTFLVHSIPATILFDSGASHSFISVPFVGRNQLGVERLRNPLLITTPGGVMTAKYYSPAVPIEIQGIPFPSDLILLDTKNLDVILGMNWLAQFQGVVDCARRTVTLYRGPEQPVVFFAPPTSVRSSELHQIGLSEIPIVREFGDVFPEELPGMPPKREIEFRIDLAPGTTPLYKRPYRMAANELAEVKKQLEELKEKGYIRPSTSPWGAPVIFVEKKDKTKRMCVDYRALNEVTIKNKYPLPRIDDLFDQLKGATVFSKIDLRSGYHQLRIREEDIPKTAFTTRYGLYEFTVMSFGLTNAPAFFMNLMNKVFMEYLDKFVVVFIDDILIYSQSEEDHQHHLCHILIFVSGFINYLIN

SEQ ID NO: 19108 - protein, 1286 aa, Oryza sativa
  Clone ID: TF_OSC33328j.C1.p1.fg
MALKKREFRELKQGNRSVMEYLHEFNNLARYAPEDVREDEEKQEKFLAGMDPELSVRLVSGDYLDFQRLVDKSIRLEAKHKELESHKRRLANFRNQQGANQRIRYTNPYPGGSSSQQQQQQQPRSAPRPQFVVRVPQPQQQQSQQGTRAPRPPTPAAQSGQGRRDVQGPQRLCFNCFEPGHFADKCPKPRRQQGQAPPRSNNGGKDVIRGRVNHVTAEDVLTTPDVIVGTFLIHSIPATILFDSGASHSFISVPFVGRNQLGVERFRNPLLITTPGGVMTAKYYSPAVPIEIQGIPFPSDLILLDTKNLDVILGMNWLAQFQGVVDCARRTVTLYRGPEQPVVFFAPPTSVSSSELHQIGLSEIPIVREFGDVFPEELPDMPPKREIEFRIDLAPGTTPLYKRPYRMAANELAEVKKQLEELKEKGYIRPSTFPWGAPMIFVEKKDKTKRMCVDYRALNKVTIKNKYPLPRIDDLFDQLKGATVFSKIDLRSGYHQLRIREEDIPKTAFTTRYGLHGHIILVYSQSEEDHQHHLRLVLGKLREHQLYAKLSKCEFWLSEVKFLGHVISAKGVAVDPETVTPSRLEATQDSHSNPQFLRFGRILPELLKKKYKFVWSPQCEKAFKTLKEKLVSSPVLILPDTRKDFMVYCDASRQGLGCVLMQEGHVVAYASRQLRPHEGNYPTHDLELAAVVHALKIWRHYLIGNRCEIYTDHKSLKYIFTQSDLNLRQRRWLELIKDYDVGIHYHPGKANVVVDALSQKSHCNTLNVRGIPPELNQQMEALNLSIVGRGFLAALEAKPTLLDQIREAQKNDPDMRGLLKNMKQGKAAGFTEDEYGTLWNGNRVCVPDNRELKQLILQEAHESPYSIHPGSTKMYLDLKEKYWWVSMKREIAEFVALCDVCQRVKAEHQRPAGLLQPLQVPEWKWDEIGMDFITGLPKTQGGYDSIWVVVDRLTKVARFIPVKTTYGGNKLAELYFARIVSLHGVPKKIVSDRGSQFTSHFWKKLQEELGTRLNFSTAYHPQTDGQTERLNQILEDMLRACVLDFGKTWDKSLPYAEFSYNNSYQASIQMAPYEALYGRKCRTSLLWDQVGESQVFGTDILREAEAKVRTIRDNLKVAQSWQKSYADNRRRNLEFAVDDFVYLRVTPLRGVHRFQTKGKLAPRYVGPFRIVARRGEVAYQLELPASLGNVHDVFHVSQLKKCLRVPSEQADSEQIEVREDLTYVERPVKILDTMERRTRNRVIRFCKVQWSNHAEEEATWEREDELKAAHPDLFASSSESRGRDSV

SEQ ID NO: 19109 - protein, 668 aa, Oryza sativa
  Clone ID: TF_OSC34304j.C1.p5.fg
MTGFVLELRGMCVVLGYPHGVDYQARPLPEQEGEDAEPHAGWEVTAVILSGSPERTSLAVTAGGDSSPAACQNAALLAIGTLHQRYPDELQHSPYRYHPRRGGARDFATFRDASLEDDATVVHLARMVEAYDAARIDFHQMVRRGMVENNLKILELRQENLQLKKDLDALEAQLHQLKIAQGEDSRPKRRRVCRSQKITARKSTSRPELVRQSLAWTCFVETPRAEPAPVVPQEGEASGVGSTEDALLLTFRPGPSQRRNVSTGEGNQPEGSNPNPQGNPPPPPPPDTNAILTQILAQQANMMTAFLHHLQNPPQQNAPPPPPQHSKLAEFLRIRPPTFSSSNNPVDALDWLHAVGKKLDTVQCSDEEKVIFAAHQLQGPASLWWDHFQATQPEGQPITWARFTAAFRRTHVPAGVVALKKREFRELKQGNRSVMEYLHEFNSLARYAPEDVREDEEKQEKFLAGMDPELSVRLVSGDYPDFQRLVDKSIRLEAKHKELETHKRRLANFRNQQGANQRVRYTNPYPGGSSSQQQQQQQQPRSAPRPQFVVRVPQPQQQQSQQGTRVARPPTPVVQPVQGRRDAQGQQRLCFNCFEPGHFADKCPKPRRQQGQAPPRSNNGGKDVIRGRVNHVTAEDVLTTPDVIVESSEMCFRKNYLVCRLSERLSSG

SEQ ID NO: 19110 - protein, 471 aa, Oryza sativa
  Clone ID: TF_OSC3431j.C1.p1.fg
MKILELRQENLQLKKDLDAVEAQLHQLKIAQGEVCRPKRRRVCRSQKITARKSTSRPELVRQSLAWTCFVETPRAEPAPVVPQEGEASGVGSNHNHQGNPPPPPPPPPPPPPDTNAILTQILAQQANMMTTFLHHLQNPPQQNAPPPPPQHSKLAEFLRIRPPTFSSSNNPVDALDWLHAVGKKLDTVQCSDEEKVIFAAHQLQGPASLWWDHFQATQPEGQPITWARFTAAFRRTHVLAGVVALKKREFRELKQGNRSVMEYLHEFNNLARYAPEDVREDEEKQEKFLAGMDPELSVRLVSGDYPDFQRLVDKSIRLEAKHKELESHKRRLANFRNQQGANQRVRYTNPYPGGSSSQQQQQQQQPRSAPRPQFVVRVPQPQQQQNQQGTRAPRPPTPAVQPGQGHRDAQGQQRLCFNCFEPGHFADKCPKPRRQQGQAPPRSNNGGKDVIRGRVNHVTAEDVLTTPDVIV

SEQ ID NO: 19111 - protein, 1275 aa, Oryza sativa
  Clone ID: TF_OSC34810j.C1.p2.fg
MSWQRVGALLLGGSVLPACPGCPGRRGIGSVLLFMARMGWELCHVFRPYTVVMVMTRRSANTGDGNQPEGSNHNHQGNPPPPPPPPPPPPPDTNAILTQILAQQANMMTAFLHHLQNPPQQNAPPPPPQHSKLAEFLRIRPPTFSSSNNPVDALDWLHAVGKKLDTVQCSDEEKATQPEGQPITWARFTAAFRRTHVPAGVVALKKREFRELKQGNRSVMEYLHEFNNLARYAPEDVREDEEKQEKFLAGMDLELSVRPVSGDYPDFQRLVDKSIRLEAKHKELESHKRRLANFRNQQGANQRVRYTNPYPGGSSSQQQQQPRFAPRPQFVVRVPQPQHSRVSKRPVRPVLLRPLCSLVKSRRDVQGQQRLCFNCFEPGHFADKCPKPRRQQGQAPPRPNNGGKDVIRGRVNHVTAEDMLTTPDVIVGTFLIHSIPATILFDSGASHSFISVPFVGRNQLGVERLRNPLLITTPGGVMTAKYYSPAVPIEIQGIPFPSDLILLDTKNLDVILGMNWLAQFQGVVDCARRTVTLYRGPEQPVVFFAPPTSVRSSELHQIGLSEIPIVREFGDVFPEELPGMPPKREIEFRIDLAPGTTPLYKRPYRMAANELAEVKKRLEELKEKGYIRPSTSPWGAPVIFVEKKDKTKRMCVDYRALNEVTIKNKYPLPRIDDLFDQLKGATVFSKMDLRSGYHQLRIREEDIPKTAFTTRYGLYEFTVMSFGLTNAPAFFMNLMNKVFMEYLDKFVVVFIDDILVYSQSDEDHQQHLRLVLGKLREHQLYAKLSKCEFLLSEVKFLGHVISAKGVAVDPETVTAVTDWKQPKTVTQVRNFLGLAGYYRRFIENFSKIARPMTQLLKKEEKFVWSPQCKKAFQTLKEKLVSLPVLILPDTRKDFMVCCDASRQRLGVSRQSTNDRPDFSNLSKYLNENGMKLGWISSPDFQRPKVARFIPVKTTYGGNKLAELYFARIVSLHGVPKKIVSDRGSQFTFHFWKKLQEELGTRLNFSTAYHPQTDGQTERLNQILEDMLRACVLDFGKTWDKSLPYAEFSYNNSYQASIQMAPYEALYGRKCRTPLMWDQVGESQVFGTDILREAEAKVRTIRDNLKVAQSRQKSYADNRRRDLEFAVDDFVYLRVTPLRGVHRFRTKGKLAPRYVGPFHIVARRGEVAYQLELPASLGNVHDVFHVSQLKKCLRVPSEQADPEQIEVREDLTYVERPVKILDTMERRTRNRVIRFCKVQWSNHAEEEATWEREDELKAAHPDLFACSSESRGRDSV

SEQ ID NO: 19112 - protein, 311 aa, Oryza sativa
  Clone ID: TF_OSC34815j.C1.p1.np
RSVMEYLHEFNNLARYALENVREDEKKQEKFLAGMDPELSVRLVSGDYPDFQRLVDKSIRLAKHKELESHKRRLANFRNQQGANQRVRYTNPYPGGSSSQQQQQQQQPRSAPRPQFVVRVPQPQQQQSQQGTRAPRPPTPTVQPGQGRRDASGPQRLCFNCFEPGHFADKCPKPRRQQGQAPPRSNNGGKDVIRCRVNHVTAEDMLTTPDVIVGTFLIHSIPATILFDSGASHSFISVPFVGRNQLGVERLRNPLLITTPGGVMTAKYYSSAVPIEIQGIPFPSDLILLDTKNLDVIPGMNWLAQFQGVVD

SEQ ID NO: 19113 - protein, 1786 aa, Oryza sativa
  Clone ID: TF_OSC400024j.C1.p11.fg
MSWHRAGVLLLGAQSCLPVPGVPAVGGIGSVLLSMARMGWKLCHVFRLYTVVMAGSVTRRGLDMTGFVLELRGMCVVLGYPHGVDYQGRPLPEQEGDDAEPHAAWEVTAVILAGSPERTSLTVTAGGDSFPAACQSAALLAIGTLHQRYPDELQHSPYRYHPRRGGARDYATFRDASSEDDATIMHLARMVEAYDAARIDFHQMVRRGMVENNMKILELRQENLQLKKDLDAVEAQLHQLKIAQGEVCRPKRRRVCRSQKITARKSTSRPELVRQSLAWTCFVETPRAEPAPVVPQEGEASGVGSTEDALLLTFRPGPSQRRSAATGDSNQPEGSNHHHQGSPPPPPPPPPPPPDTNAILTQILAQQADMMAAFLHHIQNPPQHNAPPPPSQHSKLAEFLRIRPLTFSSSNNPVDALDWLHAVGKKLDTVQCSDEEKVIFAAHQLQGPASLWWDHFQATQPEGQPITWARFTAAFRRTHVPAGVVALKKREFRELKQGNRSVTEYLHEFNNLARYAPEDVREDEEKQEKFLAGMDPELSVRLVSGNYPDFQRLVDKSIRLEAKHKELESHKRRLANFRNQQGANQRVRYTNPYPGGSSSQQQQQQQQPRSAPRPQFVVRVPQPQQQQNQQGTRAPRPPTPTVQPGQGRRDAQGPQRLCFNCFEPGHFADKCPKPRRQQGQAPPRSNNGGKDVIRGRVNHVTAEDVLTTPDVIVGTFLIHSIPATILFDSGASHSFISVPFVGRNQLGVERLRNPLLITTPGGVMTAKYYSPAVPIEIQGIPFPSDLILLDTKNMDVILGMNCSSELHQIGLSEIPIVREFGDVFPDELPGMPPKREIEFRIDLAPGTTPLYKRPYRMAANELAEVKKQLEELKEKGYIRPSTSPWGAPVIFVEKKDKTKRMCVDYRALNEVTIKNKYPLPRIDDLFDQLKGATVFSKIDLRSGYHQLRIRDEDIPKTAFTTRYGLYEFTVMSFGLTNAPAFFMNLMNKVFMEYLDKFVVVFIDDILVYSQSEEDHQHHLCLVLGKLREHQLYAKLSKCEFWLSEVKFLGHVISAKGVAVDPETVTAVTDWKQPKTVTQVRSFLGLAGYYRRFIENFSKIAQPMTQLLKKEEKFVWSPQCEKAFKTLKEKLVASPVLILPDTRKDFMVYCDASRQGLGCVLMQDGHVVAYASRQLRPHEGNYPTHDLELAAVVHALKIWRHYLIGNRCEIYTDHKSLKYIFTQSDLNLRQRRWLELIKDYDVGIHYHPGKANVVADALSRKSHCNTLNVRGIPPKLSQQMEALNLSIVGRGFLAALEAKPTLLDQIREAQKNDPDMHGLLKNMKQGKAAGFTEDEHGTLWNGNRVCVPDNRELKQLILQEAHESPYSIHPGSTKMYLDLKEKYWWVSMKREIAEFVALCDVCQRVKAEHQRPAGLLQPLQVPEWKWDEIGMDFITGLPKTQGGYDSIWVVVDRLTKVARFIPVKTTYGGNKLAELYFARIVSLHGVPKKIVSDRGSQFTSHFWKKLQEELGTRLNFSTAYHPQTDGQTERLNQILEDMLRACVLDFGKTWDKSLPYAEFSYNNSYQASIQMAPYEALYGRKCRTPLLWDQVGESQVFGTDILREAEAKVRTIRDNLKVAQSRQKSYADNRRRNLEFAVDDFVYLRVTPLRGVHRFQTKGKLAPRYVGPFRIVARHGEVAYQLELPASLGNVHDVFHVSQLKKCLRVPSEQADSEQIEVREDLTYVERPVKILDTMERRTRNRVIRFCKVQWSNHAEEEATWEHEDELKAAHPDLFASSSESRGRDSV

SEQ ID NO: 19114 - protein, 1273 aa, Oryza sativa
  Clone ID: TF_OSC400036j.C1.p74.fg
MDISRTNEGYTSCGPVVEMSWHSAGVLLLGAQSCLPILEVPAVGGVGSVLLSMARMGWKLCHVFRPYAVVMAGSVNRHGLDLCGFVLELRGMCIVLGYPHGVDYQGKKLPEQDGDDAEPHAAWEVTAVILTGSPERTSLAVTAGGDSFSAACQNAALLAIGTLHQRYPDELQHSPYRYHPRRGGARDYATFWDASSEDDATIMHLACMVEAYDAARIDFHHMVRRGLVENNMKILELRQENLQLKKDLDAVEAQLFQLKIAQGEVCHPKRRRVCRSLKITARKSTFRPELVRQSLAWTCFVETPCAEPAPVVPQEEEASGVGSTEDMVTTRRSAVAGDGNQPEGSNPNTQGGPPPPPPPPPPPPPDTNPILTQILAQQANMMAAFLHHIQNPPQHNAPPPPPPQHSKLAEFLRIRPPTFSSSNNPVDALDWLHAVGKKLDTVQCNNEEKIIFATHQLQGPASLWWDHFQATQPEGHPITWARFTAAFRRTHVPAGVMALKKREFRELKQGNRSVMKYLHEFNNLARYAPEDVREDEEKQEKFLVGMDPELSVRLVSGDYPDFQRLQQQQPQPRFAPRPQFVVRVPQPQQQQSQQGTRALRPPAPAVQLGQGRMDAQGQQRLCFNCFEPGHFADKCPKPRRQQGQAPPCPNNGGNDVARGRVNHVTAEDVLTTPDVIVGTFLIHSIPATILFDSGASYSFISVPFVGRNQLGVERPRNPLLITTPGGDMTAKYYSPTVPIEIQGIPFPFDLILLDTNNLDVILGMNWLAQFQGVVDCARRTVILYQGPKQPVVFFAPPTSVGSSELHQIGLSEIPIVSEFGDVFPEELPGMPPKREIEFRIDLAPGTTPLYKRPYRMAANKLAEVKKQLEELKKKGALNEVTIKNKYPLPRINDLFDQLKGAIVFSKIDLRSGYHQLRIREEDIPKTAFTTRYGLFEFTVMSFGLTNAPAFFMNLMNKVFMEYLDKFVVVFIDDILLSKCEFWLSEVKFLGHVISAKEVAVDPETVTAVTDWKQPKTLLKKEEKFVWSPQCEKAFQTLKEKLVSSPVLILPDTRKDFLVYCDASRQGLGCVLMQEGHVVAYASRQLRPHEGNYPTHDLELAAVVHALKIWRHYLIGNRCEIYTDHKSLKYIFTQSDLNLRQRRWLELIKDYDVGIHYHPGKANVVADALSRKSHCNTLGVRGIPPELNQQLEALNLSIVGRGFLATLEAKPTLLDQIREAQKNDPDMHGILKNMKQGKAAGFTEDEHGTLWNGNRVCVPDESPSSRRSRRLARS

SEQ ID NO: 19115 - protein, 1198 aa, Oryza sativa
  Clone ID: TF_OSC400104j.C1.p3.gm
MVTPMVTTRRNVNTGEGNQPEGSNPNHQGNPPPPPPPDTNAILTQILAQQANMMTAFLHHLQNPPQQNAPPPPPQHSKLAEFLRIRPPTFSSSNNPVDALDWLHAVGKKLDTVQCSDEEKVIFAAHQLQGPASLWWDHFQATQPAGQPITWAHFTAAFRRTHVPAGVVALKKREFRELKQGNRSVMEYLHEFNNLARYAPEDVREDEEKQEKFLAGMDPELSVRLVSGDYPDFQRLVDKSIRLEAKHKELESHKRRLANFRNQQGANQRVRYTNPYPGGSSSQQQQQQQQPRPAPRPQFVVRVPQPQQQQNQQGTRAPRPPTPAGQPVQGRRDASGPQRLCFNCFEPGHFADKCPKPRRQQGQAPPRSNNGGKDVIRGRVNHVTAEDVLTTPDVIVELHQIGLSEIPIVREFGDVFREELPGMPPKREIEFRIDLAPGTTPLYKRPYRMAANELAEVKKQLEELKEKGYIRPSTSPWGAPVIFVEKKDKTKRMCVDYRALNEVTIKNKYPLPRIDDLFDQLKGATVFSKIDLRSGYHQLRIREEDIPKTAFTTRYGLYEFTVMSFGLTNAPAFFMNLMNKVFMEYLDKFVVVFIDDILIYSQSEEDHQHHLRLVLGKLRKHQLYAKLSKCEFWLSEVKFLGHVISAKGVAVDPETVTAVTDWKQPKTVTQIRSFLGLAGYYRRFIENFSKIARPMTQLLKKEEKFVWSPQCEKAFQTLKEKLVSSPVLILPDTRKDFMVYCDASRQGLGCVLMQDGHVVAYASRQLRPHEGNYPTHDLKLAAVVHALKIWRHYLIGNRCEIYTDHKSLKYIFTQSDLNLRQRRWLELIKDYDVGIHYHPGKANVVADALSRKSHCNTLNVRGIPPELNQQMEALNLSIVGRGFLAALEAKPTLLDQIREAQKNDPDMHGLLKNMKQGKAAGFTEDEHGTLWNGKRVCVPDSRELKQLILQEAHESPYSIHPGSTKMYLDLKENYWWVSMKREIAEFVALCDVCQRVKAEHQRPAGLLQPLQVPEWKWDEIGMDFITGLPKTQGGYDSIWVIVDRLTKVARFIPVKTTYGGNKLAELYFARITDGQTERLNQILEDMLRACVLDFGKTWDKSLPYAEFSYNNSYQASIQMAPYEALYGRKCRTPLLWDQVGESQVFGTDILREAEAKVRIIRDNLKVAQSRQKSYADNRRRDLEFAVDDFVYLRVTPLR

SEQ ID NO: 19116 - protein, 1804 aa, Oryza sativa
  Clone ID: TF_OSC400177j.C1.p48.fg
MDEVGGRWTFSRANEGYTSCGPMAGSVTRRGLDMTGFVLELRGMCVVLGYPHGVDYQVRPLPEQEGEDAEPHAAWEVTAVILSGSPERTSLTVTAGGDSFPAACQNAALLAIGTLHQRYPDELQHSPYRYHPRRGGARDYATFRDASSEDDATVVHLARMVEAYDAARIDFHQMVRRGMVENNMKILELRQENLQLKKDLDALEAQLHQLKIAQGEISRPKRRRVCRSQKITARKSTSRPELVRQSLAWTCFVETPCAEPAPVVPQEGEASGVGSSEGALLLTFRPGPSQRSSSLFAGSVWGFQMVTTRRNVNTGGGNQPEGSNPNPQGNPPPPPPPDTNAILTQILAQQANMMNAFLHHLQNSPQQNAPPPPPQHSKLAEFLRIRPPTFSSSNNPVDALDWLHAVGKKLDTVQCSDEEKVIFAAHQLQGPASLWWDHFQATQPEGQPITWTRFTAAFRRTHVPAGVVALKKREFRELKQGNRSVMEYLHEFNNLARYAPEDVREDEEKQEKFLAGMDPELSVRLVSGDYPDFQRLVDKSIRLEAKHKELESHKRRLANFRNQQGANQRVRYTNPYPGGSSSQQQQQQQQPRSAPRPQFVVRVPQQQQQQNQQGTRAPRPPTPTVQPVQGRRDASGPQRLCFNCFEPGHFADKCPKPRRQQGQAPPRSNNGGKDVIRGRVNHVTAEDVLTTPDVIVGTFLVHSIPATILFDSGASHSFISVPFVGRNQLGVERLRNPLLITTPGGVMTAKYYSPAVPIEIQGIPFPSDLILLDTKNLDVILGMNWLAQFQGVVDCARRTVTLYRGPEQPVVFFAPPTSVRSSELHQIGLSEIPIVREFGDVFPEELPGMPPKREIEFRIDLAPGTTPLYKRPYRMAANELAEVKKQLEELKEKGYIRPSTSPWGAPVIFVEKKDKTKRMCVDYRALNEVTIKNKYPLPRIDDLFDQLKGATVFSKIDLRSGYHQLRIREEDIPKTAFTTRYGLYEFTVMSFGLTNAPAFFMNLMNKVFMEYLDKFVVVFIDDILIYSQSEEDHQHHLRLVLGKLREHQLYAKLSKCEFWLSEVKFLGHVISAKGVAVDPETVTAVTDWKQPKTVTQIRSFLGLAGYYRRFIENFSKIARPMTQLLKKEEKFVWSPQCEKAFQTLKEKLVSSPVLILPDTRKDFMVYCDASRQGLGCVLMQDGHVVAYASRQLRPHEGNYPTHDLELAAVVHALKIWRHYLIGNRCEIYTDHKSLKYIFTQSDLNLRQRRWLELIKDYDVGIHYHPGKANVVADALSRKSHCNTLNVRGIPPELNQQMEALNLSIVGRGCLAALEAKPTLLDQIREAQKNDPDMHGLLKNMKQGKAAGFTEDEHGTLWNGKRVCVPDSRELKQLILQEAHESPYSIHPGSTKMYLDLKEKYWWVSMKREIAEFVALCDVCQRVKAEHQRPAGLLQPLQVPEWKWDEIGMDFITGLPKTQGGYDSIWVIVDRLTKVARFIPVKTTYGGNKLAELYFARIVSLHGVPKKIVSDRGSQFTSHFWKKLQEELGTRLNFSTAYHPQTDGQTERLNQILEDMLRACVLDFGKTWDKSLPYAEFSYNNSYQASIQMAPYEALYGRKCRTPLLWDQVGESQVFGTDILREAEAKVRIIRDNLKVAQSRQKSYADNRRRDLEFAVDDFVYLRVTPLRGVHRFQTKGKLAPRYVGPFRIIARRGEVAYQLELPASLGNVHDVFHVSQLKKCLRVPSEQADSEQIEVREDLTYVEKPVKILDTMERRTRNRVIRFCKVQWSNHAKEEATWEREDELKAAHPGLFASSSESRGRDSV

SEQ ID NO: 19117 - protein, 2009 aa, Oryza sativa
  unsure (1)..(2009): unsure at all Xaa locations
  Clone ID: TF_OSC400263j.C1.p2.np
MAAGSSAADSPSSGRSLPLPTLYKHSPCLPPPFPPLAALSLRRNRARAVALSLRRHRRAPVRRRSRPGPSPASASPSPGSPQPRRPRPPLRFARQPPERRRPRRPEPRRRLPPLRSPFPSSLSTRGEPWTRFASPFPHLSRAPLRRAGGRRRRPSGRGCATSRRLCRRGRLRARPAAAMWGPVVSRPRPRVRLTRGTHGAGRCEPGAPGPPWTHLGHIRTGLRASVAXHYRFHMSSGANEGYTSCGPVVEMSWHRAGVLLLGAQSCLPVPGVPAVGGIGSMYTSDQSIIYSNSRALGYGQAEQCTQMAGSVSRRGLDMTGFVLELRGMCVVLGYPHGVDYQGRPLPEQEGDDAEPHAAWEVTAVILTGSPERTSLAVTAGGDSFSAACQSAALLAICTLHQRYPDELQHSPYRYHPRRGGARDYATFRDASSEDDATIMHLARMVEAYDAARIDFHQMVRRGMVENNLKILELRQENLQLKKDLDAVEAQLHQLKIAQGEVCRPKRRRVCRSQKITARKSTSRPELVRQSLAWTCFVENPRAEPAPVVPQEGEASGVGSTEDALLLTFHGETRRSASTGDGNQPEGSNHNHQGSPPPPPPPPPPPPPDTNAILTQILAQQANMMIAFLHHLQNPPQHNAPPPPPQHSKLAEFLRIRPPTFFSSNNPVDALDWLHAVGKKLDTVQCSDEEKVIFAAHQLQGPASLWWDHFQATQPEGQPITWARFTAAFRRTHVPAGVVALKKREFRELKQGNRSVMEYLHEFNNLARYAPEDVRDEEKQEKFLAGMDPELSVRLVSGDYPDFQRLVDKSIRLEAKHKELESHKRRLANFRNQQGANQRVRYTNPYPGGSSSQQQPRSAPRPQFVVRVPQPQQQQSQQGTRAPRPPTPTVQPGQGRRDAQGPQRLCFNCFEPGHFADKCPKPRRQQGQAPPRSNNGGKDVIRGRVNHVTAEDVLTTPDVIVGTFLIHSIPATILFDSGASHSFISVPFVGRNQLGVERLRNPLLITTPGGVMTAKYYSPAVPIEIQGIPFPSDLILLDTKNLDVILGMNWLAQFQGVVDCARRTVTLYRGPEQPVVFFAPPTSVRSSELHQIVLSEIPIVREFGDVFPEELPGMPPKREIEFRIDLAPGTTPLYKRPYRMAANELAEFKKQLEELKEKGYIRPSTSPWGAPVIFVEKKDKTKRMCVDYRALNEVTIKNKYPLPRIDDLFDXLKSATVFSKIDLRSGNHQLRIREEDIPKTAFTTRYGLYEFTVMSFGLTNAPAFFMNLMNKVFMEYLDKFVVVFIDDILIYSQSEEDHQHHLRLVLGKLREHQLYAKLSKCEFWLSEVKFLGHVISAKGVAMDPETVTAVTDWKQPKTVTQVRSFLGLAGYYRRFIENFSKIARPMTQLLKKEEKFVWSPQCEKAFQTLKEKLVSSLVLVLPDTRKDFMVYCDASRQGLGCVLMQDGHVVAYASRQLRPHEGNYPTHDLELAAVVHALKIWRHYLIGNRCEIYTDHKSLKYIFTQSDLNLRQRRWLELIKDYDVGIHYHPGKANVVADALSRKSHCNTLNVRGIPPELNQQMEALNLSIVGRGFLATLEAKPTLLDQIREAQKNDPDMRGLLKNMKQGKAAGFTEDEHGALWNGNRRVKAEHQRPAGLLQPLQVPEWKWDEIGMDFITGLPKTQGGYDSIWVVVDRLTKVARFIPVKTTYGGNKLAELYFARIVSLHGVPKKIVSDRGSQFTSHFWKKLQEELGTRLNFSTAYHPQTDGQTERLNQILEDMLRACVLDFGKTWDKSLPYAEFSYNNSYQASIQMAPYEALYGRKCRTPLLWDQVGESQVFGTDILREAEAKVRTIRDNLKVAQPRQKSYADNRRRNLEFAVDDFVYLRITPLRGVHRFRTKGKLAPRFVGPFRIIARRGEVAYQLELPASLGNVHDVFHVSQLKKCLRVPSEQADSEQIEVREDLTYVERPVKILDTMERRTRNRVIRFCKVQWSNHAEEEATWEREDELKAAHPDLFASSSESRGRDSV

SEQ ID NO: 19118 - protein, 1708 aa, Oryza sativa
  Clone ID: TF_OSC400440j.C1.p3.fg
MDEVRGRWTFSRANEGYTSCGPMAGSVTRRGLDMTGFVLELRGMCVVLGYPHGVDYQARPLPEQEGEDAEPHAGWEVTAVILSGSPERTSLAVTAGGDSFPAACQNAALLAIGTLHQRYPDELQHSPYRYHPRRGGARDYATFRDASSEDDATVVHLARMVEAYDAARIDFHQMVRRGMVENNLKILELRQENLQLKKDLDAVEAQLHQLKIAQGEDSRLKRRRVCRSQKITARKSTSRPELVRQSLAWTCFVETPRAEPAPVVPQEGEASGVGSSEGALLLTFRPGPSQRSPSLFAGSVWGFQMNAPPPPPQHSKLAEFLRIRPPTFSSSNNPVDALDWLHAVGKKLDTVQCSDEEKVVFAAHQLQGPASLWWDHFQAAQPEGQPITWARFTAAFRRTHVPAGVVALKKREFRELKQGNRSVMEYLHEFNNLARYAPEDVREDEEKQEKFLAGMDPELSVRLVSGDYPDFQRLVDKSIRLEAKHKELESHKRRLANFRNQQGANQRVRYTNPYPGGSSSQQQQQQQQPRSAPRPQFVVRVPPPQQQQNQQGTRAPRPPTPTVQPVQGRRDAQGQQRLCFNCFEPGHFADKCPKPRRQQGQAPPRSNNGGKDVIRGHVNHVTAEDVLTTPDVIVGTFLVHSIPATILFDSGASHSFISVPFVGKNQLGVERLRNPLLITTPGGVMTAKYYSPAVPIEIQGIPFPSDLILLDTKNLDVILGMNWLAQFQGVVDCARRTVTLYRGPEQPVVFFAPPTSVRSSELHQIGLSEIPIVREFGDVFPEELPGMPPKREIEFRIDLAPGTTPLHKRPYRMAANELAEVKKQLEELKEKGYIRPSTSPWGAPVIFVEKKDKTKRMCVDYRALNEVTIKNKYPLPRIDDLFDQLKGATVFSKIDLRSGYHQLRIREEDIPKTAFTTRYGLYEFTVMSFGLTNAPAFFMNLMNKVFMEYLDKFVVVFIDDILIYSQSEEDHQHHLRLVLGKLREHQLYAKLSKCEFWLSEVKFLGHVISAKGVAVDPETVTAVTDWKQPKTVTQIRSFLGLAGYYRRFIENFSKIARPMTQLLKKEEKFVWSPQCEKAFQTLKEKLVSSPVLILPDTRKDFMVYCDASRQGLGCVLMQDGHVVAYASRQLRPHEGNYPTHDLELAAVVHALKIWRHYLIGNRCEIYTDHKSLKYIFTQSDLNLRQRRWLELIKDYDVGIHYHPGKANVVADALSRKSHCNTLNVRGIPPELNQQMEALNLSIVGRGFLAALEAKPTLLDQIREAQKNDPDMHGLLKNMKQGKAAGFTEDEHGTLWNGKRVCVPDNRELKQLILQEAHESPYSIHPGSTKMYLDLKEKYCVSRQNTNDRPDFSSLSKCQNGSGMKLGWISSPDFQKPKVARFIPVKTTYGGNKLAELYFARIVSLHGIPKKIVSDRGSQFTSHFWKKLQEELGTRLNFSTAYHPQTDGQTERLNQILEDMLRACVLDFGKTWDKSLPYAEFSYNNSYQASIQMAPYEALYGRKCRTPLLWDQVGESQVFGTDILREAEAKVRIIRDNLKVAQSRQKSYADNRRRDLEFAVDDFVYLRVTPLRGVHRFQTKGKLAPRYVGPFRIIARRGEVAYQLELPASLGNVHDVFHVSQLKKCLRVPSEQADSEQIEVREDLTYVERPVKILDTMERRTRNRVIRFCKVQWSNHAEEEATWEREDELKAAHPDLFASSSESRGRDSV

SEQ ID NO: 19119 - protein, 1753 aa, Oryza sativa
  Clone ID: TF_OSC400477j.C1.p45.fg
MSWHRAGVLLLGAQSCLPVPGVLAVGGIGSVLLSMARMGWKLCHVFRLYTVVMAGSVTRRGLDMTGFVLELRGMCVVLGYPHGVDYQGRPLPEQEGDDAEPHAAWEVTAVILVGSPERTSLAVTAGGDSFPAACQSAALLAIGTLHQRYPDELQHSPYRYHPRRGGARDYATFRDASSEDDATIVHLARMVEAYDAARIDFHQMVRRGMVENNMKILELRQENLQLKKDLDAVEAQLHQLKIAQGEMVTTRRNAATGDGNQPEGSNHNNHQGNPPPPPPPPPPPPPDTNAILTQILAQQANMMTAFLHHLQNPPQHNAPPPPPQHSKLAEFLRIRPPTFSSSNNPVDALDWLHAVGKKLDTVQCSDEEKVIFAAHQLQGPASLWWDHFQATQPEGQPITWARFTAAFQRTHVPAGVVALKKREFRELKQGNCSVMEYLHEFNNLARYAPEDVREDEEKQEKFLAGMDPELSVRLVSGDYPDFQRLVDKSIRLEAKHKELESHKRRLANFRNQQGANQRVRYTNPYPGGSSSQQQQQQQQPRSAPRPQFVVRVPQPQQQQNQQGTRAPRPPTPAVQPGQGRRDAQGQQRLCFNCFEPGHFADKCPKPRRQQGQAPPRSNNGGKDVIRGRVNHVTAEDVLTTPDVIVGTFLIHSIPATILFNSGASHSFISVPFVGRNQLGVERLRNPLLITTPGGVMTAKYYSPAVPIEIQGIPFPSDLILLDTKNLNVILGMNWLAQFQGVVDCARRTVTLYRGPEQPVVFFAPPTSVSSSELHQIGLSEIPIVREFGDVFPEELPGMPPKREIEFWIDLAPGTTPLYKRPYRMAANELAEVKKQLEELKEKGYIRPSTSPWGAPVIFVEKKDKTKRMCVDYRALNEVTIKNKYPLPRIDDLFDQLKGATVFSKIDLRSGYHQLRIREEDIPKTAFTTRYGLYEFTVMSFGLTNAPAFFMNLMNKVFMEYLDKFVVVFIDDILIYSQSEEDHQHHLRLVLGKLREHQLYAKLSKCEFWLSEVKFLGHVISAKGVAVDPETVTAVTDWKQPKTVTQVRSFLGLAGYYRRFIENFSKIARPMTQLLKKEEKFVWSPQCEKAFKTLKEKLVASPVLILPDTRKDFMVYCDASRQGLGCVLMQDGHVVAYASRQLRPHEGNYPTHDLELAAVVHALKIWRHYLIGNRCEIYTDHKSLKYIFTQSDLNLRQRRWLELIKDHDVGIHYHPGKANVVADALSRKSHCNTLNVRGIPPELSQQMAALNLSIVSRGFLAALEAKPTLLDQIREAQKNDPDMHGLLKNMKQGKAAGFTEDEHGTLWNGNRVCVPDNRELKQLILQEAHESPYSIHPGSTKMYLDLKEKYWWVSMKREIAEFVALCDVCQRVKAEHQRPAGLLQPLQVPEWKWDEIGMDFITGLPKTQGGYDSIWVVVDRLTKVARFIPVKTTYGGNKLAELYFARIVSLHGVPKKIVSDRGSQFTSHFWKKLQEELGTRLNFSTAYHPQTDGQTERLNQILEDMLRACVLDIGKTWDKSLPYAEFSYNNSYQASIQMAPYEALYGCKCRTPLLWDQVGESQVFGTDILREAEAKVRTIRDNLKVAQSRQKSYANNRRRNLEFAVDDFVYLRVTPLRGVHRFQTKGKLAPRYVSPFRIVARRGEVAYQLELPASLGNVHDVFHVSQLKKCLRVPSEQADSKQIEVREDLTYVERPVKILDTMERRTRNRVIRFCKVQWSNHAEEEATWEREDELKAAHPDLFASSSESRGRDSV

SEQ ID NO: 19120 - protein, 1469 aa, Oryza sativa
  Clone ID: TF_OSC400477j.C1.p54.gm
MVMPMVTTRRSANTGDGNQPEGSNHNNHGSPPPPPPPPPPPPPDTNAILTQILAQQANMMTAFLHHLQNPPQQNAPPPPPQHSKLAEFLRIRPPTFSSSNNPVDVLDWLHAVGKKLDTVQCSDEEKVIFAAHQLQGPASLWWDHFQATQPEGQPITWARFTAAFRRTHVPAGVMALKKREFRELKQGNRSVMEYLHEFNNLARYAPEDVREDEERQKKFLAGMDPELSVRLVSGDYPDFQRLVDKSIRLEAKHKELESHKRRLANFRNQQGANQRIRYTNPYPGGSSSQQQQQPRSAPRPQFVVRVPQPQQQQSQQGTCAPRPPTPAAQSGQGRRDVQGPQRLCFNCFEPGHFADKCPKPRRQQGQAPPRSNNGGKDVIRGRVNHVTAEDVLTTPDVIVELHQIGLSEIPIVREFGDVFPEELPGMPPKREIEFRIDLAPGTTPRYKRPYRMAANELAEVKKQLEELKEKGYIRPSTSPWGAPVIFVEKKDKTKRMCVDYRALNEVTIKNKYPLPRIDDLFDQLKGATVFSKIDLHSGYHQLRIREEDIPKTAFTTRYGLYEFTVMSFGLTNAPAFFMNLMNKVFMEYLDKFVVVFIDDILEKYWWVSMKREIAEFVALCDVCQRVKAEHQRPAGLLQPLQVPEWKWDEIGMDFITGLPKTQGGYDSIWVVVDRLTKVARFIPMKTTYGGNKLAELYFARIVSLHGVPKKIVSDRGSQFTSHFWKKLQEELGTRLNFSTAYHPQTDGQTERLNQILEDMLRACVLDIGKTWDKSLPYAEFSYNNSYQASIQMAPYEALYGCKCRTPLLWDQVGESQVFGTDILREAEAKADLEQIEVREDLTYVERPVKILDTMERRTRNRGRGRTASCRCAGVVAFGRTERLPRGARLSAARALRTMIITSSEFTPEDAARIPKLQVLGQALLLIAFGSGENRREEQVLFDVVDIPYNYNAILGRATLNQFEAISHHNYLKLKIPGPAGVIVVKGLQPSATSKGDLAIINRAVHNVEAELHSRPKHAPKPTPHSKIVKVQIDDADPAKLISLGDGMGEQEAEGILAVLKKNIDIFAWSPDEVGVVSTDLIMHQLAIKPDAKPRKQKLCKMSADRQEAAKAEVQKLLRAGVIQEIDHPEWLANPVLVRKSNGKWRMCVDFTDLNKACPKDDFPLPRIDQLVDSTAGYELMSFLDAYSSYHQIHMNPPDIPKTAFITLLGIFCHLRMPFGLRNAGATFARLVYKETFDNLRAAGIKLNPEKCVFGIRAGKLLGFLVSERGIEANPEKIDAIQQMKPPSSVHEVQKLAGRITALSRFLPKVAERGLPFFKTLRGMGKFSWTPECQAAFDELKQYLQSPPALISPTLGSELLLYLAASPVAVSAALVQETEFGQKPVYFVSEALQGAKARYIEMEKLAYALVMASRKLKHYFQAHKVIVPSQYPLGEILRGKEISGRLSKWAAELSPFDLHFVARTAVKSQA

SEQ ID NO: 19121 - protein, 1858 aa, Oryza sativa
  Clone ID: TF_OSC400482j.C1.p1.fg
MANLNPNPLRFLMHGLVVHAGGDFRIPRVDLTVPQRPARRHEDFYVAIVEPIPLEQDWDHHRALIANFVQDELHYEVCNSFWYPSVVGFFQMRSAMNRDALVLSPPEFYDGVHSVIFVNHDQCPNWRAANYHREGWFMFLDFPLDFIDRHHVHQAVTSFGAQSCLPVPGVPAVGGIGSVLLSMARMGWKLCHVFRLYTVVMAGSVTRRGLDMTGFVLELRGMCVVLGYPHGVGYQARPLPEQEGEDAEPHAGWEVTAVILAGSSERTSLTVTAGGDSFPAACQNAALLAIGTLHQRYPDELQHSPYRYHPRRGGARDYATFRDASSEDDATVVHLARMVEAYDAARIDFHQMVRRGMVENNLKILELRQENLQLRKDLDAVEAQLHQLKIAQGEICRPKRRRVCRSQKITARKSTSRPELVRQSLAWTCFVETPRAEPAPVMVTTRRNTVTGDGNQPEGSNHNHQGNPPPPPPSSPPPPPDTNAILTQILAQQANMMNAFLHHLQNPPQQNVSPPPSQHSKLAEFLRIRPPTFSSSNNPVDALDWLHAVGKKLDTDVRGDEEKQEKFLAGMDLELSVRLVSGDYPDFHRLVDKSIRLEAKHKELESHKRRLANFRNQQGANQRVRYTNPYPGGSSSQQQQQQQQPRPAPRPQFVVRVPQPQQQQNQQGTRAPRPPTPTVPPGQGRRDAQGQQRLCFNCFEPGHFADKCPKPRRQQGQAPPRSNNGGKDVIRGRVNHVTAEDVLTTPDVIVGTFLVHSIPATILFDSGASHSFISVPFVGRNQLGVERLRNPLLITTPGGVMTAKYYSPAVPIEIQGIPFPSDLILLDTKNLDVILGMNWLAQFQGVVDCARRTVTLYRGPEQPVVFFAPPTSVRSSELHQIGLSEIPIVREFGDVFPEELPGMPPKREIEFRIDLAPGTTPLYKRPYRMAANELAEVKKQLEELKEKGYIRPSTSPWGAPVIFVEKKDKTKRMCVDYRALNEVTIKNKYPLPRIDDLFDQLKGATVFSKIDLRSGYHQLRIREEDIAKTAFTTRYGLYEFTVMSFGLTNAPAFFMNLMNKVFMEYLDKFVVVFIDDILIYSQSEEDHQHHLRLVLGKLREHQLYAKLSKCEFWLSEVKFLGHVISAKGVAVDPEIVTAVTDWKQPKTVTQVRSFLGLAGYYRRFIENFSKIARPMTQLLKKEEKFVWSPQCEKAFQTLKEKLVSSPVLILPDTRKDFMVYCDASRQGLGCVLMQDGHVVAYASRQLRTHEGNYPTHDLELAAVVHALKIWRHYLIGNRCEIYTDHKSLKYIFTQSDLNLRQRRWLELIKDYDVGIHYHPGKANVVADALSRKSHCNTLNVRGIPPELNQQMEALNLSIVGRGFLATLEAKPTLLDQIREAQKNDPDMHGLLKNMKQGKAAGFTEDEHGTLWNGNRVCVPDNRELKQLVLQVAHESPYSIHPGSTKMYLDLKEKYWWVSMKREIAEFVALCDVCQRVKAEHQRPAGLLQPLQVPEWKWDEIGMDFITGLPKTQGGYDSIWVVVDRLTKVARFIPVKTTYGGNKLAELYFARIVSLHGVPKKIVSDRGSQFTSHFWKKLQEELGTRLNFSTAYHPQTDGQTERLNQILEDMLRACVLDFGKTWDKSLPYAEFSYNNSYQSSIQMAPYEALYGRKCRTPLLWDQVGESQVFGTDILREAEAKVRIIRDNLKVAQSRQKSYADNRRRDLEFAVDDFVYLRVTPLRGVHRFQTKGKLAPRYVGPFRIVARRGEVAYQLELPASLGNVHDVFHVSQLKKCLRVPSEQADSEQIEVREDLTYVERPVKILDTMERRTRNRVIRFCKVQWSNHAEEEATWEREDELKAAHPDLFASSSESRGRDSV

SEQ ID NO: 19122 - protein, 1847 aa, Oryza sativa
  Clone ID: TF_OSC400486j.C1.p8.fg
MEMDEVGGRWTFSRADEGYTSCGPVVEMSWHRAGVLLLGAQSCLPVPGVPAVGRIGSVLLSMARMGWKLCHVFCLYTMVMAGSVTRRGLDMTGFVLELRGMCVVLGYPHGVDYQARPLPEQEGDDAEPHAGWEVTAVILSGSPERTSLAVTAGGDSFPAACQSAALLAIGTLHQRYPDELQHSPYRYHPRRGGARDYATFRDASSEDDATIVHLARMVEAYDAARIDFHQMVRRGMVENNLKILELRQENLQLQKDLDAVEAQLHQLKIAQGEVCRPKRRRVCRSQKITARKSTSRPELVRQSLAWTCFIETPRAEPAPVVPQEGETSGVGSTEDALLLTFRPGPSQRRSANTGDGNQLEGSNHNHQGNPPPPPPPPPPPPPDTNAILTQILAQQANMMTAFLHHLQNPPQHNAPPPPPQHSKLAEFLRIRPPTFSSSNNPVDALDWLHAVGKKLDIVQCSDEEKVIFAAHQLQGPASLWWDHFQATQPEGQPITWARFTAAFRRTHVPAGVVALKKREFRELKQGNRSVMEYLHEFNNLARYAPEDVREDEEKQENFLAGMDPELSVRLVSGDYPDFQRLVDKSICLEAKHKELESHKRRLANFRNQQGANQRVRYTNPYPGGSSSQQQQQQPRPAPRPQFVVRVPQPQQQQNQQGTRAPRPPTPTVQPGQGRRDAQGPQRLCFNCFEPGHFADKCPKPRRQQGQAPPRSNNGGKDVIRGRVNHVTAEDVLTTPDVIVGTFLIHSIPATILFDSGASHSFISVPFVGRNQLGVERLRNPLLITTPGGVMTAKYYSPAVPIEIQGIPFPSDLILLDTKNLDVILGMNWLAQFQGVVDCARRTVTLYRGPEQPVVFFASPTSVRSSELHQIGLSEIPIVREFRDVFPEELPGMLPKREIEFRIDLAPGTTPLYKRPYRMAANELAEVKKQLEELKEKGYIRPSTSPWGAPVIFVEKKDKTKRMCVDYRALNEVTIKNKYPLPRIDDLFDQLKGATVFSKIDLRSGYHQLRIREEDIPKTAFTTRYGLYEFTVMSFGLTNAPAFFMNLMNKVFMEYLDKFVVVFIDDILIYSQSEEDHQHHLRLVLGKLREHQLYAKLSKCEFWLSEVKFLGHVISAKGVAVDPETVTAVTDWKQPKTVTQVRSFLGLAGYYRRFIENFSKIARPMTQLLKKEEKFVWSPQCEKAFQTLKEKLVSSPVLILPDTRKDFVVYYDASRQGLGCVLMQDGHVVAYASRQLRPHEGNYPTHDLELAAVVHALKIWRHYLIGNRYEIYTDHKSLKYIFTQSDLNLRQRRWLELIKDYDVGSHYHPGKANVVADALSRKSHCNTLNIRGVPPELNQQMEALNLSIVGRGFLAALEAKPTLLDQIREAQKNDLDMHGLLRNMKQGKAAGFTEDEHGTLWNGNRVCVPDNRELKQLILQEAHESPYSIHPGSTKMYLDLKEKYWWVSMKREIAEFVALCDVCQRVKEEHQRPAGLLQPLQVPEWKWDEIGMDFITGLPKTQGGYDSIWVVVDRLTKVARFIPVKTTYGGNKLAELYFARIVSLHGVPKKIVSDRGSQFTSHFWKKLQEELGTRLNFSTAYHPQTDGQTERLNQILEDMLRACVLDFGKTWDKSLPYAEFSYNNSYQASIQMAPYEALYGRKCRTPLLWDQAGESQVFGTDILREAEAKVRTIRDNLKVAQSRQKSYADNRRRDLEFAVDDFVYLRVTPLRGVHRFQTKRKLAPRYVGPFRIIARRGEVAYRLELPASLGNVHDVFHVSQLKKCLRVPSEQADSEQIEVREDLTYVERPVKILDTMERGTRNRVIRFCKVQWSNHAEEEATWEREDELKAAHPDLFASSSESRGRDSV

SEQ ID NO: 19123 - protein, 2014 aa, Oryza sativa
  unsure (1)..(2014): unsure at all Xaa locations
  Clone ID: TF_OSC400492j.C1.p14.np
MAAGSSAADSPSSGRSLPLPTLYKRSPCLPPPFPPLAALSPRRNRARAVVLSLRRRRRAPVRRRRRPGPSPASASPPSSPPRPRRPRPPLRFARRPPERRRPRRPVPRRRLPPLRSPFPSSPSTRGEPWTRFVSPFPPLSRAPLRRAGGRRRRPSGRGRVASHRLCRRGLRARPAAAMWGPAVSRPRPRVRLTRGTHGAGRRKPRAPGPPWTHPGHIRTGLRASVAKHYRFHMSSGTNEGYTSCGPVVEMSWHRAGVLLLGAQSCLPVPGVPAVGGIRSMYTSDQSKTYSNSRALGYGQAEQCTQMAGSVTRRGLDMTGFVLELRGMCVVLGYPHGVDYQARPLPEQEGDDAEPRAGWEVTAVILAGSSERTSLTVTAGGDSFPAACQNAALLAIGTLHQRYPDELQHSSYRYHPRRGGARDYATFRDASSEDDATVVHLARMVEAYDAARIDFHQMVRRGMVENNLKILELRQENLQLKKDLDAVEAQLHQLKIAQGEVCRPKRRRVCRSQKITARKSTSRPELVRQSLAWTCFVETPCAEPAPVVPQEGEASGVGSTEDVLLLTFHGETRRNAVTGDGNQPEGSNHNHQGNPPPPPPPPPPPPPDTNAILTQILAQQANMMNAFLHHLQNPPQQNAPPPPPQHSKLAEFLRIRPPTFSSSNNPVDALDWLHAVGKKLDTVQCTDEEKVIFAAHQLQGPASLWWDHFQATQPEGQPITWARFTAAFRRTHVPAGVVALKKREFRELKQGNRSVLEYLHEFNNLARYAPEDVRGDEEKQEKFLAGMDPELSVRLVSGDYPDFQRLVDKSIRLEAKHKELESHKRRLANFRNQQGANQRVRYTNPYPGGSSSQQQQQQQQPRPAPRPQFVVRVPQPQQQQNQQGTRAPRPPTPTVPPGQGRRDAQGQQRLCFNCFEPGHFADKCPKPRRQQGQAPPRSNNGGKDVIRGRVNHVTAEDVLTTPDVIVGTFLVHSIPATILFDSGASHSFISVPFVGRNQLGVERLRNPLLITTPGGVMTAKYYSPAVPIEIQGIPFPSDLILLDTKNLDVILGMNWLAQFQGVVDCARRTVTLYRGPEQPVVFFAPPTSVRSSELHQIGLSEIPIVREFGDVFPEELPGMPPKREIEFRIDLAPGTTPLYKRPYRMAANELAEVKKQLEELKEKGYIRPSTSPWGAPVIFVEKKDKTKRMCVDYRALNEVTIKNKYPLPRIDDLFDQLKGATVFSKIDLRSGYHQLRIREEDIPKTAFTTRYGLYEFTVMSFGLTNAPAFFMNLMNKVFMEYLDKFVVVFIDDILIYSQSEEDHQHHLRLVLGKLREHQLYAKLSKCEFWLSEVKFLGHVISAKGVAVDPETVTAVTDWKQPKTVTQVRSFLGLAGYYRRFIENFSRIARPMTRLLKKEEKFVWSPQCEKAFQTLKEKLVSSPVLILPDTRKDFMVYCDASRQGLGCVLMQDGHVVAYASRQLRPYEGNYPTHDLELAAVVHALKIWRHYLIGNRCEIYTDHKSLKYIFTQSDLNLRQRRWLELIKDYDVGIHYHPGKANVVADALSRKSHCNTLNVRGIPPALNQQMEALNLSIVGRGFLAALEAKPNLLDQIREAXKNDPDMHGLLKKMKQGKAAGFTEDEHGTLWNGKRRVKAEHQRPAGLLQPLQVPEWKWDEIGMDFITGLPKTQGGYDSIWVVVDRLTKVARFIPVKTTYGGNKLAELYFARIVSLHGVPKKIVSDRGSQFTSHFWKKLQEELGTRLNFSTAYHPQTDGQTERLNQILEDMLRACVLDFGKTWDKSLPYAEFSYNNSYQSSIQMAPYEALYGRKCRTPLLWDQVGESQVFGTDILREAEAKVRIIRDNLKVAQSRQKSYADNRRRDLEFAVDDFVYLRVTPLRGVHRFQTKGKLAPRYVGPFRIVARRGEVAYQLELPASLGNVHDVFHVSQLKKCLRVPSEQADSEQIEVREDLTYVERPVKILDTMERRTRNRVIRFCKVQWSNHAEEEATWEREDELKAAHPDLFASSSESRGRDSV

SEQ ID NO: 19124 - protein, 713 aa, Oryza sativa
  Clone ID: TF_OSC400534j.C1.p1.fg
MSWQRVGALLLGAQSCLPVPGVPAMAGSVTRRGLDMTGFVLELRGMCVVLGYPHGVDYQARPLPDQEGDDAEPHAGWEVTAVILSGSPERTSLAVTAGGDSFPAACQNAALLAIGTLHQRYPDELQHSPYRYHPRRGGARDYATFRDASSEDDATVVHLARMVEAYDAARIDFHQMVRRGMVENNMKILELRQENLQLKKDLDAVEAQLHQLKIAQGEDCRPKRRRVCRSQKITARKSTSRPELVRQSLAWTCFVETPRAEPAPVVPQEGEASGVGSTEGSNHNHQGNPPPPPPPPPPPPPDTNAILTQILAQQANMMTAFLHHLQNPPQQNAPPPPPQHSKLAEFLRIRPPTFSSSNNPVDALDWLHAVGKKLDTVQCSDEEKVIFAAHQLQGPASLWWDHFQATQPEGQPITWARFTAAFRRTHVPAGVVALKKREFRELKQGNRSVMEYLHEFNSLARYAPEDVREDEEKQEKFLAGMDPELSVRLVSGDYPDFQRLVDKSIRLEAKHKELESHKRRLANFRNQQGANQRVRYTNPYPGGSSSQQQQQQQPRSAPRPQFVVRVPQPQQQQNQQGTRAPRPPTPTVQPGQGRRDAQGQQRLCFNCFEPGHFADKCPKPRRQQGQAPPRSNNGGKDVIRGRVNHVTAEDVLTTPDVIVGTFLIHSIPATILFDSGASHSFISVTFVGRNQLGVERLRNPLLITTPGGVMTAK

SEQ ID NO: 19125 - protein, 2012 aa, Oryza sativa
  unsure (1)..(2012): unsure at all Xaa locations
  Clone ID: TF_OSC400675j.C1.p46.np
MAAGPPAPVSFPSGRSLPLPTLFKPSPRLPRPFPPLAAPSPRRNRARAVAPSLLRRRRPPAGLLRSPGPSPALASPPPASPHRRRPRPPPRRVRRPPERRRPRRPEPRRRLPPLRPPFSSSPSTXGEPWTAASFAPSLPLSRPPLRRACGRRRRPXGRGAASRRPRRGRLRARRVAAAWGPAVSRPRPRVRLTRGAHGAGRASPGAPGQPWTGLIFVFTGVIASKIKRIXEVKIKSSGSTDPGNCSPLLQMAITWPFELGIGPFKSLFFPXEVKNPFLCFVPACYMEFIRVKALLFSVGRVDFCLXMAGSINRRGLDLTGFVLELRGMCVALGYPHGVDYQGKQLPEQEGDDAEPHAAWEVTAVILTGSPERTSLAVTAGGDSFSAACQNAALLAIGTLHQRYPDELQHSPYRYHPRHGGARDYATFRDASSEDDATIMHLARMVEAYDAARIDFHQMVRRGLVENNMKILELRQENLQLKKDLDAVEAQLCQLKITQGEVCRPKGRRVCRSLKITARKSTSRPELVRQSLAWTCFVKTPRAEPAPVVPQEEGASGVGSTEACACVLLMVTTRRSAATGDGNQPEGSNPNIQGGPPPPPPPPLPPPPDINSILTQILAQQANMMAAFLHHIQNPPQHNAPPPPPPPQHSKLAKFLRIRPPTFSSSNNPVDALDWLHAVGKKLDTAQCNDEEKVIFAAHQLXGPASLWWDHFQATQPEGRPITWAHFTAAFQRTHVPAGVMALKKREFRELKQGNRSVMEYLHEFNNLARYAPEDVEDEEKQEKFLAGMDPELSVRLVSGDYPDFQRLVDKSIRLEAKHKELESHKRRLANFRNQQGVNQRVRYTNPYPGGSSSQQQQQQPRSMPRPQFVVRVPQPQQQQSQQGTRAPRPPSPVVQPGQGRRDVQGQQRLCFNCFEPGHFADKCPKPRRQQGQAPPRPNNGGKDVIRGRVNHVTAEDVLTTPDVIVGTFFIHSIPATILFDSGASHSFISVPFVGRNQLGVERLRNPLLITTPGGVMTAKYYSPVVPIEIQGIPFPSDLILLDTKNLDVILGMNWLAQFRVVDCARRTVTLYRGPEQPVVFFAPPTTVGSSELHQIGLSEIPIVSEFGDVFPEELPGMPPKREIEFRIDLALGTTPLYKRPYRMAANELAEVKKQLEELKEKGYIRPSTSPGAPVIFVEKKDKIKRMCVDYRALNEVTIKNKYPLPRIDDLFDQLKGATVFSKIDLRSGYHQLRIHEEDIPKTAFTTRYGLYEFTVMSFGLTNAPTFFMNLMNKVFMEYLDKFVVVFIDDILVYSQSEEDHQQHLRLVLGKLWEHQLYAKLSKCEFWLSEVKFLGHVISAKGVAVDPETVIAVTDWKQPKTVTQVRSFLGLAGYYRRFIENFSKIARPMTQLLKKEEKFVWSPQCEKAFQTLKEKLVSSPVLILPDTRKDFMVYCDASRQGLGCVLMQEGHVVAYASRQLLPHEGNYPTHDLELAAVVHALKIWQHYLIGNRCEIYTDHKSLKYIFTQSDLNLRQRRWLELIKDYDVGIHYHPGKANVVADALSRKSRCNSLGVCGIPPELHQQMEALNLSIVGRGFLATLEAKPTLLDQIREAQKNDPDMHGILKNMKQGKAAGFTEDEHGTLWNGNRRVKAEHQRPAGLFQPLQVPEWKWDEIGMDFITGLPKTQGGYDSIWVVVDGLTKVARFIPVKTTYGGNKLAELYFARIVSLHGVPKKIVSDRGSQFTSHFXKKLQEELGTRLNFSTAYHPQTDGQTERLNQILEDMLRACVLDFGKTGDKSLPYAEFSYNNSYQASIQMAPYEALYGRKCRTPLLWDQVGESQVFGTDIFREAEAKVRTIRENLKVAQSRQKSSADNRRRDLEFAVDDFVYLWVTPLRGVHRFQTKGKLAPRFVGHFRIIARRGEVAYQLELPASLGNVHDVFHVSQLKKCLRVPSEQADSEQIEVREDLTYVERPVKILHAMERRTRNRVIRFCKVQWSNHAEEEATWEREDELKAAHLDLFASSSESRGRDSV

SEQ ID NO: 19126 - protein, 1791 aa, Oryza sativa
  Clone ID: TF_OSC400677j.C1.p1.fg
MGWKLCHVFRLYTVVMAGSVTRRGLHMTGFVLELRGMCVVLGYPHGVDYQARPLPEQEGEDAEPHAGWEVTAVILSGSPERTSLAVTAGGDSFPAACQNAALLAIGTLHQRYPDELQHSPYRYHPRRGGARDYATFRDASSEDDATVVHLARMVEAYDAARIDFHQMVRRGMVENNMKILELRQENLQLKKDLDALEAQLHQLKIAQGEDSRPKRRRVCRSQKITARKSTSRPELVRQSLAWTCFVETPRAEPAPVVPQEGEASGVGSSEVLIVSSPSLFAGSVRGFQMVTTRRNVNTGEGNQPEGSNPNHQGNPPPPPPPPPPPDTNAILTQILAQQANLMNAFLHHLQNPPQHNAPPPPPQHSKLAEFLRIRPPTFSSSNNPVDALDWLHAVGKKLDTVQCSDEEKVIFAAHQLQGPASLWWDHFQATQPEGQPITWTRFTAAFRRTHVPAGVVALKKREFRELKQGNRSVMEYLHEFHNLARYAPEDVREDEEKQEKFLAGMDPELSVRLVSWDYPDFQRLVDKSIRLEAKHKELESHKRRLANFRNQQGANQRVRYTNPYPGGSSSQQQQQQQPRSAPRPQFVVRVPQQQQQQNQQGTRAPRPPTPTVQPVQGRRDAQGQQRLCFNCFEPGHFADKCPKPRRQQGQAPPRSNNGGKDVLRGRVNHVTAEDVLTTPDVIVGTFLVHSIPATILFDSGASHSFISVPFVGKSQLGVERLRNPLLITTPGGVMTAKYYSPAVPIEIQGIPFPSDLILLDTKNLDVILGMNWLAQFQGVVDCARRTVTLYRGPEQPVVFFAPPTSVRSSELHQIGLSEIPIVREFGDVFPEELPGMPPKREIEFRIDLAPGTTPLHKRPYRMAANELAEVKTQLEELKEEGYIRPSTSPWGAPVIFVEKKDKTKRMCVDYRALNEVTIKNKYPLPRIDDLFDQLKGATVFSKIDLRSGYHQLRIREEDIPKTAFTTRYGLYEFTVMSFGLTNAPAFFMNLMNKVFMEYLDKFVVVFIDDILIYSQSEEDHQHHLRLVLGKLREHQLYAKLSKCEFWLSEVKFLGHVISAKGVAVDPETVTAVTDWKQPKTVTQIRSFLGLAGYYRRFIENFSKIARPMTQLLKKEEKFVWSPQCEKAFQTLKEKLVSSPVLILPDTRKDFMVYCDASRQGLGCVLMQDGHVVAYASRQLRPHEGNYPTHDLELAAVVHALKIWRHYLIGNRCEIYTDHKSLKYIFTQSDLNLRQRRWLELIKDYDVGIHYHPGKANVVADALSRKSHCNTLNVRGIPPELNQQMEALNLNIVGRGFLAALEAQPTLLDQIREAQKNDPDMHGLLKNMKQGKAAGFTEDEHGTLWNGKRVCVPDSRELKQLILQEAHESPYSIHPGSTKMYLDLKEKYWWVSMKREIAEFVALCDVCQRVKAEHQRPAGLLQPLQVPEWKWDEIGMDFITGLPKTQGGYDSIWVIVDRLTKVARFIPVKTTYGGNKLAELYFARIVSLHGVPKKIVSDRGSQFTSHFWKKLQEELGTRLNFSTAYHPQTDGQTERLNQILEDMLRACVLDFGKTWDKSLPYAEFSYNNSYQASIQRAPYEALYGRKCRTPLLWDQVGESQVFGTDILREAEAKVRIIRDNLKVAQSRQKSYADNRRRDLEFAVYDFVYLRVTPLRGVHRFQTKGKLAPRYVGPIRITARRGEVAYQLELPASLGNVHDVFHVSQLKKCLRVPSEQADSEQIEVREDLTYVEKPVKILDAMERRTRNRVIRFCKVQWSNHAEEEATWEREDELKAAHPDLFASSSESRGRDSV

SEQ ID NO: 19127 - protein, 1666 aa, Oryza sativa
  Clone ID: TF_OSC400702j.C1.p30.fg
MDISRANEGYTSCGPMAGSINRRGLDLTGFVLELRGMCVVLGYPHGVDYQGKQLLEQEVILTGSPERTSLAVTAGGDSFSAACQNAALLAIGTLHQRYPDELQHSPYRYHPRRGGARDYATFQDASSEDDATIMHLARMVEAYDAARIDFHQMVRRGLVKNNMKILELRQENLQLKKDLDAVEAQLCQLKIAQGEMVTTRRSAATGDGNQPEGSNPNIQGGPPPPPPPPPPPPPDTNSILTQILAQQANMMAAFLHHIQNPPQHNAPPPPPPPQHSKLAELLRIRPPTFSSSNNPVDALDWLHAVGKKLDTVQCNDEEKVIFAAHQLQGPASLWWDHFQATQPEGQPITWARFTAAFRRTHVPAGVMALKKREFRELKQGNRSVMEYLHGFNNLARYAPEDVREDEEKQEKFLARMDPELSVRLVSGDYPDFQRLVDKSIRLEAKHKELESQKRRLANLRNQQGANQRVRYTNPYPGGSSSQPQQQQSQQGTRVPRPPAPVVQPGQGRREVQGQQRLCFNCFEPGHFADKCPKPRRQQGQAPPRPNNGGKDVIRGRVNHVTAEDVLTTPDVIVGTFLIHSIPATILFDSGASHSFISVPFVGRNQLGVERLRNPLLITTPRGVMTAKYYSPAVPIEIQGIPFPSDLILLDTKNLDVILGMNWLAEFQGVVDCARRTVTLYRGPEQPVVFFAPPTSIGSSELHQIGLSEIPIVSEFGDVFPEELPGMPPKREIEFRIDLAPGTTPLYKRLYRMAANELAEVKKQLEELKEKGYIRPSTSPWGAPVIFVEKKDKTKRMCVDYRALNEVTIKNKYPLPRIDDLFDQLKGATVFSKIDLRSGYHQLRIREEDIPKTAFTTRYGLYEFTVMSFGLTNAPAFFMNLMNKVFMEYLDKFVVVFIDDILVYSQSEEDHQQHLRLVLGKLREHQLYAKLSKCEFWLSEVKFLGHVISAKGVAVDPETVTAVTDWKQPKTVTQVRSFLGLAGYYRRFIENFSKIARPMTQLLKKEKKFVWSPQCEKAFQTLKEKLVSSPVLILPDTRKDFMVCCDASRQGLGCVLMQEGHVVAYASRQLRHHEGNYPTHDLELAAVVHALKIWRHYLIGNRCEIYTDHKSLKYIFTQSDLNLRQRRWLELIKDYDVGILYHPGKANVVADALSRKSRCNTLGVRGIPPELHQQMEALNLSIVGRGFLATLEAKPTLLDQIREAQKNDPDMHGILKNMKQGKAAGFTEDEHGTLWNGSRVCVPDDKELKQLIVQEAHESPYSIHPGSTKMYLDLKGTYWWVSMKWEIAEFVALCDVCQRVKAENGRPDFSNLYKYQNGNGMKLGWISSPDFQKPKAVARFIPVKTTYGGNKLAELYFARIVSLHGVPKKIVSDRGSQFTSHFWKKLQEELGTRLNFSTAYHPQTDGQTERLNQILEDMLRACVQDFRKTWDKSLPYAEFSYNNSYQASIQMALYEALYGRKCRTPLLWDQVGESQVFGTDILREAEAKVRTIRENLKVAQSRQKSYADNRRRDLEFAVDDFVYLRVTPLRGVHRFQTKGKLAPRFVGPFRIIARHGEVANQLELPASLGNVHDVFHVSQLKKCLRVLSEQADSEQIEVREYLTYVERPVKILDAMERRTRKRVIRFCKVQWSNHAEEEATWEREDELKAAHPDLFASSSESRGRDSV

SEQ ID NO: 19128 - protein, 1811 aa, Oryza sativa
  Clone ID: TF_OSC400724j.C1.p17.gm
MTGFVLELRGMCVVLGYPHGVDYQARPLPEQEGDDAEPHAGWEVTAVILSGSPERTSLAVTAGGDSFPAACQNAALLAIGTLHQRYPDELQHSPYRYHPRRRGARDHATFRDASSEDDATIVHLARMVEAYDAARIDFHQMVRRGMVENNLKILELRQENLQLKKDLDAVEAQLHQLKIAQGEVCRPKRRRVCRSQKITARKSTSRPELVRQSLEWTCFVETPRTEPAPVVPQEGEASGVGSTEDALLLTFRPGPSQRRSANTGDGNQPEGSNHNHQGNPPPPPPPPPPPPPDTNAILTQILAQQANMMTAFLHHLQNPPQHNAPPPPPQHSKLAEFLRIRPPTFSSSNNPVDALDWLHAVGKKLDTVQCSDEEKVIFAAHQLQGPASLWWDHFQATQPEGQPITWARFTAAFRRIHVPAGVVALKKREFRELKQGNRSVMEYLHEFNNLARYAPEDVREDEEKQEKFLAGMDPELSVRLVSGDYPDFQRLVDKSIRLEAKHKELESHKRRLANFRNQQGANQRVRYTNPYPGGSSSQQQQQQQQPRSAPRPQFVVRVPQPQQQQNQQGTRAPRPPTPTVQPGQGRRDTQGQQRLCFNCFEPGHFADKCPKPRRQQGQAPPRSNNGGKDVIRGRVNHVTAEDVLTTPDVIVGLSEIPIVREFGDVFPEELPGMPPKREIEFRIDLAPGTTPLYKRPYRMAANELAEVKKQLEELKEKGYIRPSTSPWGAPVIFVEKKDKTKRMCVDYRALNEVTIKNKYPLPRIDDLFDQLKGATVFSKIDLRSGYHQLRIREEDIPKTAFTTRYGLYEFTVKSFGLTNAPAFFMNLMNKVFMEYLDKFVVVFIDDILIYSQSEEDHRHHLRLVLGKLRDHQLYAKLSKCEFWLSEVKFLGHVISAKGVAVDPETVTAVTDWKQPKTVTQVRSFLGLAGYYRRFIENLSKIALPMTQLLKKEEKFVWNPQCEKAFKTLKEKLGSSPVLILPDTRKDFMVYCDASRQGLGCVLMQDGHVVAYASRQLRPHEGNYPTHDLELAAVVHALKIWRHYLIGNRCEIYTDHKSLKYIFTQSDLNLRQRRWLELIKDYDVGIHYHPGKANVVADALSRKSHCNTLNVRGIPPELNQQMEALNLSIVGRRFLATLEAKPTLLDQIREAQKNDPDMHGLLKNMKQGKAAGFTEDEHGTLWNGNRVCVPDNRELKQLILQEAHESPYSIHPGSTKIVSRQSTNDRPDFSNLSKYQNGNGMKLGWISSPDFQKPKADMILYGTAYHPQTDGQTERLNQILKDMLRACVLDFGKTWDKSLPYAEFSYNNSYQASIQMAPYEALYGRKCRTPLLWDQVGESQVFGTDILREAEAKVRTIRDNLKVAQSRQKSYADNRRRDLEFAVDDFVYLRVTPLRGVHRFQTKGKLAPRYVGPFRIIARRGGVAYQLELPASLGNVHDVFHVSQLKKCLRVPSEQADSEQIEVREDLTYVERPVKILDTMERRTRNRVIRFCKVQWNNHAEEEATWKREDELKAAHPDLFATPRPYKDRSSGLCCKALPYFHMSSGANEGYTSCGPVVEMSWHRAGVLLLGAQSCLPVPGVPAVGGIGSRDSGPCTLKVEGAIEVHNPVPGANVGVWVSSVSGEEGNIGRNMVELSELDGPLYDPTGTLLIVQDLAERGSRWTWCTAAAHGNERPRSILSTTNGQDLTVYDRSTTDDNDDVGDDVITGGGSGGKLAGERRCDDANGGHQLVDGNAANLPVTKTTAEDQRRRGRSGGNLRLNDDGGAPATYGDGGGVDEIGDGLVTTKATSPSSDDDWSDGGARMELRRRRRR

SEQ ID NO: 19129 - protein, 2024 aa, Oryza sativa
  unsure (1)..(2024): unsure at all Xaa locations
  Clone ID: TF_OSC400738j.C1.p8.np
MAAGPPAPVSFPSGRSLPLPTLFKPSPHLLRPFPPLAALPPRRIRARALSLSLHRRRQAPVRRRRRPGPPPTSAPPPSGSPHPRQPRPPLRFGRRPPERRXPRRPEPRRHLPLLRPPPPSPPSPRGEPWTRLLSPFPPLSRLPLRRAGGRRRRPSGRGRAASRRPRRRGRPRARRVAAAWGPAVSRPRPRVRLTCGAYGAGRASPGASGPPWTHLGHIRTGLRASVAKHYRFHMSSGTNEGYTSCGPTNEGYTSCGPVVEMSWHRAGVLLLGAQSCLPVPGVPAVGGVGSMYTSDQSIIYSNSRALGYGQAKQCTQMAGSINRRGLDLTGFVLELRGMCVVLGYPHGVDYQGKQLPEQEGDDAEPHAAWEVTAVILTGSPERTSLAVTAGGDSFSAACQNAALLAIGTLHQRYPDELQHSPYRYHPRRGGARDYATFRDASSEDDATIMHLARMVEAYDAARIDFHQMVRRGLVENNMKILELRQENLQLEKDLYAVEAQLRQLKIAQGEVCRLKRLRVYRSLKLPARKSTSRPELVRQSLAWTCFVETPRAELAPVVPQEDGASGVGSTEDALLLTFHGETRRRANTGDGNQPEGSNHNNHGSPPPPPPPPPPPPPDTNAILTQILAQQANMMPAFLHHIQNPPQHNAPPPPPQHSKLVEFLRIRPPTFSSSNNPVDALDWLHAVGKKLDTVQCSDEEKVIFAAHQLQGPASLWWDHFQATQPEGQPFTWARFTAAFRRTHVPAEVMALKKREFRELKQGNRSVMEYLHEFNNLARYAPEDVREDKEKQEKFLAGMDPELSMRLVSGDYPDFQRLVDKSIRLEAKHKKLESHKRCLANFRNQQGANQRVRYTNPYLGGSSSQQQQQQQPRSAPRPHFVVRVPQPQQQQSQQGTRAPRPPTPAVQPGQGRRDVQGQQRLCFNCFEPGHFADKCPKPRRQQGQPPPRPNNDGKDVIWGRVNHVTAEDVLTTPNVIVGTFLIHSIPTTILFDSGASHSFISVPFVGRNQLGVERLRNSLLITTPRGVMTAKYYSPAVPIEIQGIPFPSDLILLDTKNLDVILGMNWLAQFQGVVDCARRTVTLYRGPEQPVVFFAPPTSVGSSELHQIGLSEIPIVREFGDVFPEELPGMPPKREIEFRIDLAPGTTPLYKRPYRMASNELAEVKKQLEELKEKGYIRPSTSPXGAPVIFVXKEDKTKRMCIDYRALNEVTIKNKYPLPRIDDLFDXLKGATVFSKIDLRSGYHQLRIREEDIPKTAFTTRYGLYEFTVMSFGLTNAPTFFMNLMNKVFMEYLDKFVVVFIDDILVYSQSEEDHQHHLRLVLGKLREHQLYAKLSKCEFWLSEVKFLGHVISAKGVAVDPETVTAVTGWKQSKTVTQIRSFLGLAGYYRRFIENFSKIARPMTQLLKKEEKFVWSPQCEKAFQTLKEKLVSSPVLILPDTRKDFMVYCDALRQGLGCVLMQEGHVVAYASRQLRPHEGNYPTHDLELAAVVHALKIWRHYLIGNRCEIYTDHKSLKYIFTQSDLNLRQRRWLELIKDYDVGIHYHPGKANVVANALSRKSHCNTLDVRGIPPELNQQMEALNLSIVGRGFLATLEAKPTLLDQIREAQKNDPDMRGLLKNMKQGKAAGFTEDEHGTLWNGNRRVKAEHQRPAGLLQPLQVPEWKWDEIGMDFITGLPKTQGGYNSIWVVVDRLTKVARFIPVKTTYGGNKLAELYFARIVSLHGVPKKIVSDRGSQFTSHFWKKLQEELRTRLNFSTAYHPQTDGQTERLNQILEDMLRACVLDFGKTWDKSLPYAEFSYNNSYQASIQMAPYEALYGRKCRTPLLWDQVGESQVFGTDILREAEAKVRTIRDNLKVAQSRQKSYADNRRCNLEFAVDDFVYLRVTPLRGVHRFQTKGKLAPRFVGPFRIIARRGEVAYQLELPASLGNVHDVFHVSQLKKCLRVPSEQADSEQIEVREDLTYVERPVKILDTMERRTRNRVIRFCKVQWSNHAEEEATWXREDEMKAAHPDLFASSSESRGRDSV

SEQ ID NO: 19130 - protein, 1795 aa, Oryza sativa
  Clone ID: TF_OSC400773j.C1.p37.fg
MDEVGGRWTFSRANEGYTSCGPMAGSVTRRGLDMTGFVLELRGMCVVLGYPHGVDYQARPLPEQEGEDAEPHAGWEVTAVILSGSPERTSLAVTAGGDSFPAACQNAALLAIGTLHQRYPDELQHSPYRYHPRRGGARDYATFRDASSEDDATVVHLARMVEAYDAARIDFHQMVRRGMVENNMKILELRQENLQLKKDLDALEAQLHQLKIAQGEDSRPKRRRVCRSQKITARKSTSRPELVRQSLAWTCFVETPRAEPAPVIPQEGEASGVGSTEVLIVSSPSLFAGSVWGFQMVTTRRNVNTGEGNQPEGSNPNHQGNPPPPPPPDTNAILTQILAQQANMMNAFLHHLQNPPQQNAPPPPPQHSKLAEFLRIRPPTFSSSNNPVDALDWLHAVGKKLDTVQCSDEEKVVFAAHQLQGPASLWWDHFQATQPEGQPITWTRFTAAFRRTHVPAGVVALKKREFRELKQGNRSVMEYLHEFNNLARYAPEDVREDEEKQEKFLAGMDPELSVRLVSGDYPDFQRLVDKSIRLEAKHKELESHKRRLANFRNQQGANQRVRYTNPYPGGSSSQQQQQQQQPRSAPRPQFVVRVPQQQQQQNQQGTRAPRPPTPTVQPVQGRRDASGPQRLCFNCFEPGHFADKCPKPRRQQGQAPPRSKNGGKDVIRGRVNHVTAEDVLTTPDVIVGTFLVHSIPATILFDSGASHSFISVPFVGRNQLGVERLRNPLLITTPGGVMTAKYYSPAVPIEIQGIPFPSDLILLDTKNLDVILGMNWLAQFQGVVDCARRTVTLYRGPEQPVVFFAPPTSVRSSELHQIGLSEIPIVREFGDVFPEELPGMPPKREIEFRIDLAPGTAPLYKRPYRMAANELAEVKKQLEELKEKGYIRPSTSPWGALVIFVEKKDKTKRMCVDYRALNEVTIKNKYPLPRIDDLFDQLKGATVFSKIDLRSGYHQLRIREEDIPKTAFTTRYGLYEFTVMSFGLTNAPAFFMNLMNKVFMEYLDKFVVVFIDDILIYSQSEEDHQHHLRLVLGKLREHQLYAKLSKCEFWLSEVKFLGHVISAKGVAVDPETVTAVTDWKQPKTVTQIRSFLGLAGYYRRFIENFSKIARPMTQLLKKEEKFVWSPQCEKAFQTLKEKLVSSPVLILPDTRKDFMVYCDASRQGLGCVLMQDGHVVAYASRQLRPHEGNYPTHDLELAAVVHALKIWRHYLIGNRCEIYTDHKSLKYIFTQSDLNLRQRRWLELIKDYDVGIHYHPGKANVVADALSRKSHCNTLNVRSIPPELNQQMEALNLSIVGRGFLAALEAKPTLFDQIREAQKNDPDMHGLLKNMKQGKAAGFTEDEHGTLWNGKRVCVPDNRELKQLILQEAHESPYSIHPGSTKMYLDLKEKYWWVSMKREIAEFVALCDVCQRVKAEHQRPAGLLQPLQVPEWKWDEIGMDFITGLPKTQGGYDSIWVIVDRLTKVARFIPVKTTYGGNKLAELYFARIVSLHGVPKKIVSDRGSQFTSHFWKKLQEELGTRLNFSTAYHPQTDGQTERLNQILEDMLRACVLDFGKTWDKSLPYAEFSYNNSYQASIQMAPYEALYGRKCRTPLLWDQVGESQVFGTDILREAEAKVRIIRDNLKVAQSRQKSYADNRRRDLEFAVDDFVYLRVTPLRGVHRFQTKGKLAPRYVGPFRIIARRGEVAYQLELPASLGNVHDVFHVSQLKKCLRVPSEQANSEQIEVREDLTYVEKPVKILDTMERRTRNRVIRFCKVQWSNYAEEEATWEREDELKAAHPDLFASSSESRGRDSV

SEQ ID NO: 19131 - protein, 2015 aa, Oryza sativa
  unsure (1)..(2015): unsure at all Xaa locations
  Clone ID: TF_OSC400834j.C1.p6.np
NGAEISAAVSSLSGRALPLSALYICSPCLSPPFPPLAARSRRRIRASAVLLSLRRRRQPSVRRRRRSGLPPDSAPPPSASPRRRRPRPLLRFARRPPEHRRPRHPEPRRRLSPLRSSFPPPSSSRGEPRTRSLSLFSPLSRAPLRRAGGRRRXPSGSGCAASRRPCRRGRLRPPPAAARWGPAVSRPRPRVRLTRGTHGADRRQPRAPGPPWTHLGHIRTGLRASVAKHYRFHMSSGANEGYTSCGPVVEMSWQRVGALLLGAQSCLPVPEVPAVGGIGSMYTSDQSLIYSNSRALGYGQAEQCTQMAGSVTRRGLHMTGFVLELRGMCVVLGYPHGVDYQARPLPEQEGEDAEPHAGWEVTAVILSGSPERTSLAVTAGGDSFPAACQNAALLAIGTLHQRYPDELQHSPYRYHPRRGGARDFATFRDASSEDDATIVHLARMVEAYDAARIDFHQMVRRGMVENNMKILELRQENLQLKKDLDAVEAQLHQLKIAQGEVCRPKRRRVCRSQKITARKSTSRPELVRQSLAWTCFVETPRAEPAPVVPQEGEASGVGSTEDALLLTFHGETRRNAVTGDGNQPEGSNHNHQGNPPPPPPPPPPPPPDTNAILTQILAQQANMMTTFLHHLQNPPQQNAPPPPPQHSKLAEFLRIRPPTFSSSNNPVDALDWLHAVGKKLDTVQCSDEEKVIFAAHQLQGPASLWWDHFQATQPEGQPITWARFTAAFRRTHVLAGVVALKKREFRELKQGNRSVMEYLHEFNNLARYAPEDVREDEEKQEKFLAGMDPELSVRLVSGDYPDFQRLVDKSIRLEAKHKELESHKRRLANFRNQQGANQRVRYTNPYPGGSSSQQQQQQQQPRSAPRPQFVVRVPQPQQQQNQQGTRAPRPPTPAVQPGQGHRDAQGQQRLCFNCFEPGHFADKCPKPRRQQGQAPPRSNNGGKDVIRGRVNHVTAEDVLTTPDVIVGTFLVHSIPATILFDSGASHSFISVPFVGRNQLGVERLRNPLLITTPGGVMTAKYYSPAVPIEIQGIPFPSDLILLDTKKLDVILGMNWLAQFQGVVVCARRTVTLYRGPEQPVVFFAPPASVRSSELHQIGLSEIPIVREFGDVFPEELPGMPPKREIEFRIDLAPGTTPLYKRPYRMAANELAEVKKQLEELKEKGYIRPSTSPWGAPVIFVEKKDKTKRMCVDYRALNEVTIKNKYPLPRIDDLFDQLKGATVFSKIDLRSGYHQLRIREEDIPKTAFTTRYGLYEFTVMSFGLTNAPAFFMNLMNKVFMEYLDKFVVVFIDDILIYSQSEEDHQHHLRLVLGKLREHQLYAKLSKCEFWLSEVKFLGHVISAKGVAVDPETVTAVTDWKQPKTVTQIRSFLGLAGYYRRFIENFSKIARPMTQLLKKEEKFVWSPQCEKAFQTLKEKLVSSPVLILPDTRKDFMVYCDASRQGLGCVLMQDGHVVAYASRQLRPHEGNYPTHDLELAAVVHALKIWRHYLIGNRCEIYTDHKSLKYIFTQSDLNLRQRRWLELIKDYDVGIHYHPGKANVVADALSRKSHCNTLNVRGIPPELSQQMEALNLSIVGRGFLAALEAKPTLLDQIREAQKNDPDMHGLLKNMKQGKAAGFTEDEHGTLWNGNRRVKAEHQRPAGLLQPLQVPEWKWDEIGMDFITGLPKTQGGYDSIWVVVDRLTKVARFIPVKTTYGGNKLAELYFARIVSLHGIPKKIVSDRGSQFTSHFWKKLQEELGTRLNFSTAYHPQTDGXTERLNQILEDMLRACVLDFGKTWDKSLPYAEFSYNNSYQASIQMAPYEALYGRKCRTPLLWDQVGESQVFGTDILREAEAKVRTIRDNLKVAQSRQKSYADNRRRDLEFAVDDFVYLRVTPLRGVHRFQTKGKLAPRYVGPFRIIARRGEVAYQLELPASLGNVHDVFHVSQLKKCLRVPSEQADSEQIEVREDLTYVERPVKILDTMERRTRNRVIRFCKVQWSNHAEEEATWEREDELKAAHPDLFASSSESRGRDSV

SEQ ID NO: 19132 - protein, 1805 aa, Oryza sativa
  Clone ID: TF_OSC400948j.C1.p3.fg
MDEVGRRWTFSRANEGYTSCGPMAGSVTRRGLDMTGFVLELRGMCVVLGYPHGVDYQARPLPEQEGEDAEPHAGWEVTAVILSGSPERTSLAVTAGGDSFPAACQNAALLAIGTLHQRYPDELQHSPYRYHPRRGGARDYATFRDASSEHDATVVHLARMVEAYDAARIDFHQMVRRGMVENNMKILELRQENLQLKKDLDALEAQLHQLKIAQGEDSRPKRRRVCRSQKITARKSTSRPELVRQSLAWTCFVETPRAEPAPVVPQEGEASGVGSSEGALLLTFRPGPSQRSPSLFAGSVWGFQMVTTRRNVNTGEGNQPEGSNPNPQGNPPPPPPPDTNAILTQILAQQANMMNAFLHHLQNPPQQNAPPPPPQHSKLAEFLRIRPPTFSSSNNPVDALDWLHAVGKKLDTVQCSDEEKVVFAAHQLQGPASLWWDHFQATQPEGQPITWTRFTAAFRKTHVPAGVVALKKREFRELKQGSRSVMEYLHEFNNLARYAPEDVREDEEKQEKFLAGMDPELSVRLVSGDYPDFQRLVDKSIRLEAKHKELESHKRRLANFRNQQGANQRVRYTNPYPGGSSSQQQQQQQQQPRSAPRPQFVVRIPQPQQQQNQQGTRAPRPPTPTVQPVQGRRDAQGPQRLCFNCFEPGHFADKCPKPRRQQGQVPPRSNNGGKDVIRGRVNHVTAEDVLTTPDVIVGTFLVHSIPATILFDSGASHSFISVPFVGKNQLGVERLRNPLLITTPGGVMTAKYYSPAVPIEIQGIPFPSDLILLDTKNLDVILGMNWLAQFQGVVDCARRTVTLYRGPEQPVVFFAPPTSVRSSELHQIGLSEIPIVREFGDVFPEELPGMPPKREIEFRIYLAPGTTPLYKRPYRMAANELAEVKKQLEELKEKGYIRPSTSPWGAPVIFVEKKDKTKRMCVDYRALNEVTIKNKYPLPRIDDLFDQLKGATVFSKIDLRSGYHQLRIREEDIPKTAFTTRYGLYEFTVMSFGLTNAPAFFMNLMNKVFMEYLDKFVVVFIDDILIYSQSEEDHQHHLRLVLGKLREHQLYAKLSKCEFWLSEVKFLGHVISAKGVAVDPETVTAVTDWKQPKTVTQIRSFLGLAGYYRRFIENFSKIARPMTQLLKKEEKFVWSPQCEKAFQTLKEKLVSSPVLILPDTRKDFMVYCDASRQGLGCVLMQDGHVVAYASRQLRPHEGNYPTHDLELAAVVHALKIWRHYLIGNRCEIYTDHKSLKYIFTQSDLNLRQRRWLELIKDYDVGIHYHPGKANVVADALSRKSHCNTLNVRGIPPELNQQMEALNLSLVGRGFLAALEAKPTLLDQIREAQKNDPDMHGLLKNMKQGKAAGFTEDEHGTLWNGKRVCVPDNRELKQLILQEAHESPYSIHPGSTKMYLDLKEKYWWVSMKREIAEFVALCDVCQRVKAEHQRPAGLLQPLQVPEWKWDEIGMDFITGLPKTQGGYDSIWVIVDRLTKVARFIPVKTTYGGNKLAELYFARIVSLHGVPKKIVSDRGSQFTSHFWKKLQEELGTRLNFSTAYHPQTDGQTERLNQILEDMLRACVLDFGKTWDKSLPYAEFSYNNSYQASIQMAPYEALYGRKCRTPLLWDQVGESQVFGTDILREAEAKVRIIRDNLKVAQSRQKSYADNRRRDLEFAVDDFVYLRVTPLRGVHRFQTKGKLAPRYVGPFRIVARRGEVAYQLELPASLGNVHDVFHVSQLKKCLRVPSEQADSEQIEVREDLTYVEKPVKILDTMERRTRNRVIRFCKVQWSNHAEEEATWEREDELKAAHPDLFASSSESRGRDSV

SEQ ID NO: 19133 - protein, 1774 aa, Oryza sativa
  Clone ID: TF_OSC400979j.C1.p1.fg
MAGSVTRRGLDMTGFVLELRGMCVALGYPHGVDYQARPLPEQEGDDAEPHAGWEVTAVILAGSPERTSLTVTAGGDSFPAACQSAALLAIGTLHQRYPDELQHSPYRYHPRHGGARDYATFRDASSEDDATIVHLARMVEAYDAARIDFHQMVRRGMVENNMKILELRQENLQLKKDLDAVEAQLHQLKIAQGEVCRPKRRRVCRSQKITARKSTSRPELVRQSLAWTCFVETPRAEPAPVVPQEGEASGVGSTEALSLFAGSVWGFQMVTTRRNANTGDGNQPESSNHNHQGNPPPPPPPPPPPPPDTNAILTQILAQQANMMTAFLHHLQNPPQHNAPPPPPQHSKLAEFLRIRPPTFSSSNNPVDALDWLHAVGKKLDTVQCSDEEKVIFAAHQLQGPASLWWDHFQATQPEGQPITWARFTAAFRRTHVPAGVVALKKREFRELKQGNRSVMEYLHEFNNLARYAPEDVREDEEKQEKFLAGMDPELSVRLVSGDYPDFQRLVDKSIRLEAKHKELESHKRRLANFRNQQGANQRVRYTNPYPGGSSSQQQQQQQQPRSAPRPQFVVRVPQPQQQQNQQGTRAPHPPTPTVQSGQGRRDAQGQQRLCFNCFEPGHFADKCPKPRRQQGQAPPRSKNGGKDVIRGRVNHVTAEDVLTTPDVIVGTFLVHSIPATILFDSGASHSFIFVPFVGRNQLGVERLRNPLLITTPGGVMTAKYYSPAVPIEIQGIPFPSDLILLDTKNLDVILGMNWLAQFQGVVDCARRTVTLYRGPAQPVVFFAPSTSIRSSELHQIGLSEIPIVREFGDVFPEELPGMPPKREIEFRIDLAPGTTPLHKRPYRMAANELAEVKKQLEELKEKGYIRPSTSPWGAPVIFVEKKDKTKRMCVDYRALNEVTIKNKYPLPRIDDLFDQLKGATVFSKIDLRSGYHQLRIREEDIPKTAFTTRYGLYEFTVMSFGLTNAPAFFMNLMNKVFMEYLDKFVVVFIDDILIYSHSEEDHQHHLRLVLGKLREHQLYAKLSKCEFWLSEVKFLGHVISAKGVAVDPETVTAVTDWKQPKTVTQVRSFLGLAGYYRRFIENFSKIARPMTQLLKKEEKFVWSPQCEKAFQTLKEKLVSSPVLILPDTRKDFMVYCDASRQGLGCVLMQDGHVVAYASRQLRPHEGNYPTHDLELAAVVHALKIWRHYLIGNRCEIYTDHKSLKYIFTQSDLNLRQRRWLELIKDYDVGIHYHPGKANVVADALSRKSHCNTLNVRGIPPELSQQMEALNLSIVSRGFLAALEAKPTLLDQIREAQKNDPDMHGLLKNMKQGKAAGFTEDEHGTLWNGKRVCVPDNRELKQLILQEAHESPYSIHPGSTKMYLDLKEKYWWVSMKREIAEFVALCDVCQRVKAEHQRPAGLLQPLQVPEWKWDEIGMDFITGLPKTQGGYDSIWVVVDRLTKVARFIPVKTTYGGNKLAELYFARIVSLHGVPKKFVSDRGSQFTSHFWKKLQEDLGTRLNFSTAYHPQTDGQTECLNQILEDMLRACVLDFGKTWDKSLPYAEFSYNNSYQASIQMAPYEALYGRKCRTPLLWDQVGESQVFGTDILREAEAKVRTIRDNLKVAQSRQKSYADNRRCDLEFAVDDFVYLRVTPLRGVHRFQTKGKLAPRYVGPFRIVARRGEVAYQLELPASLGNVHDVFHVSQLKKCLRVPSEQADSEQIEVREDLTYVERPVKILDTMERRTRNRVIRFCKVQWSNHAEEEATWEREDELKAAHPDLFASSSESRGRDSV

SEQ ID NO: 19134 - protein, 2853 aa, Oryza sativa
  Clone ID: TF_OSC400979j.C1.p10.gm
AFQTLKEKLVSSPVLILPDTRKDFMVYCDASRQGLGCVLMQDGHVVAYASRQLRPHEGNYPTHDLELAAVVHALKIWRHYLIGNRCEIYTDHKSLKYIFTQSDLNLRQRRWLELIKDYDVGIHYHPGKANVVADALSRKSHCNTLNVRGIPPELSQQMEALNLSIVSRGFLAALEAKPTLLDQIREAQKNDPDMHGLLKNMKQGKAAGFTEDEHGTLWNGNREKYWWVSMKREIAEFVALCDVCQRVKAEHQRPAGLLQPLQVPEWKWDEIGMDFITGLPKTQGGYDSIWVVVDRLTKVARFIPVKTTYGGNKLAELYFARIVSLHGVPKKFVSDRGSQFTSHFWKKLQEELGTRLNFSTAYHPQTDGQTECLNQILEDMLRACVLDFGKTWDKSLPYAEFSYNNSYQASIQMAPYEALYGRKCRTPLLWDQVGESQVFGTDILREAEAKVRIIRDNLKVAQSRQKSYADNRRCDLEFAVGDFVYLRVTPLRGVHRFQTKGKLAPRYVGPFRIIARRGEVAYQLELPASLGNVHDVFHASQLKKCLRVPSEQADSEQIEVREDLTYVERPVKILDTMERRTRNRPIPISSPVPPNLGVEIPFKGGRRARPPPSLTGGAHPSSPFSRRARRRARALAPPPPPNPPHPAVPARIKEGEITPRDSLPFFPLFPLSLSLGFVRNRARDLRRRHQWRPRFPRPIPSPPGALSLSRRYLIASRAPLLRFRRSPLTLPVGIEPAPSFSLSAIAAELRSVAVVAPDLLPFRRHPLRLRRVLADPVRPSASLADRRNAAVLVDPSPRRRRPPLRSPFPPPSSSRGEPWTAVRFPSSLLSLGCRSAAPLVAGGDHRGAGAPPPVGRAGEAAFGRARGCQVGPAVSRPRPWVRLTRGTHGAGRRQPRAPGPPWAVRLPRGPHSRGPAPLPYKDRSSGLCCKALPYFHMSSGANEGYTGCGSVVEMSWHRAGVLLLGAQSCLPVPGVPAVGGIGSMAGSVTRRGLDMTGFVLELRGMCVVLGYPHGVDYQARPLPEQEGEDAEPHAGWEVTAVILSGSPERTSLAVTAGGDSFPAACQNAALLAIGTLHQRYPDELQHSPYRYHPRSGGARDYATFRDAGSEDDAPIVHLARMVKAYDAARIDFHQMVRRGMVENNMKILELRQENLQLKKDLDAVEAQLHQLKIAQGEDCRPKRRRVCRSQKITARKSTSRPELVRQSLAWTCFVETPRAEPAPVVPQEGEASGVGSTEALSLFAGSVWGFQMVTTRRNANTGDGNQPESSNHNHQGNPPPPPPPPSPPPPDTNAILTQILAQQANMMTAFLHHLQNPPQHNAPPPPPQHSKLAEFLRIRPPTFSSSNNPVDALDWLHAVGKKLDTVQCSDEEKVIFAAHQLQGPASLWWDHFQATQPEGQPITWARFTAAFRRTHVPAGVVALKKREFRELKQGNRSVMEYLHEFNNLARYAPEDVREDEEKQEKFLAGMDPELSVRLVSGDYPDFQRLVDKSIRLEAKHKELESHKRRLANFRNQQGANQRVRYTNPYPGGSSSQPQQQHQQPRSAPRPQFVPGQGRRDASGPQRLCFNCFEPGHFADKCPKPRRQQGQAPPRSNNGGKDVIRGRVNHVTAEDVLTTPDVIVGTFLIHSIPATILFDSGASHSFISVPFVGRNQLGVERLRNPLLITTPGGVMTAKEFGDVFPEELPGMPPKREIEFRIDLAPGTTPLYKRPYRMAANELAEVKKQLEELKEKGYIRPSTSPWGAPVIFVEKKDKTKRMCVDYRALNEVTIKNKYPLPRIDDLFDQLKGATVFSKIDLRSGYHQLRIREEDIPKTAFTTRYGLYEFTVMSFGLTNAPAFFMNLMNKVFMEYLDKFVVVFIDDILIYSHSEEDHQHHLRLVLGKLREHQLYAKLSKCEFWLTEVKFLGHVISAKGVAVDPEAVTAVTDWKQPKTVTQIRSFLGLAGYYQRFIENFSKIARPMTQLLKKEEKFVWSPQCEKAFQTLKEKLVSSPVLILPDTRKDFMVYCDASRQGLGCVLMQDGHVVAYAFRQLRPHEGNYPTHDLELAAVVHALKIWRHYLIGNRCEIYTDHKSLKYIFTQSDLNLLQRRWLELIKDYDVGIHYHPGKANVVADALSRKSHCHALNVRGIPPELNQQMEALNLSIVSRGFLAALEAKPTLLDQIREAQKNDPDMHGLLKNMKQGKAAGFTEDEHGTLWNGNREKYWWVSMKREIAEFVALCDVCQRVKAEHQRPAGLLQPLQVPEWKWDEIGMDFITGLPKTQGGYDSIWVVVDRLTKVARFIPVKTTYGGNKLAELYFARIVSLHGVPKKIVSDRGSQFTSHFWKKLQEELGTRLNFSTAYHPQTDGQTERLNQILEDMLRACVLDFGKTWDKSLPYAEFSYNNSYQASIQMAPYEALYGRKCRTPLLWDQVGESQVFGTDILREAEAKVRIIRDNLKVAQSRQKSYADNRRCDLEFAVGDFVYLRVTPLRGVHRFQTKGKLAPRYVGPFRIIARRGEVAYQLELPASLGNVHDVFHASQLKKCLRVPSEQADSEQIEVREDLTYVERPVKILDTMERRTRNRPIPISSPVPPNLGVEIPFKGGRRARPPPSLTGGAHPSSPSSRRARRRARALAPPPPPNPPHPAVPARIKEGEITPRDSLPFFPLFPLSLSLGFVRNRARDLRRRHQWRPRFPRPIPSPPAALSLSRRYLIASRAPLLRFRRSPLTLPVGIEPAPSSSHSTVAAELRSVAVVAPDLLPFRRRPLRLRRVLADPVRPSASLADRRNAAVLLRSGRRFRHPRRPGVSRGPPFAFPLPSSLSGAAPPRRWSPAATIGARVRRLPLAVPARPPSGAPAAARWARPSAARARGCG

SEQ ID NO: 19135 - protein, 1799 aa, Oryza sativa
  Clone ID: TF_OSC401000j.C1.p56.fg
MSWHRAGVLLLGAQSCLPVLGVPAVGGIGSVLLSMARMGWKLCHVFRLYTVVMAGSVTRRGLDMTGFVLELRGMCVALGYPHGVDYQARPLPEQEGDDAEPHAAWEVTAVILAGSPERTSLTVTAGGDSFPAACQSAALLAIGTLHQRYPDELQHSPYRYHPRRGGARDHTTFRDASSEDDATIVHLARMVEAYDAARIDFHQMVRRGMVEDNLKILELRQENLQLKKDLDAVEAQLHQLKIAQGEICRPKRRRVCRSLKITARKSTSRPELVRQSLAWTCFVETPRAEPAPVMVMTRRSANTGDGNQPEGSNHNHQGNPPPPPPLPPPPPPDTNAILTQILAQQANMMTAFLHHLQNPPQLNAPPPPPQHSKLAEFLRIRPPTFSSSNNPVDALDWLHAVGKKLDTVQCSDEEKVIFAAHQLQGPASLWWDHFQATQPEGQPITWARFTAAFRRTHVPAGVVALKKREFREWKQGNRSVMEYLHEFNNLARYAPEDVREDEEKQEKFLAGMDPELSVRLVSGDYPDFQRLVDKSIRLEAKHKELESHKRRLANFRNQQGANQRVRYTNPYPGGSSSQQQQQQQQPRSAPRPQFVVRVPQPQQQQNQQGTRAPRPPPPTVQPGQGRRDAQGPQRLCFNCFEPGHFADKCPKPRRQQGQAPPRPNNGVKDVIRGRVNHVTAEDVLTTPDVIVGTFLIHSIPATILFDSGASHSFISVPFVGRNQLGVERLRNPLLITTPGGVMTAKYYIPAVPIEIQGIPFPSDLILLDTKNLDVILGMNWLAQFQGVVDCARRTVTLYRGPEQPVVFFAPPTSVRSSELHQIELSEIPIVREFGDVFPEELPGMPPKREIEFRIDLAPGTAPLYERPYRMAANELAEVKKQLEELKEKGYIRPSTSPWGAPVIFVEKKDKTKRMCVDYRALNEVTIKNKYPLPRIDDLFDQLKGATVFSKIDLRSGYHQLRIREEDIPKTAFTTRYGLYEFTVMSFGLTNAPAFFMNLMNKVFMEYLDKFVVVFIDDILIYSQSEEDHQHHLRLVLGKLREHQLYAKLSKCEFWLSEVKFLGHVISAKGVAVDPETVTAVTDWKQPKTVTQVRSFLGLAGYYRRFIENFSKIARPMTQLLKKEEKFVWSPQCEKAFQTLKEKLVSSPVLILPDTHKDFMVYCDASRQGLGCVLMQDGHVVAYASRQLRPHEGNYPTHDLELAAVVHALKIWRHYLIGNRCEIYTDHKSLKYIFTQSDLNLRQRRWLELIKDYDVGIHYHPGKANVVADALSRKSHCNTLNVRGIPPELNQQMEALNLSIVSRGFLAALEAKPTLLDQIREAQKNDPDMHGLLKNMKQGKAAGFTEDEHGTLWNGNRVCVPDNRELKQLILQEAHESPYSIHPGSTKIYLDLKEKYWWVSMKREIAEFVALCDVCQRVKAEHQRPAGLLQPLQVLEWKWDEIGMDFITGLPKTQGGYDSIWVVVDRLTKVARFIPVKTTYGGNKLAELYFARIVSLHGVPKKIVSDRGSQFTSHFWKKLQEELGTRLNFSTAYHPQTDGQTERLNQILEDMLRACVLDFGKTWDKSLPYAEFSYNNSYQASIQMAPYEALYGRKCRTPLMWDQVGESQVFGTDILREAEAKVRTIRDNPKVAQSRQKSYADNRRRDLEFAVDDFVYLRVTPLRGVHRFRTKGKLAPRYVGPFRIVARRGEVAYQLELPASLGNVHDVFHGSQLKKCLRVPSEQADSEQIEVREDLTYVERPVKILDTMERRTRNRVIRFCKVQWSNHAEEEATWEREDELKAAHPDLFASSSESRGRDSV

SEQ ID NO: 19136 - protein, 2016 aa, Oryza sativa
  Clone ID: TF_OSC401018j.C1.p26.np
MAAGSSAADSPSSGRSLLLPTLHKHSPCLPPSFPPLAALSPRRNRARAVVLSLRRRRRAPVRRRRRPGPPPVSASPSSGSPRPRRSRPPLRFARRPPERRRPRRPEPRRRLPPLRSPFPSSPSTRGEPWTAHFVSPFPLLSRAPLRRAGGRRRRPSGRGCAASRRLCRRGRLRARPAAAMWGPAVSRPCPRVRLTRGTHGAGRRKPRAPGPPWTHLGHIRTGLRASVAKHYRFHMSSGANEGYTSCGPVVEMSWHRAGVLVLGAQSCLPVPGVPAVGGIGSMYTSDQSKIYSNSRALGYGQAEQCTQMAGSVSRRGLDMTGFVLELRGMCVVLGYPHGVDYQARPLPEQEGDDAEPHAAWEVTAVILAGSPERISLTVTAGGDSFPAACQSAALLAIGTLHQRYPDELQHSPYRYHPRRGGARDYATFRDASSEDDATIVHLARMVKAYDAARIDFHQMVRRGMVENNMKILELRQENLQLKKDLDAVEAQLHQLKIAQGEVCRPKRRRVCRSQKITARKSTSRPELVRQSLAWTCFVETPRAEPTPVVPQKGEASGVGSTEDALLLTFHGETRRNAATSDGNQPEGSNHNNHGSPPPPPPPPPPPPPDTNAILTQILAQQANMMTAFLHHLQNPPQHNAPPPPPQHSKLAEFLRIRPPTFSSSNNPVDALDWLHAVGKKIDTVQCSDEEKVIFAAHQLQGPASLWWDHFQATQPEGQPITWARFTAAFRRTHVPAGVVALKKREFRELKQGNRSVMEYLHEFNNLARYAPEDVREDEEKQKKFLAGMDPELSVRLVSGDYPDFQRLVDKSIRLEVKHKELESHKRRLANFRNQQGANQRVRYTNPYPGGSSSQQRQQQQQPRSAPRPQFVVRVPQPQQQQSQQGTRAPRPPTPTVQPGQGRRDASGPQRLCFNCFEPGHFADKCPKPRRQQGQAPPRSNNGGKDVIRGRVNHVTAEDVLTTPDVIVGTFLIHSIPATILFDSGASHSFISVPFVGRNQLGVERLRNPLLITTPGGVMTAKYYSPAVPIEIQGIPFPSDLILLDTKNLDVVLGMNWLAQFQGVVDCARRTVTLYRGPGQPVVFFAPPTSVSSSELHQIGLSEIPIVREFGDVFPEELPGMPPKREIEFRIDLALGTTPLCKRPYRMAANELAEVKKQLEELKEKGYIRPSTSPWGAPVIFVEKKDKTKRMCVDYRALNEVTIKNKYPLPRIDDLFDQLKGATVFSKIDLRSGYHQLRIREEDFPKTAFTTRYGLYEFTVMSFGLTNAPAFFMNLMNKVFMEYLDKFVVVFIDDILIYSQSEEDHQHHLLLVLGKLREHQLYAKLSKCEFWLSEVKFLGHVISAKGVAVDPETVTAVTDWKQPKTVTQVRSFLGLAGYYRRFIENFSKIARPMTQLLKKEEKFVWSPQCEKAFRTLKEKLVASPVLILPDTRKDFIVYCDASRQGLGCVLMQDGHVVAYASRQLRPHEGNYPTHDLELAAVVHALKIWRHYLIGNRCEIYTDHRSLKYIFTQSDLNLRQRRWLELIKDYDVGIHYHPGKANVVADALSRKSHCNTLNVRGIPPELNQQMEALNLSIVSRGFLATLEAKPTLLDQIREAQKNDPDMHGLLKNMKQGKAAGFTEDEHGTLWNGNRRVKAEHQRPAGLLQPLQVPEWKWDEIGMDFITGLPKTQGGYDSIWVVVDRLTKVARFIPVKTTYGGNKLAELYFARIVSLHGVPKKIVSDRGSQFTSHFWKKLQEELGTRLNFSTAYHPQIDGQTERLNQILEDMLRACVLDFGKTWDKSLPYAEFSYNNSYQASIQMAPYEALYGRKYRTPLLWDQVGESQVFGTDILREAEAKVRTIRDNLKVAQSRQKSYADNRRRDLEFAVDDFVYLRVTPLRGVHRFRTKGKLAPRYVGPFRITARRGEVAYQLELPASLGNVHDVFHVSQLKKCLRVPSEQADSEQIVVREDLTYVERPVKILDTMERRTRNRVIRFCKVEWSNHAEEEATWEREDELKAAHPDLFASSSESRGRDSV

SEQ ID NO: 19137 - protein, 1820 aa, Oryza sativa
  Clone ID: TF_OSC401018j.C1.p35.gm
MMTAFLHHLQNPPQHNAPPPPPQHSKLAEFLRIRPPTFSSSNNPVDALDWLHAVGKKLDTVECSDEEKVIFAAHQLQGPASLWWDHFQATQPEGQPITWARFTAAFRRTHVPAGVVALKKREFRELKQGNRSVMEYLHEFNNLARYAPEDVREDEEKQEKFLAGMDPELSVRLVSGDYLDFQRLVDKSIRLEAKHKELESHKRRLANFRNQQGANQRVRYTNPYPGGSSSQQQQQQQQPRSAPRPQFVVRVPQPQQQQSQQGTRAPRPPTPTVQPGQGRRDASGPQRLCFNCFEPGHFADKCPKPRHQQGQAPPCSNNGGKDVIRGRVNHVTAEDVLTTPDVIVELHQIGLSEIPIVREFGDVFPEELPGMPPKREIEFQIDLAPGTTPLCKRPYRMAANELAEVKKQLEELKEKGYIRPSTSPWGAPVIFVEKKDKTKRMCVDYRALNEVTIKNKYPLPRIDDLFDQLKGATVFSKIDLRSGYHQLRIRDEDIPKTAFTTRYGLYEFTVMSFGLTNAPAFFMNLMNKVFMEYLDKFVVVFIDDILIYSQSEEDHQHHLGLVLGKLREHQLYAKLSKCEFWLSEVKFLGHVISAKGVAVDPETVTAVTDWKQPKTVTQVRSFLGLAGYYRRFIENFSKIARPMTQLLKKEEKFVWSPQCEKAFKTLKEKLVASPVLILPDTRKDFMVYCDASRQGLGCVLMQDGHVVAYASRQLRPHEGNYPTHDLELAAVVHALKIWRHYLIGNRCEIYTDHKSLKYIFTQSDLNLRQRRWLELIKDYDVGIHYHPGKANVVADALSRKSHCNTLNIRGIPPELNQQMAALNLNIVSRGFLAALEAKPTLLDQIREAQKNDPDMHGLLKNMKQGKAAGFTEDEHGTLWNGNRYEDVLRLEGEILSTNDRPDFSNLSKYQNGKGMKLGWISSPDFQKPKVDMILYGIVSLHGVPKKIVSDRGSQFTSHFWKKLQEELGTRLNFSTAYHPQTDGQTERLNQILEDMLRACVLDFGKTWDKSLPYAEFSYNNSYQASIQMAPYEALYGRKCRTPLLWDQVGESQVFGTDILRQAEAKVRTIRDNLKVAQSRQKSYADNHRRDLEFAVDDFVYLRVTPLRAVHSFRTKGKLAPRFVGPFRIIARRGEVAYQLELPASLGNVHDVFHVSQLKKCLRVPSEQADSEQIEVREDLTYVERPVKILDAMERRTRSRPFPSSPSTRGEPWTAVSLPPSLPSLGRRSAAPVVAGGDHRGAGVPPPVGCAGEAAFGRAPRLPCGARPSAARALGANEGYTSCGPVVEMSWHRAGVLLLGAQSCLPVPGVPAVGGIGSRFMENFSKIARPMTQLLKKEEKFVWSPQCEKAFRTLKEKLVASPVLILPDTRKDFIVYCDASRQGLGCVLMQDGHVVAYASRQLRPHEGNYPTHDLELAAVVHALKIWRHYLIGNRCEIYTDHKSLKYIFTQSDLNLRQRRWLELIKDYDVGIHYHPGKANVVADALSRKSHCNTLNVRGIPPELNQQMEALNLSIVSRGFLATLEAKPTLLDQICKAQKNDPDMHGLLKNMKQGKAAGFTEDEHGTLWNGNREAHESPYSIHPGSTKMYLDLKEKYWWVSMKREIAEFVALCDVCQRVKAEHQRPAGLLQPLQVPEWKWDEIGMDFITGLPKTQGGYDSIWVVVDRLTKVARFIPVKTTYGGNKLAELYFARIVSLHGVPKKIVSDRGSQFTSHFWKKLQEELGTRLNFSTAYHPQTDGQTERLNQILEDMLRACVLDFGKTWDKSLPYAEFSYNNSYQASIQMAPYEALYGRKCRTPLLWDQVGESQVFGTDILREAEAKD

SEQ ID NO: 19138 - protein, 2015 aa, Oryza sativa
  unsure (1)..(2015): unsure at all Xaa locations
  Clone ID: TF_OSC401018j.C1.p37.np
DGAEIAAPVSFPSGRPLSLPTLFKHSPCLPPPFPTLAAFSPRRNRARAVVLSLRRCRRASVRRRRRPGPPPASASPPSASPRPRRPRPPLRFARRPPERRRPRRPEPRRRLSPLRSPFPSSPSTRGEPRTHLASPFPPLSRAPLRRAGGRRRXPSGRGRAASRRPCRRGRHRARPAAAMWGPAVSRPRPRVRLTRGTHGAGRRKPCAPGPPWTHLGHIRTGVRASVAKHYRFHMSSGANEGYTSCGPVVEMSWHRAGVLLLGAQSCLPVPGVPAVDGIGSMYTSDQSKIYSNSRALGYGQAEQCTQMAGSVSRRGLDMTGFVLELRGMCVVLGYPHGVDYQARPFPEQEGDDAEPHAAWEVTAVILAGSPERTSLTVTAGGDSFPAACQSAALLAIGTLHQRYPDELQHSPYRYHPRRGGARDYATFRDASSEDDATIVHLARMVEAYDAARIDFHQMVRRGMVENNMKILELRQENLQLKKDLDAVEAQLHQLKIAQGEICRPKHRRVYRSQKITARKSTSRPELVRQSLAWTCFVETPRAEPAPVVPQEGEASGVGSTEDALLLTFHGETRRNAATSDGNQPEDSNHNNHGSPPPPPPPPPPPPPDTNAILTQILAQQANMMTAFLHHLQNPPQHNAPPPPPQHSKLAEFLRICPPTFSSSNNPVDALDWLHAVGKKLDTVQCSDEEKVIFAAHQLQGPASLWWDHFQATQPEGQPITWARFTAAFRRTHVPAGVVALKKREFRELKQGNRSVMEYLHEFNNLARYAPEDVREDEEKQEKFLAGMDPELSVCLVSGDYPDFQRLVDKSIRLEAKHKELESHKRRLANFHNQQGANQRVRYTNPYPGGSSSQQQQQQQQPRSAPRPQFVVRVPQPQQEQNQQGTRAPRPPPPTVQPGQGRRDAQGPQRLCFNCFEPGHFADKCPKPRRQQGQAPPRPNNGGKDVIRGRVNHVTAEDVLTTPDVIVGTFLIHSIPATILFDSGASHSFISVPFVGRNQLGVERLRNPLLITTPGGVMTAKYYSPAVPIEIQGIPFPSDLILLGTKNLDVILGMNWLAQFQGVVDCARRTVTLYRGPEQPVVFFAPPTSVRSSELHQIELSEIPIVREFGDVFPEELPGMPPKREIEFRIDLAPGTAPLYKRPYRMAANELAEVKKQLEELKEKGYIRPSTSPWGAPVIFVEKKDKTKRMCVDYRALNEVTIKNKYPLPRIDDLFNQLKGATVFSKIDLRSGYHQLRIREEDIPKTAFTTRYGLYEFTVMSFGLTNAPAFFMNLMNKVFMEYLDKFVVVFIDDILIYSQSEEDHQHHLRLVLGKLREHQLYAKLSKCEFWLSEVKFLGHVISAKGVAVDPETVIAVTDWKQPKTVTQVRSFLGLAGYYRRFIENFSKIARPMTQLLKKEEKFVWSPQCEKAFQTLKEKLVSSPVLILPDTHKDFMVYCDASRQGXGCVLMQDGYVVAYASRQLRPHEGNYPTHDLELAAVVHALKIWWHYLIGNRCEIYTDHKSLKYIFTQSDLNLRQRRWLELIKDYDVGIHYHPGKANVVADALSRKGHCNTLNVRGIPPELNQQMEALNLSIVSRGFLAALEAKPTLLDQIREAQKNAPDMHGLLKNMKQGKAAGFTEDEHGTLWNGNRRVKAEHQRPAGLLQPLQVPEWKWDEIGMDFITGLPKTQGGYDSIWVVVDRLTKVARFIPVKTTYRGNKLAELYFARIVSLHGVPKKIVSDRGSQFTSHFWKKLQEELGTRLNFSTAYHLQTDGQTERLNQILEDMLRACVLDFEKTWDKSLPYAEFSYNNSYQASIQMAPYEALYGRKCRTPLMWDQVGESQVFGTDILREAEAKVRTIRDNLKVARSRQKSYADNRRRDLEFAVDDFVYLRVTPLRGVHRFRTKGKLAPRYVGPFRIVARRGEVAYQLELPASLGNVHNVFHVSQLKKCLRVPSEQADSEQIEVREDLTYVERPVKILDTMERRTRNRVIRFCKDQWSNHAEEEATWEREDELKAAHPDLFASSSESRGRDSV

SEQ ID NO: 19139 - protein, 1047 aa, Oryza sativa
  Clone ID: TF_OSC401054j.C1.p1.fg
MGWKLCHVFRPYTVVMAGSVTRRGLSMTGFVLELRGMCVVLGYPHGVDYQARPLPEQEGEDAEPHAGWEVTAVILSGSPERTSLAVTAGGDSFPAACQNAALLAIGTLHQRYPDELQHSPYRYHPRRGGARDYATFRDASSEDDATVVHLARMVEAYDAARIDFHQMVRRGMVENNLKILELRQENLQLKKDLDALEAQLHQLKIAQGEDSRPKRRRVCRSQKITARKSTSRPELVRQSLAWTCFVETPRAEPAPVVPQEGEASGVGSSEGALLLTFRPGPSQRSLSLFAGSVWGFQMVTTRRNVNTGEGNQPEGSNHNHQGNPPPPPPPPPPPPPDTNAILTQILAQQANMMTAFLHHLQNPPQQNAPPPPPQHSKLAEFLRIRPPTFSSSNNPVDALDWLHAVGKKLDTVQCSDEEKVVFAAHQLQGPASLWWDHFQATQPEGQPITWARFTAAFRRTHVPAGVVALKKREFRELKQGNRSVMEYLHEFNNLARYAPQDVREDEEKQEKFLAGMDPELSVRLVSGDYPDFQRLVDKSIRLEAKHKELESHKRRLANFRNQQGANQRVRYTNPYPGGSSSQQQQQQQQPRSAPRPQFVVRIPQPQQQQNQQGTRAPRPPTPTVQPVQGRRDAQGQQRLCFNCFEPGHFADKCPKPRRQQGQAPPRSNNGGKDVIRGRVNHVTAEDVLTTPDVIVGTFLVHSIPATILFDSGASHSFISVSFVGRNQLGVERLRNPLLITTPGGVMTAKYYSPAVPIEIQGIPFPSDLILLDTKNLDVILGMNWLAQFQGVVDCARRTVTLYRGPEQPVVFFAPPTSVRSSELHQIGLSEIPIVREFGDVFPEELPGMPPKREIEFRIDLAPGTTPLHKRPYRMAANELAEVKKQLEELKEKGYIRPSTSPWGAPMIFVEKKDKTKRMCVDYRALNEVTIKNKYPLPRIDDLFDQLKGATVFSKIDLRSGYHQLRIREEDIPKTAFTTRYGLYEFTVMSFGLTNAPAFFMNLMNKVFMEYLDKFVVVFIDDILIYSQSEEDHQHHLRLVLGKLREHQ

SEQ ID NO: 19140 - protein, 1805 aa, Oryza sativa
  Clone ID: TF_OSC401054j.C1.p116.gm
MVMPMVTTRRNVNTGEGNQPEGSNPNHQGNPPPPPPPPPPPPPDTNAILTQILAQQANMMTAFLHHLQNPPQQNAPPPPPQHSKLAEFLRIRPPTFSSSNNPVDALDWLHAVGKKLDTVQCSDEEKVVFAAHQLQGPASLWWDHFQATQPEGQPITWTRFTAAFRRTHVPAGVVALKKREFRELKQGNRSVMEYLHEFNNLARYAPEDVREDEEKQEKFLAGMDPELSVRLVSGDYPDFQRLVDKSIRLEAKHKELESHKRRLANFRNQQGANQRVRYTNPYPGGSSSQQQQQQQQPRSAPRPQFVVRVPQPQQQQNQQGTRAPRPPTPTVQPVQGRRDAQGQQRLCFNCFEPGHFADKCPKPRRQQGQAPPRSNNGGKDVIRGRVNHVTAEDVLTTPDVIVELHQIELSEIPIVREFGDVFPEELPGMPPKREIEFRIDLAPGTTPLHKRPYRMAANELAEVKKQLEELKEKGYIRPSTSPWGAPVIFVEKKDKTKRMCVDYRALNEVTIKNKYPLPRIDDLFDQLKGATVFSKIDLRSGYHQLRIREEDIPKTAFTTRYGLYEFTVMSFGLTNAPAFFMNLMNKVFMEYLDKFVVVFIDDILIYSQSEEDHQHHLRLVLGKLREHQLYAKLSKCEFWLSEVKFLGHVISAKGVAVDPETVTAVTDWKQPKTVTQVRSFLGLAGYYRRFIENFSKIARPMTQLLKKEEKFVWSPQCEKAFQTLKEKLVSSPVLILPDTRKDFMVYCDASRQGLGCVLMQDGHVVAYASRQLRPHEGNYPTHDLELAAVVHALKIWRHYLIGNRCEIYTDHKSLKYIFTQSDLNLRQRRWLELIKDYDVGIHYHPGKANVVADALSRKSHCNNLNVRGIPPELSQQMEALNLNIVGRGFLAALEAKPTLLDQIREAQKNDPDMHGLLKNMKQGKAAGFTEDEHGTLWNGNRRVKAEHQRPAGLLQPLQVPEWKWDEIGMDFITGLPKTQGGYDSIWVVVDRLTKVARFIPVKTTYGGNKLAELYFARIVSLHGVPKKIVSDRGSQFTSHFWKKLQEELGTRLNFSTAYHPQTDGQTERLNQILEDMLRACVLDFGKTWDKSLPYAEFSYNNSYQASIQMAPYEALYGRKCRTPLLWDQVGESQVFGTDILREAEAKVRIIRDNLKVAQSRQKSYADNRRRDLEFAVDDFVYLRVTPLRGVHRFQTKGKLAPRYVGPFRIVARRGEVAYQLELPASLGNVHDVFHVSQLKKCLRVPSEQADSEQIEVREDLTYVERPVKILDTMERRTRNRVIRFCKVQWSNHAEEEATWEREDELKAAHPDLFATAKGGPVKKVAKKKGLVDVARVFSDDESSDGTPTSPAGRSLDLSAAPIPSLGVAGVGGSTAAGASASAERIVTAAAKVFGSPPHQPVASPLIEAKGKRAVAETSTSEYSLSVPRFAPGDFETRADLLPFVEGVSNLVLPASAPSLFTELNEFDEGCTAIKSLAVRILAAHCSMERTVRARLDGFKSHLRAKDDELGRKNLEMDALANSLKEAKAENKRLQSELEKGKEARAEVDRLKAELEKEKAHTAVLIDYYSLTEPKMEALRQEVRKAEASAAEESWRFSREIVKTTESARTACQTLRLARIDMGAKVWGVPSEDASAFDFSEWTQQAGGSVSDCATAYGDCCARVSATFTMGLLQQFGCEHIAEFPKYAKGDWEISAQDISPTLRAWRKQFWQKDGRSAAKARLLEQLAKAEAADLCEDEGAAARGGGGDARDHAEIILGRGLASAMTLATFALLDLLNTDFQHSGPINSLSKYFGGHCSCSLVRAT

SEQ ID NO: 19141 - protein, 1821 aa, Oryza sativa
  Clone ID: TF_OSC401054j.C1.p41.fg
MSWHRAGVLLLGAQFCLPVPGVPAVGRIGSVLLSMARMGWKLCHVFRLYTVVMAGSVTRRGLDMTGFVLELRGMCVALGYPHGVDYQARPLPEQEGDDAEPRAGWEVTAVILAGSSERTSLTVTAGGDSFPAACQSAALLAIGTLHQRYPDELQHSPYRYHPRRGGARDYATFRDASSEDDATIVHLARMVEAYDAARIDFHQMVRRGMVENNMKILELRQENLQLKKDLDAVEAQLHQLKIAQGEICRPKRRRVCRSQKITARKSTSRPELVRQSLAWTCFVETPRAEPAPVVPQEGEASGVGSTEVVWGMVMPMVTTRRNANTGDGNQPECSNHNHQGNPPPPPPPPPPPPPDTNAILTQILAQQANMMTAFLHHLQNPPQQNAPPPPPQHSKLAEFLRIRPPTFSSSNNPVDALDWLHAVGKKLGTVQCSDEEKVIFAAHQLQGPASLWWDHFQATQPEGQPITWARFTAAFRRTHVPAGVVALKKREFRELKQGNRSVMEYLHEFNNLARYAPEDVREDEEKQEKFLAGMDPELSVRLVSGDYPDFQRLVDKSIRLEAKHKELESHKRRLANFRNQQGANQRVRYTNPYPGGSSSQQQQQQQQPRSAPRPQFVVRVPQPQQQQNQQGTRAPRPPTPTVQPGQGRRDAQGQQRLCFNCFEPGHFADKCPKPRRQQGQAPPRSNNGGRDVIRGRVNHVTAEDVLTTPDVIVGTFLVHSIPATILFDSGASHSFISVPFVGRNQLGVERLRNPLLITTPGGVMTAKYYSPTVPIEIQGIPFPSDLILLDTKNLDVILGMNWLAQFQGVVDCARRTVTLYRGPEQPVVFFAPPTSVRSSELHQIELSEIPIVREFGDVFPEELPGMPPKREIEFRIDLAPGTTPLYKRPYRMAANELAEVKKQLEELKEKGYIRPSTSPWDAPVIFVEKKDKTKRMCVDYRALNEVTIKNKYPLPRIDDLFDQLKGATVFSKIDLRSGYHQLRIREEDIPKTAFTTRYGLYEFTVMSFGLTNAPAFFMNLMNKVFMEYLDKFVVVFIDDILIYSQSEEDHQHHLRLVLGKLREHQLYAKLSKCEFWLSEVKFLGHVISAKGVAVDPETVIAVTDWKQPKTVTQIRSFLGLAGYYRRFIENFSKIARPMTQLLKKEEKFVWSPQCEKAFQTLKEKLVSSPVLILPDTRKDFMVYCDASRQGLGCVLMQDGHVVAYASRQLRPHEGNYPTHDLELAAVVHALKIWRHYLIGNRCEIYTDHKSLKYIFTQSDLNLRQRRWLELIKDYDVGIHYHPGKANVVADALSRKSHCNTLNVRGIPPELSQQMEALNLSIVGHGVLAALEAKPTLLDQIREAQKNDPDMHGLLKNMKQGKAAGFTEDEHGTLWNGNRVCVPDDRELKQLILQEAHESPYSIHPGSTKMYLDLKEKYWWVSMKREIAEFVALCDVCQRVKAEHQRPAGLLQPLQVPEWKWDEIGMDFITGLPKTQGGYDSIWVVVDRLTKVARFIPVKTTYGGNKLAELYFARIVSLHGVPKRIVSDRGSQFTSHFWKKLQEELGTRLNFSTAYHPQTDGQTERLNQILEDMLRACVLDFGKTWDKSLPYAEFSYNNSYQASIQMAPYEALYGRKCRTPLLWDQVGESQVFGTDILREAEAKVRIIRDNLKVAQSRQKSYADNRRRDLEFAVDDFVYLRVTPLRGVHRFQTKGKLAPRYVGPFRIVARRGEVAYQLELPASLGNVHDVFHVSQLKKCLRVPSEQADSEQIEVREDLTYVERPVKILDTMERRTRNRVIRFCKVQWSNHAEEEATWEREDELKAAHPDLFASSSKSRGRDSV

SEQ ID NO: 19142 - protein, 1821 aa, Oryza sativa
  Clone ID: TF_OSC401054j.C1.p71.fg
MSWQRVGALLLGAQSCLPVPGVPAVGRIGSVLLSMARMGWKLCHVFRLYTVVMAGSVTRRGLDMTGFVLELRGMCVALGYPHGVDYQARPLPEQEGDDAEPRAGWEVTAVILAGSSERTSLTVTAGGDSFPAACQSAALLAIGTLHQRYPDELQHSPYRYHPRRGGARDYATFRDASSEDDATIVHLARMVEAYDAARIDFHQMVRRGMVENNMKILELRQENLQLKKDLDAVEAQLHQLKIAQGEICRPKRRRVCRSQKITARKSTSRPELVRQSLAWTCFVETPRAEPAPVVPQEGEASGVGSTEVVWGMVMPMVTTRRNANTGDGNQPECSNHNHQGNPPPPPPPPPPPPPDTNAILTQILAQQANMMTAFLHHLQNPPQQNAPPPPPQHSKLAEFLRIRPPTFSSSNNPVDALDWLHAVGKKLGTVQCSDEEKVIFAAHQLQGPASLWWDHFQATQPEGQPITWARFTAAFRRTHVPAGVVALKKREFRELKQGNRSVMEYLHEFNNLARYAPEDVREDEEKQEKFLAGMDPELSVRLISGDYPDFQRLVDKSIRLEAKHKELESHKRRLANFRNQQGANQRVRYTHPYPGGSSSQQQQQQQQPRSAPRPQFVVRVPQPQQQQNQQGTRAPRPPTPTVQPGQGRRDAQGQQRLCFNCFEPGHFADKCPKPRRQQGQAPPRSNNGGRDVIRGRVNHVTAEDVLTTPDVIVGTFLVHSIPATILFDSGASHSFISVPFVGRNQLGVERLRNPLLITTPGGVMTAKYYSPAVPIEIQGIPFPSDLILLDTKNLDVILGMNWLAQFQGVVDCARRTVTLYRGPEQPVVFFAPPTSVRSSELHQIELSEIPIVREFGDVFPEELPGMPPKREIEFRIDLAPGTTPLYKRPYRMAANELAEVKKQLEELKEKGYIRPSTSPWGAPVIFVEKKDKTKRMCVDYRALNEVTIKNKYPLPRIDDLFDQLKGATVFSKIDLRSGYHQLRIREEDIPKTAFTTRYGLYEFTVMSFGLTNAPAFFMNLMNKVFMEYLDKFVVVFIDDILIYSQSEEDHQHHLRLVLEKLREHQLYAKLSKCEFWLSEVKFLGHVISAKGVAVDPETVIAVTDWKQPKTVTQIRSFLGLAGYYRRFIENFSKIARPMTQLLKKEEKFVWSPQCEKAFQTLKEKLVSSPVLILPDTRKDFMVYCDASRQGLGCVLMQDGHVVAYALRQLRPYEGNYPTHDWELAAVVHALKIWRHYLIGNRCEIYTDHKSLKYIFTQSDLNLRQRRWLELIKDYDVGIHYHPSKANVVADALSRKSHCNTLNVRGIPPELSQQMEALNLSIVGHGVLAALEAKPTLLDQIREAQKNDPDMHGLLKNMKQGKAAGFTEDEHGTLWNGNRVCVPDDRELKQLILQEAHESPYSIHPGSTKMYLDLKEKYWWVSMKREIAEFVALCDVCQRVKAEHQRPAGLLQPLQVPEWKWDEIGMDFITGLPKTQGGYDSIWVVVDRLTKVARFIPVKTTYGGNKLAELYFARIVSLHGVPKRIVSDRGSQFTSHFWKKLQEELGTRLNFSTAYHPQTDGQTERLNQILEDMLHACVLDFGKTWDKSLPYAEFSYNNSYQASIQMAPYEALYGRKCRTPLLWDQVGESQVFGTDILREAEAKVRIIRDNLKVAQSRQKSYADNRRRDLEFAVDDFVYFRVTPLRGVHRFQTKGKLAPRYVGPFRIVARRGEVAYQLELPASLGNVHDVFHVSQLKKCLRVPSEQADSEQIEVREDLTYVERPVKILDTMERRTRNRVIRFCKVQWSNHAEEEATWEREDELKAAHPDLFASSSESRGRDSV

SEQ ID NO: 19143 - protein, 1767 aa, Oryza sativa
  Clone ID: TF_OSC401058j.C1.p35.fg
MDEVGGRWTFSRANEGYTSCGPMAGSVTRRGLDMTGFVLELRGMCVVLGYPHGEDYQARPLPDQEGDDAEPHAGWEVTAVILSGSPERTSLAVTAGGDSFPAACQNAALLAIGTLHQRYPDELQHSPYRYHPRRGGARDYATFRDASSEDDATIVHLARMVEAYDAARIDFHQMVRRGMVENNMKILELRQENLQLKKDLDAVEAQLHQLKVAQGEICRPKRRRVCRSQKITARKSTSRPELVRQSLAWTCFVETPRAEPAPVMVTTRRNAATGDGNQPESSNHNHQGNPPPPPPPPPPPPPDTNAILTQILAQQANMMNAFLHHLQNPPQQNAPPPPPQHSKLAEFLRIRPPTFSSSNNPVDALDWLHAVGKKLDTVQCSDEEKVVFAAHQLQGPASLWWDHFQATQPEGQPITWARFTAAFRRTHVPAGVVALKKREFRELKQGNRSVMEYLHEFNNLARYAPEDVREDEEKQEKFLAGMDPELSVRLVSGDYPDFQRLVDKSIRLEAKHKELESHKRRLANFRNQQGANQRVRYTNPYPGGSSSQQQQQQPRPAPRPQFVVRVPQPQQQQNQQGTRAPRPPTPAVQPVQGRRDAQGQQRLCFNCFEPGHFADKCPKPRRQQGQAPPRSNNGGKDVIRGRVNHVTAEDVLTTPDVIVGTFLVHSIPATILFDSGASHSFISVPFVGRNQLGVERLRNPLLITTPGGVMTAKFYSPAVPIEIQGIPFPSDLILLDTKNLDVILGMNWLAQFQGVVDCARRTVTLYRGPEQPVVFFAPPTSVRSSELHQIELSEIPIVREFGDVFPEELPGMPPKREIEFRIDLAPGTTPLHKRPYRMAANELAEVKKQLEELKEKGYIRPSTSPWGAPVIFVEKKDKTKRMCVDYRALNEVTIKNKYPLPRIDDLFDQLKGATVFSKIDLRSGYHQLRIREEDIPKTAFTTRYGLYEFTVMSFGLTNAPAFFMNLMNKVFMEYLDKFVVVFIDDILIYSQSEEDHQHHLRLVLGKLREHQLYAKLSKCEFWLSEVKFLGHVISAKGVAVDPETVTAVTDWKQPKTVTQVRSFLGLAGYYRRFIENFSKIARPMTQLLKKEEKFVWSPQCEKAFQTLKEKLVSSPVLILPDTRKDFMVYCDASRQGLGCVLMQDGHVVAYASRQLRPHEGNYPTHDLELAAVVHALKIWRHYLIGNRCEIYTDHKSLKYIFTQSDLNLRQRRWLELIKDYDVGIHYHPGKANVVADALSRKGHCNTLNVRGIPPELSQQMEALNLNIVGRGFLAALEAKPTLLDQIREAQKNDPDMHGLLKNMKQGKAAGFTEDEHGTLWNGNRVCVPDNRELKQLILQEAHESPYSIHPGSTKMYLDLKEKYWWVSMKREIAEFVALCDVCQRVKAEHQRPAGLLQPLQVPEWKWDEIGMDFITGLPKTQGGYDSIWVVVDRLTKVARFILVKTTYGGNKLAELYFARIVSLHGVPKKIVSDRGSQFTSHFWKKLQEELGTRLNFSTAYHPQTDGQTERLNQILEDMLRACVLDFGKTWDKSLPYAEFSYNNSYQSSIQMAPYEALYGRKCRTPLLWDQVGESQVFGTDILREAEAKVRIIRDNLKVAQSRQKSYADNRRRDLEFAVDDFVYLRVTPLRGVHRFQTKGKLAPRYVGPFRIVARRGEVAYQLELPASLGNVHDVFHVSQLKKCLRVPSEQTDSEQIEVREDLTYVERPVKILDTMERRTRNRVIRFCKVQWSNHAEEEATWEREDELKAAHPDLFASSSESRGRDSV

SEQ ID NO: 19144 - protein, 1796 aa, Oryza sativa
  Clone ID: TF_OSC401058j.C1.p48.fg
MDEVGGRWTFSRANEGYTSCGPMAGSVTRRGLDMTGFVLELRGMCVVLGYPHGVDYQARPLPEQEGDDTEPRAGWEVTAVILAGSSERTSLTVTAGGDSFPAACQNAALLAIGTLHQRYPDELQHSPYRYHPRRGGARDYATFWDASSEDDATIVHLARMVEAYDAARIDFHQMVRRGMVENNMKILELRQENLQLKKDLDAVEAQLHQLKIAQGEICRPKRRRVCRSQKITARKSTSRPELVRQSLAWTCFVETPRAEPAPVVPQEGEASGVGSSEALSLLAGSVWGFQMVTTRRNAVTGDGNQPEGSNPNHQGNPPPPPPPPPPPPPDTNAILTQILAQQANMMNAFLHHLQNPPQQNAPPPPPQHSKLAEFLRIRPPTFSSSNNPVDALDWLHAVGKKLDTVQCSDEEKVVFAAHQLQGPASLWWDHFQATQPKGQPITWARFTAAFRRTHVPAGVVALKKREFRELKQGNRSVMEYLHEFNNLARYAPEDVREDEEKQEKFLAGMDPELSVRLVSGDYPDFQRLVDKSICLEAKHKELESHKRRLANFRNQQGANQRVRYTNPYPGGSSSQQQQQQQQPRPAPRPQFVVRVPQPQQQQNQQGTRAPRPPTPTVQPGQGRRDAQGQQRLCFNCFEPGHFADKCPKPRRQQGQAPPRSNNGGKDVIRGRVNHVTAEDVLTTPDVIVGTFLVHSIPATILFDSGASHSFISVPFVGKNQLGVERLRNPLLITTPGGVMTAKYYSPAVPIEIQGIPFPSDLILLDTKNLDVILGMNWLAQFQGVVDCARRTVTLYRGPEQPVVFFAPPTSVRSSELHQIELSEIPIVREFGDVFPEELPGMPPKREIEFRIDLAPGTTPLHKRPYRMAANELAEVKKQLEELKEKGYIRPSTSPWGAPVIFVEKKDKTKRMCVDYRALNEVTIKNKYPLPRIDDLFDQLKGATVFSKIDLRSGYHQLRIREEDIPKTAFTTRYGLYEFTVMSFGLTNAPAFFMNLMNKVFMEYLDKFVVVFIDDILIYSQSEEDHQHHLRLVLGKLREHQLYAKLSKCEFWLSEVKFLGHVISAKGVAVDPETVTAVTDWKQPKTVTQVRSFLGLAGYYRRFIENFSKIARPMTQLLKKEEKFVWSPQCEKAFQTLKEKLVSSPVLILPDTRKDFMVYCDASRQGLGCVLMQDGHVVAYASRQLRPHEGNYPTHDLELAAVVHALKIWRHYLIGNRCEIYTDHKSLKYIFTQSDLNLRQRRWLELIKDYDVGIHYHPGKANVVADALSRKSHCNTLNVRGIPPELNQQMEALNLSIVGRGFLAALEAKPTLLDQIREAQKNDPDMHGLLKNMKQGKAAGFAEDEHGTLWNGNRVCVPDNRELKQLILQEAHESPYSIHPGSTKMYLDLKEKYWWVSMKREIAEFVALCDVCQRVKAEHQRPAGLLQPLQVPEWKWDEIGMDFITGLPKTQGGYDSIWVVVDRLTKVARFIPVKTTYGGNKLAELYFARIVSLHGVPKKIVSDRGSQFTSHFWKKLQEELGTRLNFSTAYHPQTDGQTERLNQILEDMLRACVLDFGKTWDKSLPYAEFSYNNSYQASIQMAPYEALYGRKCRTPLLWDQVGESQVFGTDILREAEAKVRIIRDNLKVAQSRQKSYADNRRRNLEFAVDDFVYLRVTPLRGVHRFQTKGKLAPRYVGPFRIIARRGEVAYQLELPASLGNVHDVFHVSQLKKCLRVPSEQTDSEQIKVREDLTYVERPVKILDTMERRTRNRVIRFCKVQWSNHAEEEATWEREDELKAAHPDLFASSSESRGRDSV

SEQ ID NO: 19145 - protein, 1503 aa, Oryza sativa
  Clone ID: TF_OSC401068j.C1.p3.gm
MVTPMVTTRRNVNTGEGNQPEGSNPNHQGNPPPPPPPDTNAILTQILAQQANMMNAFLHHLQNPPQQNAPPPPPQHSKLAEFLRIRPPTFSSSNNPVDALDWLHAVGKKLDTVQCSDEEKVIFAAHQLQGPASLWWDHFQATQPEGQPITWARFTAAFRRTHVPAGVVALKKKEFRELKQGNRSVMEYLHEFNNLARYAPEDVREDEEKQEKFLAGMDPELSVRLVSGDYPDFQRLVDKSIRLEAKHKELELHKRRLANFRNQQGANQRVRYTNPYPGGSSSQQQQQQQPRPAPRPQFVVRVPQPQQQQNQQGTRAPRPPTPTVQPVQGRRDASGPQRLCFNCFEPGHFADKCPKPRRQQGQAPPRSNNGGKDVSRGRVNHVTAEDVLTTPDVIVEKKDKTKRMCVDYRALNEVTIKNKYPLPRIDDLFDQLKGATVFSKIDLRSGYHQLRIREEDIPKTAFTTRYGLYEFTVMSFGLTNAPAFFMNLMNKVFMEYLDKFVVVFIDDILIYSQSEEDHQHHLRLVLGKLREHQLYAKLSKCEFWLSEVKFLGHVISAKGVAVDPETVTAVTDWKQPKTVTQIRSFLGLAGYYRRFIENFSKIARPMTQLLKKEEKFGWSPQCEKAFQTLKEKLVSSPVLILPDTRKDFMVYCDASRQGLGCVLMQDGHVVAYASRQLRPHEGNYPTHDLELAAVSDLNLRQRRWLELIKDYDVGIHYHPGKANVVADALSRKSHCNTLNVRGIPPELNQQMEALNLSIVGRGFLAALEAKPTLLDQIREAQKNDPDMHGLLKNMKQGKAAGFTEDEHGTLWNGKREKYWWVSMKREIAEFVALCDVYQRVKAEHQRPAGLLQPLQVPEWKWDEIGMDFITGLPKTQGGYDSIWVIVDRLTKVARFIPVKTTYGGNKLAELYFARIVSLHGIPKKIVSDRGSQFTSHFWKKLQEELGTRLNFSTAYHPQTDGQTERLNQILEDMLRACVLDFGKTWDKSLPYAEFSYNNSYQASIQMAPYEALYGRKCRTPLLWDQVGESQVFGTDILREAETKVRIIRDNLKVAQSRQKSYADNRRRDLEFAVDDFVYLRVTPLRGVHRFQTKGKLAPRYVGPFRITARRGEVAYQLELPASLGNVHDVFHVSQLKKCLRVPSEQADSERIEVREDLTYVEKPVKILDTMERRTRNRVIRFCKAGPPAALADGWDPPVIALLAPRPPPRPCPSAAAAANPAAPVRPACNQEGGITPRNPLPRFPLFPLSLSLGFARNQSRIHRRRNQWRPNPPRAIPPSPAALSFPRRYLNVARAPLFRFRRSPLALAVGIVLAPCSSLSAVAAELRCAAVVAPVLLPTRRPLPRHRRIAVDLVRASVSLADCRSAVVIVIPNRAAAFFRSVRRFRRLRCLGVSRGPSPSFPPSLLSLGCRSAAPLVAGSDHRGAGAPLPSAVPARPPSGAPSRLPSGPGRQPPAPAGAADARDPRRRPPPAACARSTVDRAADAWAPLPVDPVRAPAPRLTQ

SEQ ID NO: 19146 - protein, 1804 aa, Oryza sativa
  Clone ID: TF_OSC401143j.C1.p10.fg
MDEVGRRWTFSRANEGYTSCGPMAGSVTRRGLDMTGFVLELRGMCVVLGYPHGVDYQARPLPEQEGEDAEPHAGWEVTAVILSGSPERTSLAVTAGGDSFPAACQNAALLAIGTLHQRYPDELQHSPYRYHARRGGARDYATFRDASSEDDATVVHLARMVEAYDAARIDFHQMVRRGMVENNMKILELRQENLQLKKDLDAVEAQLHQLKIAQGEDSRPKRRRVCRSQKITARKSTSRPELVRQSLAWTCFVETPRAEPAPVVPQEGEASGVGSSEGALLLTFRPGPSQRSPSLFAGSVRGFQMVTTRRNVNTGEGNQPEGSNPNHQGNPPPPPPPDTNAILTQILAQQANMMNAFLHHLQNPPQQNAPPPPPQHSKLAEFLRIRPPTFSSSNNPVDALDWLHAVGKKLDTVQCSDEEKVIFAAHQLQGPASLWWDHFQATQPEGQPITWARFTAAFRRTHVPAGVVALKKREFRELKQGNRSVMEYLHEFNNLARYAPEDVREDEEKQEKFLAGMDPELSVRLVSGDYPDSQRLVDKSIRLEAKHKELESHKRRLANFRNQQGANQRVRYTNPYPGGSSSQQQQQQQQPRSAPRPQFVVRVPQQQQQQNQQGTRAPRPPTPTVQPVQGRRDAQGQQRLCFNCFEPGHFADKCPKPRRQQGQAPPRSNNGGKDVIRGRVNHVTAEDVLTTPDVIVGTFLVHSIPATILFDSGASHSFISVPFVGRNQLGVERLRNPLLITTPGGVMTAKYYSPAVPIEIQGIPFPSDLILLDTKNLDVILGMNWLAQFQGVVDCARRTVTLYRGPEQPVVFFAPPTSVRSSELHQIGLSEIPIVREFGDVFPEELPGMPPKREIEFRIDLAPGTTPLHKRPYRMAANELAEVKTQLEELKEKGYIRPSTSPWGAPVIFVEKKDKTKRMCVDYRALNEVTIKNKYPLPRIDDLFDQLKGATVFSKIDLRSGYHQLRIREEDIPKTAFTTRYGLYEFTVMSFGLTNAPAFFMNLMNKVFMEYLDKFVVVFIDDILIYSQSEEDHQHHLRLVLGKLREHQLYAKLSKCEFWLSEVKFLGHVISAKGVAVDPETVTAVTDWKQPKTVTQIRSFLGLAGYYRRFIENFSKIARPMTQLLKKEEKFVWSPQCEKAFQTLKEKLVSSPVLILPDTRKDFMVYCDASRQGLGCVLMQDGHVVAYASRQLRPHEGNYPTHDLELAAVVHALKIWRHYLIGNRCEIYTDHKSLKYIFTQSDLNLRQRRWLELIKDYDVGIHYHPGKANVVADALSRKSHCNTLNVRGIPPELNQQMEALNLNIVGRGFLAALEAQPTLLDQIREAQKNDPDMHGLLKNMKQGKAAGFTEDEHGTLWNGKRVCVPDSRELKQLILQEAHESPYSIHPGSTKMYLDLKEKYWWVSMKREIAEFVALCDVCQRVKAEHQRPAGLLQPLQVPEWKWDEIGMDFITGLPKTQGGYDSIWVIVDRLTKVARFIPVKTTYGGNKLAELYFARIVSLHGVPKKIVSDRGSQFTSHFWKKLQEELGTRLNFSTAYHPQTDGQTERLNQILEDMLRACVLDFGKTWDKSLPYAEFSYNNSYQASIQMAPYEALYGRKCRTPLLWDQVGESQVFGTDILREAEAKVRIIRDNLKVAQSRQKSYADNRRRDLEFAVDDFVYLRVTPLRGVHRFQTKGKLAPRYVGPFRITARRGEVAYQLELPASLGNVHDVFHVSQLKKCLRVPSEQADSEQIEVREDLTYVEKPVKILDAMERRTRNRVIRFCKVQWSNHAEEEATWEREDELKAAHPDLFASSSESRGRDSV

SEQ ID NO: 19147 - protein, 1344 aa, Oryza sativa
  Clone ID: TF_OSC401143j.C1.p3.fg
MSWHRAGVLLLGAQSCLPVPEVPAVGGIGSVLLSMARMGWKLCHVFRPYTVVMAGSISRRGLDLTGFVLELRGMCVVLGYPHGVDYQGRPLPEQEGDDAEPHAAWEVTAVILTGSPERTSLAVTAGGDSFPAACQNAALLAIGTLHQRYPDELQHSPYRYHPRRGGARDFATFRDASSEDDATIMHLARMVEAYDAARIDFHQMVRRGMVENNMKILELRQENLQLKKELDAVEAQLHQLKIAQGEVCRPKRRRVCRSQKITARKSTSRPELVRQSLAWTCFVETPRAEPAPVVPQEGEASGVGSTEDALLLTFRPGPSQRRSANTGDGNQPEGSNHNNHGSPPPPPPPPPPPPPDTNAILTQILAQQANMMTAFLHHLQNPPQQNAPPPPPQHCKLAEFLRIRPPTFSSSNNPVDALDWLHAVGKKLDTVQCSDEEKVIFAAHQLQGPASLWWDHFQATQPEGQPITWARFTAAFRRTHVPAGVVALKKREFRELKQGNRSVMEYLHEFNNLARYALEDVREDEEKQEKFLAGMDPELSVRLVSGDYPDFQRLVDKSIRLEAKHKELESHKRRLANVRNQQGANQRVRYTNPYPGGSSSQQQQQQQPRSAPRPQFVVRVPQPQQQQSQQGTRVPRPPTPAAQSGQGRRDASGPQRLCFNCFEPGHFADKCPKPRRQQGQAPPRSNNGGKDVIRGRVNHVTAEDVLTTPDVIVGTFLIHSIPATILFDSGASHSFISVPFVGRNQLGVERLRNPLLITTPGGVMTAKYYSPAVPIEIQGIPFPSDLILLDTKNLDVILGMNWMAQFQGVVDCARRTVTLYRGPEQSVVFFAPPTSVSSSELHQIGLSEIPIVREFGDVFPEELPGMPPKREIEFRIDLAPGTTPLYKRPYRMAANELAEVKKQLEELKEKGALNEVTIKNKYPLPRIDDLFDQLKGATVFSKIDLRSGYHQLRIREEDIPKTAFTTRYGLYEFTVMSFGLTNAPAFFMNLMNKVFMEYLDKFVVVFIDDILVYSQSEEDHQHHLRLVLGKLREHQLYAKLSKCEFWLSEVKFLGHVISAKGVAVDPETVTAVTDWKQPKTVTQVRSFLGFAGYYRRFIENFSKIARPMTQLLKKEEKFVWSPQCEKAFQTLKEKLVSSPVLTLPDTRKDFMVYCDASRQGLGCVLMQDGHVVAYASRQLRPHEGNYPTHDLELAAVVHALKIWRHYLIGNRSEIYTDHKSLKYIFTQSDLNLRQRRWLELIKDYDVGIHYHPGKANVVADALSRKSHCNTLNVRGIPPELNQQMEALNLSIVGRGFLVALEAKPTLLDQIREAQCRDRENCLFPNASVLIPVPGKAGVHHTSMI

SEQ ID NO: 19148 - protein, 1728 aa, Oryza sativa
  Clone ID: TF_OSC401235j.C1.p53.fg
MSWHRAGVLLLGAQSCLPVPGVTAVGGIGSVLLSIARMGWKLCHVFRLYTVVMAGSVSRRGLDMTGFVLELRGMCVVLGYPHGVDYQARPLPEQEGDDAEPHAAWEVTAVILTGSPERTSLAVTAGGDSFPAACQSAALLAIGTLHQRYPDELQHSPYRYHPRRGGARDYATFRDASSEDDATIVHLACMVEAYDAARIDFHQMVRRGMVENNMKILELRQENLQLKKDLDAVEAQLHQLKIAQGEVCRPKRRRVCRSQKITARKSTSRPELVRQSLAWTCFMETPRAEPAPMVPQEGEASGVGSTEDALLLTFRPGPSQRRSVNTGDGNQPEGSNHNNHGSPPPPPPPPPPPPPDTNAILTQILAQQANMMTAFLHHLQNPLQQNAPPPPPQHSKLAEFLRIRPPTFSSSNNPVDALDWLHAVGKKLDTVQCSDEEKVIFAAHQLQGPASLWWYHFQATQPEGQPITWARFTAAFRRTHVPAGVVALKKREFRELKQGNLSVMEMCGKMRRSKRSSGMDPELSVRLVSGDYPDFQRLVDKSIRLEAKHKELESHKRRLANFRNQQGANQRVRYTNPYPGGSSSQQQQQQQPRSAPRPQFVVRVPQPQQQQSQQGTRAPRPSTPTVQPGQGRRDAQGPQRLCFNCFEPGHFADKCPKPRRQQGQAPPRSNNGGKDVIRGRVNHVTAEDVLTTPDVIVGTFLIHSIPATILFDSGASHSFISVPFVGRNQLGVERLRNPLLITTPGGVMTAKYYSPAVPIEIQGIPFPSDLILLDTKNLDVILGMNWLAQFQGVVDCARRTVTLYRGPEQPVVFFAPPTSVSSSELHQIGLSEIPIVREFGDVFPEELPGMPPKREIEFRIDLAPGTTPLYKRPYRMAANELAEVKKQLEELKEKGYIRPSTSPWGAPVIFVEKKDKTKRMCVDYRALNEVTIKNKYPLPRIDDLFDQLKGATVFSKIDLRSGYHQLRIREEDIPKTAFTTRYGLYEFTVMSFGLTNAPAFFMNLMNKVFMEYLDKFVVVFIDDILVYSQTEEDHQHHLRLVLGKLREHQLYAKLSKCEFWLSEVKFLGHVISAKGVAVDPETVTAVTDWRQPKTVTQIRSFLGLAGYYRRFIENFSKIARPMTQLLKKEEKFVWSPQCEKAFQTLKEKLVSSPVLILPDTRKDFMVYCDAARQGLGCVLMQDGHVVAYASRQLRPHEGNYPTHDLELAAVVHALKIWRHYLIGNCCEIYTDHKSLKYIFTQSDLNLRQRRWLELIKDYDVGIHYHPGKANVVADALSRKSHCNTLNVRGIPLELNQQMEALNLSIVGRGFLAALEAKPTLLDQIREAQKNDPDMRGLLKNMKQGKATGFTEDEHGTLWNGNRVCVPDNRELKQLILQEAHESPYSIHPGSTKMYLDLKKKYWWVSMKREIAEFVALCDVCQRVKAEHQRPAGLLQPLQVPEWKWDEIGMDFITGLPKTQGGYDSIWVVVDRLTKVARFIPVKTTYGGNKLAELYFARIVSLHGVPKKIVSDRGSQFTSHFWKKLQEELGTRLNFSTAYHPQTDGQTERLNQILEDMLRACVLDFGKTWDKSLPYAEFSYNNSYQASIQMAPYEALFQTKGKLAPRFVGPFRIIARRGEVAYQLELPASLGNVHDVFHVSQLKKCLRVPSEQADSEQIEVREDLTYVERPVKILDTMERRTRNRVIRFCKVQWSNHAEEEATWEREDELKAAHPDLFASSSESRGRDSV

SEQ ID NO: 19149 - protein, 1784 aa, Oryza sativa
  Clone ID: TF_OSC401235j.C1.p71.fg
MDEVGGRWTFSRANEGYTSCGPMAGSVTRRGLDMTGFVLELRGMCVVLGYPHGVDYQARPLPEQEGEDAEPHAGWEVTAVILSGSPERTSLAVTAGGDSFPAACQNAALLAIGTLHQRYPDELQHSPYRYHPRRGGARDHATFRDASSEDDATVVHLARMVEAYDAARIDFHQMVRRGMVENNMKILELRQENLQLKKDLDALEAQLHQLKVAQGEDSRPKRRRVCRSQKITARKSTSRPELVRQSLAWTCFVETPRAEPAPVVPQEGEASGVGSTEDALLLTFRPGPSQRRNVSTGEGNQPEGSNPNPQGNPPPPPPPDTNAILTQILAQQANLMTAFLHHLQNPPQQNAPPLPPQHSKLAEFLRIRPPTFSSSNNPVDALDWLHAVGKKLDTVQCSDEEKVTFAAHQLQGPASLWWDHFQATQPEGQPITWARFTAAFRRTHVPAGVVALKKREFRELKQGNRSVMEYLHEFNNLARYAPEDVREDEEKQEKFLAGMDPELSVRLVSGDYPDFQRLVDKSIRLEAKHKELESHKRRLANFRNQQGANQRVRYTNPYPGGSSSQQQQQQPRSAPRPQFVVRVPQPQQQQNQQGTRAPRPPTPAVQPVQGRRDASGPQRLCFNCFEPGHFADKCPKPRRQQGQAPPRSNNGGKDVIRGRVNHVAAEDVLTTPDVIVGTFLIHSIPATILFDSGASHSFISVPFVGKNQLGVERLRNPLLITTPGGVMTAKYYSPAVPIEIQGIPFPSDLILLDTKNLDVILGMNWLAQFQGVVDCARRTVTLYRGPEQPVVFFAPPTSVRSSELHQIELSEIPVVREFGDVFPEELPGMPPKREIEFRIDLAPGTTPLHKRPYRMAANELAEVKKQLEELKEKGYIRPSTSPWGAPVIFVEKKDKTKRMCVDYRALNEVTIKNKYPLPRIDDLFDQLKGATVFSKIDLRSGYHQLRIREEDIPKTAFTTRYGLYEFTVMSFGLTNAPAFFMNLMNKVFMEYLDKFVVVFIDDILIYSQSEEDHQHHLRLVLGKLREHQLYAKLSKCEFWLSEVKFLGHVISAKGVAVDPETVTAVTDWKQPKTVTQVRSFLGLAGYYRRFIENFSKIARPMTQLLKKEEKFVWSPQCEKAFQTLKEKLVSSPVLILPDTRKDFMVYCDASRQGLGCVLMQDGHVVAYASRQLRPHEGNYPTHDLELAAVVHALKIWRHYLIGNRCEIYTDHKSLKYIFTQSDLNLRQRRWLELIKDYDVGIHYHPGKANVVADALSRKSHCNTLNARDIPPELNQQMEALNLSIVGRGFLAALEAKPTLLDQIREAQKNDPDMHGLLKNMKQGKAAGFTEDEHGTLWNGNRVCVPADKELKQLILQEAHESPYSIHPGSTKMYLDLKGKYWWVSMKREIAEFVALCDVCQRVKAEHQRPAGLLQPLQVPEWKWDEIGMDFITGLPKTQGGYDSIWVIVDRLTKVARFIPVKTTYGGNKLAELYFARIVSLHGIPKKIVSDRGSQFTSHFWKKLQEELGTRLNFSTAYHPQTDGQTERLNQILEDMLRACVLDFGKTWDKSLPYAEFSYNNSYQASIQMAPYEALYGRKCRTPLLWDQVGESQVFGTDILREAEAKVRIIRDNLKVAQSRQKSYADNRRRDLEFAVDDFVYLRVTPLRGVHRFQTKGKLAPRYVGPFRVIARRGEVAYQLELPASLGNVHDVFHVSQLKKCLRVPSEQADSEQIEVREDLTYVERPVKILDTMERRTRNRVIRFCKVQWSNHAEEEATWEREDELKAAHPDLFASSSESRGRDSV

SEQ ID NO: 19150 - protein, 1684 aa, Oryza sativa
  Clone ID: TF_OSC401237j.C1.p35.fg
MDISRANEGYTSCGPVVEMSWHRAGVLLLGAQSCLPVPEIPAVGGIGSVLLSMARMGWKLCHVFRLYTVVMAGSINRRGLDLTGFVLELRGMCVVLGYPHGVDYQGRQLPEQEGDDAEPHAAWEVTAVILTGSPERTSLAVTAGGDSFSAACQNAALLAIGTLHQRYPDELQHSPYRYHPRRGGARDHATFRDASSEDDATIMHLARMVEAYDAARIDFHQMVRRGMVENSMKILELRQENLQLKKDLDAVEAQLHQLKIAQGEVCRPKRRRVCRSQKITARKSTSRPELVRQSLAWTCFVETPRAEPAPVVPQEGEASGVGSTEDALLLTFRPGPSQRRSANTGDGNQPEGSNHNNHGSPPPPPPPPPPPPLDTNAILTQILAQQANMMAAFLHHIQNPPQHNAPPPPPQHSKLAEFLRIRPPTFSSSNNPVDALDWLHAVGKKLDTVQCSDEEKVVFAAHQLQGPASLWWDHFQATQPEGQPITWARFTAAFRRTHVPAGVMALKKREFRELKQGNRSVMEYLHEFNNLARYAPEDVREDEEKQEKFLAGMDPELSVRLVSGGSSSQQQQQQQPRSAPRPQFVVRIPQPQQQQSQQGTRAPRPPTTAAQSGQGRRDVQGPQRLCFNCFEPGHFADKCPKPRRQQGQAPPRSNNGGKDVIRGRVNHVTAEDVLTTPDVIVGTFLIHSIPATILFDSGASHSFISVPFVGRNQLGVERLRNPPLITTPGGVMTAKYYSPAVPIEIQGIPFPSDLILLDTKNLDVILGMNWLAQFQGVVDCARRTVTLYRGPEQPVVFFAPPTSVSSLELHQIGLSEIPIVKEFGDVFPEELPGMPPKREIEFRIDLAPGTTPLYKRPYRMAANELAEVKKQLEELKEKGYIRPSTSPWGAPVIFVEKKDKTKRMCVDYRALNEVTIKNKYPLPRIDDLFNQLKGATVFSKIDLRSGYHQLRIREEDIPKTAFTTRYGLYEFTVMSFGLTNAPAFFMNLMNKVFMEYLDKFVVVFIDDIMVYSQSEEDHQHHLRLVLGKLREHQLYAKLSKCEFWLSEVKFLGHVISAKGVAVDPETVTAVTDWKQPKTVTQIRSFLGLAGYYRRFIENFSKIARPMTQLLKKEEKFVWSPQCEKAFQTLKEKLEGHVVAYASRQLRPHEGNYPTHDLELAAVVHALKIWRHYLIGNRCEIYTDHKSLKYIFTQSDLNLRQRRWLELIKDYDVGIHYHPGKANVVADALSRKSHCNTLVVRGIPPELNQQMEALNLSIVSRGFLATLEAKPSLLDQIREAQKNDPDMRGLLKNMKQGKAAGFTEDEHGTLWNGNRVCVPDVRELKQLILQEAHESPYSIHPGSTKMYLDLKEKYWWVSMKREIAEFVALCDVCQRVKAEHQRPAGLLQPLQVPEWKWDEIGMDFITGLPKTQGGYDSIWVVVDRLTKVARFIPVKTTYGGNKLAELYFARIVSLHGVPKKIVSDRGSQFTSHFWKKLQEELGTRLNFSTAYHPQTDGQTERLNQILEDMLRACVLDFGKTWDKSLTYAEFSYNNSYQASIQMAPYEALYGRKCRTPLLWDQVGESQVFGTDILREAEAKVRTIRDNLKVAQSRQKSYADNRRRDLEFAVDDFVYLRVTPLRGVHRFQTKGKLAPRFVGPFRIIARRGEVAYQLELPASLGNVHDVFHVSQLKKCLRVPSEQADSE

SEQ ID NO: 19151 - protein, 1783 aa, Oryza sativa
  Clone ID: TF_OSC401303j.C1.p1.fg
MDEVGGRWTFSRANEGYTSCGPMAGSVTRRGLHMTGFVLELRGMCVVLGYPHGVDYQARPLPDQEGEDAEPHAGWEVTAVILSGSPERTSLAVTAGGDSFPAACQNAALLAIGTLHQRYPDELQHSPYRYHPRRGGARDYATFRDASSEDDATVVHLARMVEAYDAARIDFHQMVRRGMVENNMKILELRQENLQLKKDLDALEAQLHQLKIAQGEICRPKRRRVCRSQKITARKSTSRPELVRQSLAWTCFVETPRAEPAPVVPQEGEASGVGSSEGALLLTFRPGPSQRSPSLFAGSVWGFQMVTTRRNVNTGEGNQPEGSNPNPQGNPPPPPPPDTNAILTQILAQQANMMNAFLHHLQNPPQQNAPPPPPQHSKLAEFLRIRPPTFSSSNNPVDALDWLHAVGKKLDTVQCSDEEKVIFAAHQLQGPASLWWDHFQATQPEGQPITWARFTAAFRRTHVPAGVVALKKREFRELKQGNRSVMEYLHEFNNLARYAPEDVREDEEKQEKFLAGMDPELSVRLVSGDYPDFQRLVDKSIRLEAKHKELESHKRRLANFRNQQGANQRVRYTNPYPGGSSSQQQQQQQNQQGTRAPRPPTPTVQPVQGRRDASGPQRLCFNCFEPGHFADKCPKPRRQQGQAPPRSNNGGKDVIRGRVNHVTAEDVLTTPDVIVGTFPVHSIPATILFDSGASHSFISVPFVEKNQLGVERLRNPLLITTPGGVMTAKYYSPAVPIEIQGIPFPSDLILLDTKNLDVILGMNWLAQFQGVVDCARRTVTLYRGPEQPVVFFAPPTSVRSSELHQIGLSEIPIVREFGDVFPEELPGMPPKREIEFRIDLAPGTTPLYKRPYRMAANELAEVKKQLEELKEKGYIRPSTSPWGAPVIFVEKKDKTKRMCVDYRALNEVTIKNKYPLPRIDDLFDQLKGATVFSKIDLRSGYHQLRIREEDIPKTAFTTRYGLYEFTVMSFGLTNAPAFFMNLMNKVFMEYLDKFVVVFIDDILIYSQSEEDHQHHLRLVLGKLREHQLYAKLSKCEFWLSEVKFLGHVISAKGVAVDPETVTAVTDWKQPKTVTQIRSFLGLAGYYRRFIENFSKIARPMTQLLKKEEKFVWSPQCEKAFQTLKQKLVSSPVLILPDTRKDFMVYCDASRQGLGCVLMQDGHVVAYASRQLRPHEGNYPTHDLELAAVVHALKIWRHYLIGNRCEIYTDHKSLKYIFTQSDLNLRQRRWLELIKDYDVGIHYHPGKANVVADALSRKSHCNTLNVRGIPPELSQQMEALNLNIVGRGFLAALEAKPTLLDQIREAQKNDPDMHGLLKNMKQGKAAGFTEGEHGTLWNGKRVCVPDSRELKQLILQEAHESPYSIHPGSTKMYLDLKEKYWWVSMKREIAEFVALCDVCQRVKAEHQRPAGLLQPLQVPEWKWDEIGMDFITGLPKTQGGYDSIWVIVDRLTKVARFIPVKTTYGGNKLAELYFARIVSLHGVPKKIVSDRGSQFTSHFWKKLQEELGTRLNFSTAYHPQTDGQTERLNQILEDMLRACVLDFGKTWDKSLPYAEFSYNNSYQASIQMAPYEALYGRKCRTPLLWDQVGESQVFGTDILREAEAKVRIIRDNLKVAQSRQKSYADNRRRDLEFAVDDFVYLRVTPLRGVHRFQTKGKLAPRYVGPFRIIARRGEVAYQLELPASLGNVHDVFHVSQLKKCLRVPSEQANSEQIEVREDLTYVERPVKILDTMERRTRNRVIRFCKVQWSNHAEEEATWEREDELKAAHPDLFASSSESRGRDSV

SEQ ID NO: 19152 - protein, 1807 aa, Oryza sativa
  Clone ID: TF_OSC401317j.C1.p24.fg
MEVDEVGGRWTFSRANEGYTSCGPVVEMSWHRAGVLLLGAQSCLPVSGVPAVGGIGSVLLSIARMGWKLCHVFRLYTVVMAGSVTRRGLDMTGFVLELRGMCVVLGYPHGVDYQARPLPEQEGDDAEPHAAWEVTAVILAGSPERTSLTVTAGGDSFPAACQSAALLAIGTLHQRYPDELQHSPYCYHPRRGGARDHATFRDASSEDDATIVHLARMVEAYDAARIDFHQMVRRGMVENNMKILELRQENLQLKKDLDAVEAQLHQLKIAQGEVCRPKRRRVCRSLKITARKSTSRPELVRQSLAWTCFIETPRAEPAPVMVTTRRNAVTGDGNQPEGSNHNNHGSPPPPPPPPPPPPPDTNAILTQILAQQANMMTAFLHHLQNPPQLNAPPPPPQHSKLAEFLRIRPPTFSSSNNPVDALDWLHAVGKKLDTVQCSDEEKVIFAAHQLQGPASLWWDHFQATQPEGQPITWARFTAAFRRTHVPAGVVALKKREFRELKQGNRSVMEYLHEFNNLARYAPEDVREDEEKQEKFLAGMDPELSVRLVSGDYPDFQRLVDKSIRLEAKHKELESHKCHLENFRNQQGANQRVRYTNPYPGGSSSQQQPQQQQPRSAPRPQFVVRVPQPQQQQNQQGTRAPRPPTPTVQPGQGRRDASGPQRLCFNCFEPGHFADKCPKPRRQQGQAPPRPNNGGKDVIQGRVNHVTAEDVLTTPDVIVGTFLIHSIPATILFDSGASHSFISVPFVGRNQLGVERLRNPLLITTPGEVMTAKYYSPAVPIEIQGIPFPSDLILLDTRNLDVILGMNWLAQFQGVVDCARRTVTLYRGPEQPVVFFAPPTSVNRSELHQIGLSEIPIVREFGDVFPEELPGMPPKREIEFRIDLAPGTTPLYKRPYRMAANELAEVKKQLEELKEKGYIRPSTSPWGAPVIFVEKKDKTKRMCVDYRALNEVTIKNKYPLPRIDDLFDQLKGATVFSKIDLRSGYHQLRIREEDIPKTAFTTRYGLYEFTVMSFGLTNAPAFFMNLMNKVFMEYLDKFVVVFIDDILIYSQSEEDHQHHLRLVLGKLREHQLYAKLSKCEFWLSEVKFLGHVISAKGVAVDPETVTAVTDWKPPKTVTQVRSFLGLAGYYRRFIENFSKIARPMTQLLKKEEKFVWSPQCEKAFQTLKEKLVSSPVLILPDTRKDFMVYCDASRQGLGCVLMQDGHVVAYASRQLRPHEGNYPTHDLELAAVVHALKIWRHYLIGNRCEIYTDHKSLKYIFTQSDLNLRQRRWLELIKDYDVGIHYHPGKANVVADALSQKGHCNTLNVRGIPPELNQQMEALNLSIVSRGFLAALEAKPTLLDQIREAQKNDPDMHGLLKNMKQGKAAGFTEDEHGTLWNGNRVCVPDNRELKQLILQEAHESPYSIHPGSTKMYLDLKEKYWWVSMKREIAEFVALCDVCQRVKAEHQRPAGLLQPLQVPEWKWDEIGMDFITGLPKTQGGYDSIWVVVDRLTKVARFIPVKTTYGGNKLAELYFARIVSLHGVPKKIVSDRGSQFTSHFWKKLQEELGTRLNFSTAYHPQTDGQTERLNQILQDMLRACVLDFGKTWDKSLPYAEFSYNNSYQASIQMAPYEALYGRKCRTPLLWDQVGESQVFGTDILREAEAKVRTIRDNLKVAQSRQKSYADNRRRDLEFAVDDFVYLRVTPLRGVHRFQTKGEARTSLPASLGNVHDVFHVSQLKKCLRVPSEQADSEQIEVREDLTYVERPVKILDTMERRTRNRVIRFCKVQWSNHAEEEATWEREDELKAAYPDLFASSSESRGRDSV

SEQ ID NO: 19153 - protein, 1635 aa, Oryza sativa
  Clone ID: TF_OSC401317j.C1.p25.fg
MSWHRAGVLLLGAQSCLPVPGVPAVGGIGSVLLSMARMGWKLCHVFRLYTVVMAGSINRRGLDLTGFVLELRGMCVVLGYAHGVDYQGRQLPEQEGDDAEPHAAWEVTAVILTGSPERTSLAVTTGGDSFSAACQNAALLAIGTLHQRYPDELQHSPYRYHPRRGGARDYATFRDASSEDDATIMHLARMVEAYDAARIDFHQMLKKDLDAAEAQLHQLKIAQGEVCRPKRRRVCRSQKITARKSTSRPELVRQSLAWTCFVETPRAEPAPMAPQEGEASGVDGDDQEKCCYGEGSHPEGSNHNNQGSPPPPPPPPLPPPPDTNAILTQILAQQANMMAALLHHIQNPPQHNAPPPPPQHSKLAEFLRIRPPTFSSSNNPVDALDWLHAVGKKLDTVQCSDEEKATQPEGQPITWARFTAAFRRTHVPAGVMALKKREFRELKQGNRSVMEYLHEFNNLARYAPEDVREDEEKQKKFLAGMDPELSVCLVSGDYPDFQRLVDKSIRLEAKHKELESHKRRLANFRNQQGANQRIRYTNPYPGGSSSQQQKQQQPRSAPRPQFVVCVPQPQQQQSQQGTRAPRPPTPAAQSGQGRRDVQGPQRLCFNCFEPGHFADKCPKPRRQQGQAPPRSNNGGKDVIRGRVNHVTAEDVLTTPDVIVGTFLIHSIPATILFDSGASHSFISVPFVGRNQLGVERLRNPLLITTPGGVMTAKYYSPAVPIEIQGIPFPSDLILLDTKNLDVILGMNWLAQFQGVVDCARRTVTLYRGPEQPVVFFAPPTSVSSSELHQIGLSEIPIVREFGDVFPEELPGMPPKREIEFWIDLAPGTTPLYKRPYRMAANELAEVKKQLEELKERGYIRPSTSPWGAPVIFVEKKDKTKRMCVDYRALNEVTIKNKYPLPRIDDLFDQLKGATVFSKIDLRSGYHQLRIREEDIPKTAFTTRYGLHEFTVMSFGLTNAPAFFMNLMNKVFMEYLDKFVVVFIDDILVYSQSEEDHQHHLRLVLGKLREHQLYAKLSKFVEERREICVEPAMREGVQEKLVSSPVLILPDTRKDFMVYCDASRQGLGCVLMQEGHVVAYALRQLRPHEGNYPTHDLELAAVVHALKIWRHYLIGNRYEIYTDHKSLKYIFNQSDLNLRQRRWLELIKDYDVGIHYHPGKANVVADALSRKSHCNTLNVRGIPPELNQQMEALNLSIVGRGFLAALEAKPTLLDQIREAQKNDPDMRGLLKNMKQGKAAGFTEDEHGTLWNGNRVCVPDNRELKQLILQEAHESPYSIHPGSTKMYLDLKEKYWWVSMKREIAEFVALCDVCQRVKAEHQRPAGLLQPLQVPEWKWDEIGMDFITGLPKTQGGYDSIWVVVDRLTKVARFIPVKTTYGGNKLAELYFARIVSLHGVPKKIVSDRGSQFTSHFWKKLQEEMDTRLNFSTAYHPQTDGQTERLNQILEDMLRACVLDFGKTWDKSLPYAEFSYNNSYQASIQMAPYEALYGRKCRTPLLWDLVGENQVFGTDILREAEAKVIIARRGEVAYQLDLPASLGNVHDVFDVSQLKKCLRVPSEQADSEQIEVREDLTYVERPVKILDTMERGTRNRVIRFCKVQWSNHAEEEATWEREDELKAAHPDLFASSSESRGRNSV

SEQ ID NO: 19154 - protein, 785 aa, Oryza sativa
  unsure (1)..(785): unsure at all Xaa locations
  Clone ID: TF_OSC401341j.C1.p51.np
MAATGDHRGAPPPAAAPAWPPSGAPSGCRVGPGRQPPAPLGAADAWDPRCRPMAGSINRRGLDLTGFVLELRGMCVVLGYPHGVDYQGKQLPEQEGDDAEPHAAWEVTAVILTGSPERTSLAVTAGGDSFSAACQNAALLAIGTLHQRYPDELQHSPYRYHPRRGGARDYATFRDASSEDDATIMHLARMVEAYDAARMDFHQMVRRGLVENNMKILELRQENLQLKKDLDVVEAQLCQLKIAQGEVCRPKRRRVCRSLKITARKSTSRPELVRQSLAWTCFVETPRAEPAPVVPQEDGVSGVGSTEDALLLTFRPGPLQKRSAATGDGNQPVGSNHNNHGSPPPPPPPPPPPPLDTNTILTQIIAQRANMMAAFLHHIQNPPQHNAPPPPPQHSKLAEFLRIRPPTFSSSNNPVDALDWLHAVGKKLDTVQCNDEEKVIFAAHXLQGPASLWWDHFQATXPEGQPITWARFTASFQRTHVPVGVMALKKREFXELKQGNRSMMEYLHEFNNLARYAPEDVREDEEKQEKFLAGMDPELSVRLVSGDYPDFQRLVDKSIRLEAKHKELESHKRRLANFRNQQGANQRVRYTNPYPGGSSSQQQQQQQPRSTSRPQFVVHVPQPQQQQSQQGTRAPRPPTPAVQPVQGRRDAQGQQRLCFNCFEPGHFADKCPKPRCQQGQAPPRSNNGGKDVIRGRVNHVTAENVLTTPDVIVGTFLIHSIPATIFVTSQNDSKIHPLNYAXNNXNPCESLQQIKSLTSPAPLMAAGSSAPVSPSSGRPLSPPTL

SEQ ID NO: 19155 - protein, 1822 aa, Oryza sativa
  Clone ID: TF_OSC401344j.C1.p11.fg
MSWHRAGVLLLGAQSCLPVPEVPAVGGIGSVLLSMARMGWKLCHVFRLYTVVMAGSVTRRGLDMTGFVLELRGMCVVLGYPHGVDYQARPLPEQEGDDAEPHAGWEVTAVILSGSPERTSLAVTAGGDSFPAACQSAALLAIGTLHQRYPDELQHSPYRYHPRRGGARDYATFRDASSEDDATIVHLARMVEAYDAARIDFHQMVRRGMVENNMKILELRQENLQLKKDLDVVEAQLHQLKIAQGEVCRPKRRRVCRSQKITARKSTSRPELVRQSLAWTCFVETPRAEPAPVVPQEGEASGVGSTEDALLLTFRPGPSQRRSANTGDGNQPEGSNHHHQCSPPPPPPPPPPPPPDTNAILTQILAQQANMMTAFLHHLQNPPQHNAPPPPPQHSKLAEFLRIRPPTFSSSNNPVDALDWLHAVGKKLDTVQCSDEEKVIFAAHQLQGPASLWWDHFQATQPEGQPITWARFTAAFRRTHVPAGVVALKKREFRELKQGNRSVMEYLHEFNNLARYAPEDVREDEEKQEKFLAGMDPELSVRLVSGDYPDFQRLVDKSIRLEAKHKELESHKRRLANFRNQQGANQRVRYTNPYPGGSSSQQQQQQQQPRSAPRPQFVVRVPQPQQQQNQQGTRAPRPPTPTVQPGQGRRDAQGPQRLCFNCFEPGHFADKCPKPRRQQGQAPPRSNNGGKDVIRGRVNHVTAEDVLTTPDVIVGTFLIHSIPATILFDSGASHSFISVPFVGRNQLGVERLRNPLLITTPGGVMTAKYYSPAVPIEIQGIPFSSDLILLDTKNLDVILGMNWLAQFQGVVDCARRTVTLYRGPEQPVVFFAPPTSVSSSELHQIGLSEIPIVREFGDVFPEELPGMPPKREIEFRIDLAPGTTPLYKRPYRMAANELAEVKKQLEELKEKGYIRPSTSPWGAPVIFVEKKDKTKRMCVDYRALNEVTIKNKYPLPRIDDLFDQLKGATVFSKIDLRSGYHQLRIREEDIPKTAFTTRYGLYEFTVMSFGLTNAPAFFMNLMNKVFMEYLDKFVVVFIDDILIYSQSEEDHQYHLRLVLGKLREHQLYAKLSKCEFWLSEVKFLGHVISAKGVAVDPETVTAVTDWKQPKTVTQVRSFLGLAGYYRRFIENFSKIARPMTQLLKKEEKFVWSPQCEKAFKTLKEKLVSSPVLILPDTCKDFMVYCDASRQGLGCVLMQDGHVVAYASRQLRPHEGNYPTHDLELDAVVHALKIWRHYLIGNRCEIYTDHKSLKYIFTQSDLNLRQRRWLELIKDYDVGIHYHPGKANVVADALSRKSHCNTLNVRGIPLELSQQMEALNLSIVGRGFLAALEAKPTLLDQIREAQKNDPDMHGLLKNMKQGKAAGFTEDEHGTLWNGNRVCVPDNRELKQLILQEAHESPYSIHPGSTKMYLDLKEKYWWVSMKREIAEFVALCDVCQRVKAEHQRPAGLLQPLQVPEWKWDEIGMDFITGLRKTQGGYDSIWVVVDRLTKVARFIPVKTTYGGNKLAELYFARIVSLHGVPKKIVSDRGSQFTSHFWKKLQEELGTRLNFSTAYHPQTDGQTERLNQILEDMLRACVLDFGKTWDKSLPYAEFSYNNSYQASIQMAPYEALYGRKCRTPLLWDQVGESQVFGTDILREAEAKVRTIRDNLKVAQSRQKSYADNRRRDLEFAVDDFVYLRVTPLRGVHRFRTKGKLAPRYVGPFRIVARRGEVAYQLELPASLGNVHDVFHVSQLKKCLRVPSEQADSEQIEVREDLTYVERPVKILDTMERRTRNRVIRFCKVQWSNHVEEEATWEREDELKAAHPDLFASSSESRGRDSV

SEQ ID NO: 19156 - protein, 238 aa, Oryza sativa
  Clone ID: TF_OSC401344j.C1.p4.fg
MEYLHEFNNLARYAPEDVREDEEKQEKFLAGMDPELSVRLVSGDYPDFQRLVDKSIRLEAKHKELESHKRRLANFRNQQGANQRVRYTNPYPGGSSSQQQQQQQPRSTSRPQFVVHVPQPQQQQSQQGTRAPRPPTPAVQPVQGRRDAQGQQRLCFNCFEPGHFADKCPKPRCQQGQAPPRSNNGGKDVIRGRVNHVTAENVLTTPDVIVGTFLIHSIPATIFVTSQNDSKIHPLNYA

SEQ ID NO: 19157 - protein, 1800 aa, Oryza sativa
  Clone ID: TF_OSC401348j.C1.p7.fg
MSWHRAGVLLLGAQSCLPVPEVPAVGGIGSMAGSVTRRGLDMTGFVLELRGMCVVLGYPHGVDYQARPLPEQEGDDAEPHAGWEVTAVILSGSPERTSLAVTAGGDSFPAACQSAALLAIGTLHQRYPDELQHSPYRYHPRRGGARDYATFRDASSEDDATIVHLARMVEAYDAARIDFHQMVRRGMVENNMKILELRQENLQLKKDLDAVEAQLHQLKIAQGEVCRPKRRRVCRSQKITARKSTSRPELVRQSLAWTCFVETPRAEPAPVVPQEGEASGVGSTEDALLLTFRPGPSQRRSANTGDGNQPEGSNHHHQGSPPPPPPPPPPPPPDTNAILTQILAQQANMMTAFLHHLQNPPQHNAPPPPPQHSKLAEFLRIRPPTFSSSNNPVDALDWLHAVGKKLDTVQCSDEEKVIFAAHQLQGPASLWWDHFQATQPEGQPITWARFTAAFRRTHVPAGVVALKKREFRELKQGNRSVMEYLHEFNNLARYAPEDVREDEEKQEKFLAGMDPELSVRLVSGDYPDFQRLVDKSIRLEAKHKELESHKRRLANFRNQQGANQRVRYTNPYPGGSSSQQQQQQQQPRSVPRPQFVVRVPQPQQQQNQQGTRAPRPPTPTVQPGQGRRDAQGPQRLCFNCFEPGHFADKCPKPRRQQGQAPPRSNNGGKDVIRGRVNHVTAEDVLTTPDVIVGTFLIHSIPATILFDSGASHSFISVPFVGRNQLGVERLRNPLLITTPEGVMTAKYYSPAVPIEIQGIPFPSDLILLDTKNLDVILGMNWLAQFQGVVDCARRTVTLYRGPEQPVVFFAPPTSVSSSELHQIGLSEIPIVREFGDVFPEELPGMPPKREIEFRIDLAPGTTPLYKRPYRMAANELAEVKKQLEELKEKGYIRPSTSPWGAPVIFVEKKDKTKRMCVDYRALNEVTIKNKYPLPRIDDLFDQLKGATVLSKIDLRSGYHQLRIREEDIPKTAFTTRYGLYEFTVMSFGLTNAPAFFMNLMNKVFMEYLDKFVVVFVDDILIYSQSEEDHQHHLRLVLGKLREHQLYAKLSKCEFWLSEVKFLGHVISAKGVAVDPETVTAVTDWKQPKTVTQVHSFLGLAGYYRRFIENFSKIARPMTQLLKKEEKFVWSPQCEKAFKTLKEKLVSSPVLILPDTRKDFMVYCDASRQGLGCVLMQDGHVVAYASRQLRPHEGNYPTRDLELAAVVHALKIWLHYLIGNRCEIYTDHKSLKYIFTQSDLNLRQRRWLELIKDYDVGIHYHPGKANVVADALSRKSHCNTLNVRGIPLELSQQMEALNLSIVGRGFLAALEAKPTLLDQIREAQKNDPDMHGLLKNMKQGKAAGFTEDEHGTLWNGNRVCVPDNRELKQLILQEAHESPYSIHPGSTKMYLDLKEKYWWVSMKREIAEFVALCDVCQRVKAEHQRPAGLLQPLQVPEWKWDEIGMDFITGLPKTQGGYDSIWVVVDRLTKVARFIPVKTTYGGNKLAELYFARIVSLHGVPKKIVSDRGSQFTSHFWKKLQEELGTRLNFSTAYHPQTDGQTERLNQILEDMLRACVLDFGKTWDKSLPYAEFSYNNSYQASIQMAPYEALYGRKCRTPLLWDQVGESQVFGTDILREAEAKVRTIRDNLKVAQSRQKSYADNRRRDLEFAVDDFVYLRVTPLRGVHRFRTKGKLAPRYVGPFRIVARRGEVAYQLELPASLGNVHDVFHVSQLKKCLRVPSEQADSEQIEVREDLTYVERPVKILDTMERRTRNQVIRFCKVQWSNHVEEEATWEREDELKAAHPDLFASSSESRGRDSV

SEQ ID NO: 19158 - protein, 1797 aa, Oryza sativa
  Clone ID: TF_OSC401354j.C1.p21.fg
MDISRANEGYTSCGPVVEMSWHRAGVLLLGAQSCLPIPEVPAVGGIGSVLLSMARMGWKLCHVFRLYTVVMAGSVTRRGLDMTGFVLELRGMCVVLGYPHGVDYQARPLPEQEGDDAEPHAGWEVTAVILSGSPERTSLAVTAGGDSFPAACQSAALLAIGTLHQRYPDELQHSPYRYHPRRGGARDYATFRDASSEDDATIVHLARMVEAYDAARIDFHQMVRRGMVENNMKILELRQENLQLKKDLDAVEAQLHQLKIAQGEVCRPKRRRVCRSQKITARKSTSRPELVRQSLAWTCFVEIPRAEPAPVVPQEGEASGVGSTEDALLLTFRPGPSQRRSANTGDGNQPEGSNHHHQGSPPPPPPPPPPPPPDTNAILTQILAQQANMMTAFLHHLQNPPQHNAPPPPPQHSKLAEFLRIRPPTFSSSNNPVDALDWLHAVGKKLDTVQCSDEEKVIFAAHQLQGPASLWWDHFQATQPEGQPITWARFTAAFRRTHVPAGVVALKKREFRELKQGNRSVMEYLHEFNNLARYAPEDVREDEEKQEKFLAGMDPELSVRLVSGDYPDFQRGSSSQQQQQQQQPRSAPRPQFVVRVPQPQQQQNQQGTRAPRPPTPTVQPGQGRRDAQGPQRLCFNCFEPGHFADKCPKPRRQQGQAPPRSNHGGKDVIRGRVNHVTAEDVLTTPDVIVGTFLIHSIPATILFDSGASHSFISVPFVGRNQLGVERLRNPLLITTPGGVMTAKYYSPAVPIEIQGIPFPSDLILLDTKNLDVILGMNWLAQFQGVVDCARRTVTLYRGPEQPVVFFAPPTSVSSSELHQIGLSEIPIVREFGDVFPEELPGMPPKREIEFRIDLAPGTTPLYKRPYRMAANELAEVKKQLEELKEKGYIRPSTSPWGAPVIFVEKKDKTKRMCVDYRALNEVTIKNKYPLPRIDDLFDQLKGATVFSMIDLRSGYHQLRIREEDIPKTAFTTRYGLYEFTVMSFGLTNAPAFFMNLMNKVFMEYLDKFVVVFIDDILIYSQSEEDHQHHLRLVLGKLREHQLYAKLSKCEFWLSEVKFLGHVISAKGVAVDPETVTAVTDWKQPKTVTQVRSFLGLAGYYRRFIENFSKIARPMTQLLKKEEKFVWSPQCEKAFKTLKEKLVSSPVLILPDTRKDFMVYCDASRQGLGCVLMQDGHVVAYASRQLRPHEGNYPTHDLELAAVVHALKIWRHYLIGNRCEIYTDHKSLKYIFTQSDLNLRQRRWLELIKDYDVGIHYHPGKANVVADALSRKSHCNTLNVRGIPLELSQQMEALNLSIVGRGFLAALEAKPTLLDQIREAQKNDPDMHGLLKNMKQGKAAGFTEDEHGTLWNGNRVCVPDNRELKQLILQEAHESPYSIHPGSTKMYLDLKEKYWWVSMKREIAEFVALCDVCQRVKAEHQRPAGLLQPLQVPEWKWDEIGMDFITGLPKTQGGYDSIWVVVDRLTKVARFIPVKTTYGGNKLAELYFARIVSLHGVPKKIVSDRGSQFTSHFWKKLQEELGTRLNFSTAYHPQTDGQTERLNQILEDMLRACVLDFGKTWDKSLPYAEFSYNNSYQASIQMAPYEALYGRKCRTPLLWDQVGESQVFGTDILREAEAKVRTIRDNLKVAQSRQKSYADNRRRDLEFAVDDFVYLRVTPLRGVHRFRTKGKLAPRYVGPFRIVARRREVAYQLELPASLGNVHDVLHVSQLKKCLRVPSEQADSEQIEVREDLTYVERPVKILDTMERRTRNRVIHFCKVQWSNHVEEEATWEREDELKAAHPDLFASSSESRGRDSF

SEQ ID NO: 19159 - protein, 1862 aa, Oryza sativa
  unsure (1)..(1862): unsure at all Xaa locations
  Clone ID: TF_OSC401478j.C1.p79.np
MDEVGGRWTSRTNEGYTSCGPVVEMSWHRAGVLLLGAXFCLPVPGVPAVGGVGSMYTSDQSIIYSNSRAPGYGQAEQCTQMASSINRRGLDLTGFVLELRGMCVVLGYPHGVDYQGKQLPEQEGDDAEPHAAWEVTAVILTGSPERTSLAVTAGGDSFSVACQNAALLAIGTLHQRYPDELQHSPYRYHPRRGGARDYATFRDASLEDDATIVHLARMVEAYDAARIDFHQMVRRGLVENNMKILELRQENLQLKMDLDTVDAQLRQLKIAQGEVCRPKRRRVCRSLKITARKSTSRPELVRQSLAWTCFVETPRAESAPVVPQEEGASGVGHGGCAAAHLPSWLVAAVDEQLVGLRMVTTRRSAATGECSHPEGSNHNNHGSPPPPPSPPPPPPPDTNAILTQILAXQANMMAAFLHHIQNPPQHNAPPPPPQHSKLAEFLRIRPPTFSSSNNPVDALDWLHAVGKKLDTVQCSDEEKVIFGAHQLQGPASLWWDHFQATQPEGQPITWARFTAAFRRTHVPAGVMALKKREFRELKQGNRSVMEYLHEFNNLARYAPEDVREDEEKQEKFLAGMDPELSVRLVSGDYPDFQRLVDKSIRLEAKHKELESHKRRLANFRNQQGANQRVRYTNPYPGXSSSQQQQQQQPRSVPRPQFVVRVPQPQQQQSQQGTRAPRPPTLAVQPGQVRRDVQGQQRLCFNCFEPGHFADKCPKPRRQQGQAPPRSNNGGKDVIRGRVNHVTAEDVLTTPDVIVGTFLIHSIPATILFDSGASHSFISMPFVGRNQLGVERLRNPLLITTPGGVMTAKXYSPAVPIEIQGIPFPSDLILLDTKNLDVILGMNWLAQFQGVVDCARRTVTLYRGPEQPVVFFAPPTSVGSSELHQIGMSEIPIVREFGDMFPEELPGMPPKREIEFRIDLAPGTTPQYKRPYRMASNELAEVKKQLGELKEKGYIRPSTSPWGAPVIFVEKKDMTKRMCVDNRALNEVTIKNKYPLPRIDDLFDQLKGATVFSKIDLRSGYHQLRIREEDIPKTAFTTRYGLYEFTVMSFGLTNAPAFFMNLMNKVFMEYLDKFVVVFIDDILVYSQSEEDHQQHLRLVLGKLREHQLYAKLSKCEFWLSEVKFLGHMISAKGVAVDPETVTAVTDWKQPKTVTQVRSFLGLAEYYRRFIKNFSKIARPMTQLLKKEEKFVWSPQCEKAFQTLKEKLVSSPVLILPDTRKDFLVYCDASRQGLGCVLMQEGHMVAYASQQLRPHEGNYPTHDLELAAVVHALKIWRHYLIGNRCEIYTDHKSLKYIFTQSDLNLRQRRWLELIKDXDVGIHYHPGKTNVVADALSRKSRCNTLGVRGIPPKLHQQMEALNLSIVGRGFLATLEAKPTLLDQIREAQKNDPDMHGILKNMKQGKAAGFTEDEHGTLWNGNRVCVPDDRELKQLILQEAHESPYSIHPGSTKMYLDLKEKYWWVSMKREIAEFVALYDVCQRVKAEHQRPAGLLQPLQVLEWKWDEIGMDFITGLPKTQGGYDSIWVVVDRLTKVARFIPVKTTYGGNKLAELYFARIVSLHGVPKKIVSDRGSQFTSHFWKKLQEELGTRLNFSTAYHPQTDGQTECLNQILEDMLRACILDFGKTWDKSLPYAEFSYNNSYQASIQMAPYEALYGRKCRTPLLXDQVGESQVFGTDILREAEAKVRTIRDNLKVAQSRQESYADNRRRNLEFAVDDFVYLRVTPLRGVHRFQTKGKLASRFVGPFRIIARRGEVAYQLELPASLGNVHDVFHVSQLKKCLRVLSEQADSEQIEVRENLTYMERPVKILDTMERRTRNRVIRFCKVQWSNHAEEEATWERENELKAAHPDLFASSSESRGRDSV

SEQ ID NO: 19160 - protein, 656 aa, Oryza sativa
  Clone ID: TF_OSC401486j.C1.p1.fg
MAGSVTRRGLDMTGFVLELRGMCVVLGYPHGVDYQARPLPEQEGEDAEPHAGWEVTAVILSGSPERTSLAVTAGGDSSPAACQNAALLAIGTLHQRYPDELQHSPYRYHPRRGGARDFATFRDASLEDDATVVHLARMVEAYDAARIDFHQMVRRGMVENNLKILELRQENLQLKKDLDALEAQLHQLKIAQGEDSRPKRRRVCRSQKITARKSTSRPELVRQSLAWTCFVETPRAEPAPVVPQEGEASGVGSTEDALLLTFRPGPSQRRNVSTGEGNQPEGSNPNPQGNPPPPPPPDTNAILTQILAQQANMMTAFLHHLQNPPQQNAPPPPPQHSKLAEFLRIRPPTFSSSNNPVDALDWLHAVGKKLDTVQCSDEEKVIFAAHQLQGPASLWWDHFQATQPEGQPITWARFTAAFRRTHVPAGVVALKKREFRELKQGNRSVMEYLHEFNSLARYAPEDVREDEEKQEKFLAGMDPELSVRLVSGDYPDFQRLVDKSIRLEAKHKELETHKRRLANFRNQQGANQRVRYTNPYPGGSSSQQQQQQQQPRSAPRPQFVVRVPQPQQQQSQQGTRVARPPTPVVQPVQGRRDAQGQQRLCFNCFEPGHFADKCPKPRRQQGQAPPRSNNGGKDVIRGRVNHVTAEDVLTTPDVIV

SEQ ID NO: 19161 - protein, 1804 aa, Oryza sativa
  Clone ID: TF_OSC401664j.C1.p29.fg
MDEVGGRWTFSRANEGYTSCGPMAGSVTRRGLHMTGFVLELRGMCVVLGYPHGVDYQARPLPEQEGEDVEPHAGWEVTAVILSGSPERTSLAVTAGGDSFPAACQNAALLAIGTLHQRYPDELQHSPYRYHPRRGGASDHATFRDASSEDDATVVHLARMVEAYDAARIDFHQMVRRGMVENNMKILELRQENLQLKKDLDAVEAQLHQLKIAQGEICRPKRRRVCRSQKITARKSTSRPELVRQSLAWTCFVETPRAEPAPVVPQEGEASGVGSSEGALLLTFRPGPSQRSPSLFAGSVWGFQMVTTRRNVNTGEGNQPEGSNPNPQGNPPPPPPPDTNAILTQILAQQANMMNAFLHHLQNPPQQNAPPPPPQHSKLAEFLRIRPPTFSSSNNPVDALDWLHAVGKKLDTVQCSGEEKVIFAAHQLQGPASLWWDHFQAAQPEGQPITWARFTAAFRRTHVPAGVVALKKREFRELKQGNRSVMEYLHEFNNLARYAPEDVREDEEKQEKFLAGMDPELSVRLVSGDYPDFQRLVDKSIRLEAKHKELESHKRRLANFRNQQGANQRVRYTNPYPGGSSSQQQQQQQQPRPAPRPQFVVRVPQPQQQQNQQGTRAPRPPTPAVQPVQSRRDASGPQRLCFNCFEPGHFADKCPKPRRQQGQAPPRSNNGGQDVIRGRVNHVTAEDVLTTPDVIVGTFLVHSIPATILFDSGASHSFISVPFVGKNQLGVERLRNPLLITTPGGVMTAKYYSPAVPIEIQGIPFPSDLILLDTKNLDVILGMNWLAQFQGVVDCARRTVTLYRGPEQPVVFFAPPTSVRSSELHQIGLSEIPIVREFGDVFPEELPGMPPKREIEFRIDLAPGTTPLYKRPYRMAANELAEVKKQLEELKEKGYIRPSTSPWGAPVIFVEKKDKTKRMCVDYRALNEVTIKNKYPLPRIDDLFDQLKGATVFSKIDLRSGYHQLRIREEDIPKTAFTTRYGLYEFTVMSFGLTNAPAFFMNLMNKVFMEYLDKFVVVFIDDILIYSQSEEDHQHHLRLVLGKLREHQLYAKLSKCEFWLSEVKFLGHVISAKGVVVDPETVTAVTDWKQPKTVTQIRSFLGLAGYYRRFIENFSKIARPMTQLLKKEEKFVWSPQCEKAFQTLKEKLVSSPVLILPDTRKDFMVYCDASRQGLGCVLMQDGHVVAYASRQLRPHEGNYPTHDLELAAVVHALKIWRHYLIGNRCEIYTDHKSLKYIFTQSDLNLRQRRWLELIKDYDVGIHYHPGKANVVADALSRKSHCNNLNARSIPPELSQQMEALNLNIVGRGFLAALEAKPTLLDQIREAQKNDPDMHGLLKNMKQGKAAGFTEDEHGTLWNGKRVCVPDSRELKQLILQEAHESPYSIHPGSTKMYLDLKEKYWWVSMKREIAEFVALCDVCQRVKAEHQRPAGLLQPLQVPEWKWDEIGMDFITGLPKTQGGYDSIWVVVDRLTKVARFIPVKTTYGGNKLAELYFARIVSLHGVPKKIVSDRGSQFTSHFWKKLQEELGTRLNFSTAYHPQTDGQTERLNQILEDMLRACVLDFGKTWDKSLPYAEFSYNNSYQANIQMAPYEALYGRKCRTPLLWDQVGESQVFGTDILREAEAKVRIIRDNLKVAQSRQKSYADNRRRDLEFAVDDFVYLRVTPLRGVHRFQTKGKLAPRYVGPFRIIARRGEVAYQLELPASLGNVHDVFHVSQLKKCLRVPSEQADSEQIEVREDLTYVEKPVKILDTMERRTRNRVIRFCKVQWSNHAEEEATWEREDELKAAHPDLFASSSESRGRDSV

SEQ ID NO: 19162 - protein, 1804 aa, Oryza sativa
  Clone ID: TF_OSC401716j.C1.p49.fg
MDEVGGRWTFSRANEGYTSCGPMAGSVTRRGLDMTGFVLELRGMCVVLGYPHGVDYQARPLPEQEGEDAEPHAGWEVTAVILSGSPEWTSLAVTAGGDSFPAACQNAALLAIGTLHQRYPDELQHSPYRYHPRRGGASDHATFRDASSEDDATVVHLARMVEAYDAARIDFHQMVRRGMVENNLKILELRQENLQLKKDLDALEAQLHQLKVAQGEICRPKRRRVCRSQKITARKSTSRPELVRQSLAWTCFVETPRAEPAPVVPQEGEASGVGSSEGALLLTFRPGPSQRSPSLFAGSVWGFQMVSTRRNVNTGEGNQPEGSNPNPQGNPPPPPPPPDTNAILTQILAQQANMMNAFLHHLQNLPQQNAPPPPPQHSKLAEFLRIRPPTFSSSNNPVDALDWLHAVGKKLDTVQCSDEEKVIFAAHQLQGPASLWWDHFQATQPEGQPITWARFTAAFRRTHVPAGVVALKKREFRELKQGNRSVMEYLHEFNNLARYAPEDVREDEEKQEKFLAGMDPELSVRLVSGDYPDFQRLVDKSIRLEAKHKELESHKRRLANFRNQQGANQRVRYTNPYPGGSSSQQQQQQQPRSAPRPQFVVRVPQQQQQQNQQGTRAPRPPTPTVQPVQGRRDAQGQQRLCFNCFEPGHFADKCPKPRRQQGQAPPRSNNGGKDVIRGRVNHVTAEDVLTTPDVIVGTFLVHSIPATILFDSGASHSFISVPFVGKNQLGVERLRNPLLITTPGGVMTAKYYSPAVPIEIQGIPFPSDLILLDTKNLDVILGMNWLAQFQGVVDCARRTVTLYRGPEQPVVFFAPPTSVRSSELHQVGLSEIPIVREFGDVFPEELPGMPPKREIEFRIDLAPGTTPLYKRPYRMAANELAEVKKQLEELKEKGYIRPSTSPWGAPVIFVEKKDKTKRMCVDYRALNEVTIKNKYPLPRIDDLFDQLKGATVFSKIDLRSGYHQLRIREEDIPKTAFTTRYGLYEFTVMSFGLTNAPAFFMNLMNKVFMEYLDKFVVVFIDDILIYSQSEEDHQHHLRLVLGKLREHQLYAKLSKCEFWLSEVKFLGHVISAKGVAVDPETVTAVTDWKQPKTVTQIRSFLGLAGYYRRFIENFSKIARPMTQLLKKEEKFVWSPQCEKAFQTLKEKLVSSPVLILPDTRKDFMVYCDASRQGLGCVLMQDGHVVAYASRQLRPHEGNYPTHDLELAAVVHALKIWRHYLIGNRCEIYTDHKSLKYIFTQSDLNLRQRRWLELIKDYDVGIHYHPGKANVVADALSRKSHCNTLNVRGIPPELNQQMEALNLSIVGRGFLAALEAKPTLLDQIREAQKNDPDMHGLLKNMKQGKAAGFTEDEHGTLWNGKRVCVPDSRELKQLILREAHESPYSIHPGSTKMYLDLKEKYWWVSMKREIAEFVALCDVCQRVKAEHQRPAGLLQPLQVPEWKWDEIGMDFITGLPKTQGGYDSIWVIVDRLTKVARFIPVKTTYGGNKLAELYFARIVSLHGVPKKIVSDRGSQFTSHFWKKLQEELGTRLNFSTAYHPQTDGQTERLNQILEDMLRACVLDFGKTWDKSLPYAEFSYNNSYQASIQMAPYEALYGRKCRTPLLWDQVGESQVFGTDILREAEAKVRIIRENLKVAQSRQKSYADNRRRDLEFAVDDFVYLRVTPLRGVHRFQTKGKLAPRYVGPFRITARRGEVAYQLELPASLGNVHDVFHVSQLKKCLRVPSEQADSEQIEVREDLTYVERPVKILDTMERRTRNRVIRFCKVQWSNHAEEEATWEREDELKAAHPGLFASSSESRGRDSV

SEQ ID NO: 19163 - protein, 1592 aa, Oryza sativa
  Clone ID: TF_OSC401831j.C1.p2.fg
MSWHRAGVLLLGAQSCLPVPGVPAVGGIGSVLLSMARMGWKLCHVFRLYTVVMAGSVTRRGLDMTGFVLELRGMCVVLGYPHGVDYQARPLPEQEGEDAEPHAGWEVTAVILSGSPERTSLAVTAGGDSFPAACQNAALLAIGTLHQRYPDELQHSPYRYHPRRGGARDYATFRDAGSEDDAPIVHLARMVEAYDAARIDFHQMVRRGMVENNMKILELRQENLQLKKDLDAVEAQLHQLKIAQGEDCRPKRRRVCRSQKITARKSTSRPELVRQSLAWTCFVETPRAEPAPVVPQEGEASGVGSTEDALLLTFRPGPSQRDEEKVIFAAHQLQGPASLWWDHFQATQPEGQPITWARFTAAFRRTHVPAGVVALKKREFRELKQGNRSVMEYLHEFNNLARYAPEDVREDEEKQEKFLAGMDPELSVRLVSGDYPDFQRLVDKSIRLEAKHKELESHKRRLANFRNQQGANQRVRYTNPYPGGSSSQPQQQHQQPRSAPRPQFVPGQGRRDASGPQRLCFNCFEPGHFADKCPKPRRQQGQAPPRSNNGGKDVIRGRVNHVTAEDVLTTPDVIVDTKNLDVILGMNWLAQFQGVVDCARRTVTLYRGPEQPVVFFAPPTSVKSSELHEIGLSEIPIVREFGDVFPEELPGMPPKREIEFRIDLAPGTTPLYKRPYRMAANELAEVKKQLEELKEKGYIRPSTSPWGAPVIFVEKKDKTKRMCVDYRALNEVTIKNKYPLPRIDDLFDQLKGATVFSKIDLRSGYHQLRIREEDIPKTAFTTRYGLYEFTVMSFGLTNAPAFFINLMNKVFMEYLDKFVVVFIDDILIYSQSEEDHQHHLRLVLGKLREHQLYAKLSKCEFWLTEVKFLGHVISAKGVAVDPEAVTAVTDWKQPKTVTQIRSFLGLAGYYQRFIENFSKIARPMTQLLKKEEKFVWSPQCEKAFQTLKEKLVSSPVLILPDTRKDFMVYCDASRQGLGCVLMQDGHVVAYASRQLRAHEGNYPTHDLELAAVVHALKIWRHYLIGNRCEIYTDHKSLKYIFTQSDLNLRQRRWLELIKDYDVGIHYHPGKANVVADALSRKSHCHALNVRGIPPELNQQMEALNLSIVSRGFLAALEAKPTLLDQIREAQKNDPDMHGLLKNMKQGKAAGFTEDEHGTLWNGNREAHESPYSIHPGSTKMYLDLKEKYWWVSMKREIAEFVALCDVCQRVKAEHQRPAGLLQPLQVPEWKWDEIGMDFITGLPKTQGGYDSIWVVVDRLTKVARFIPVKTTYGGNKLAELYFARIVSLHGVPKKIVSDRGSQFTSHFWKKLQEELGTRLNFSTAYHPQTDGQTERLNQILEDMLRACVLDFGKTWDKSLPYAEFSYNNSYQASIQMAPYEALYGRKCRTPLLWDQVGESQVFGTDILREAEAKVRIIRDNLKVAQSRQKSYADNRRCDLEFAVGDFVYLRVTPLRGVHRFQTKGKLAPRYVGPFRIIARRGEVAYQLELPASLGNVHDVFHASQLKKCLRVPSEQADSEQIEVREDLTYVERPVKILDTMERRTRNRVIRFCKVQWSNHAEEEATWEREDELKAAHPDLFASPSESRGRDSV

SEQ ID NO: 19164 - protein, 1095 aa, Oryza sativa
  Clone ID: TF_OSC401832j.C1.p10.fg
MVMAGSVTRRGLDMTGFVLELRGMCVVLGYPHGVDYQARPLPDQEGDDAEPHAGWEVTAVILSGSPERTSLAVTAGGDSFPAACQNAALLAIGTLHQRYPDELQHSPYRYHPRRGGACDYATFRDASSEDDATIVHLARMVEAYDAARIDFHQMVRRGMVKSNLMILELRQENLQLKKNLDAVEAQLHQLKITQGEICRPKRRRVCRSQKITARKSTSRPELVRQSLAWTCFVETPRAEPAPVVPQEGEAFGVGSTEAPSLFAGSVWGFQMVTTRRNAATGDGNQPEGSNHNHQGNPPPPPPPPPPPPPDTNAILTQILAQQANMMNAFLHHLQNPPQQNAPPPPPQHSKLAEFLRIRPPTFSSSNNPVDALDWLHAVGKKLDTVQCSDEEKVVFAAHQLQGPASLWWDHFQATQPEGQPITWARFTAAFRRTHVPAGVVALKKREFRELKQGNRSVMEYLHEFNNLARYAPEDVREDEEKQEKFLAGMDPELSVRLVSGDYPDFQRLVDKSIRLEAKHKELESHKRRLANFRNQQGANQRVRYTNPYPGGSSSQQQQQQQQPRSAPRPQFVSGQGRRDASGPQRLCFNCFEPGHFADKCPKPRRQQGQAPPRSNNGGKDVIRGRVNHVTAEDVLTTPDVIVGTFLVHSIPATILFDSGASHSFISVPFVGRNQLGVERLRNPLLITTPGGVMTAKYYSPAVPIEIQGIPFPSDLILLDTKNLDVILGMNWLAQFQGVVDCARRTVTLYRGPEQPVVFFAPPTKVARFIPVKTTYGGNKLAELYFARIVSLHGVPKKIVSDRGSQFTSHFWKKLQEELGTRLNFSTAYHPQTDGQTERLNQILEDMLRACVLDFGKTWDKSLPYAEFSYNNSYQASIQMAPYEALYGRKWRTPLLWDQVGESQVFGTDILREAEAKVRIIRDNLKVAQSRQKSYADNRRRDLEFAVDDFVYLRVTPLRGVHRFQTKGKLAPRYVGPFRIVARRGEVAYQLELPASLGNVHDVFHVSQLKKCLRVPSEQADSEQIEVREDLTYVERPVKILDTMERRTRNRVIRFCKVQWSNHAEEEATWEREDELKAAHPGLFASSSESRGRDSV

SEQ ID NO: 19165 - protein, 808 aa, Oryza sativa
  Clone ID: TF_OSC401838j.C1.p1.fg
MVTTRRNAVTGDGNQPEGSNHNHQGNPPPPPPPPPPPPPDTNAILTQILAQQANMMTAFLHHLQNPPQQNAPPPPPQHSKLAEFLRIRPPTFSSSNNPVDALDWLHAVGKKLDTVQCSDEEKVIFAAHQLQGPASLWWDHFQATQPEGQPITWARFTAAFRRTHVPAGVVALKKREFRELKQGNRSVMEYLHEFNNLARYAPEDVREDEEKQEKFLAGMDPELSVRLVSGDYPDFQRLVDKSIRLEAKHKELESHKRRLANFRNQQGANQRVRYTNPYPGGSSSQQQQQQQQPRSAPRPQFVVRVPQPQQQQNQQGTRAPRPPTQTVQPGQGRRDAQGQQRLCFNCFEPGHFADKCPKPRRQQGQAPPRPNNGGKDVIRGRVNHVMAEDVLTTPDVIVVTAVTDWKQPKTVTQVRSFLGLAGYYRSVSRQSTNDRPDFSNLSKYQNGNGMKLGWISSPDFQKPKVARFIPVKTTYGGNKLAELYFARIAGPPATLADRWGPPVIPYLAPLPPPARALAPPPPPNPPHPAVPARHKEGEITPRDSLSLSPRFSLSLSLGFARIYSRNPRRRNQWRPRFPRPIPSSPAALSPSRRYIIVPRASLLRFRHSPLTLPVGFVPAPSSSLSAVAAELRFAVVVAPDLLPTRRHLLRLRRVLVDLVRSSVSVADCRSAAVLVDPNRAAAFLRSGLSFPPSSSTRGEPRTVVSLPPSLPSLGRRSVAPEVAAGDHRGAGAPPPVGRAGEAAFGRAPRLPGGPGRQPPAPAGAADAWDPRRRSAAAACTRSTVDREAGAWAPLPWTRSARPLSRLTQ

SEQ ID NO: 19166 - protein, 1244 aa, Oryza sativa
  Clone ID: TF_OSC401845j.C1.p3.gm
MVMPMVTTRRSAATGDGNQPEGSNHHHQGSPPPPPPPPPDTNAILTQILAQQANMMTAFLHHLQNPPQHNAPPPPPQHSKLAEFLRIRPPTFSSSNNPVDALDWLHVVGKKLDTVQCSDEEKVIFAAHQLQGPASLWWDHFQATQPEGQPITWARFTAAFRRTHVPAGVMALKKREFRELKQGNRSVMEYLHEFNNLARYAPEDVREDEEKQEKFLAGMDPELSVRLVSGDYPDFQRLVDKSIRLEAKHKELESHKRRLANFRNQQGANQRVRYTNPYPGGSSSQQQQQQQQPRSAPRPQFVVRVPQPQQQQNQQGTRAPRPPTPTVQPGQGRRDAQGPQRLCFNCFEPGHFADKCPKPRRQQGQAPPRSNNGGKDVIRGRVNHVTAEDVLTTPDVIVGTFLIHSIPATILFDSGASHSFISVPFVGRNQLGVERLRNPLLITTPGGVMTAKYYSPAVPIEIQGIPFPSDLILLDTKNLDIGLLEIPIVREFGDVFPEELPEEDHQHHLRLVLGKLREHQLYAKLSKCEFWLSEVKFLGHVISAKGVAVDPETVTAVTDWKQPKTVTQVRSFLGLAGYYRRFIENFSKIARPMTQLLKKEEKFVWRPQCEKAFKTLKERLDGHVVAYASRQLRPHEGNYPTHDLELAAVVHALKIWRHYLIGNRCEIYTDHKSLKYIFTQSDLNLRQRRWLELIKDYDVGIHYHPGKANVVADALSRKSHCNTLNVRGIPPELNQQMEALNLSIVGRGFLAALEAKPTLLDRIREAQKNDPDMHGLLKNMKQGKAAGFTEDEHGTLWNGNRVCVPDNRELKQLILQEAHESPYSIHPGSTKMYLDLKEKYWWVSMKREIAEFVALCDVCQRVKAEHQRPAGLLQPLQVPEWKWDEIGMDFITGLPKTQGGYDSIWVVVDRLTKVARFIPVKTTYGGNKLAELYFARIVSLHGVPKKIVSDRGSQFTSHFWKKLQEELGTRLNFSTAYHPQTDGQTERLNQILEDMLRACVLDFGKTWDKSLPYAEFSYNNSYQASIQMAPYEALYGRKCRTPLLWDQVGESQVFGTDILREAEAKVRTIRDNLKVAQSRQKSYADNRRRNLEFAVDDFVYLRVTPLRGVHRFQTKGKLAPRYVGPFRIVARRGEVAYQLELPASLGNVHDVFHVSQLKKCLRVPSEQADSEQIEVREDLTYVERPVKILDTMERRTRNRVIRFCKVQWSNHAEEEATWERENELKAAHPDLFASSSESRGRDSV

SEQ ID NO: 19167 - protein, 1801 aa, Oryza sativa
  Clone ID: TF_OSC401848j.C1.p1.fg
MSWHRAGVLLLGAQSCLPVPGVPAVGGIGSVLLSMARMGWKLCHVFRPYTVVMAGSISRRGLDLTGFVLELRGMCVVLGYPHGVDYQGRPLPEQEGDDAEPHAAWEVTTVILTGSPERTSLAVTAGGDSFSAACQNAALLAIGTLHQRYPDELQHSPYRYHPRRGGARDYATFRDASSEDDATIMHLARMVEAYDAARIDFHQMVRRGMVENNMKILELRQENLQLKKDLDTVEAQLHQLKIAQGEVCRPKRRRVCRSQKITARKSTSRPELVRQSLAWTCFVETPRAEPAPVVPQEGEAFGVGSTEDALLLTFRPGPSQRRSANTGDGNQPEGSNHNNHGSPPPPPPPPPPPPPDTNAILTQILAQQANMMAAFLHHIQNPPQHNAPPPPPQHSKLAEFLRIRPPTFSSSNNPVDALDWLHAVGKKLDTVQCSDEEKATQPEGQPITWARFTAAFRRTHVPAGVMALKKREFRELKQGNRSVMEYLHEFNNLARYAPEDVREDEEKQEKFLAGMDPELSVRLVSGDYPDFQRLVDKSIRLEAKHKELESHKRRLANFRNQQGANQRVRYTNPYPGGSSSQQQQQQQPRSAPRPQFMVRVPQPQQQQSQQGTRAPRPPMPAVQPGQGRRDVQGPQRLCFNCFEPGHFADKCPKPRRQQGQAPPRSNNGGKDVIRGRVNHVTAEDVLTTPDVIVGTFLIHSIPATILFDSGASHSFISVPFVGRNQLGVERLRNPLLITTPGGVMTAKYYSPAVPIEIQGIPFPSDLILLDTKNLDVILGMNWLAQFQGVVDCARRTVTLYREPEQPVVFFAPPTSVSSLELYQIGLSEIPIVREFGDVFPEELPGMPPKREIEFRIDLAPGTTPLYKRPYRMAANELAEVKKQLEELKEKGYIRPSTSPWGAPVIFVEKKDKTKRMCVDYRALNEVTIKNKYPLPRIDDLFDQLKGATVFSKIDLRSGYHQLRIREEDIPKTAFTTRYGLYEFTVMSFGLTNAPAFFMNLMNKVFMEYLDRFVVVFIDDILVYSQSEEDHQHHLRLVLGKLREHQLYAKLSKCEFWLSEVKFLGHVISAKGVAVDPETVTAVTDWKQPKTVTQIRSFLGLAGYYRRFIENFSKIARPMTQLLKKEEKFVWSPQCEKAFQTLKEKLVSSPVLILPDTRKDFMVYCDASRQGLGCVLMQDGHVVAYASRQLRPHEGNYPTHDLELAAVVHALKIWRHYLIGNRCEIYTDHKSLKYIFTQSDLNLRQRRWLELIKDYDVGIHYHPGKANVVADALSRKSHYNTLDVRGIPPELSQQMEALNLSIVGRGFLATLEAKPTLLDQIREAQKNDPDMHGLLKNMKQGKAAGFTEDEHGTLWNGNRICVPDNRELKQLILQEAHESPYSIHPGSMKMYLDLKEKYWWVSMKREIAEFVALCDVCQRVKAEHQRPAGLLQPLQVPEWKWDEIGMDFITGLPKTQGGYDSIWVVVDRLTKVARFIPVKTTYGGNKLAELYFARIVSLHGVPKKIVSDRGSQFTSHFWKKLQEELGTRLNFSTAYHPQTDGQTERLNQILEDMLRACVLDFGKTWDKSLPYAEFSYNNSYQASIQMAPYEALYGRKCRTPLLWDQVGESQVFRTDILREAEAKVRTIRDNLKVAQSRQKSYADNRRRNLEFAVDDFVYLRVTPLRGVHRFQTKGKLAPRFMGPFRIIARRGEVAYQLELPASLGNVHDVFHVSQLKKCLRVPSEQADSEQIEVREDLTYVERPVKILDTMERRTRNRVIRFCKVQWSNHAEEEATWEREDELKAAHPDLFASSSESRGRDSV

SEQ ID NO: 19168 - protein, 1803 aa, Oryza sativa
  Clone ID: TF_OSC401855j.C1.p4.fg
MDEVGGRWTFSRANEGYTSCGPMAGSVTRRGLDMTGFVLELRGMCVVLGYPHGVDYQARPLPEQEGEDAEPHAGWEVTAVILSGSPERTSLAVTAGGDSFPAACQNAALLAIGTLHQRYPDELQHSPYRYHPRRGGARDFATFRDASSEDDATVVHLARMVEAYDAARIDFHQMVRRGMVENNMKILELRQENLQLKKDLDALETQLHQLKIAQGEISRPKRRRVCRSQKITARKSTSRPELVRQSLAWTCFVETPRAEPAPVVPQEGEASGVGSSEGALLLTFRPGPSQCSPSLFAGSVWGFQMVTTRRNVNTGEGNQPEGSNPNPQGNPPPPPPPDTNAILTQILAQQANMMNAFLHHLQNPPQQNAPPPPPQHSKLAEFLRIRPPTFSSSNNPVDALDWLHAVGKKLDTVQCSDEEKVIFAAHQLQGPASLWWDHFQATQPEGQPITWTRFTAAFRKTHVPAGVVALKKREFRELKQGNRSVMEYLHEFNNLARYAPEDVREDEEKQEKFLAGMDPELSVRLVSGDYPDFQRLVDKSIRLEAKHKELESHKRRLANFRNQQGANQRVRYTNPYPGGSSSQQQQQQQPRSAPRPQFVVRVPQQQQQQNQQGTRAPRPPTPAVQPVQGRRDAQGPQRLCFNCFEPGHFADKCPKPRRQQGQAPPRSNNGGKDVIRGRVNHVTAEDVLTTPDVIVGTFLVQSIPATILFDSGASHSFISVPFVGRNQLGVERLRNPLLITTPGGVMTAKYYSPAVPIEIQGIPFPSDLILLDTKNLDVILGMNWLAQFQGVVDCARRTVTLYRGPEQPVVFFAPPTAVRSSELHQIELSEIPIVREFGDVFPEELPGMPPKREIEFRIDLAPGTTPLYKRPYRMAANELAEVKKQLEELKEKGYIRPSTSPWGAPVIFVEKKDKTKRMCVDYRALNEVTIKIKYPLPRIDDLFDQLKGATVFSKIDLRSGYHQLRIREEDIPKTAFTTRYGLYEFTVMSFGLTNAPAFFMNLMNKVFMEYLDKFVVVFIDDILIYSQSEEDHQHHLRLVLGKLREHQLYAKLSKCEFWLSEVKFLGHVISAKGVAVDPETVTAVTDWKQPKTVTQIRSFLGLAGYYRRFIENFSKIARPMTQLLKKEEKFVWSPQCEKAFQTLKEKLVSSPVLILPDTRKEFMVYCDASRQGLGCVLMQDGHVVAYASRQLRPHEGNYPTHDLELAAVVHALKIWRHYLIGNRCEIYTDHKSLKYIFTQSDLNLRQRRWLELIKDYDVGIHYHPGKANVVADALSRKSHCNTLNVRGIPPELNQQMEALNLSIVGRGFLAALEAKPTLLDQIREAQKNDPDMHGLLKNMKQGKAAGFTEDEHGTLWNGKRVCVPDSRELKQLILQEAHESPYSIHPGSTKMYLDLKEKYWWVSMKREIAEFVALCDVCQRVKAEHQRPAGLLQPLQVPEWKWDEIGMDFITGLPKTQGGYDSIWVIVDRLTKVARFIPVKTTYGGNKLAELYFARIVSLHGIPKKIVSDRGSQFTSHFWKKLQEELGTRLNFSTAYHPQTDGQTERLNQILEDMLRACVLDFGKTWDKSLPYAEFSYNNSYQASIQMAPYEALYGRKCRTPLLWDQVGESQVFGTDILREAEAKVRIIRDNLKVAQSRQKSYADNRRRDLEFAVDDFVYLRVTPLRGVHRFQTKGKLAPRYVGPFRIIARRGEVAYQLELPASLGNVHDVFHVSQLKKCLRVPSEQADSEQIEVREDLTYVEKPVKILDTMERRTRNRVIRFCKVQWSNHAEEEATWEREDELKAAHPDLFASSSESRGRDSV

SEQ ID NO: 19169 - protein, 1370 aa, Oryza sativa
  Clone ID: TF_OSC401859j.C1.p2.fg
MGWELCHVLRPYAVVMAANLNRRGLDLTGFALELRGMCVVLGYPHGVDYQGKRLPEQDGDDAEPRAAWEVTAMILTGSPKRTSLAVTAGRDSFPATCQNAALLAIGTLHQRYPDELQHSPYRYYPRRGGARDYATFQDASSEDDATIMHLARMVEAYDAARIDFYRMARRGLVENNMKILELRQENLQLKDLDAMEAQLCQLKIAQGEICRPKRRRNPPQHNAPPPPPPPPQHSKLAEFLRIRPPTFSSSNNHVDALDWLHAVGKKLDTVQCNDKEKVIFVTHQLQGPASLWWDHFQATQPEGQPITWARFTAAFQRTHVPAGVVALKKREFRELKQGNRSVMEYLHEFNNLARYAPEDVRKDEEKQEKFLAGMDPELSVRLVSGDYPDFQRLVDKSIRLEAKHKELESHKRRLANFRNQQGANQRIRYTNPYLGGSSSQQQQQQPRPVPRPQYVVRVPQPQQQRQNQQGNRAPRPPAPAMQPGQGRKDAQGQQRLCFNCFEPGHFADKCPKPRRQQGPAPKPRRQPRRQQGPAPPGPNNGGKDATRGRVNHVTAEDVLTTPDVILDTFFIHSIPATILLDSGASHSFISVQFVGRNQLRVAKLRSSLLITTPGGAMTAKYYSPTIPIEIQGISFPSDLILLDTKDLDVILGKNWPDQPVVFFAHPTPTGNSVLHQLGLSEIPVASKFSDVFPEELPGMPPKREIEFRIDLAPGTTPMYKRPYRMAANELAEVKKQLEGLKEKGYIRPSTSPWGAPVIFVEKKDKTKRMCVDYRALNEVTIKNKYPLPRIDDLFDQLKGASVFSKIDLRSGYHQLRIREEDIPKTAFTTRYGLYEFTVMSFGLTNAPAFFMNLMNKVFMEYLDKFVVVFIDDILVYSQSEKEHQQHLRLVLGKLREHQLYAKLSKCEFWLSEVKFLGHVISAKGVAVAPETVTAVTDWKQPKTVTQVHSFLGLAGYYRRFIENFSKIARPMTQLRKEEKFVWSPQCERAFQTLKEKLVSSPVLILPDTRKDFLVYCEASRQGLGCVLMQEGHVVAYASRQLRPHEGNYPTHDLELAAVRRWLELIKDYDVGIHYHPGKANVVADALSRKGHCNALCVRGIPPELNQQLEALNLSVVSHGFLAALEAKPTLLDHIRKAQKNDPDIQEILKNMKQGKATGFTEDEHGTLWNGNRVCVPDNKELKQLILQEALMLRACVLDFGRTWDKSLPYAEFSYNNSYQASIQMAPYEALYGRKCRTPLLWDQVGESQVFGTDILREAEAKVRTIRDNLKVAQSRQKMDDFVYLRVTPQRGVHRFQTKGKLAPRYVGPFRIIARRGEVAYQLELPTSLGNVHDVFHVSQLKKCLRVPSEQADSEQIDVREACEDSGHNGA

SEQ ID NO: 19170 - protein, 1756 aa, Oryza sativa
  Clone ID: TF_OSC402412j.C1.p1.fg
MDISRANEGYTSCGPVVEMSWHRAGVLLLGAQSCLPIPEVPAVGGIGSVLLSMARMGWKLCHVFRLYTVVMAGSVTRRGLDMTGFVLELRGMCVVLGYPHGVDYQARPLPEQEGDDAEPHAGWEVTAVILSGSPERTSLAVTAGGDSFPAACQSAALLAIGTLHQRYPDELQHSPYRYHPRRGGARDYATFRDASSEDDATIVHLARMVEAYDAARIDFHQMVRRGMVENNMKILELRQENLQLKKDLDAVEAQLHQLKIAQGEVCRPKRRRVCRSQKITARKSTSRPELVRQSLAWTCFVEIPRAEPAPVVPQEGEASGVGSTEDALLLTFRPGPSQRRSANTGDGNQPEGSNHHHQGSPPPPPPPPPPPPPDTNAILTQILAQQANMMTAFLHHLQNPPQHNAPPPPPQHSKLAEFLRIRPPTFSSSNNPVDALDWLHAVGKKLDTVQCSDEEKVIFAAHQLQGPASLWWDHFQATQPEGQPITWARFTAAFRRTHVPAGVVALKKREFRELKQGNRSVMEYLHEFNNLARYAPEDVREDEEKQEKFLAGMDPELSVRLVSGDYPDFQRGSSSQQQQQQQQPRSAPRPQFVVRVPQPQQQQNQQGTRAPRPPTPTVQPGQGRRDAQGPQRLCFNCFEPGHFADKCPKPRRQQGQAPPRSNHGGKDVIRGRVNHVTAEDVLTTPDVIVGTFLIHSIPATILFDSGASHSFISVPFVGRNQLGVERLRNPLLITTPGGVMTAKYYSPAVPIEIQGIPFPSDLILLDTKNLDVILGMNWLAQFQGVVDCARRTVTLYRGPEQPVVFFAPPTSVSSSELHQIGLSEIPIVREFGDVFPEELPGMPPKREIEFRIDLAPGTTPLYKRPYRMAANELAEVKKQLEELKEKGYIRPSTSPWGAPVIFVEKKDKTKRMCVDYRALNEVTIKNKYPLPRIDDLFDQLKGATVFSMIDLRSGYHQLRIREEDIPKTAFTTRYGLYEFTVMSFGLTNAPAFFMNLMNKVFMEYLDKFVVVFIDDILIYSQSEEDHQHHLRLVLGKLREHQLYAKLSKCEFWLSEVKFLGHVISAKGVAVDPETVTAVTDWKQPKTVTQVRSFLGLAGYYRRFIENFSKIARPMTQLLKKEEKFVWSPQCEKAFKTLKEKLVSSPVLILPDTRKDFMVYCDASRQGLGCVLMQDGHVVAYASRQLRPHEGNYPTHDLELAAVVHALKIWRHYLIGNRCEIYTDHKSLKYIFTQSDLNLRQRRWLELIKDYDVGIHYHPGKANVVADALSRKSHCNTLNVRGIPLELSQQMEALNLSIVGRGFLAALEAKPTLLDQIREAQKNDPDMHGLLKNMKQGKAAGFTEDEHGTLWNGNRVCVPDNRELKQLILQEAHESPYSIHPGSTKMYLDLKEKYWWVSMKREIAEFVALCDVCQRVKAEHQRPAGLLQPLQVPEWKWDEIGMDFITGLPKTQGGYDSIWVVVDRLTKVARFIPVKTTYGGNKLAELYFARIVSLHGVPKKIVSDRGSQFTSHFWKKLQEELGTRLNFSSAYHPQTDGQTERLNQILEDMLRACVLDFGKTWDKSLPYAEFSYNNSYQASIQMAPYKRCMGANPNTLLWIKLGKAKCSVDDFVYLRVTPLRGVHRFRTKGKLAPRYVGPFRIVARRREVAYQLELPASLGNVHDVLHVSQLKKCLRVPSEQADSEQIEVREDLTYVERPVKILDTMERRTRNRVIHFCKVQWSNHVEEEATWEREDELKAAHPDLFTSSSESRSRDSF

SEQ ID NO: 19171 - protein, 1849 aa, Oryza sativa
  Clone ID: TF_OSC402669j.C1.p3.fg
MEVDEVGGRWTFSRANEGYTSCGPVVEMSWHRAGVLLLGAQSCLPVPGLPPVGGIGSVLLSMARMGWKLCHVFRLYTVVMAGSVTRRGLDMTGFVLELRGMCVVLGYPHGVDYQARPLPDQEGDDAEPHAGWEVTAVILSGSPERTSLAVTAGGDSFPAACQNAALLAIGTLHQRYPDELQHSPYRYHPRRGGACDHATFRDASSEDDATIVHLARMVEAYDAARIDFHQMVRRGMVENNMKILELRQENLQLKKDLDTVEAQLHQLKIAQGEVCRPKRRRICRSQKITARKSTSRPELVRQSLAWTCFVETPRAEPAPVVPQEGEASGVGSTEGALLLTFRPGPSQRRNANTGDGNQPEGSNHNHQGNPPPPPPPPPPPPPDTNAILTQILAQQANMMTAFLHHLQNPPQQNAPPPPPQHSKLAEFLRIRPPTFSSSNNPVDALDWLHAVGKKLDTVQCSDEEKVIFAAHQLQGPASLWWDHFQATQPEGQPITWARFTAAFRRTHVPAGVVALKKREFRELKQGNRSVMEYLHEFNNLARYAPEDVREDEEKQEKFLAGMDPELSVRLVSGDYPDFQRLVDKSIRLEAKHKELESHKRRLANFRNQQGANQRVRYTNPYPGGSSSQQQQQQQQPRSAPRPQFVVRVPQPQQQQNQQGTRAPRPPTPTVQPGQGRRDAQGQQRLCFNCFEPGHFADKCPKPRRQQGQAPPRSNNGGKDVIRGRVNHVTAEDVLTTPDVIVGTFLVHSIPATILFDSGASHSFISVPFVGRNQLGVERLRNPLLITTPGGVMTAKYYSPAVPIEIQGIPFPSDLILLDTKNLDVILGMNWLAQFQGVVDCARRTVTLYRGPEQPVVFFAPPTSVRSSELHQIELSEIPIVREFGDVFPEELPGMPPKREIEFRIDLAPGTTPLHKRPYRMAANELAEVKKQLEVLKEKGYIRPSTSPWGAPVIFVEKKDKTKRMCVDYRALNEVTIKNKYPLPRIDDLFDQLKGATVFSKIDLRSGYHQLRIRKEDIPKTAFTTRYGLYEFTVMSFGLTNAPAFFMNLMNKVFMEYLDKFVVVFIDDILIYSQSEEDHQHHLRLVLGKLREHQLYAKLSKCEFWLSEVKFLGHVISAKGVAVDPETVTAVTDWKQPKTVTQVRSFLGLAGYYRRFIENFSKIARPMTQLLKKEEKFVWSPQCEKAFQTLKEKLVSSPVLILPDTRKDFMVYCDASRQGLGCVLMQDGHVVAYASCQLRPHEGNYPTHDLELAAVVHALKIWRHYHIGNRCEIYTDHKSLKYIFTQSDLNLRQRRWLELIKDYDVGIHYHPGKANVVADALSRKSHCNTLNVRGIPPELSQQMEALNLSIVGRGFLAALEAKPTLLDQIREAQKNDPDMHGLLKNMKQGKATGFTEDEHGTLWNGKRVCVPDNRELKQLILQEAHESPYSIHPGSTKMYLDLKEKYWWVSMKREIAEFVALCDVCQRVKAEHQRPAGLLQPLQVPEWKWDEIGMDFITGLPKTQGGYDSIWVVVDRLTKVARFIPVKTTYGGNKLAELYFARIVSLHGVPKKIVSDRGSQFTSHFWKKLQEELGTRLNFSTAYHPQTDGQTERLNQILEDMLRACVLDFGKTWDKSLPYAEFSYNNSYQASIQMAPYEALYGRKCRTPLLWDQVGESQVFGTDILREAEAKVRIIRDNLKVAQSRQKSYADNRRRDLEFAVGDFVYLRVTLLRGVHRFQTKGKLAPRYVGPFRINARRGEVAYQLELPASLGNVHDVFHVSQLKKCLRVPSEQADSEQIEVREDLTYVERPMKILDTMERRTRNRVIRFCKVQWSNHAEEEATWEREDELKAAHPDLFASSSESRGRDSV

SEQ ID NO: 19172 - protein, 1767 aa, Oryza sativa
  Clone ID: TF_OSC404680j.C1.p3.gm
MVTTRRTAVTGDGNQPEGSNPNHQGNPPPPPPPPPPPPPDTNAILTQILAQQANMMTAFLHHLQNPPQQNAPPPPPQHSKLAEFLRIRPPTFSSSNNPVDALDWLHAVGKKLDTVQCSDEEKVIFAAHQLQGPASLWWDHFQATQPEGQPITWARFTAAFRRTHVPAGVVALKKREFRELKQGNRSVMEYLHEFNNLARYAPEDVREDEEKQEKFLAGMDPELSVRLVSGDYPDFQRLVDKSIRLEAKHKELESHKRRLANFRNQQGANQRVRYTNPYPGGSSSQQPQQQQPRSAPRPQFVVRVPQPQQQQNQQGTRAPRPPTPAVQPGQGRRDAQGQQRLCFNCFEPGHFADKCPKPRRQQGQAPPRPNNGGKDVIRGRVNHVTAEDVLTTPDVIVGLSEIPIVREFGDVFPEELPGMPPKREIEFRIDLAPGTTPLHKRPYRMAANELAEVKKQLEELKEKGYIRPSTSPWGAPVIFVEKKDKTKRMCVDYRALNEVTIKNKYPLPRIDDLFDQLKGATVFSKIDLRSGYHQLRIREEDIPKTAFTTRYGLYEFTVMSFGLTNAPAFFMNLMNKVFMEYLDKFVVVFIDDILIYSQSEEDHQHHLRLVLGKLREHQLYAKLSKCEFWLSEVKFLGHVISAKGVAVDPETVTAVTDWKQPKTVTQVRSFLGLAGYYRRFIENFSKIARPMTQLLKKEEKFVWSPQCEKAFQTLKEKLDGHVVAYASRQLRPHEGNYPTHDLELAAVVHALKIWRHYLIGNRCEIYTDHKSLKYIFTQSDLNLRQRRWLELIKDYDVGIHYHPGKANVVADALSRKSHCNTLNVRGIPPELSQQMEALNLSIVGRGFLAALEAKPTLLDQIREAQKNDPDMHGLLKNMKQGKAAGFTEDEHGTLWNGKRSLWPYVMCASVSRQNTNDRPVFSNLSKYQNGNGMKLGWISSPDFQKPKVDMIPYGTAYHPQTDGQTERLNQILEDMLRACVLDFGKTWDKSLPYAEFSYNNSYQASIQMAPYEALYGRKCRTPLLWDQVGESQVFGTDILREAEAKADSEQIEVREDLTYVERPMKILDTMERRTRNRAGPPATLADGWDPPVISFLAPRPPPARALAPPPPRIPPHPAVPARIKEGEITPRDSLSRFPLFSLSLSLGFVRFESRNRRRRLQWRPRSPRPIPPSPAAFSPSRCYIFVPRAPLFRFRRSPLALAVGFVLAPCTSLSAVAVDLRFAADVAPGFLPTRRHLHRLRRVVADPVRPFASPADRRSSVVLAVPNRAAAFLRFGRRFRRRCSPGVSRGLPFAFPLPFSLSGAAPPRRWSPAATIGARVRRLPSAVPARPPSGRAPRLPGGPGRQPPAPAGAADAWDPRRRPPPAACSRSTVDREADAWAPPPVDPMADRDEEQILYDTIAEGSSQYWNEEEGNKDPNQYLNEEGNVERDAEGNQEGNVQRDAEGNEEEEASGRQTRGKGVIPWKIGFKEDIHTYRSRMRSKRDTEAKIADLEYRVSSYELSMQEEVASRASTGQVGSQSMDAMQTLDETTCLVDDITQRTPCELYIPFKNLSIKVASGMAIPMDPSGTYHCRLIPAGYSKVEVELVEGATSSSLGDKRRLVHHLLRLRHLLLRLLHRLLRRLLHRLLRKLLVRLLPSQGPPKLHHLPPQATKKAKVDTAKNKDLGYDCTQEELDAYVALEVRRQLKPRSPEKKIPIVPSVRNFFRGMSAPAKEAIKLSDYERTLKKASSEKSKPVPQLGEQPNQEIEPLVTVKILEYKNLLMTPG

SEQ ID NO: 19173 - protein, 1791 aa, Oryza sativa
  Clone ID: TF_OSC404798j.C1.p16.fg
MDEVGGRWTFSRANEGYTSCGPMAGSVTRRGLDMTGFVLELRGMCVVLGYPHGVDYQARPLPDQEGDDAEPHAGWEVTAVILSGSPERTSLAVTAGGDSFPAACQNAALLAIGTLHQRYPDELQHSPYRYHPRRGGACDYATFRDASSEDDATIVHLARMVEAYDAARIDFHQMVRRGMVENNMKILELRQENLQLKKDLDAVEAQLHQLKIAQGEICRPKRRRVCRSQKITARKSTSRPELVRQSLAWTCFVETPRAEPAPVVPQEGEASGVGSTEVVWGMVMPMVTTRRNAVTGDGNQPEGSNHNHQGNPPPPPPPPPPPPPDTNAILTQILAQQANMMTAFLHHLQNPPQQNAPPPPPQHSKLAEFLRIRPPTFSSSNNPVDALDWLHAVGKKLDTVQCSDEEKVVFAAHQLQGPASLWWDHFQATQPEGQPITWARFTAAFRRTHVPAGVVALKKREFRELKQGNRSVMEYLHEFNNLARYAPEDVREDEEKQEKFLAGMDPELSVRLVSGDYPDFQRLVDKSIRLEAKHKELESHKRRLANFRNQQGANQRVRYTNPYPGGSSSQQQQQQQQPRSAPRPQFVVRIPQPQQQQNQQGTRAPRPPTPTVQSGQGRRDAQGQQRLCFNCFEPGHFADKCPKPRRQQGQAPPRSNNGGKDVIRGRVNHVTAEDVLTTPDVIVGTFLVHSIPATILFDSGASHSFISVPFVGRNQLGVERLRNPLLITTPGGVMTAKYYSPAVPIEIQGIPFSSDLILLDTKNLDVILGMNWLAQFQGVVDCARRTVTLYRGPEQPVVFFAPPTSVRSSGLHQIGLSEIPIVREFGDVFPEELPGMPPKREIEFRIDLAPGTTPLYKRPYRMAANELAEVKRQLEELKEKGYIRPSTSPWGAPVIFVEKKDKTKRMCVDYRALNEVTIKNKYPLPRIDDLFDQLKGATVFSKIDLRSGYHQLRIREEDIPKTAFTTRYGLYEFTVMSFGLTNAPAFFMNLMNKVFMEYLDKFVVVFIDDILIYSQSEEDHQHHLRLVLGKLREHQLYAKLSKCEFWLSEVKFLGHVISAKGVAVDPETVTAVTDWKQPKTVTQVRSFLGLAGYYRRFIENFSKIARPMTQLLKKEEKFVWSPQCEKAFQTLKEKLVSSPVLILPDTRKDFMVYCDASRQGLGCMLMQDGHVVAYASRQLRPHEGNYPTHDLELAAVVHALKIWRHYLIGNRCEIYTDHKSLKYIFTQSDLNLRQRRWLELIKDYDVGIHYHPGKANVVADALSRKSHCNTLNVRGIPPELSQQMEALNLSIVGRGFLAALEAKPILLDQIREAQKNDPDMHGLLKNMKQGKAAGFTEDEHGTLWNGKRVCVPHNRELKQLILQEAHESPYSIHPGSTKMYLDLKEKYWWVSMKREIAEFVALCDVCQRVKAEHQRPAGLLQPLQVPEWKWDEIGMDFITGLPKTQGGYDSIWVVVDRLTKVARFIPVKTTYGENKLAELYFARIVSLHGVPKKIVSDRGSQFTSHFWKKLQEELGTRLNFSTAYHPQTDGQTERLNQILEDMLRACVLDFGKTWDKSLPYAEFSYNNSYQASIQMAPYEALYGRKCRTPLLWDQVGESQVFGTDILREAEAKVRIIRDNLKVAQSRQKSYADNRRRDLEFAVDDFVYLRVTPLRGVHRFQTKEKLAPRYVGPFRIVARRGEVAYQLELPASLGNVHDVFHVSQLKKCLRVPSEQADSEQIEVREDLTYVERPVKILDTMERRTRNRVIRFCKVQWSNHAEEEATWEREDELKAAHPDLFASSSESRGRDSV

SEQ ID NO: 19174 - protein, 405 aa, Oryza sativa
  Clone ID: TF_OSC405314j.C1.p2.fg
MMTAFLHHLQNPPQQNAPPPPPQHSKLAEFLRIRPPTFSSSNNPVDALDWLHAVGKKLDTVQCSDEEKVVFAAHQLRGPASLWWDHFQATQPGEQPITWARFTAAFRRTHVPAGVVALKKREFRELKQGNRSVMEYLHEFNNLARYAPEDVREDEEKQEKFLAGMDPELSVRLVSGDYPDFQRLVDKSIRLEAKHKELESHKRRLANFRNQQGANQRVRYTNPYPGGSSSQQQQQQQQPRSAPRPQFVVRVPQPQQQQNQQGTRAPRPLTPTVQPGQGRRDASGPQRLCFNCFEPGHFADKCPKPRRQQGQAPPRSNNGGKDVIRGRVNHVTAEDVLTTPDVIVEKKDKTKRMCVDYRALNEVTIKNKYPLPRIDDLFDQLKGRPSTPSPSGVGKVAGTSIVCQA

SEQ ID NO: 19175 - protein, 709 aa, Oryza sativa
  Clone ID: TF_OSC405532j.C1.p2.fg
MSWHRAGVLLLGAQSCLPVPGVPAMAGSVTRRGLDMTGFVLELRGMCVVLGYPHGVDYQGRPLPEQEGDDGEPHAAWEVTAVILAGSPERTSLAVTAGGDSFPAASQSAALLAIGTLHQRYPDELQHSPYRYHPRRGGARDYATFRDASSEDDATIVHLARMVEAYDAARIDFHQMVRRGMVENNLKILELRQENLQLKKDLDAVEAQLHQLKIAQGEVCRPKRRRVCRSQKITARKSTSRPELVRQSLAWTCFVETPRAEPAPVVPQEGEASGVGSTEDALLLTFRPGPSQRRSANTGDGNQPEGSNHHHQGSPPPPPPPPPPPPPDTNAILTQILAQQANMMTAFLHHLQNPPQHNAPPPPPQHSKLAEFLRIRPPTFSSSNNPVDALDWLHAVGKKLDTVQCSDEEKVIFAAHQLQGPASLWWDHFQATQPEGQPITWARFTAAFRRTHVPAGVVALKKREFRELKQGNRSVMEYLHEFNNLARYAPEDVREDEEKQEKFLAGMDPELSVRLVSGDYPDFQRLVDKSIRLEAKHKELESHKRRLANFRNQQGANQRIRYTNPYPGGSSSQQQQQQQQPRFAPRPQFVVRVPQPQQQQNQQGTRAPRPPTPTVQPGQGRRDAQGPQRLCFNCFEPGHFADKCPKLRRQQGQAPSRSNNGEKDVIWGRVNHVTAEDVLTTPDVIVGSSETCFRKNYPVCRPNERLSSG

SEQ ID NO: 19176 - protein, 1809 aa, Oryza sativa
  Clone ID: TF_OSC405754j.C1.p5.fg
MDEVGGRWTFSRANEGYTSCGPMAGSVTRRGLDMTGFVLELRGMCVVLGYPHGVDYQARPLPEQEGEDAEPHAGWEVTAVILSGSPERTSLAVTAGGDSFPAACQNAALLAIGTLHQRYPDELQHSPYRYHPRRGGARDYATFRDASSEDDATVVHLARMVEAYDAARIDFHQMVRRGMVENNLKILELRQENLQLKKDLDALEAQLHQLKIAQGEDSRPKRRRVCRSQKITARKSTSRPELVRQSLAWTCFVETPRAEPAPVVPQEGEASGVGSSEGALLLTFRPGPSQRSPSLFAGSVWGFQMVTTRRNVNTGEGNQPEGSNPNHQGNPPPPPPPPPPPPPDTNAILTQILAQQANMMNAFLHHLQNPPQQNAPPPPPQHSKLAEFLRIRPPTFSSSNNPVDALDWLHAVGKKLDTVQCSDEEKVVFAAHQLQGPASLWWDHFQAAQPEGQPITWARFTAAFRRTHVPAGVVALKKREFRELKQGNRSVMEYLHEFNNLARYAPEDVREDEEKQEKFLAGMDPELSVRLVSGDYPDFQRLVDKSIRLEAKHKELESHKRRLANFRSQQGANQRVRYTNPYPGGSSSQQQQQQQPRPAPRPQFVVRVPQPQQQQNQQGTRAPRPPTPAVQPGQGRRDAQGQQRLCFNCFEPGHFADKCPKPRRQQGQAPPRSNNGGKDVIRGRVNHVTAEDVLTTPDVIVGTFLVHSIPATILFDSGASHSFISVPFVGRNQLGVERLRNPLLITTPGGVMTAKYYSPAVPIEIQGIPFPSDLILLDTKNLDVILGMDWLAQFQGVVDCARRTVTLYRGPEQPVVFFAPPTSVRSSELHQIGLSEIPIVREFGDVFPEELPGMPPKREIEFRIDLVPGTTPLHKRPYRMAANELAEVKKQLEELKEKGYIRPSTSPWGAPVIFVEKKDKTKRMCVDYRALNEVTIKNKYPLPRIDDLFDQLKGATVFSKIDLRSGYHQLRIREEDIPKTAFTTRYGLYEFTVMSFGLTNAPAFFMNLMNKVFMEYLDKFVVVFIDDILIYSQSEEDHQHHLRLVLGKLREHQLYAKLSKCEFWLSEVKFLGHVISAKGVAVDPETVTAVTDWKQPKTVTQIRSFLGLAGYYRRFIENFSKIARPMTQLLKKEEKFVWSPQCEKAFQTLKEKLVSSPVLILPDTRKDFMVYCDASRQGLGCVLMQDGHVVAYASRQLRPHEGNYPTHDLELAAVVHALKIWRHYLIGNRCEIYTDHKSLKYIFTQSDLNLRQRRWLELIKDYDVGIHYHPGKANVVADALSRKGHCNALNVRSIPPELNQQMEALNLSIVGRGFLAALEAKPTLLDQIREAQKNDPDMHGLLKNMKQGKAAGFTEDEHGTLWNGKRVCVPDSRELKQLILQEAHESPYSIHPGSTKMYLDLKEKYWWVSMKREIAEFVALCDVCQRVKAEHQRPAGLLQPLQVPEWKWDEIGMDFITGLPKTQGGYDSIWVIVDRLTKVARFIPVKTTYGGNKLAELYFARIVSLHGVPKKIVSDRGSQFTSHFWKKLQEELGTRLNFSTAYHPQTDGQTERLNQILEDMLRACVLDFGKTWDKSLPYAEFSYNNSYQASIQMAPYEALYGRKCRTPLLWDQVGESQVFGTDILREAEAKVRIIRDNLKVAQSRQKSYADNRRRDLEFAVDDFVYLRVTPLRGVHRFRTKGKLAPRYVGPFRITARRGEVAYQLELPASLGNVHDVFHVSQLKKCLRVPSEQADSEQIEVREDLTYVERPVKILDAMERRTRNRVIRFCKVQWSNHAEEEATWEREDELKAAHPDLFASSSESRGRDSV

SEQ ID NO: 19177 - protein, 1757 aa, Oryza sativa
  Clone ID: TF_OSC408104j.C1.p1.fg
MDEVGGRWTFSRANEGYTSCGPMAGSVTRRGLDMIGFVLELRGMCVVLGYPHGVDYQARPLPEQEGEDAEPHAGWEVTVVILSGSPERTSLAVTAGGDSFPAACQNAALLAIGTLHQRYPDELQHSPYRYHPRRGGARDFATFRDASSEDDATVVHLARMVEAYDAARIDFHQMVRRGMVENNMKILELRQENLQLKKDLDALEAQLHQLKIAQGEDSRPKRRRVCRSQKITARKSTSRPELVRQSLAWTCFVETPRAEPAPVVPQEGEASGVGSSEAPSLFAGSVWGFQMVTTRRNVNTGEGNQPEGSNPNPQGNPPPPPPPDTNAILTQILAQQANMMNAFLHHLQNPPQQNAPPPPPQHSKLAEFLRIRPPTFSSSNNPVDALDWLHAVGKKLDTVQCSDEEKVVFAAHQLQGPASLWWDHFQATQPEGQPITWARFTAAFRRTHVPAGVVALKKREFRELKQGNRSVMEYLHEFNNLARYAPEDVREDEEKQEKFLAGMDPELSVRLVSGDYPDFQRLVDKSIRLEAKHKELESHKRRLANFRNQQGANQRVRYTNPYPGGSSSQQQQQQPRPAPRPQFVVRVPQPQQQQNQQGTRAPRPPTPAGQPVQGRRDASGPQRLCFNCFEPGHFADKCPKPRRQQGQAPPRPNNGGQGVIRGRVNHVTAEDVLTTPDVIVGTFLVHSIPATILFDSGASHSFISVPFVGRNQLGVERLRNPLLITTPGGVMTAKYYSPAVPIEIQGIPFPSDLILLDTKNLDVILGMNWLAQFQGVVDCARRTVTLYRGPEQPVVFFAPPTSVRSSELHQIELSEIPVVREFGDVFPEELPGMPPKREIEFRIDLAPGTTPLYKRPYRMAANELAEVKKQLEELKEKGYIRPSTSPWGAPVIFVEKKDKTKRMCVDYRALNEVTIKNKYPLPRIDDLFDQLKGATVFSKIDLRSGYHQLRIREEDIPKTAFTTRYGLYEFTVMSFGLTNAPAFFMNLMNKVFMEYLDKFVVVFIDDILIYSQSEEDHQHHLRQVLGKLREHQLYAKLSKCEFWLSEVKFLGHVISSKGVAVDPETVTAVTDWKQPKTVTQVRSFLGLAGYYRRFIENFSKIARPMTQLLKKEEKFVWSPQCEKAFQTLKEKLVSSPVLILPDTRKDFMVYCDASRQGLGCVLMQDGHVVAYASRQLRPHEGNYPTHDLELAAVVHALKIWRHYLIGNRCEIYTDHKSLKYIFTQSDLNLRQRRWLELIKDYDVGIHYHPGKANVVADALSRKSHCNTLNVRGIPPELNQQMEALNLNIVGRGCLAALEAKPTLLDQIREAQKNDPDMHGLLKNMKQGKAAGFTEDEHGTLWNGKRVCVPDSRELKQLILQEAHESPYSIHPGSTKMYLDLKEKYWWVSMKREIAEFVALCDVCQRVKAEHQRPAGLLQPLQVPEWKWDEIGMDFIPGLPKTQGGYDSIWVIVDRLTKVARFIPVKTTYGGNKLAELYFARVVSLHGVPKKIVSDRGSQFTSHFWKKLQEELGTRLNFSTAYHPQTDGQTERLNQILEDMLRACVLDFGKTWDKSLPYAEFSYNNSYQASIQMAPYEALYGRKCRTPLLWDQAGESQVFGTDILREAEAKVRIIRDNLKVAQSRQKSYADNRRRDLEFAVDDFVYLRVTPLRGVHRFQTKGKLAPRYVGPFRIIARRGEVAYQLELPASLGNVHDVFHVSQLKKCLRVPSEQADSEQIEVREDLTYVEKPVKILDTMERRTRNRVIRFCKVQWSNHAE

SEQ ID NO: 19178 - protein, 893 aa, Oryza sativa
  Clone ID: TF_OSC408351j.C1.p6.fg
QVQTTTVDAAGHLQTKTKEKSNILKPGQGRRDVQGQQRLCFNCFEPGHFADKCPKPRRQQGQAPPRPNNGGKDVIRGRVNHVTAEDVLTTPDVIVGVVDCARRTVTLYRGPEQPVVFFAPPTSVGSSELHQIGLSEIPIVSEFGDVFPEELPGMPPKREIEFWIDLAPGTTPLYKRPYRMAANELAEVKKQLEELKEKGYIWPSTSPWGAPVIFVEKKDKTKRMCVDYRALNEVTIKKQLKGATVFSKIDLRSGYHQLRIREEDIPKTVFTTRYGLYEFTVMSFGLTNAPAFFMNLMNKVFMVYLDKFVVVFIDDILVYSQSEEDHQQHLRLVLGKLREHQLYAKLSKCEFWLSKVKFLGHVISAKGVAVDPETVTAVTDWKQPKTVTQVRNFLGLAGYYRRFIENFSKIARPMTQLLKKEEKFVWSPQCEKAFQTFKEKLVSPPVLILPDTRKDFMVYCDASRQGLGCVLMQEGHVVAYASCQLWPHEGNYPTHDLELAAVGKAAGFTEDEHGTLWNGNRVCVPNDKELKQLILQEAHESPYSIHPGSTKMCLDLKEKYWWVSIKREIAEFVALCDVCQRVKAEHQRPAGLLQPLQVPEWKWVEIGMNFITGLPKTQGCYDSIWVVVDRLTKVARFIPVKTTYGGNKLAELYFARIVSLHGVPKKIVSDRGSQFTSHFWKKLQEELDFGKTWDKSLPYAEFSYNNSYQASIQMAQYEALYGRKCRTPLLWDQVGESQVFGTDILREAEAKVRTIRENLKVAQSRQKSYADNRRRDLEFAVDDFVFLRVTPLRGVHWFQTKGKLAPRFVGPFRIIARRGEVAYQLELPASLGNVHDVFHVSQLKKCLRVPSEQADSEKIEVREDLTYVERPVKILDTMERRTRNQVIRFCKVQ

SEQ ID NO: 19179 - protein, 1538 aa, Oryza sativa
  Clone ID: TF_OSC408405j.C1.p4.fg
MSWHRAGVLLLGVQSCLPVPGVPAVGGIGSVLLSMARMGWKLCHVFRLYTVVMLTTRRSAATGDGNQPEGSNHHHQGSPPPPPPPPPPPPPDTNAILTQILAQQANMMTAFLHHLQNSPQHNAPPPPPQHSKLAEFLRIRPPTFSSSNNPVDALDWLHAVGKKLDTVQCSDEEKATQPEGQPITWARFTAAFRRTHVPAGVMALKKREFRELKQGNRSVMEYLHEFNNLARYAPEDVREDEEKQEKFLAGMDPELSVRLVSGDYPDFQRLVDKSIRLEAKHKELESHKRRLANFRNQQGANQRVRYTNPYPGGSSSQQQQQQQQPRSAPRPQFVVRVPQPQQQQNQQGTRAPRPPTPTVQPGQGRRDAQGPQRLCFNCFEPGHFADKCPKPRRQQGQAPPRSNNGGKDVIRGRVNHVTAEDVLTTPDVIVGTFLIHSIPATILFDSGASHSFISVPFVGRNQLGVERLRNPLLITTPGGVMTAKYYSPAVPIEIQGIPFPSDLILLDTKNLDVILGMNWLAQFQGVVDCARRTVTLYRGPEQPVVFFAPPTSVSSSELHQIGLSEIPIVREFGDVFPEELPGMPPKRQIEFRIDLAPGTTPLYKRPYRMAANELAEVKKQLEELKEKGYIRPSTSPWGAPVIFVEKKDKTKRMCVDYRALNEVTIKNKYPLPRIDDLFDQLKGATVFSKIDLRSGYHQLRIRDEDIPKTAFTTRYGLYEFTVMSFGLTNAPAFFMNLMNKVFMEYLDKFVVVFIDDILVYSQSEEDHQHHLRLVLGKLREHQLYAKLSKCEFWLSEVKFLGHVISAKGVAVDPETVTAVIDWKQPKIVTQVRSFLGLAGYYRRFIENFSKIARPMTQLLKKEEKFVWSPQCEKAFKTLKEWLVSSPVLILPDTRKDFMVYCDASRQGLGCVLMQDGHVVAYASRQLRPHEGNYPTHDLELAAVVHALKIWRHYLIGNRCEIYTDHKSLKYIFTQSDLNLRQRRWLELIKDYDVGIHYHPGKANVVADALSRKSHCNTLNVRGIPPELNQQMEALNLSIVGRGFLAALEAKPTLLDRIREAQKNDPDMHGLLKNMKQGKAAGFTEDEHGTLWNGNRVCVPDNRELKQLILQEAHESPYSIHPGSTKMYLDLKEKYWWVSMKREIAEFVALCDVCQRVKAEHQRPAGLLQPLQVPEWKWDEIGMDFITGLPKTQGGYDSIWVVVDRLTKVARFIPVKTTYGGNKLAELYFARIVSLHGVPKKIVSDRGSQFTSHFWKKLQEELGTRLNFSTAYHPQTDGQTERLNQILEDMLRACVLDFGKTWDKSLPYAEFSYNNSYQASIQMAPYEALYGRKCRTPLLWDQVGESQVFGTDILREAEAKVRTIRDNLKVAQSRQKSYADNRRRNLEFAVDDFVYLRVTPLRGVHRFQTKGKLAPRYVGPFRIVARRGEVAYQLDLPASLGNVHDVFHVSQLKKCLRVPSAQADSEQIEVREDLTYVERPVKILDTMERRTRNRVIRFCKVQWSNHAEEEATWEREDELKAAHPDLFASSSESRGRDSV

SEQ ID NO: 19180 - protein, 1713 aa, Oryza sativa
  Clone ID: TF_OSC409045j.C1.p3.fg
MSWHRAGVLLLGAQSCLPVPGVPAVGGIGSVLLSMARMGWKLCHVFRPYTMVMAGSVSRRGLDMTGFVLELRGMCVVLGYPHGVDYQGRPLPEQEGDDAEPHAAWERYPDELQHSPYRYHPRRGGARDYATFWDASSEDDATIMHLARMVEAYDAARIDFHQMVRRGMVENDLKILELRQENLQLKKDLDAVEAQLHQLKITQGEVCRPKRRRVCRSQKITARKSTSRPELVRQSLAWTCFVETPRAEPAPVVPQEGEASGVGSTEDALLLTFRPGPSQWRNAATSDGNQPEGSNHNNHGSPPPPPPPPPPPPPDTNAILTQILAQQANMMAAFLHHIQNPPQHNAPPPPPQHSKLAEFLRIRPPTFSSSNNPVDALDWLHAVGKKLDTVQCSDEEKVVFAAHQLQGPASLWWDHFQATQPEGQPITWARFTAAFRRTHVPAGVMALKKREFRELKQGNRSVMEYLHEFNNLARYAPEDVREDEEKQEKFLAGMDPELSVRLVSGDYPDFQRLVEKSIRLEAKHKELESHKRRLANFRNQQGANQRIRYTNPYPGGSSSQQQQPRSAPRPQFVVRVPQPQQQQSQQGTRAPRPPTPAAQSGQGRRDVQGPQRLCFNCFEPGHFADKCPKPRRQQGQAPPRSNNGGKDVIRGRVNHVTAEDVLTTPDVIVGTFLIHSIPATILFDSGASHLFISVPFVGRNQLGVERLRNPLLITTPGGVMTAKYYSPAVPIEIQGIPFPSDLILLDTKNLDVILGMNWLAQFQGVVDCARRTVTLYRGPEQPVVFFAPPTSVSSSELHQIGLSEIPIVREFGDVFPEELPGMPPKREIEFRIDLALGTTPLYKRPYRMAANELAEVKKQLEELKEKGYIRPSTSSWGAPVIFVEKKDKTKRMCVHYRALNEVTIKNKYPLPRIDDLFDQLKGATVFSKIDLRSGYHQLRIREEDIPKTAFTTRYGLYEFTVMSFGLTNAPAFFMNLMNKVFMEYLDKFVVVFIDDILKQPKTVTQIRSFLGLAGYYRRFIENFSKIARPMTQLLKKEEKFVWSPQCEKAFKTLKEKLVSSPVLILPDTRKDFMVYCDASRQGLGCVLMQDGHVVAYASRQLRPHEGNYPTHDLELAAVVHALKIWRHYLIGNRCEIYTDHKSLKYIFTQSDLNLRQRRWLELIKNYDVGIHYHPGKANVVADALSRKSHCNTLNVRGIPPELNQQMEALNLSIVGRGFLAALEAKPTLLDQIREAQKNDPDMHGLLKNMKQGKAAGFTEDEHGTLWNRNRVCVPDNRELKQLILQEAHESPYSIHPGSTKMYLDLKEKYWWVSMKREIAEFVALCDVCQRVKAEHQRPAGLLQPLQVPEWKWDEIGMDFITGLPKTQGGYDSIWVVVDRLTKVARFIPVKATYGGNKLAELYFARIVSLHGVPKKIVSDRGSQFTSHFWKKLQEELGTRLNFSTAYHPQTDGQTERLNQILEDMLRACVLDFGKTWDKSLPYAEFSYNNSYQASIQMAPYEALYGRKCRTPLLWDQVGESQVFGTDILREAEAKVRTIRDNLKVARSRQKSYADNRRRDLEFAVDDFVYLRVTPLRGVHRFQTKGKLAPRFVGPFRIIARRGEVAYQLELPASLGNVHDVFHVSQLKKCLRVPSEQADSEQIEVREDLTYVERPVKILDTMERRTRNRVIRFCKVQWSNHAEEEATWEREDELKAAHPDLFVSSSESRGRDSV

SEQ ID NO: 19181 - protein, 548 aa, Oryza sativa
  Clone ID: TF_OSC410295j.C1.p1.hg
MMTAFLHHLQNPPQQNAPPPPPQHSKLAEFLRIRPPTFSSSNNPVDVLDWLHAVGKKLDTVQCSDEEKVIFAAHQLQGPAFLWWDHFQATQPEGQPITWARFTAAFQRTHVPAGVVALKKREFRELKQGNCSVMEYLHEFNNLARYAPEDVREDEEKQEKFLAGMDPELSVRLVSGDYPDFQRLVDKSIRLEAKHKELESHKRRLANFRNQQGANQRVRYTNPYPGGSSSQQQQQQQQPRSAPRPQFVVRVPQPQQQQNQQGTRAPRPPTPAVQPGQGRRDAQGQQRLCFNCFEPGHFADKCPKPRRQQGQAPPRSNNGGKDVIRGRVNHVTAEDVLTTPDVIVGTFLIHSIPATILFNSGASHSFISVPFVGRNQLGVERLRNPLLITTPGGVMTAKYYSPAVPIEIQGIPFPSDLILLDTKNLDVILGMNWLAQFQGVVDCARRTVTLYRGPEQPVVFFAPPTSVSSSELHQIGLSEIPIVREFGDVFPEELLGMPPKREIEFRIDLAPGTTPRYKRPYRMAANELAQNWDSTCHWLALIRSSRYI

SEQ ID NO: 19182 - protein, 1705 aa, Oryza sativa
  Clone ID: TF_OSC411279j.C1.p18.fg
MSWHRAGVLLLGAQSCLPVPGVPAVGGIGSVLLSMPRMGWKLCHVFRLYTVVMAGSVTRRGLDMTGFVLELRGMCVVLGYPHGVDYQARPLPEQEGDDAEPHAGWEVTVVILSGSPERTSLAVTAGGDSFPAACQNAALLAIGTLHQRYPDELQHSPYRYHPRRGGARDYATFRDASSEDDATIVHLARMVEAYDAARIDFHQMVRRGMVENNLKILELRQENLQLKKDLDAVEAQLHQLKIAQGEVCRPKRRRVCRSQKITARKSTSRPELVRQSLAWTCFVETPRAEPVPVVPQEGEASGVGSTEDALLLTFRPGPSQRRSANTGAGNQPEGSNHNHEGNPPPPPPPPPPPPPDTNAILTQILAQQANMMTAFLHHLQNPPQHNAPPPPPQHSKHAEFLRIRPPTFSSSNNPMDALDWLHAVGKKLDTVQCSDEEKVIFAAHQLQGPASLWWDHFQAAQPEGQPITWARFTAAFRRTHVPAGVVALKKREFRELKQGNRSVMEYLHEFNNLARYAPEDVREDEEKQEKFLAGMDPELSVRIVSGDYPDFQRLVDKSIRLEAKHKELESHKRRLANFRNQQGANQRPQQQQNQQGTRAPRPPTPAVQPGQGRRDAQGQQRLCFNCFEPGHFADKCPKPRRQQGQAPPRSDNGGKDVIRGRVNHVTAEDVLTTPDVIVGTFLIHSIPATILFDSGASHSFISVPFVGRNQLGVERLRNPLLITTPGGVMTAKYYSPAVPIEIQGVPFPTDLILLDTKNLDVILGMNWLAQFQGVVDCARRTVTLYRGPEQPVVFFAPPTSVRSSELHQIGLSEIPIVREFGDVFPEELPGMPPKREIEFRIDLAPGTTPLYKRPYRMAANELAEVKKQLEELKEKGYIRPSTSPWGAPVIFVEKKDKTKRMCVDYRALNEVTIKNKYPLPRIDDLFDQLKEEDHQHHLRLVLGKLREHQLYAKLSKCEFWLSEVKFLGHVISAKGVAVDPETVTAVTDWKQPKTVTQIRSFLGLAGYYRRFIENFSKIARPMTQLLKKEEKFVWSPQCEKAFQTLKEKLVSSPVLILPDTHKDFMVYCDASRQGLGCVLMQDGHVVAYASRQLRPHEGNYPTHDLELAAVVHALKIWRHYLIGNRCEIYTDHKSLKYIFTQSDLNLRQRRWLELIKDYDVGIHYHPGKANVVADALSRKSHCNTLNVRGIPPELNQQMEALNLSIVSRGFLATLEAKPTLLDQIREAQKNDPDMHGLLKNMKQGKAAGFTEDEHGTLWNGNRVCVPDNRELKQLILQEAHESPYSIHPGSTNMYLDLKEKYWWVSMKREIAEFVALCDVCQRVKAEHQRPAGLLQPLQVPEWKWDEIGMDFITGLPKTQGGYDSIWVVVDRLTKVARFIPVKTTYGGNKLAELYFARIVSLHGVPKKIVSDRGSQFTSHFWKKLQEELGTRLNFSTAYHPQTDGQTERLNQILEDMLRACVLDFGKTWDKSLPYAEFSYNNSYQASIQMAPYEALYGRKCRTPLLWDQVGESQVFGIDILREAEAKVRTIRDNLKVAQSRQKSYADNRRRDLEFAVDDFVYLRVTPLRGVHRFQTKGKLAPRYVGPFRIIARRGEVAYQLELPASLGNVHDVFHVSQLKKCLRVPFEQADSEQIEVRKDLTYVERPVKILDTMERRTRNRVIRFCKVQWSNHAEEEATWEREDELKAAHPDLFASSSESRGRDSV

SEQ ID NO: 19183 - protein, 1809 aa, Oryza sativa
  Clone ID: TF_OSC411279j.C1.p19.fg
KIWKWLAWLAWDELNPGSGCQFGPNHRRPGLRQMAGSVTRRGLHMTGFVLELRGMCVVLGYPHGVDYQARPLPEQEGEDAEPHAGWEVTAVILSGSPERTSLAVTAGGDSFPAACQNAALLAIGTLHQRYPDELQHSPYRYHPRRGGARDYATFRDASSEDDATVVHLARMVEAYDAARIDFHQMVRRGMVENNMKILELRQENLQLKKDLDALEAQLHQLKIAQGEDSRPKRRRVCRSQKITARKSTSRPELVRQSLAWTCFVETPRAEPAPVVPQEGEASGVGSSEVLIVSSPSLFAGSVRGFQMVTTRRNVNTGEGNQPEGSNPNHQGNPPPPSPPPPPPDTNAILTQILAQQANLMNAFLHHLQNPPQHNAPPPPPQHSKLAEFLRIRPPTFSSSNNPVDALDWLHAVGKKLDTVQCSDEEKVIFAAHQLQGPASLWWDHFQATQPEGQPITWTRFTAAFRRTHVPAGVVALKKREFRELKQGNRSVMEYLHEFHNLARYAPEDVREDEEKQEKFLAGMDPELSVRLVSGDYPDFQRLVDKSIRLEAKHKELESHKRRLANFRNQQGANQRVRYTNPYPGGSSSQQQQQQQPRSAPRPQFVVRVPQQQQQQNQQGTRAPRPPTPTVQPVQGRRDAQGQQRLCFNCFEPGHFADKCPKPRRQQGQAPPRSNNGGKDVLRGRVNHVTAEDVLTTPDVIVGTFLVHSIPATILFDSGASHSFISVPFVGKSQLGVERLRNPLLITTPGGVMTAKYYSPAVPIEIQGIPFPSDLILLDTKNLDVILGMNWLAQFQGVVDCARRTVTLYRGPEQPVVFFAPPTSVRSSELHQIGLSEIPIVREFGDVFPEELPGMPPKREIEFRIDLAPGTTPLHKRPYRMAANELAEVKTQLEELKEEGYIRPSTSPWGAPVIFVEKKDKTKRMCVDYRALNEVTIKNKYPLPRIDDLFDQLKGATVFSKIDLRSGYHQLRIREEDIPKTAFTTRYGLYEFTVMSFGLTNAPAFFMNLMNKVFMEYLDKFVVVFIDDILIYSQSEEDHQHHLRLVLGKLREHQLYAKLSKCEFWLSEVKFLGHVISAKGVAVDPETVTAVTDWKQPKTVTQIRSFLGLAGYYRRFIENFSKIARPMTQLLKKEEKFVWSPQCEKAFQTLKEKLVSSPVLILPDTRKDFMVYCDASRQGLGCVLMQDGHVVAYASRQLRPHEGNYPTHDLELAAVVHALKIWRHYLIGNRCEIYTDHKSLKYIFTQSDLNLRQRRWLELIKDYDVGIHYHPGKANVVADALSRKSHCNTLNVRGIPPELNQQMEALNLNIVGRGFLAALEAQPTLLDQIREAQKNDPDMRGLLKNMKQGKAAGFTEDEHGTLWNGKRVCVPDSRELKQLILQEAHESPYSIHPGSTKMYLDLKEKYWWVSMKREIAEFVALCDVCQRVKAEHQRPAGLLQPLQVPEWKWDEIGMDFITGLPKTQGGYDSIWVIVDRLTKVARFIPVKTTYGGNKLAELYFARIVSLHGVPKKIVSDRGSQFTSHFWKKLQEELGTRLNFSTAYHPQTDGQTERLNQILEDMLRACVLDFGKTWDKSLPYAEFSYNNSYQASIQMAPYEALYGRKCRTPLLWDQVGESQVFGTDILREAAAKVRIIRDNLKVAQSRQKSYADNRRRDLEFAVDDFVYLRVTPLRGVHRFQTKGKLAPRYVGPFRIIARRGEVAYQLELPASLGNVHDVFHVSQLKKCLRVPSEQADSEQIEVREDLTYVEKPVKILDAMERRTRNRVIRFCKVQWSNHAEEEATWEREGELKAAHPDLFASSSESRGRDSV

SEQ ID NO: 19184 - protein, 1988 aa, Oryza sativa
  unsure (1)..(1988): unsure at all Xaa locations
  Clone ID: TF_OSC413096j.C1.p1.np
MAAGSSAPVSPSSGRPLSLPTLYKHSPCLPPPFPPLAAPSLRRNRARAVALSLRRHRRAPVCRRRRPGPSSASAPPPSVSPQPRRPRPPLRFARRQPERRRPRLPEPRRRLPPLRSPFPSSPSTRGELWTAFVSPFPPLSRAPLYRAGGHRRRPSGRGCAASRRLCRRGRLRARPAAAMWGPAVSRPRPRVRLTRGTHGAGRCEPGAPGPPWTHLGHIRTGLRASVAKHYRFHMSSGANEGYTSCGPVVEMSWHRAGVLLLGAQSCLPVPGVPGVGGIGSMYTSDQSIIYSNSRALGYGQAEQCTQMAGSVSRRGLDLTGFVLELRGMCVVLGYPHGVDYQGRPLPEQEGDDAEPHAAWEVTAVILTGSPERTSLAVTAGGDSFSAACQSAALLAISTLHQRYPDELQHSPYRYHPRRGGARDYATFRDASSEDDATIMHLARMVEAYDAARIDFHQMVRHGMVENNLKILKLRQENLQLKKDLDAVEAQLHQLKIAQREVCRPQRRRVCRSQKITARKSTSRPELVRQSLAWTCFVETPRAEPAPVVPQEGEASGVGSMEDALLLTFHGETRRNAATSDSNQPEGSNHNNHGSPPPPPPPPPPPPPDTNAILTQILAQQANMMAAFLHHIQNPPQHNAPPPPPQHSKLAEFLRIRPPTFSSSNNPVDALDWLHAVGKKLDTVQCSDEEKVIFAAHQLQGPASLWWDHFQATQLEGQPITWARFTAAFRRTHVPAGVMALKKREFRELKQGNRSVMEYLHEFNNLARYAPEDVREDEEKQEKFLAGMDPELSVRLVSGDYPDFQRLVDKSIRLEAKHKELESHKRRLANFRNQQGANQRIRYTNPYPGGSSSQQQQPRSAPRPQFVVRVPQPQQQQSQQGTRAPRPPTPAAQSGQGRRDVQGPQRLCFNCFEPGHFADKCPKPRRQQGQAPPHSNNGGKDVIWGRVNHVTAEDVLTTPDVIVGTFLIHSIPATILFDSGASHSFISVPFVGRNQLGVERLRNPLLITTPGGVMTAKYYSPAVPIEIQGIPFPSDLILLDTKNLDVILGMNWLAQFQGVVDCARRTVTLYRGPEXPVVFFAPPTSVSSSELHQIGLSEIPIVREFGDVFPEELPGMPPKREIEFRIDLAPGTTPLYKRPYRMAANELAEVKKQLEELKEKGYIRLSTSPWGAPVIFVEKKDKTKRMCVDYRALNEVTIKNKYPLPRIDDLFDQLKGATVFSKIDLRSGYHQLRIREEDIPKTAFTIRYGLYEFTVMSFGLTNAPAFFMNLMNKVFMEYLDKFVVVFIDDILVYSQSEEDHQHHLRLVLGKLREHQLYAKLSKCEFWLSEVTDWKQPKTVTQIRSFLGLAGYYRRFIENFSKITRPMTQLLKKEEKFVWSPQCEKAFKTLKEKLVSSPVLILLDTRKDFMVYCDASRQGLGVLMQDGHVVAYASRQLRPHEGNYPTHDLELAAVVHALKIWRHYLIGNRCEIYTDHKSLKYIFTQSDLNLRQRRWLELIKDYDVGIHYHPGKANVVADALSRKSHCNTLNVRGIPPELNQQMEALNLSIVGRGFLAALEAKPTLLDQIREAQKNDPDMHGLLKNMKQGKATGFTEDEHGTLWNGNRRVKAEHQRLAGHLQPLQVPEWKWDEIGMDFITGLPKTQGGYDSIWVVVDRLTKVARFILVKATYGGNKLAELYFARIVSLHGVPKKIVSDRGSQFTSHFWKKLQEELGTRLNFSTAYHPQTDGQTERLNQILEDMLRACVLDFGKTWDKSLPYAEFSYNNSYQASIQMAPYEALYGRKCRTPLLWDQVGESQVFGTDILREAEAKVRTIRDNLKVAQSRQKSYVDNRRRDLEFAVDDFVYLRVTPLRGVHRFQTKGKLAPRFVGPFRIIARRGEVAYQLELPASLGNVHDVFHVSQLKKCLRVPSEKADSEXIEVREDLTYVERPVKILDTMERRTRNRVIRFFKVHWSNHAEEEATWEREDELKAAHPDLFVSSSESRGRDSV

SEQ ID NO: 19185 - protein, 2011 aa, Oryza sativa
  unsure (1)..(2011): unsure at all Xaa locations
  Clone ID: TF_OSC413096j.C1.p2.np
MAAGTPAPVSPSSGHPLPLLTLYKPSPCLPPPFPPLAALSPRRNRARAIALSLRRGRRAPVRRRCRPGPPLPSASPPSASPDPRRPRPPLRFARRPPEHRRPRPPEPRRRLPPLRSSFPSSPSTWGEPWTAFVSPFPPLSRPPLRRTYGRRRRPXGRGRAASRLRRRGRLRARPAAAVWGPAVSRPRPXVRLTRGTHGAGRESPGAPGPPWSYLGYYKDXARASVAKHYRFHMSSGANEGYTSCGPVVEMSWHRAGVLLLGAQSCLPVPGVPAVGGVGSMYTSDQSIIYSNSRALGYGQAEQCTQMAGSVSRRGLDLTSFVLELRGMCVALGYPHGVDYQGRPLPEQEGDDAEPHAAWEVTAVILTGSPERTSLAVTAGGDSFSAACQNAALLAIGTLHQRYLDELQHSPYRYHPRRGGARDYATFRDASSEDDATIMHLARMVXAYDAARIDFHQMVRPGMVENNMKILELRQENLQLKKDLDVVEAQLHQLKIAQGEVCRPKRCRVCRSQKITARKSTSRPELVRQSLAWTCFVETPRAEPAPVVPQEGEASGVGSTEDALLLTFHGETRRSAATGDGNQPEGSNHNNHGSPPPPPPPPPPDTNAILTQILAQQANMMAVFLHHIQNPPHHNAPPPPPQHSKLAEFLRIRPPTFSSSNNPVDALDWLHAVGKNLDTVQCSDEEKVVFAAHQLQGPASLWWDHFQATQPEGQPITWARFTAAFRRTHVPAGVMALKKREFRELKQGNRSVMEYLHEFNNLARYAPEDVREDEEKQEKFLAGMDPELSVRLVSGDYPDFQRLVDKSIRLEAKHKELESHKRRLANFRNQQGANQRIRYTNPYPGGSSSQQQQQXQQPRSAPRPQFVVRVPQPQQQQSQQGTHAPRPPTPAAQSGQGRRDVQGPQRLCFNCFEPGHFADKCPKSRRQQGQAPPRSNNGGKDVIRGRVNHVTAEDVLTTPDVIVGTFLIHSIPATILFDSGASHSFISVPFVGRNQLGVERLRNPLLITTPGGVMTAKYYSPAVPIEIQGIPFPSDLILLDTKNLDVILGMNWLAQFQGVVDCARRTVTLYRGPEQPVVFFAPPTSVSSSELHQIGLSEIPIVREFGDVFPEELPGMPPKREIEFRIDLATGTTPLYKRPYRMAANELAEVKKQLEELKEKGYIRPSTSPWGAPVIFVEKKDKTKRMCVDYRALNEVTIKNKYPLPRIDDLFDQLKGATVFSKIDLRSGYHQLRIREEDIPKTAFTTRYGLYEFTVMSFGLTNAPAFFMNLMNKVFMEYLDKFVVVFIDDILVYSQSEEDHQHHLRLVLGKLREHQLYAKLSKCEFWLSEVKFLGHVISAKGVAVDPETVTAVTDWKQPKTVTQIRSFLGLAGYYRRFIENFSKIARPMTQLLKKEEKFVWSPQCEKAFQTLKEKLVSSPVLIMPDTRKDFTVYCDASRQGLGCVLMQDGHVVAYASRQLRPHEGNYPTHDLELAAVVHALKIWRHYLIGNRCEIYTDHKSLKYIFTQSDLNLRQRRWLELIKDYDVGIHYHPGKANMVADALSRKSHCNTLNVRGIPPELNQQMEALNLSIVGRGFLAALEAKPTLLDQIREAQKNDPDMRGLLKNMKQGKAAGFTEDEHGTLWNGNRRVKAEHQRPAGLLQPLQVPEWKWDEIGMDFITGLSKTQGGYDSIWVVVDRLTKVARFIPVKTTYGGNKLAELYFARIVSLHGVPKKIVSDRGSQFTSHFWKKLQEELGTRLNFSTTYHPQTDGQTERLNQILEDMLRACVLDFGKTWDKSLPYAEFSYNNSYQASIQMAPYEALYGCKCRTLLLWDQVGESQVFGTDILREAKAKVRTIRDNLKVAQSRQKSYADNRRRDLEFAVDDFVYLRVTPLRGVHRFQTKGKLAPRFVGPFRIIARCGEVAYQLELPASLGNVHDVFHVSQLKKCLRVPSEQADSEQIEVREDLAYVERPVKILDTMERRTRNRVIRFCKVQWSNHAEEEATWEREDELKAAHPDLFASSSESRGRDSV

SEQ ID NO: 19186 - protein, 419 aa, Oryza sativa
  Clone ID: TF_OSC413731j.C1.p2.fg
MTRRSANTGDGNQPEGSNHNHQGNPPPPPPPPPPPPPDTNAILTQILAQQANMMTAFLHHLQNPPQLNAPPPPPQHSKLAEFLRIRPPTFSSSNNPVDALDWLHAVGKKLDTVQCSDEEKVIFAAHQLQGPASLWWDHFQATQPEGQPITWARFTAAFRRTHVPAGVVALKKREFRELKQGDRSVMEYLHEFNNLARYAPEDVREDEEKQEKFLAGMDPELSVRLVSGDYPDFQRLVDKSIRLEAKHKELESHKRRLANFRNQQGANQRVRYTNPYPGGSSSQQQQQQQQPRSAPRPQFVVRVPQPQQQQNQQGTRAPRPPPPTVQPGQGRRDAQGPQRLCFNCFEPGHFADKCPKPRRQQGQAPPRPNNGGKDVIRGRVNHVTAEDVLTTPDVIVESSETCFRKNYLVCRLSERLSSG

SEQ ID NO: 19187 - protein, 1682 aa, Oryza sativa
  Clone ID: TF_OSC416075j.C1.p2.gm
MDEVGRRWTFSRANEGYTSCGPMAGSVTRRGLDMTGFVLELRGMCVVLGYPHGVDYQARPLPEQEGEDAEPHAGWEVTAVILSGSPERTSLAVTAGGDSFPAACQNAALLAIGTLHQRYPDELQHSPYRYHPRRGGARDHATFRDASSEDDATVVHLARMVEAYDAARIDFHQMVRRGMVENNLKILELRQENLQLKKDLDAVEAQLHQLKIAQGEDSRPKRRRVCRSQKITARKSTSRPELVRQSLAWTCFVETPRAEPAPVVPQEGEASGVGSSEGALLLTFRPGPSQRSSSLFAGSVWGFQMVTTRRNVNTGEGNQPEGSNPNPQGNPPPPPPPDTNAILTQILAQQANMMNAFLHHLQNPPQQNAPPPPPQHSKLAEFLRIRPPTFSSSNNPVDALDWLHAVGKKLDTVQCSDEEKVVFAAHQLQGPASLWWDHFQATQPQGQPITWAHFTAAFRRTHVPAGVVALKKREFRELKQGNRSVMEYLHEFNNLARYAPEDVREDEEKQEKFLAGMDPELSVRLVSGDYPDFQRLVDKSIRLEAKHKELESHKRRLANFRNQQGANQRVRYTNPYPGGSSSQQQQQQQPRPAPRPQFVVRVPQPQQQQNQQGTRAPRPPTPAVQPVQGRRDAQGQQRLCFNCFEPGHFADKCPKPRRQQGQAPPRSNNGGKDVIRGRVNHVTAEDVLTTPDVIVGTFLVHSIPATILFDSGASHSFISVPFVGKNQLGVERLRNPLLITTPGGVMTAKYYSPAVPIEIQGIPFPSDLILLDTKNLDVILGMNWLAQFQGIGLSEIPIVREFGDVFPEELPGMPPKREIEFRIDLAPGTTPLYKRPYRMAANELAEVKKQLEELKEKGYIRPSTSPWGAPVIFVEKKDKTKRMCVDYRALNEVTIKNKYPLPRIDDLFDQLKGATVFSKIDLRSGYHHLRIREEDIPKTAFTTRYGLYEFTVMSFGLTNAPAFFMNLMNKVFMEYLDKFVVVFIDDILIYSQSEEGHQHHLRLVLGKLGNINCMPSLARYYRRFIENFSKIARPMTQLLKKEEKFVWSPQCEKAFQTLKEKLVSSPVLILPDTRKDFMVYCDASRQGLGCVLMQDGHVVAYASRQLRPHEGNYPTHDLELAAVVHALKIWRHYLIGNRCEIYTDHKSLKYIFTQSDLNLRQRRWLELIKDYDVGIHYHPGKANVVADALSRKSHCNTLNVRGIPPELNQQMEALNLSIVGRGFLAALEAKPTLLDQIREAQKNDPDMHGLLKNMKQGKAAGFTEDEHGTLWNGKREKYWWVSMKREIAEFVALCDVCQRVKAEHQRPAGLLQPLQVPEWKWDEIGMDFVTGLPKTQGGYDSIWVIVDRLTKVARFIPVKTTYGGNKLAELYFARIVSLHGIPKKIVSDRGSQFTSHFWKKLQEELGTRLNFSTAYHPQTDGQTERLNQILEDMLRACVLDFGKTWDKSLPYAEFSYNNSYQASIQMAPYEALYGRKCRTPLLWDQVGESQVFGTDILREAEAKVRIIRDNLKVAQSRQKSYADNRRRDLEFAVDDFGYLRVTPLRGVHRFQTKGKLAPRYVGPFRIIARRGEVAYQLELPASLGNVHDVFHVSQLKKCLRVPSEQADSEQIEVREDLTYVERPVKILDTMERRTRNRVIRFCKVQWSNHAEEEATWEREDELKAAHPDLFASSSESRGRDSV

SEQ ID NO: 19188 - protein, 1977 aa, Oryza sativa
  unsure (1)..(1977): unsure at all Xaa locations
  Clone ID: TF_OSC416252j.C1.p1.np
MAAGSPAPVSFPADRPLSLPTLFKPSPLLPRPFLPLAAPFPRQNRARAVVLSLLRHRRPPAGPLRSPGPPPASASSPQASPCRRXPCPPPRRARRPPKRHSPRPPEPRHRLPPLRTPPLPSPSTRGETWTTALSPFPPLSWPPLRCAYGRRRRPXGRAASRRPRRRGRLRARRVAVAWGPAVSRPCPRVRLMRGAYGAGRCEPGAPGPPWTHLGHIRTGLWASVAKHYRFHMSSGRXEKGPTCGPHMSVTRVRGGAAAAWAEFMLPLVKLYIVSTFGVPCLLGQGIIHARKERPLGYFRSXQCLXMAGNINRHGLDLTGFVLELRGMFVVLGYPHGVDYQGKKLPEQDGDDAEPRAAWEVTAVILTGSPERTSLAVTAGGDSFPAACQNAALLVIGTLHQRYLDELRHSPYSYHPRGACDYATFRDASSEDDATIMHLARMVEAYDAARIDFHHIVRRGLVENNMKILELRQENLQLKKDLDAVEAQLCQLKIAKGEVCRPKRRRVCRNLKITARKSTSRPELVRQSLAWTCFVEIPCAESAPLVPQEEGASGVGSTEDVLLLTFHGETRRSAVTGEGSHPEGSNPNNHDSPPPPPPPPPPPPDTNPILTQILAQQANVMAAFLHHIQNPPQHNAPPPPPPLQHSKLAEFLRIRPPTFSSFNNPVDALDWLHAVGKKLDTVQCNDEEKVIFATHQLQGPASLWWDHFQATQPEGXPITWARFTAAFRRTHVPAGVMALKKREFRELKQGNRSVMEYLHEFNNLARYAPEDVREDEEKQQKFLAGMDPELSVHLVSRDYPDFQRLVDKSIHLEAKHKELESHKRRLANFSNQQGANQRVRYTNPYPGGSSSQQQQQQQPRPAPRPPYVVRVPQPQQQQNQQGTRAPRPPAPAVQPGQGRRDAQGQQRLCFNCFEPGHFADKCPKRRQQGQAPPRPNNGGKDVTGGCVNHVTAEDVLTTPDVIVGTFLIHSIPATILFDSGASHSFISVPFVGRNQLGVERLRNPLLITTPGVVMTTKYYSPAVPIEIQGIFPSDLILLDTKNLDVILGMNWLAQFQGVVDCARRTVTLYRGPDQPVVFFAPTPAGTSVLHQLGLSVISIVSEFGDVFPEELPGMPPKREIEFRIDLAPGATPLYKRPYRMAANELAEVKKQLEELKENGYIRPSTSPWSAPVIFVEKKDKTKRMCVDYRALNEVTIKNMYPLPQIDDLFDQLKGATVFSKIDLRSGYHQLRIREEDIPKTALTTRYGLYEFTVMLFGLTNSPAFFMNLMNKVFMEYLDKFVVVFIDDILVYSESEEDHQQHLRLVLGKLREHXLYAKLSKCEFLLSEVKFLGHVISAKGVAVDPKTVTAVTDWKQPKTVTQVRSFLGLAGYYRRFIENFSKIARPMTQLLKKEEKFVWSPQCEKAFQTLKEKLVSSPVLILLDTRKDFLVYCDASRQGLGCVLMQEGHVVAYASRQLRPHEGNYPTHDLELAAVVHDLKIWRHYLIGNRCEIYTDHKSLKYIFTQSDLNLQQRRWLELIKDYDVGIHYHPSKANVVADALSRKSHCSTLGVRGIPPELNQQLEALNLSIVSYGFLAMLEAKPTLLDQIREAQKNDPDIHGILKNMKQGKAAGFTEDEHGTLWNGNHRVKAEHQRPARLLQPLQVPEWKWDEIGMDFITGVPKTQGGYDSIWVIVDRLTKVAWFIPVKTTYGGNKLAELYFARIVSLHGVPKKIVSDRGSQFTYHPQTDGQTDHPNQVLEDWDKSLPYAEFSYNNSYQASIQMAPYEALYGRKCRTPLLWDQVGESQVFGTDILREAEAKVRTIXDNLKVAXSRQKSYADNRRRNLEFAVDDFVYLRVTLLRGVHRFQTKGKLPPRFVGPFRIIARRGEVAYQLELPASLGNVHDVFHVSQLKKCLRVPSEQADSEQIEVREDLTYVEKPVKILDTIERRTRNRVIRFCKVQWSNHAEEEATWEREDELKAAHPDLFASSSESRGRDSV

SEQ ID NO: 19189 - protein, 1451 aa, Oryza sativa
  unsure (1)..(1451): unsure at all Xaa locations
  Clone ID: TF_OSC417437j.C1.p1.np
TATPPSAPPAAPQRPQPPPPPETPPRPRPRPPRPPPQPGPAPPSPRPPPHARPPPSRRPPSPPPPPPAPPRPAPPTPRRPPSRPPRPPPPRPDPTPRRAQPHSPPPPPPRPPPRPPPAERPAPQEASPRSCPRASATGRGNTRPADGEPGGKSTARRPQMQMTGGTHGAGRCEPGCPGPPWTHLGHIRTGLRASVAKHYRFHMSSGANEGYTANEGYTSCGPVVEMSWHRAGVLLLGAQSCLPVPGVPAVGGIGSMYTSDQSIIYSNSRALGYGQAEQCTQMAGSISRRGLDLTGFVLELRGMCVVLGYPHGVDYQGRPLPEQEGDDAEPHAAWEVTAVILTGSPERTSLAVTAGGDSFSVTCQNAALLAIGTLHQRYPDELQHSPYRYHPRRGGARDYATFRDASSEDDATIMHLARMVEAYDAARIDFHQMVRRGMVGNNMKILELRQENLQLKKDLDAVEAQLHQLKIAQGEVCRPKRRRVCRSQKITARKSTSRPELVSQSLAWTCFVEIPVPQEGEASGVGSTEDALLLTFHGETRRSAVTGDGNQPEGSNHNNHGSPPPPPPPPPPPPPDTNAILTQILAQQANMMAAFLHHIQNPPQHNAPPPPPQHSKLAEFLRIRPPTFSSSNNPVDALDWLHAVGKKLDTVQCSDEEKVVFAAHQLQGPASLWWDHFQATQPEGQPITWARFTAAFRRTHVPAGVMALKKREFRELKQGNRSVMEYLHEFNNLARYAPEDVRENEEKQEKFLAGMDPELSVRLVSGDYPDFQRLVDKSIRLEAKHKELESHKRRLANFRNQQGANQRIRYTNPYPGGSSSQQQQQQQQPCSAPRPQFVVRVPQPQQQQSQQGTRAPRPPTPAVQSGQGRRDVQGPQRLCFNCFEPGHFADKCPKPRRQQGQAPPRSNNGGKDVIRGQVNHVTAEDVLTTPDVIVGTFLIHSIPATILFDSGASHSFISVPFVGRNQLGVERLRNPLLITTPGGVMTAKYYSPAVPIEIQGIPFPSDLILLDTKNLDVILGMNWLAQFQGVVDCARRTVTLYRGPEQPVVFFAPPTSVSSSELHQIGLSEIPIVREFGDVFPEELPGMPPKREIEFRIDLAPGTTPLYKRPYRMAANELAEVKKQLEELKEKGYIRPSTSPWGSPVIFVEKKDKTKRMCVDYRALNEVTIKNKYPLPWIDDLFDQLKGATVFSKIDLRSRYHXLRIREEDIPKTAFTTXYGLYEFTVMSFGLTNAPAFFMNLMNKVFMEYLDKFVVVFIDDILVYSQSEEDHQHHLRLVLGKLREHQLYAKLSKCEFWLSEVKFLGHVISAKGVAVDPETVTAVTDWKQPKTVTQIRSFLGLAGYYRRFIENFSKIARPMTQLLKKEEKFVWSPQCEKAFQTLKEKLVSSPVLILPDTRKDFMVYCDASRQGLGCVLMQDGHVVAYASRQLRPHEGNFPTERSIKATQIPAK

SEQ ID NO: 19190 - protein, 1488 aa, Oryza sativa
  Clone ID: TF_OSC417495j.C1.p2.fg
MKILELRQENLQLKKDLDAVEAQLHQLKIAQGEVCRPKRRRVCRSQKITARKSTSRPELVRQSLAWTCFVETPRAEPAPVVPQEGEASGVGSTEDALLLTFRPGPSQRRSANTGDGNQPEGSNHHHQGSPPPPPPPPPPPPPDTNAILTQILAQQANMMTAFLHHLQNPPQHNAPPPPPQHSKLAEFLRIRPPTFSSSNNPVDALDWLHAVGKKLDTVQCSDEEKVIFAAHQLQGLASLWWDHFQATQPEGQPITWARFTAAFRRTHVPAGVVALKKREFRELKQGNRSVMEYLHEFNNLARYAPEDVREDEEKQEKFLAGMDPELSGANQRVRYTNPYPGGSSSQQQQQQQQPRSAPRPQFVVRVPQPQQQQNQQGTRAPRPPTPTVQPGQGRRDAQGPQRLCFNCFEPGHFADKCPKPRRQQGQAPPRSNNGGKDVIRGRVNHVTAEDVLTTPDVIVGTFLVHSIPATILFDSGASHSFISVPFVGRNQLGVERLRNPLLITTPGGVMTAKYYSPAVPIEIQGIPFPSDLILLDTKNLDVILGMNWLAQFQGVVDCARRTVTLYRGPEQPVVFFAPPTSVSSSELHQIGLSEIPIVREFGDVFPEELPVMPPKREIEFRIDLAPGTTPLYKRPYRMAANELAEVKKQLEELKEKGYIRPSTSPWGAPVIFVEKKDKTKRMCVDYRALNEVTIKNKYPLPRIDDLFDQLKGATVFSKIDLRSGYHQLRIREEDILKTAFTTRYGLYEFTVMSFGLTNAPAFFMNLMNKVFMEYLDKFVVVFIDDILVYSQSEEDHQHHLRLVLGKLREHQLYAKLSKCEFWLSEVKFLGHVISAKGVAVDPETVTAVTDWKQPKTVTQVRSFLGLAGYYRRFIENFSKIARPMTQLLKKEEKFVWSPQCEKAFQTLKEKLVSSPVLILPDTRKDFMVYCDASRQGLGCVLMQDGHVVAYASRQLRLHEGNYPTHDLELAAVVHALKIWRHYLIGNRCEIYTDHKSLKYIFTQSDLNLRQRRWLELIKDYDVGIHYHPGKANVVADALSRKSHCNTLNLRGIPPELNQQMAALNLSIVSRGFLAALEAKPALLDQIREAQKNDPDMHGLLKNMKQGKAAGFTEDEHGTLWNGNRVCVPDNRELKQLILQEAHESPYSIHPGSTKMYLDLKEKYWWVSMKREIAEFVALCDVCQRVKAEHQRPAGLLQPLQVPEWKWDEIGMDFITGLPKTQGGYDSIWVVVDRLTKVARFIPVKTTYGGNKLAELYFDRIVSLHGVPKKIVSDRGSQFTSHFWKKLQEELGTRLNFSTAYHPQTDGQTERLNQILEDMLRACVLDFGKTWDKSLPYAEFSYNNSYQASIQMAPYEALYGRKCRTPLLWDQVGESQVFGTDILREAEAKVRTIRDNLKVAQSRQKSYADNRRRNLEFAVGDLVYLRVTPLRGVHRFRTKGKLAPRYVGPFRIVARRGEVAYQLELPASLGNVHDVFHVSQLKKCLRVPS

SEQ ID NO: 19191 - protein, 816 aa, Oryza sativa
  Clone ID: TF_OSC420793j.C1.p1.fg
MTGFVLELRGMCVALGYPHGVDYQARPLPEQEGEDAEPHAGWEVTAVILAGSSERTSLTVTAGGDSFPAACQSAALLAIGTLHQRYPDELQHSPYRYHPRRGGARDYATFRDASSEDDATIVHLARMVEAYDAARIDFHQMVRRGMVENNMKILELRQENLQLKKDLDAVEAQLHQLKVAQGEICRPKRRRVCRSQKITARKSTSRPELVRQSLAWTCFVETPRAEPAPVVPQEGEASGVGSSEAPSLFAGSVWGFQMVTTRRNVSTGEGNQPEGSDHNHQGNPPPPPPPPPPPPPPPDTNAILTQILAQQANMMTAFLHHLQNPPQQNAPPPPPQHSKLAEFLRIRPPTFSSSNNPVDALDWLHAVGKKLDTVQCSDEEKVVFAAHQLQGPASLWWDHFQATQPEGQPITWTRFTAAFRRTHVPAGVVALKKREFRELKQGNRSVMEYLHEFNNLARYAPEDVREDEEKQEKFLAGMDPELSVRLVSGDYPDFQRLVDKSIRLEAKHKELESHKRRLANFRNQQGANQRVRYTNPYPGGSSSQQQQQPRPAPRPQFVVRVPQPQQQQNQQGTRAPRPPTPAVQPVQGRRDAQGQQRLCFNCFEPGHFADKCPKPRRQQGQAPPRSNNGGKDVIRGRVNHVTAEDVLTTPDVIVVVDRLTKVARFIPVKTTYGGNKLAELYFARIFRRRLQWSRDLRGRFPFSPAALSLSRRYKIVPRASLFRFRRSPLALAVGFVLTPCTSLSAVAVELRSAAVVAPVFLPTRRHLHPRRRVVVDPVRISVSPADRRSTVVIVIPNRAAAFFRFGRRSRRRRRPG

SEQ ID NO: 19192 - protein, 700 aa, Oryza sativa
  Clone ID: TF_OSC4210j.C1.p1.fg
MSWHRAGVLLLGAQFCLPVPGVPAMAGSVTRRGLDMTGFVLELRGMCVALGYPHGVDYQARPLPEQEGDDAEPRAGWEVTAVILAGSSERTSLTVTAGGDSFPAACQSAALLAIGTLHQRYPDELQHSPYRYHPRRGGARDYATFRDASSEDDATIVHLARMVEAYDAARIDFHQMVRRGMVENNMKILELRQENLQLKKDLDAVEAQLHQLKIAQGEICRPKRRRVCRSQKITARKSTSRPELVRQSLAWTCFVETPRAEPAPVVPQEGEASGVGSTEVVWGMVMPMVTTRRNANTGDGNQPECSNHNHQGNPPPPPPPPPPPPPDTNAILTQILAQQANMMTAFLHHLQNPPQQNAPPPPPQHSKLAEFLRIRPPTFSSSNNPVDALDWLHAVGKKLGTVQCSDEEKVIFAAHQLQGPASLWWDHFQATQPEGQPITWARFTAAFRRTHVPAGVVALKKREFRELKQGNRSVMEYLHEFNNLARYAPEDVREDEEKQEKFLAGMDPELSVRLVSGDYPDFQRLVDKSIRLEAKHKELESHKRRLANFRNQQGANQRVRYTNPYPGGSSSQQQQQQQQPRSAPRPQFVVRVPQPQQQQNQQGTRAPRPPTPTVQPGQGRRDAQGQQRLCFNCFEPGHFADKCPKPRRQQGQAPPRSNNGGRDVIRGRVNHVTAEDVLTTPDVIVGRSCGSLCLTSATTS

SEQ ID NO: 19193 - protein, 1229 aa, Oryza sativa
  Clone ID: TF_OSC421503j.C1.p5.fg
MSWHRAGVLLLGAQSCLPVPGVPAVGGIGSVLLSMARMGLKLCHVFRLYTVVMAGSVTRRGLSMTGFVLELRGMCVVLGYPHGVDYQARPLPEQEGDDAEPHAAWEVTAVILSGSPERTSLAVTAGGDSFPAACQNAALLAIGTLHQRYPDELQHSPYRYHPRRGGARDYATFRDASSEDDATIVHLARMVEAYDAARIDFHQMVRRGMVENNMKILELHQENLQLKKDLDAVEAQLHQLKIAQGEVCRPKRRRVCRSQKITARKSTSRPELVCQSLAWTCFVETPRAEPAPVVPQEGEASGVGSTEDALLLTFRPGPSQRRNAATGDGNQPEGSNHNHQGNPPPPPPPPPPPPPDTNAILTQILAQQANMMTAFLHHLQNPPQHNAPPPPPQHSKLAEFLRIRPPTFSSSNNPVDALDWLHAVGKKLDTVQCSDEEKVIFAAHQLQGPASLWWDHFQATQPEGQPITWARFTAAFRRTHVPVGVVSLKKREFRELKQGNRSVMEYLHEFNNLARYTPEDVREDEEKQEKFLAGMDPELSVRLVSGDYPDFQRLVDKSIRLEAKHKELESHKRRLANFRNQQGANQRVRYTNPYPGGSSSQQQQQQQQPRSAPRPQFVVRVPQPQQQQNQQGTRAPRPPTPTVQPGQGRRDAQGQQRLCFNCFEPGHFADKCPKPRRQQGQAPPRSNNGAKDVIRGRVNHVTAEDVLTTPDVIVGTFLVHSIPATILFDSGASHSFVSVPFVGRNQLGVERLRNPLLITTPGGVMTAKYYSPAVPIEIQGIPFPSDLILLDTKNLDVILGMNWLAQFQVVVDCARRTVTLYRGPEQPVVFFAPPTSVSSSELHQIGLSEIPIVREFGDVFPEELPGMPPKREIEFRIDLAPGTTPLHKRPYRMAANELAEVKKQLEELKEKGYIRPSTSPWGAPVIFVEKKDKTKRMCVDYRALNEVTIKNKYPLPRIDDLFDQLKGATVFSKIDLRSGYHQLRIREEDIPKTAFTTRYGLYEFTVMSFGLTNAPAFFMNLMNKVFMEYLDKFVVVFIDDILIYSRSEEDHQHHLRLVLGKLHEHQLYAKLSKCEFWLSEVKFLGHVISAKGVAVDPETVTAVTDWKQPKTVTQVRSFLGLAGYYRRFIENFSKIARPMTQLLKKEEKFVWSPQCEKAFQTLKEKLVSSPVLILPDTRKDFMVYCDASRQGLGCVLMQDGHVVAYASRQLRPHEGNYPTHDLELAAVTS

SEQ ID NO: 19194 - protein, 1926 aa, Oryza sativa
  unsure (1)..(1926): unsure at all Xaa locations
  Clone ID: TF_OSC5440j.C1.p1.np
PRPPFRFGRRPPERRRPRRPDPRCRLPSLRPPFLSSPSTXGEPWTAASFPPSLPLSRPPLRRAYGRRRRPXGRAASRRLRRPGRPRARRVAAAWGPAVSRPRPXVRLTRGTHGAGRCEPGAPGPPWTHLGHIRTGLRASVAKHYRFHMSSGAKEGYTSCGPVVEMSWHRAGVLLLGAQSCLPVPEVPAVGGVGSMYTSDQSIIYSNSRALGYGQAEQCTQMAGSINRRGLDLTGFVLELRGMCVVLGYSHGVDYQGKQLPEQEGDDAEPHAAWEVTVVILTGSPERTSLAVTVGGDSFSAACQNAALLAIGTLHQLYPDELQHSPYRYHPRRGGARDYATFRDASSEDDATIRHLARMVEAYDAARIDFHQMVRRGLVENNMKILELRQENLQLKKDLDAVEAQLRQLKIAQGEVGRPKCRRVCRSLKITARKSTSRPELVRQSLAWTCFVETPCAEPAPVVPQEDGASGVGSTEDALLLTFHGETRRSAATGEGSHPEGSNHNNHGSPPPPPPPPPPPPPDTNAILTQILAQQANMMAAFLHHIQNPPQHNAPPPPPQHSKLAEFLRIRPPTFSSSNNPVDALDWLHAVGKKLDTVQCSDEEKVIFAAHQLQGPASLCWDHFQATQPKGQPITWARFTAAFRRTHVPAGVMALKKREFRELKQGNRSMMEYLHEFNNLARYALEDIREDEEKQEKFLAGMDPELSVRLVSGDYPDFQRLVDKSIRLEAKHKELESHKRRLANFRNQQGANQRVRYTNPYPGGSSQQQQQQQPRSAPRPQFVVRVPQPQQQQSQQGTRAPRPPTPAVQPGQGRRDAQGQQRLCFNCFEPGHFADKCPKPRRQQGQAPPRSNNGGKDVIRGRVNHVMAEDVLTTPDVIFGTFPIHSIPATILFDSGASHSFMSVPFVGRNQLGVERLRNPLLITTPGGVMTAKYYSHAVPIEIQGIPFLSDLILLDTKNLDVILGMNWLAQFQGVVDCARRTITLYRGPEQPVVFFAPPTSVGSSELHQIKLSEIPIVREFGDVFPEELPGMPPKREIEFRIDLAPGTAPLYKRPYRMAANELAEVKKQLEELKEKGYIRPSISPWGAPVIFVEKKDKTKRMCVDYRALNEVTIKNKYPLPRIDDLFDQLKGATVFSKIDLRSGYHQLRIREEDIPKTAFTTRYGLYEFTVMSFGLTNAPAFFMNLMNKVFMEYLDKFVVVFIDDILVYSQLEEDHQHHLRLVLGKLREHQLYAKLSKCEFWLSEVKFLGHVISAKGVAVDPETATAVTDWKQPKTVTQIRSFLGLAGYYRRFIENFSKIARPMTQLLKKEEKFVWSPQYEKAFQTLKERLVSSPVLILPDTRKDFMVYCDASRQGLGCVLMQEGHLVAYASRQLRPHEGNYPTHDLELAAVVHALKIWRHYLIGNRCEIYTDHKSLKYIFTQSDLNLRQRRWLELIKDYDVGIHYHPGKANVVADALCRKSHCNTLNVRGIPAKLNQQMEALNLSIVGRGFLATLEAKPTLLDQIREAQKNDPDMRGLLKNMKXGKAAGFTEDEHGTLWNGNRRVKAEHQRPAGLLQPLQVPEWKWDEIGMDFITGLPKTQGGYDSIWVVVDRLTKVARFIPVKTTYGGNKLAELYFARIVSLHGVPKKIVSDRGSQFTSHFWKKLQEELGTQLNFSTAYHPQTDGQTERLNQILEDMLRACVLDFGKTWDKSLPYAEFSYNNSYQASIQMAPYEALYGRKCRTPLLWDQVGEQVFGADILREAEAKVRTIRDNLKVAQSRQKSYADNRRRNLEFVVDDFVYLRVTPLRGVHRFQTKGKLAPRFVGPFRIIARRGEVAYQLELPVSLGNVHDVFHVSQLKKCLRVPSEQADSEQIVVCEDLTYVXRLVKILDTMERRTRNRVIRFCKIQWSNHAEEEPTWEREDEMKAAHPNLFASSSESRGRDSV

SEQ ID NO: 19195 - protein, 1777 aa, Oryza sativa
  Clone ID: TF_OSC5888j.C1.p4.fg
MDEVGGRWTFSRANEGYTSCGPMAGSVTRRGLDMTGFVLELRGMCVVLGYPHGVDYQARPLPEQEGEDAEPHAGWEVTAVILSGSPERTSLAVTAGGDSFPAACQNAALLAIGTLHQRYPDELQHSPYRYHPRRGGARDYATFRDASSEDDATVVHLARMVEAYDAARIDFHQMVRRGMVENNLKILELRQENLQLKKDLDALEAQLHQLKIAQGEISRPKRRRVCRSQKITARKSTSRPELVRQSLAWTCFVETPRAEPAPVVPQEGEASGVGSSEAPSLFAGSVWGFQMVTTRRNVNTGEGNQPEGSNPNHQGNPPPPPPPDTNAILTQILAQQANMMTAFLHHLQNPPQQNAPPPPPQHSKLAEFLRIRPPTFSSSNNPVDALDWLHAVGKKLDTVQCSDEEKVVFAAHQLQGPASLWWDHFQATQPEGQPITWARFTAAFRRTHVPAGVVALKKREFRELKQGNRSVMEYLHEFNNLARYAPEDVREDEEKQEKFLAGMDPELSVRLVSGDYPDFQRLVDKSIRLEAKHKELESHKRRLANFRNQQGANQRVRYTNPYPGGSSSQQQQQQQPRPAPRPQFVVRVPQPQQQQNQQGTRAPRPPTPAVQPVQGRRDAQGQQRLCFNCFEPGHFADKCPKPRRQQGQAPPRSNNGGKDVIRGRVNHVTAEDVLTTPDVIVGTFLVHSIPATILFDSGASHSFISVPFVGRNQLGVERLRNPLLITTPGGVMTAKYYSPAVPIEIQGIPFPSDLILLDTKNLDVILGMNWLAQFQGVVDCARRTVTLYRGPEQPVVFFAPSTSVRSSELHQIELSEIPIVREFGDVFPEELPGMPPKREIEFRIDLAPGTTPLYKRPYRMAANELAEVKKQLEELKEKGYIRPKKKDKTKRMCVDYRALNEVTIKNKYPLPRIDDLFDQLKGATVFSKIDLRSGYHQLRIREEDIPKTAFTTRYGLYEFTVMSFGLTNAPAFFMNLMNKVFMEYLDKFVVVFIDDILIYSQSEEDHQHHLRLVLGKLREHQLYAKLSKCEFWLSEVKFLGHVISAKGVAVDPETVTAVTDWKQPKTVTQIRSFLGLAGYYRRFIENFSKIARPMTQLLKKEEKFVWSPQCEKAFQTLKEKLVSSPVLILPDTRKDFMVYCDASRQGLGCVLMQDGHVVAYASRQLRPHEGNYPTHDLELAAVVHALKIWRHYLIGNRCEIYTDHKSLKYIFTQSDLNLRQRRWLELIKDYDVGIHYHPGKANVVADALSRKSHCNTLNVRSIPPELNQQMEALNLSIVGRGFLAALEAKPTLLDQIREAQKNDPDMHGLLKNMKQGKAAGFTEDEHGTLWNGKRVCVPDNRELKQLILQEAHESPYSIHPGSTKMYLDLKEKYWWVSMKREIAEFVALCDVCQRVKAEHQRPAGLLQPLQVPEWKWDEIGMDFITGLPKTQGGYDSIWVIVDRLTKVARFIPVKTTYGGNKLAELYFARIVSLHGIPKKIVSDRGSQFTSRFWKKLQEELGTRLNFSTAYHPQTDGQTERLNQILEDMLRACVLDFGKTWDKSLPYAEFSYNNSYQASIQMAPYEALYGRKCRTPLLWDQVGESQVFGTDILREAEAKVRIIRDNLKVAQSRQKSYADNRRRDLEFAVDDFVYLRVTPLRGVHRFQTKGKLAPRYVGPFRITARRGEVAYQLELPASLGNVHDVFHVSQLKKSLRVPSEQANSEQIEVREDLTYVERPVKILDTMERRTRNRVIRFCKVQWSNHAEEEATWEREDELKAAHPDLFASSSESRGRDSV

SEQ ID NO: 19196 - protein, 710 aa, Oryza sativa
  Clone ID: TF_OSC6120j.C1.p1.fg
MSWQRVGALLLGAQSCLPVPEMAGSVTRRGLDMTGFVLELRGMCVALGYPHGVDYQARPLPDQEGDDAEPHAGWEVTAVILSGSPERTSLAVTAGGDSFPAACQNAALLAIGTLHQRYPDELQHSPYRYHPRRGGAHDYATFRDASSEDDATIVHLARMVEVYDAARIDFHQMVRRGMVENNLKILELRQENLQLKKDLDAVEAQLHQLKIAQGEVCRPKRRRVCRSQKITARKSTSRPELVRQSLAWTCFVETPRAEPAPVVPQEGEASGIGSTEALSLFAGSVWGFQMVTTRRNAATGDGNQPEGSNHNHQGNPPPPPPPPPPPPPDTNAILTQILAQQANMMTAFLHHLQNPPQHNAPPPPPQHSKLAEFLRIRPPTFSSSNNPVDALDWFHAVGKKLDTVQCSDEEKVIFAAHQLQGPASLWWDHFQATQPEGQPITWARFTAAFRRTHVPAGVVALKKREFRELKQGNRSVMEYLHEFNNLARYAPEDVREDEEKQEKFLAGMDPELSVRLVSGDYPDFQRLVDKSIRLEAKHKELESHKRRLANFRNQQGANQRGRYTNPYPGGSSSQQQQQQQQPRPAPRPQFVVRFPQPQQQQNQQGTRAPRPPTPTVQPGQGRRDAQGQQRLCFNCFEPGHFADKCPKPRRQQGQAPPRSNNGGKDVIRGRVNHVTAEDVLTTPDVIVGSSEMCFRKNYPVCRPSERLSSG

SEQ ID NO: 19197 - protein, 652 aa, Oryza sativa
  Clone ID: TF_OSC6491j.C1.p1.fg
MSWHRAGVLLLGAQSCLPVPGVPAMAGSINRRGLDLTGFVLELRGMCVVLGYAHGVDYQGRQLPEQEGDDAEPHAAWEVTAVILTGSPERTSLAVTTGGDSFSAACQNAALLAIGTLHQRYPDELQHSPYRYHPRRGGARDYATFRDASSEDDATIMHLARMVEAYDAARIDFHQMLKKDLDAAEAQLHQLKIAQGEVCRPKRRRVCRSQKITARKSTSRPELVRQSLAWTCFVETPRAEPAPMAPQEGEASGVDGDDQEKCCYGEGSHPEGSNHNNQGSPPPPPPPPLPPPPDTNAILTQILAQQANMMTALLHHIQNPPQHNAPPPPPQHSKLAEFLRIRPPTFSSSNNPVDALDWLHAVGKKLDTVQCSDEEKVIFAAHQLQGPASLWWDHFQATQPEGQPITWARFTAAFRRTHVPAGVVALKKREFRELKQGNRSVMEYLHEFNNLARYAPEDVREDEEKQEKFLAGMDPELSVRLVSGDYPDFQRLVDKSIRLEAKHKELESHKCHLENFRNQQGANQRVRYTNPYPGGSSSQQQPQQQQPRSAPRPQFVVRVPQPQQQQNQQGTRAPRPPTPTVQPGQGRRDASGPQRLCFNCFEPGHFADKCPKPRRQQGQAPPRPNNGGKDVIQGRVNHVTAEDVLTTPDVIV

SEQ ID NO: 19198 - protein, 512 aa, Oryza sativa
  Clone ID: TF_OSC7321j.C1.p1.fg
MVEAYDAARIDFHQMVRRGMVENNMKILELRQENLQLKKDLDAVEAQLHQLKIAQGEVCRPKRRRVCRSQKITARKSTSRPELVRQSLAWTCFVETPRAEPTPVVPQKGEASGVDGETRRNAATSDGNQPEGSNHNNHGSPPPPPPPPPPPPPDTNAILTQILAQQANMMTAFLHHLQNPPQHNAPPPPPQHSKLAEFLRICPPTFSSSNNPVDALDWLHAVGKKLDTVQCSDEEKVIFAAHQLQGPASLWWDHFQATQPEGQPITWARFTAAFRRTHVPAGVVALKKREFRELKQGNRSVMEYLHEFNNLARYAPEDVREDEEKQEKFLAGMDPELSVCLVSGDYPDFQRLVDKSIRLEAKHKELESHKRRLANFHNQQGANQRVRYTNPYPGGSSSQQQQQQQQPRSARGPQFVVRVPQPQQEQNQQGTRAPRPPPPTVQPGQGRRDAQGPQRLCFNCFEPGHFADKCPKPRRQQGQAPPRPNNGGKDVIRGRVNHVTAEDVLTTPDVIV

SEQ ID NO: 19199 - protein, 659 aa, Oryza sativa
  Clone ID: TF_OSC7370j.C1.p1.fg
MTGFVLELRGMCVVLGYPHGVDYQARPLPEQEGEDAEPHAGWEVTAVILSGSPERISLAVTAGGDSFPAACQNAALLAIGTLHQRYPDELQHSPYRYHPRRGGARDYATFRDASSEDDATVVHLARMVEAYDAARIDFHQMVRRGMVENNLKILELRQENLQLKKDLDAVEAQLHQLKIAQGEDSRPKRRRVCRSQKITARKSTSRPELVRQSLAWTCFVETPRAEPAPVVPQEGEASGVGSSEVVWGMVTPMVTTRRNVNTGEGNQPEGSNPNHQGNPPPPPPPDTNAILTQILAQQANMMTAFLHHLQNLPQQNAPPPPPQHSKLAEFLRIRPPTFSSSNNPVDALDWLHAVGKKLDTVQCSDEEKVIFAAHQLQGPASLWWDHFQATQPEGQPITWARFTAAFRRTHVPAGVVALKKREFRELKQGNRSVMEYLHEFNNLARYAPEDVREDEEKQEKFLAGMDPELSVRLVSGDYPDFQRLVDKSIRLEAKHKELESHKRRLANFRNQQGANQRVRYTNPYPGGSSSQQQQQQQQPRSAPRPQSVVRVPQQQQQQNQQGTRAPRPPTPAGQPVQGRRDASGPQRLCFNCFEPGHFADKCPKPRRQQGQAPPRSNNGGKDVIRGRVNHVTAEDVLTTPDVIVGRSCGSLCLTPTTTS

SEQ ID NO: 19200 - protein, 661 aa, Oryza sativa
  Clone ID: TF_OSC7911j.C1.p1.fg
MAGSVTRRGLHMTGFVLELRGMCVVLGYPHGVDYQARPLPDQEGEDAEPHAGWEVTAVILSGSPERTSLAVTAGGDSFPAACQNAALLAIGTLHQRYPDELQHSPYRYHPRRGGASDHATFRDASSEDDATVVHLARMVEAYDAARIDFHQMVRRGMVENNLKILELRQENLQLKKDLDALEAQLHQLKIAQGEISRPKRRRVCRSQKITARKSTSRPELVRQSLAWTCFVETPRAEPAPVVPQEGEASGVGSSEVVWGMVTPMVTTRRNAATGDGNQPEGSNHNHQGNPPPPPPPPPPPPPDTNAILTQILAQQANMMTAFLHHLQNPPQQNAPPPPPQHSKLAEFLRIRPPTFSSSNNPVDALDWLHAVGKKLDTVQCSDEEKVIFAAHQLQGPASLWWDHFQATQPEGQPITWARFTAAFRRTHVPAGVVALKKREFRELKQGNRSVMEYLHEFNNLARYAPEDVRADEEKQEKFLAGMDPELSVRLVSGDYPDFQRLVDKSIRLEAKHKELESHKRRLANFRNQQGANQRVRYTNPYPGGSSSQQQQQQQQPRSAPRPQFVVRVPQPQQQQNQQGTRAPRPPTPAVQPAQGRRDAQGQQRLCFNCFEPGHFADKCPKPRRQQGQAPPRSNNGGKDVIRGRVNHVTAEDVLTTPDVIV

SEQ ID NO: 19201 - protein, 731 aa, Oryza sativa
  Clone ID: TF_OSC7912j.C1.p1.fg
MTGFVLELRGMCVVLGYPHGVDYQARPLPKQEGEDAEPHAGWEVTAVILSGSPERTSLAVTAGGDSFPAACQNAALLAIGTLHQRYPDELQHSPYRYHPRRGGARDYATFRDASSEDDATVVHLARMVEAYDAARIDFHQMVRRGMVENNLKILELRQENLQLKKDLDALEAQLHQLKIAQGEISRPKRRRVCRSQKITARKSTSRPELVRQSLAWTCFVETPRAEPAPVVPQEGEASGVGSSEGALLLTFRPGPSQRSSSLFAGSMWGFQMVTTRRNVNTGEGNQPEGSNPNHQGNPPPPPPPDTNAILTQILAQQANMMNAFLHHLQNPPQQNAPPPPPQHSKLAEFLRIRPPTFSSSNNPVDALDWLHAVGKKLDTVQCSDEEKVIFAAHQLQGPASLWWDHFQATQPEGQPITWARFTAAFRRTHVPAGVVALKKREFRELKQGNRSVMEYLHEFNNLARYAPEDVREDEEKQEKFLAGMDPELSVRLVSGDYPDFQRLVDKSIRLEAKHKELESHKRRLANFRNQQGANQRVRYTNPYPGGSSSQQQQQQQPRSAPRPQFVVRVPQPQQQQNQQGTRAPRPPTPTVQPVQGRRDAQGQQRLCFNCFEPGHFADKCPKPRRQQGQAPPRSNNGGKDVIRGRVNHVTAEDVLTTPDVIVEKKDKTKRMCVDYRALNEVTIKNNVSRQNTNDRPDFSNLSKCQNGSGMKLGWISSPDFQKPKVDMILYG

SEQ ID NO: 19202 - protein, 1974 aa, Oryza sativa
  unsure (1)..(1974): unsure at all Xaa locations
  Clone ID: TF_OSC8726j.C1.p1.np
LPSRRIRARDVALSLRRRRRALVRRRRRPGPPPTSAPPPLASPHPRRPRPPLRFGRQPPERRRPRRPDPRHRLPPLRPPPPSPPSPRDELWTVASFPFPSLSRPPLRRAGGRRLRPSERGRAASRRPRKHGRPRACRVATAWGLAVSRPRPWVRLTCGAHSADRCEPRGAWFXWXHLGHIWTGLRASVAKHYRFHMSSGANEANEGYTSCGPVVEMSWHRAGVLLLGAQSCLPVPGVPAVGGIGSMYTSDQSIIYSNSRALGYGQAEQCTQMAGSVSRRGLDMTGFVLELRGMCVVLGYPHGVDYQGRPLPEQEGDDAEPHAAWEVTAVILTGSPERTSLAVTAGGDSFSAACQSAALLAICTLHQRYPDELQHSPYRYHPRRGGARDYATFRDASSEDDATIMHLARMVEAYDAARIDFHQMVRRGMVENNLKILELRQENLQLKKDLDAVEAQLHQLKIAQGEVCRPKRRRVCRSQKITARKSTSRPELVRQSLAWTCFVENPRAEPAPVVPQEGEASGVGSTEDALLLTFHGETRRSASTGDGNQPEGSNHNHQGSPPPPPPPPPPPPPDTNAILTQILAQQANMMIAFLHHLQNPPQHNAPPPPPQHSKLAEFLRIRPPTFFSSNNPVDALDWLHAVGKKLDTVQCSDEEKVIFAAHQLQGPASLWWDHFQATQPEGQPITWARFTAAFRRTHVPAGVVALKKREFRELKQGNRSVMEYLHEFNNLARYAPEDVRDEEKQEKFLAGMDPELSVRLVSGDYPDFQRLVDKSIRLEAKHKELESHKRRLANFRNQQGANQRVRYTNPYPGGSSSQQQPRSAPRPQFVVRVPQPQQQQSQQGTRAPRPPTPTVQPGQGRRDAQGPQRLCFNCFEPGHFADKCPKPRRQQGQAPPRSNNGGKDVIRGRVNHVTAEDVLTTPDVIVGTFLIHSIPATILFDSGASHSFISVPFVGRNQLGVERLRNPLLITTPGGVMTAKYYSPAVPIEIQGIPFPSDLILLDTKNLDVILGMNWLAQFQGVVDCARRTVTLYRGPEQPVVFFAPPTSVRSSELHQIVLSEIPIVREFGDVFPEELPGMPPKREIEFRIDLAPGTTPLYKRPYRMAANELAEFKKQLEELKEKGYIRPSTSPWGAPVIFVEKKDKTKRMCVDYRALNEVTIKNKYPLPRIDDLFDXLKSATVFSKIDLRSGNHQLRIREEDIPKTAFTTRYGLYEFTVMSFGLTNAPAFFMNLMNKVFMEYLDKFVVVFIDDILIYSQSEEDHQHHLRLVLGKLREHQLYAKLSKCEFWLSEVKFLGHVISAKGVAMDPETVTAVTDWKQPKTVTQVRSFLGLAGYYRRFIENFSKIARPMTQLLKKEEKFVWSPQCEKAFQTLKEKLVSSLVLVLPDTRKDFMVYCDASRQGLGCVLMQDGHVVAYASRQLRPHEGNYPTHDLELAAVVHALKIWRHYLIGNRCEIYTDHKSLKYIFTQSDLNLRQRRWLELIKDYDVGIHYHPGKANVVADALSRKSHCNTLNVRGIPPELNQQMEALNLSIVGRGFLATLEAKPTLLDQIREAQKNDPDMRGLLKNMKQGKAAGFTEDEHGALWNGNRRVKAEHQRPAGLLQPLQVPEWKWDEIGMDFITGLPKTQGGYDSIWVVVDRLTKVARFIPVKTTYGGNKLAELYFARIVSLHGVPKKIVSDRGSQFTSHFWKKLQEELGTRLNFSTAYHPQTDGQTERLNQILEDMLRACVLDFGKTWDKSLPYAEFSYNNSYQASIQMAPYEALYGRKCRTPLLWDQVGESQVFGTDILREAEAKVRTIRDNLKVAQPRQKSYADNRRRNLEFAVDDFVYLRITPLRGVHRFRTKGKLAPRFVGPFRIIARRGEVAYQLELPASLGNVHDVFHVSQLKKCLRVPSEQADSEQIEVREDLTYVERPVKILDTMERRTRNRVIRFCKVQWSNHAEEEATWEREDELKAAHPDLFASSSESRGRDSV

SEQ ID NO: 19203 - protein, 1853 aa, Oryza sativa
  unsure (1)..(1853): unsure at all Xaa locations
  Clone ID: TF_OSC900012j.C1.p12.np
MDEVGGRWTFSRANEGYTSCGPVVEMSWQRVGALLLGAQSCLPVPEVPAVGGIGSMYTSDQSIIYSNSRALGYGQAEQCTQMAGSINRRGLDLTGFVLELRGMCVVLGYPHGVDXQGKQLPEQEGADAEPHAAWEVTAVILTGSPERTSLAVTAGGDSFSAACQNAALLAIGTLHQRYPDELQHSPYRYHPRRGGARDYATFRDASSEDDATIMHQARMVEAYDVARIDFHQMMHRGLVENNMKILELRQENLQLKKDLDAVEAQLRQLKIAQGEVCRPKRRRVCRSQKITARKSTSRTCFVETPRAERAPVVPQEDGASGVGHGGCADAHLPSWPIAAVGEQLVGLRMVTTRRSAATGEGSHPEGSNHTHGSPPPPPPPPPPPPPDTNAILTQILAQQANMMAAFLHHIQNPPPHNAPPPPPQHSKLAEFLRIRPPTFSSSNNPVDALDWLHAVGKKLDTVQCSDEEKVIFAAHQLQGPASLWWDHFQATQPEGQPITWARFTAAFWRTHVPAGVMALKKREFRELKQGNRSVMEYLHEFNNLARYAPEDVREDEEKQEKFLAGMDPELSVRLVSGDYPDFQRLVDKSIRLEAKHKELESHKRRLASFRNQQGANQRVRYTNPYPGGSSSQQQQQQQQPRSAPRPQFVVRVPQPQQQQSQQGTRAPRPPTPAVQPGQGRRDVQGPQRLCFNCFEPGHFADKCPKPRRQQGQAPPRSNNGGKDVIRGRVNHVTAEDVLTTPDVIVGTFLIHSIPATILFDSGASHSFISVPFVGRNQLGVERLRNPLLITTPGGVMTAKYYSPAVPIEIXGIPFLSDLILLDTKNLDVILGMNWLAQFQGVVDCARRTVTLYRGPEQPVVFFAPPTSVGSSELHQIRLSEIPIVREFGDVFXEELPGMPPKREIEFRIDLAPGTTPLYKRPYRMAANELAEVKKQLEELKGKGYIRPSTSPWGAPVIFVEKKDKTKRMCVDYRALNEVTIKNKYPLPRIDDLFDQLKGATVFSKIDLRSGYHQLRIREEDIPKTAFTTQYGLYEFTVMSFGLTNAPAFFMNLMNKVFMEYLDKFVVVFIDDILVYSQSEEDHQHHLRLVLGKLREHQLYAKLSKCEFWLSEVKFLGHVISAKGVAVDPETVTAVTDWRQPKTVTQIRSFLGLAGYYRRFIENFSKIARPMTQLLKKEEKFVWSPQCEKAFQTLKEKLVSSPVLILPDTRKDFMVYCDASRQGLGCVLMQEGHVVAYASRQLRPHEGNYPTHDLELAAVVHALKIWRHYLIGNRCEVYTDHKSLKYIFTQSDLNLRQRRWLELIKDYDVGIHYHPGKANMVADALSRKSHCNTLDVRGIPPELNQQMEALNLSIVGRGFLATLEAKPTLLDQIREAQKNDPDMRGLLKNMKQGKAAGFTEDEHRTLWNGNRVCVPDDRELKQLILQEAHESPYSIHPGSTKMYLDLKGKYWWVSMKREIAEFVALCDVCQRVKAEHQRPAGLLQPLQVPEWKWDEIGMDFITGLPKTQGGYDSIWVVVDRLTKVARFILVKTTYGGNKLAELYFARIVSLHGVPKKIVSDRGSQFTSHIWKKLQEELGTRLNFSTAYHPQTDGQTERLNQILEDMLRACVLDFGKTWDKSLPYAEFSYNNSYQASIQMAPYEALYGRKCQTPLLWDQVGESXVFGTDILREAEAKVRTIRDNLKVAQSRQKSYADNRRRNLEFAVDNFVYLWVTPLRGVHRFQMKGKLAPRFVGPFRIIARRGEVAYQLELPASLGNVHDVFHVSQLEKCLRVPSEXADSEQIEVREDLTYVERPVKILDTMERRTRNRVIRFCKVQWRNHAEEEATWEREDELKAAHPDLFARSSESRGRDSV

SEQ ID NO: 19204 - protein, 439 aa, Oryza sativa
  unsure (1)..(439): unsure at all Xaa locations
  Clone ID: TF_OSC900012j.C1.p15.np
RPKVLIXETDTVLVKVSILXPCPPTYITRRSAAIGEGSHPEGSNQILAQQANMMAAFLHHIQNLPQNNAPPPPPPPQHSKLAEFLRIRPPTFSSSHNPIDALDWLHAVGKKLDTVQCNDEEKVIFAAHQLQGPASLWWDHFQATQPEGQPITWARFTAAFRRTHVPAGVMALKKREFRELKQGNRSVMEYLHEFNNLARYAPEDVREDEEKQEKFLAGMNPELSVRLVSGDYPDFQRLVDKSIRLEAKQKELESHKRRLANFRNQGANQRIRYTNPYPRGSSSQQQQQQPRSAPLPQFVPGQGHPGQGHRDAQGQQRLCFNCFEPGHFADKCPKPRRQQGQAPPRPNNGGKDVIRGRVNHVTAEDVLTTPDVIVGTFLIHSIPATILFDSRASHSFISVPFVGRNQLGVERLMNPLLITTPGGVMTTKYYSPAVPIEIQ

SEQ ID NO: 19205 - protein, 1790 aa, Oryza sativa
  Clone ID: TF_OSC900028j.C1.p18.fg
MDEVGGRWTFSKANEGYTSCGPMAGSVTRRGVDMTGFVLELRGMCVVLGYPHGVDYQARPLPEQEGEDAEPHAGWEVTAVILSGSPERTSLAVTAGGDSFPAACQNAALLAIGTLHQRYPDELQHSPYRYHPRRGGARDYATFRDASSEDDATVVHLARMVEAYDAARIDFHQMVRRGMVENNLKILELRQENLQLKKDLDALEAQLHQLKIAQGEDSRPKRRRVCRSQKITARKSTSRPELVRQSLAWTCFVETPRAEPAPVVPQEGEASGVGSSEAPSLFAGAVWGFQMVTTRRNVNTGEGNQPEGSNPNHQGNPPPPPPPDTNAILTQILAQQANMMTAFLHHLQNPPQQNAPPPPPQHSKLAEFLRIRPPTFSSSNNPVDALDWLHAVGKKLDTVQCSDEEKVIFAAHQLQGPASLWWDHFQATQPAGQPITWAHFTAAFRRTHVPAGVVALKKREFRELKQGNRSVMEYLHEFNNLARYAPEDVREDEEKQEKFLAGMDPELSVRLVSGDYPDFQRLVDKSIRLEAKHKELESHKRRLANFRNQQGANQRVRYTNPYPGGSSSQQQQQQQQPRPAPRPQFVVRVPQPQQQQNQQGTRAPRPPTPAGQPVQGRRDASGPQRLCFNCFEPGHFADKCPKPRRQQGQAPPRSNNGGKDVIRGRVNHVTAEDVLTTPDVIVGTFLVHSIPATILFDSRASHSFISVPFVGRNQLGVERLRNPLLITTPGGVMTAKYYSPAVPIEIQGIPFPSDLILLDTKNLDVILGMNWLAQFQGVVDCARRTVTLYRGPEQPVVFFAPPTSVRSSELHQIGLSEIPIVREFGDVFPEELPGMPPKREIEFRIDLAPGTTPLYKRPYRMAANELAEVKKQLEELKEKGYIRPSTSPWGAPVIFVEKKDKTKRMCVDYRALNEVTIKNKYPLPRIDDLFDQLKGATVFSKIDLRSGYHQLRIREEDIPKTAFTTRYGLYEFTVMSFGLTNAPAFFMNLMNKVFMEYLDKFVVVFIDDILIYSQSEEDHQHHLRLVLGKLRKHQLYAKLSKCEFWLSEVKFLGHVISAKGVAVDPETVTAVTDWKQPKTVTQIRSFLGLAGYYRRFIENFSKIARPMTQLLKKEEKFVWSPQCEKAFQTLKEKLVSSPVLILPDTRKDFMVYCDASRQGLGCVLMQDGHVVAYASRQLRPHEGNYPTHDLKLAAVVHALKIWRHYLIGNRCEIYTDHKSLKYIFTQSDLNLRQRRWLELIKDYDVGIHYHPGKANVVADALSRKSHCNTLNVRGIPPELNQQMEALNLSIVGRGFLAALEAKPTLLDQIREAQKNDPDMHGLLKNMKQGKAAGFTEDEHGTLWNGKRVCVPDSRELKQLILQEAHESPYSIHPGSTKMYLDLKENYWWVSMKREIAEFVALCDVCQRVKAEHQRPAGLLQPLQVPEWKWDEIGMDFITGLPKTQGGYDSIWVIVDRLTKVARFIPVKTTYGGNKLAELYFARIVSLHGVPKKIVSDRGSQFTSHFWKKLQEELGTRLNFSTAYHPQTDGQTERLNQILEDMLRACVLDFGKTWDKSLPYAEFSYNNSYQASIQMAPYEALYGRKCRTPLLWDQVGESQVFGTDILREAEAKVRIIRDNLKVAQSRQKSYADNRRRDLEFAVDDFVYLRVTPLRGVHRFQTKGKLAPRYVGPFRIIARRGEVAYQLELPASLGNVHDVFHVSQLKKCLRVPSEQADSEQIEVREDLTYVEKPVKILDTMERRTRNRVIRFCKVQWSNHAEEEATWEREDELKAAHPDLFASSSESRGRDSV

SEQ ID NO: 19206 - protein, 2018 aa, Oryza sativa
  unsure (1)..(2018): unsure at all Xaa locations
  Clone ID: TF_OSC900039j.C1.p3.np
MEPEIAAPVSFPSGRPLSLPTLYKHSPCLPPPFPPLAALSPRRIRARAVALSLRHRRRAPVRRRRRPGPPPASASPSFGSPRPRRPRPLLRFARRPPERRRPRRPEPRRRLPPLRSPFPSSPSTRGEPWTRFTSPFPPLSRAPLRRAGGRRRRPSGRGCAASRRLCRRGRLRVRPAAAMWGPAVSRPRPQVRLTRGTHGADRRKPRAPGPPWTHLGHVRTGLRASVAKHYRFHMSSGANEGANEGYTSCGPVVEMSWHRAGVLLLGAQSCLPVPGVPAVGGIGSMYTSDQSIIYSNSRALGYGQAEQCTQMAGSVTRRGLSMTGFVLELRGMCVVLGYPHGVDYQARPLPEQEGDDAEPHAGWEVTAVILSGSPERTSLAVTAGGDSFPAACQNAALLAIGTLHQRYPDELQHSPYRYHPRHEGARDYATFRDASSEDDATIVHLARMVEAYDVARIDFHQMVRRGMVENNMKILELRQENLQLKKDLDAVEAQLHQLKIAQGEVCRPKRRRVCRSQKITARKSTSRPELVRQSLAWTCFMETPRAEPAPVVPQEGEASGVGSTEDALLLTFHETRRNAATGDGNQPEGSNHNHQGNPPPPPPPPPPPPPDTNAILTQILAQQANMMTAFLHHLQNPPQHNAPPPPPEHSKLAEFLRIRPPTFSSSNNPVDALDWLHAVGKKLDTVQCSDEEKVIFAAHQLQGPASLWWDHFQATQPEGQPITWARFTAAFRRTHVPAGVVALKKREFRELKQGNRSVMEYLHEFNNLARYAPEDVREDEEKQEKFLAGMDPELSVRLVSGDYPDFQRLVDKSIRLEAKHKELESHKRRLANFRNQHGANQRVRYTNPYPGGSSSQQQQXQQQPRSAPRPQFVVRVPQPQQQQNQQGTRAPRPPTPTVQPGQGRRDAQGQQRLCFNCFEPGHFADKCPKPRRQQGQAPPRSSNGGKDVIRGRVNHVTAEDVLTTPDVIVGTFLIHSIPATILFDSGASHSFISVPFVGRNQLGVERLRNPLLITTPGGVMTAKYYSSAVPIEIQGIPFPSDLILLDTKNLDVILGMNWLAQFQGVMDCARRTVTLYRGPEQPVVFFAPPTSVKSSELHQIGLSEIPIVREFGDVFPEELPGMPPKREIEFRIDLAPGTTPLYKRPYRMAANELAEVKKQLEELKEKGYIRPSTSLWGAPVIFVEKKDKTKRMCVDYRALNEVTLKNKYPLPRIDDLFDQLKGATVFSKIDLRSGYHQLRIREEDIPKTAFTTRYGLYEFTVMSFGLTNAPAFFMNLMNKVFMEYLDKFVVVFIDDILIYSRSEEDHQHHPRLVLGKLREHQLYAKLSKCEFWLSEVKFLGHVISAKGVAVDPETVTAVTDWKQPKTVTQVRSFLGLAGYYRRFIENFSKIARPMTQLLKKEEKFVWSPQCEKAFQTLKEKLVSSPVLILPDTRKDFMVYCDASRQGLGCVLMQDGHVVAYASRQLRPHEGNYPTHDLELAAVVHALKIWRHYLIGNRCEIYTDHKSLKYIFTQSDLNLRQRRWLELIKDYDVGIHYHPGKANVVADALSRKSHCNTLNVRGIPPELNQQMEALNLSIVGRGFLAALEAKPTLLDQIREAQKNDPDMHGLLKNMKQGKAAGFTEDEHGTLWNGKRRVKAEHQRPAGLLQPLQVPEWKWDEIGMDFITGLPKTQGGYDSIWVVVDRLTKVARFIPVKTTYGGNKLAELYFARIVSLHGVPKKIVSDRGSQFTSHFWKKLQEELGTRLNFSTAYHPQTDGQTERLNQILEDMLRACVLDFGKTWDKSLPYAEFSYNNSYQASIQMAPYEALYGRKCRTPLLWDQVGESQVFGTDILREAESKVRIIRDNLKVAQSRQKSYADNRRRDLEFAVGDFVYLRVTPLRGVHRFQTKGKLAPRYVGPFRIIARRGEVAYQLELPASLGNVHDVFHVSQLKKCLRVPSEQADSEQIEVREDLTYVERPVKILDTMERRTRNRVIRFCKVQWSNHAEEEATWEREDELKAAHPDLFVSPSESRGQDSV

SEQ ID NO: 19207 - protein, 1757 aa, Oryza sativa
  Clone ID: TF_OSC900042j.C1.p11.fg
MSWHRAGVLLLGAQSCLPVPGVPAVGGIGSVLLSMARMGWKLCHVFRLYTVVMAGSVSRRGLDMTGFVLELRGMCVVLGYPHGVDYQRRPLPEQEGDDAEPLAAWEVTAVILAGSPERTSLAVTAGGDSFPAACQSAALLAIGTLHQRYPDELQHSPYRYHPRRGGARDFATFRDASSEDDATIMHLARMVEAYDAARIDFHQMVRRGMVENNMKILELRQENLQLKKDLDAVEAQLHQLKIAQGEVCCPKRRRVCRSQKITARKSTSRPELIRQSLAWTCFMETPRAEPTLVVPQEGEASGVGSTEDALLLTFRPGPSQRRSANTGDGNQPEGSNHNHQGSPPPPPPPPPPPPPDTNAILTQILAQQANMMTAFLHHLQNPPQHNAPPPPPQHSKLAEFLRIRPPTFSSSNNPVDALDWLHAVGKKLDTVQCSDEEKVIFAAHQLQGPASLWWDHFQATQPEGQPITWARFTAAFRRTHVPAGVVALKKREFRELKQGNRSVMEYLHEFNNLARYAPEDVREDEEKQEKFLAGIDPELSVRLVSGDYPDFQRLVDKSLRLEAKHKELESHKRRLANFRNQQGANQRQQQQQPQPRSAPRPQFVVRVPQPQQQQSQQGTRVPRPPMPDGQPSQGHRDAQGPQRLCFNCFEPGHFADKCPKPRRQQGQAPPRSNNGGKDVIRGRVNHVTAEDVLTTPDVIVGTFLIHSIPATILFDSGASHSFISVPFVGRNQLGVERLRNPLLITTPGGVMTAKYYSPAVPIEIQGIPFPSDLILLDTKNLDVILGMNWLAQFQGVVDCARRTVTLYRGPEQPVVFFAPPTSVSSSELYQIGLSEIPIVREFGDVFPEELPGMPPKREIEFRIDLAPGTTPLYKRPYRMAANELAEVKKQLEELKEKGYIHPSTSPWGAPVIFVEKKDKTKRMCVDYRALNEVTIKNKYPLPRIDDLFDQLKGATVFSKIDLRSGYHQLRIHEEDILKTAFTTRYGLYEFTVMSFGLTNAPAFFMNLMNKVFMEYLDKFVVVFIDDILIYSQSEEDHQHHLRLVLGKLREHQLYAKLSKCEFWLSEVKFLGHVISAKGVAVDPETVTAVTDWKQPKTVTQVRSFLGLAGYYRRFIENFSKIARPMTQLLKKEEKFVWSPQCEKAFQTLKEKLVSSPVLVLPDTRKDFMVYCDFAPRIGLRPHDGNYPTHDLELAAVVHALKIWRHYLIGNRCEIYTDHKSLKYIFTQSDLNLRQRRWLELVKDYDVGIHYHPGKANVVADTLSRKSHCNTLNVRGIPPELNKQMEALNLSIVGRGFLAALEAKPTLLDQIREAQRNDPDMHGLLKNMKQGKVAGFTEDEHGTLWNGNRVCVPDNRELKQLILQEAHKSPYSIHPGSTKMYLDLKEKYCVSRQSTNDRPDFSNLSKYQNGNEMKLGWISSPDFQKPKVARFIPVKTTYGGNKLAELYFARIVSLHGVPKKIVSDRGSQFTSHFWKKLQEELGTRLNFSTAYHPQTDGQTERLNQILEDMLRACVLDFGKTWDKSFPYAEFSYNNSYQASIQMAPYEALYGRKCRTPLLWDQVGESQVFGIDILREAEAKVRAIRDNLKVAQSRQKSYADNRRRDLEFAVDDFVYLRVTPLRGVQRFRTKGKLAPRFVDPFRIIARRGEVAYQLELPASLGNVHDVFHVSQLKKCLRVPSEQADSEQIEVREDLTYVERPVKILDTMERRTRNRVIRFCKVQWSNHAEEEATWEREDELKAAHPDLFASSSESRGRDSV

SEQ ID NO: 19208 - protein, 827 aa, Oryza sativa
  unsure (1)..(827): unsure at all Xaa locations
  Clone ID: TF_OSC900055j.C1.p18.np
MSWHRAGVLLLGAQSCLPVPGVPAVGGIGSVLLSMARMGWKLCHVFRLYTVVMAGSISRRGLDLTGFVLELRGMCVVLGYPHGVDYQGRPLPEQEGDDAEPHAAWERTSLAVTAGGDSFSARTSLAVTAGGDSFSAACQNAALLAIGTLHQRYPDELQHSPYRYHPRRGGARDYATFRDASSEDDATIMHLARMVEAYDAARIDFHHMVRRGMVENNMKILELRQENLQLKKDLDAVEAQLHQLKIAQGEVCRPKRRRVCRSQKITSRKSTSRPELVRQSLAWTCFVETPRAEPAPVVPQEGEASGVGSTEDALLLTFRPGPSQRRSAATGDGNQPEGSNHNNHGSPPPPPPPPPPPPPDTNAILTQILAQQANMMAAFLHHIQNPPQHNAPPPPRQHSKLAEFLRIRPPTFSSSNNPVDALDWLHAVGKKLDTVQCSDEEKVIFAAHQLQGPASQWWDHFQATQPEGQPITWARFTAAFRRTHVPAGVMALKKREFRELKQGNRSMMEYLHEFNNLARYAPEDVREDEEKKEKFLAGMDPELSVRLVSGDYSDFQRLVDKSIHLEAKHKELESHKRRLANFRNQQGANQRVRYTNPYPGGSSSQQQQPRSAPRPQFVVRVPQPQQXQSQQGTRAPRPPTPAAQSGQGRRDVQGPQRLCFNCFEPGHFADKCPKPRRQQGQAPPRSNNGGKDVIRGRVNHVTAEDVLTTPDVIVGTFLIHSIPATILFDSGASHSFISVPFVGRNQLGVERLRNPLLITTPGGVMTAKYYSPAVPIEIQGIPFPSDLILLDTKNLDVILGMNWLAQFQGVVDCARRTVTLYRGPKQP

SEQ ID NO: 19209 - protein, 759 aa, Oryza sativa
  Clone ID: TF_OSC900056j.C1.p22.gm
NFPGRDKRLCFNCFEPGHFADKCPKPRRQQGQAPPRSNNGGKDVIRGRVNHVTAEDVLTTPDVIVGTFLIHSIPATILFDSGASHSFISVPFVGRNQLGVERLRNPLLITTPGGVMTAKYYSPAVPIEIQGIPFPSDLILLDTKNLDVILGMNWLAQFQGIGLSEIPIVREFGDVFPEELPGMPPKREIEFRIDLAPGTTPLYKRPYRMAANELAEVKKQLEELKEKGYIRPSTSPWGAPVIFVEKKDKTKRMCVDYRALNEVTIKNKYPLPRIDDLFDQLKGATVFSKIDLRSGYHQLRIREEDIPKTAFTTRYGLYEFTVMSFGLTNAPAFFMNLMNKVFMEYLDKFVVPRRAAVAAAVVSRRRHHRVRKVAAVPVHRFAAAEDRRSTVAAVDPIFSAAFSSTPPPSVGLPPTFWSSVSSPRRDLRLGALRLCRRAAVRRRACAVRAVRAAEPPPVLTSSLTPFPRYRGGTEAHGDMMWGCVLWVQWYTSGQRYYRRFIENFSKIARPMTQLLKKEEKFVWSPQCEKAFQTLKEKLVSSPVLILPDTRKDFMVYCDASRQGLGLSVHGGPGARGWRRPAPWVPRVSRTRGRGRLTAGPHLAAAGRARRRPRRHGRRENGAPAPRWSPPATNGAAEWHPRERREGGSERSGPRLTPVDGDDGNGGRKRRKAAARFGTTRTTAFRRSASEAEGRTRSTTTRRSRRRRRREGRKSGATAAANRSSAATAERRCDGASTIPTGRASGERRKRRRRARGTFK

SEQ ID NO: 19210 - protein, 1806 aa, Oryza sativa
  Clone ID: TF_OSC900082j.C1.p6.fg
MSWHRASVLLLGAQSCLPVPGVPAVGGIGSVLLSMARMGWKLCHVFRLYTVVMAGSINRRGLDLTGFVLELRGMCVVLGYPHGVDYQGRQLPEQEGDDAEPHAAWEVTAVILTGSPERTSLAVTAGGDSFSAACQNAALLAIGTLHQRYPDELQHSPYRYHPRRGGARDYATFRDASSEDDATIMHLACMVEAYDAARIDFHQMVRHGLVENNMKILELRQENLQLKKDLDAVEAQLHQLKIAQGEVCRPKRRRVCRSQKITARKSTSRPELVRQSLAWTCFVETPRAEPMPVVPQEGEASGVGSTEDALLLTFRPGPSQRRSANTGDGNQPEGSNHHNHGSPPPPPPPPPPPPPDTNAILTQILAQQANMMAAFLHHIQNPPQHNAPPPPPQHSKLAEFLRIHPPTFSSSNNPVDALDWLHAMGKKLDIVQCSDEEKVVFAAHQLQGPASLWWDYFQATQPEGQPITWARFTAAFRRTHVPAGVMALKKREFRELKQGNRSVMEYLHEFNNLARYAPEDVREDEEKQEKFLAGMDPELSVRLVSGDYPDFQRLVDKSIRLEAKHKELESHKRRLANFRNQQGANQRIRYTNPYPGGSSSQQQQQQQPRSAPRPQFVVRVPQPQQQQSQQGTRAPRPPTPAAQSGQGRRDVQGPQRLCFNCFEPGHFADKCPKPRRQQGQAPPRSNNGGKDVIRGRVNHVTAEDVLTTPDVIVGTFLIHSIPATILFDSGASHSFISVPFVGRNQLGVERLRNPLLITTPGGVMTAKYYSPAVPIEIQGIPFPSDLILLDTKNLDVILGMNWLAQFQGVVDCARRTVTLYRGPEQPVVFFAPPTSVSSSELHQIGLSEIPIIREFGDVFPEELPGMPPKREIEFRIDLAPGTTPLYKRPYRMAANELAEVKKQLEELKEKGYIRPSTSPWGAPVIFVEKKDKTKRMCVDYRALNEVTIKNKYPLPRIDDLFDQLKGATVFSKIDLRFGYHQLRIREEDIPKTAFTTRYGLYEFTVMSFGLTNAPAFFMNLMNKVFMEYLDKFVVVFIDDILVYSQSEEDHQHHLRLVLGKLREHQLYAKLSKCEFWLSEVKFLGHVISAKGVAVDPETVTAVTDWKQPKTVTQIRSFLGLAGYYRRFIENFSKIARPMTQLLKKEEKFVWSPQCEKAFQTLKEKLVSSPVLILPDTRKDFMVYCDASRQGLGCVLMQEGHVVAYASRQLRPHEGNYPTHDLELAAVVHALKIWRHYLIGNRCEIYTDHKSLKYIFTQSDLNLRQRRWLELIKDYDVGIHYHPGKANVVADALSRKSHCNTLNVRGIPPELNQQMEALNLSIVGRGFLAALEAKPTLLDQIREAQKNDPDMRGLLKNMKQGKAAGFTEDEHGTLWNGNREAHESPYSIHPGSTKMYLDLKEKYWWVSMKREIAEFVALCDVCQRVKAEHQRPAGLLQPLQVPEWKWDEIGMDFITGLPKTQGGYDSIWVVVDRLTKVARFIPVKTTYGGNKLAELYFARIVSLHGVPKKIVSDRGSQFTSHFWKKLQEELGTRLNFSTAYHPQTDGQTERLNQILEDMLRACVLDFGKTWDKSLPYAEFSYNNSYQASIQMAPYEALYGRKCRTPLLWDQVGESQVFGTDILREAEAKVRTIRDNLKVAQSRQKSYADNRRRNLEFAVDDFVYLRVTPLRGVHRFQTKGKLAPRFVGPFRIIARRGEVAYQLELPASLGNVHDVFHVSQLKKCLRVPSEQADSEQIEVREDLTYVERPVKILDTMEHRTRNRVIRFCKVQWSNHAEEEATWEREDELKAAHPDLFASSSESRGRDSV

SEQ ID NO: 19211 - protein, 1795 aa, Oryza sativa
  Clone ID: TF_OSC900086j.C1.p17.fg
MDEVGGRWTFSRANEGYTSCGPMAGSVTRRGLDMTGFVLELRGMCVVLGYPHGVDYQARPLPEQEGEDAEPHAGWEVTAVILSGSPERISLAVTAGGDSFPAACQNAALLAIGTLHQRYPDELQHSPYRYHPRRGGARDYATFRDASSEDDATVVHLARMVEAYDAARIDFHQMVRRGMVENNLKILELRQENLQLKKDLDAVEAQLHQLKIAQGEDSRPKRRRVCRSQKITARKSTSRPELVRQSLAWTCFVETPRAEPAPVVPQEGEASGVGSSEVLIVSSLSLLAGSVWGFQMVTTRRNVNTGEGNQPEGSNPNHQGNPPPPPPPDTNAILTQILAQQANMMTAFLHHLQNLPQQNAPPPPPQHSKLAEFLRIRPPTFSSSNNPVDALDWLHAVGKKLDTVQCSDEEKVIFAAHQLQGPASLWWDHFQATQPEGQPITWARFTAAFRRTHVPAGVVALKKREFRELKQGNRSVMEYLHEFNNLARYAPEDVREDEEKQEKFLAGMDPELSVRLVSGDYPDFQRLVDKSIRLEAKHKELESHKRRLANFRNQQGANQRVRYTNPYPGGSSSQQQQQQQQPRSAPRPQSVVRVPQQQQQQNQQGTRAPRPPTPAGQPVQGRRDASGPQRLCFNCFEPGHFADKCPKPRRQQGQAPPRSNNGGKDVIRGRVNHVTAEDVLTTPDVIVGTFLVHSIPATILFDSGASHSFISVPFVGRNQLGVERLRNPLLITTPGGVMTAKYYSPAVPIEIQGIPFPSDLILLDTKNLDVILGMNWLAQFQGVVDCARRTVTMYRGPEQPVVFFAPPTSVRSSELHQIGLSEIPIVREFGDVFPEELPGMPPKREIEFRIDLAPGTTPLHKRPYRMAANELAEVKKQLEELKEKGYIRPSTSPWGAPVIFVEKKDKTKRMCVDYRALNEVTIKNKYPLPRIDDLFDQLKGATVFSKIDLRSGYHQLRIREEDIPKTAFTTRYGLYEFTVMSFGLTNAPAFFMNLMNKVFMEYLDKFVVVFIDDILIYSQSEEDHQHHLRLVLGKLREHQLYAKLSKCEFWLSEVKFLGHVISAKGVAVDPETVTAVTDWKQPKTVTQIRSFLGLAGYYRRFIENFSKIARPMTQLLKKEEKFVWSPQCEKAFQTLKEKLVSSPVLILPDTRKDFMVYCDASRQGLGCVLMQDGHVVAYASRQLRPHEGNYPTHDLELAAVVHALKIWRHYLIGNRCEIYTDHKSLKYIFTQSDLNLRQRRWLELIKDYDVGIHYHPGKANVVADALSRKSHCNTLNVRSIPPELSQQMEALNLSIVGRGFLAALEAKPTLLDQIREAQKNDPDMHGLLKNMKQGKAAGFTEDEHGTLWNGKRVCVPDSRELKQLILQEAHESPYSIHPGSTKMYLDLKEKYWWVSMKREIAEFVALCDVCQRVKVEHQRPAGLLQPLQVPEWKWDEIGMDFITGLPKTQGGYDSIWVIVDRLTKVARFIPVKTTYGGNKLAELYFARIVSLHGIPKKIVSDRGSQFTSHFWKKLQEELGTRLNFSTAYHPQTDGQTERLNQILEDMLRACVLDFGKTWDKSLPYAEFSYNNSYQSSIQMAPYEALYGRKCRTPLLWDQVGESQVFGTDILREAEAKVRIIRDNLKVAQSRQKSYADNRRRDLEFAVDDFVYLRVTPLRGVHRIQTKGKLAPRYVGPFRIIARRGEVAYQLELPASLGNVHDVFHVSQLKKCLRVPSEQADSEQIEVREDLTYVERPVKILDTMERRTRNRVIRFCKVQWSNHAEEEATWEREDELKAAHPGLFASSSESRGRDSV

SEQ ID NO: 19212 - protein, 1332 aa, Oryza sativa
  Clone ID: TF_OSC900091j.C1.p28.gm
MKITARKSTSRPELVRQSLAWTCFVETPRAEPAPSMVTTRRSAATGEGSHPEGSNHNNHGSPPPPPPPPPPPPPPDTNSILTQILAQQANMMAAFLHHIQNPPQHNVPPPSPPPQHSKLAEFLRIRPPTFSSSNNPVDALDWLHAVGKKLDTVQCNDEEKVIFAAHQLQGPASLWWDNFQAMQPEGQPITWARFTAAFRRTHVPAGVMALKKREFRELKQGNRSVMEYLHEFNDLARYAPEDVREDEEKQEKFLAGMDPELSVRLVSGDYPDFQRLVDKSIRLEAKHKELESHKRRLANFRNQQGANQRIRYTNPYPGGSSSQQQQQQQPRSAPRPQFVVRVPQPQQQQSQQGTRAPRPHVPAVQPGQGRRDAQGQQRLCFNCFEPGHFADKCPKPRRQQGQAPPRPNNGGKDVIRGRVNHVTAEDVLTTPDVIVGTFLIHSIPATILFDSGASHSFISVPFMGRNQLGVERLRNPLLITTPGGVMTAKYYSPAVPIEIQGIPFPSDLILLDTKNLDVILGMNWLAQFQGVVDCARRTVTLYRGPDQPVVFFAPPTSVDNSELHQIGLSKIPIVREFGDVFLEELPGMTPKREIEFRIDLAPGTTPLYKRPYRMAANELAEVKRQLEELKEKGALNEVTIKNKYPLPRIDDLFDQLKGATVFSKIDLRSGYHQLRIREEDIPKTAFTTRYGLYEFTVMSFGLTNAPAFFMNLMNKVFMEYLDKFVVVFIDDILVYSQSEEDHQQHLCLVLGKLREHHLYAKLSKCEFWLSEVKFLGHVISAKGVAVDPETVTAVTDWKQPKTVTQVRSFLGLAGYYRRFIENFSKIARPMTQLLKKEEKFVWSPQCEKAFQTLKEKLEGHVVAYASRQLRPHEGNYPTHDLDLAAVVHALKIWRHYLIGNRCEIYTDHKSLKYIFTQSDLNLRQRRWLELIKDYDVGIHYHPGKANVVADSLSRKSRCNTLGVRGIPLELNQQMEALNLSIVGRGFLATLEAKPTLLDQIREAHKNDPDMHGLLKNMKQGKAAGFTEDEHGTLWNGNRSSWPFVMCASVSRESTNDRPDFSNLSKYQNGNGMKLGWISSPDFQKPRATWDKSLPYTEFSYNNSYQASIQMAPYEALYGCKCRTPLLWDQVGESQVFGTDILREAEDKVRTIRDNLKVAQSRQKSYADNRRRNLEFAVDDFVYLWVTPLRGVHRFQTKGKLAPRFVGPFRIIARRGEVAYQLELPASFGNMHDVFHVSQLKKCLRVPSEQADSEQIEVREDLTYVERTVKILDTMERRTRNWVIRFCKVQWSNHAEEEATWEREDELKAAHPDLFANAAASEDPLFVEVEADV

SEQ ID NO: 19213 - protein, 1270 aa, Oryza sativa
  Clone ID: TF_OSC900113j.C1.p14.gm
MVTTRRNANTGDGNQPEGSNHNHQGNPPPPPPPPPPPPPDTNAILTQILAQQANMMTAFLHHLQNPPQHNAPPPPPQHSKLAEFLRIRPPTFSSSNNPVDALDWLHAVGKKLDTVQCSDEEKVIFAAHQLQGPASLWWDHFQATQPAGQPITWARFTAAFRRTHVPAGVVALKKREFRELKQGNRSVMEYLHEFNNLARYAPEDVREDEEKQEKFLAGMDPELSVCLVSRDYPDFQRLVDKSIRLEAKHKELESHKRRLANFRNQQGANQRVRYTNPYPGGSSSQQQQQQQQPRSAPRPQFVVRVPQPQQQQNQQGTRAPRPPTPTVQPGQGRRDTQGNFPGRDKRLCFNCFEPGHFADKCPKPRRQQGQAPPRSNNGGKDVIRGRVNHVTAEDVLTTPDVIVGTFLIHSIPATILFDSGASHSFISVPFVGRNQLGVERLRNPLLITTPGGVMTAKYYSPAVPIEIQGIPFPSDLILLDTKNLDVILGMNWLAQFQGIGLSEIPIVREFGDVFPEELPGMPPKREIEFRIDLAPGTTPLYKRPYRMAANELAEVKKQLEELKEKGYIRPSTSPWGAPVIFVEKKDKTKRMCVDYRALNEVTIKNKYPLPRIDDLFDQLKGATVFSKIDLRSGYHQLRIREEDIPKTAFTTRYGLYEFTVMSFGLTNAPAFFMNLMNKVFMEYLDKFVVPRRAAVAAAVVSRRRHHRVRKVAAVPVHRFAAAEDRRSTVAAVDPIFSAAFSSTPPPSVGLPPTFWSSVSSPRRDLRLGALRLCRRAAVRRRACAVRAVRAAEPPPVLTSSLTPFPRYRGGTEAHGDMMWGCVLWVQWYTSGQRYYRRFIENFSKIARPMTQLLKKEEKFVWSPQCEKAFQTLKEKLVSSPVLILPDTRKDFMVYCDASRQGLGCVLMQDGHVVAYASRQLRPHEGNYPTHDLELAAVTTGNNPTGIPHVRALILVPGGKTEPQTKPYPLDMWKYGSALQQRPEDRRGRGRADRVHGSGAHASASRSTADREHAAGGGRRRGSHASAVPAGAVGLRPAPYWEAWGPPLRLAPPFVGPLTVCVAGAGWGSGYCVGGLNVPSWESGVGRAGVAGGSGGWRGRGGVGGVWDDGGAWLRVGFAGALRSVRLRSAHVPMAAFINYRLALFDVLGLLGGCVAVVGCLCDGFWGSPGWRATTGTAAETEEAGGAFGTTRTTAFRRSASEAEGRTRSTTTRRSRRRRRREGRKSGATAAANRSSAATAERRCDGASTIPTGRASGERRKRRRRARGTFK

SEQ ID NO: 19214 - protein, 1559 aa, Oryza sativa
  Clone ID: TF_OSC900113j.C1.p30.fg
MAGVIGDGGLSGGEPRHASAYLVPAQFYGYDEAAVFEIGSALHLDTAGYDALVLVLAAHMMVTTRRNVNTGEGNQPEGSNPNPQGNPPPPPPPDTNAILTQILAQQANMMNAFLHHLQNPPQQNAPPPPPQHSKLAEFLRIRPPTFSSSNNPVDALDWLHAVGKKLDTVRCSDEEKVVFAAHQLQGPASLWWDHFQATQPEGQPITWARFTAAFRRTHVPAGVVALKKREFRELKQGNRSVMEYLHEFNNLARYAPEDVREDEEKQEKFLAGMDPELSVRLVSGDYPDFQRLVDKSIRLEAKHKELESHKRRLANFRNQQGANQRVRYTNPYPGGTSSQQQQQQQPRPAPRPQFVVRVPQPQQQQNQQGTRAPRPPTPTVQPVQGRRDAQGPQRLCFNCFEPGHFADKCPKPRRQQGQAPPRSNNGGKDVIRGRVNHVTAEDVLTTPDVIVGTFLVHSIPATILFDSGASHSFISVPFVGRNQLGVERLRNPLLITTPGGVMTAKYYSPAVPIEIQGIPFPSDLILLDTKNLDVILGMNWLAQFQGVVDCARRTVTLYRGPEQPVVFFAPPTSVRSSELHQIGLSEIPIVREFGDVFPEELPGMPPKREIEFRIDLAPGTTPLHKRPYRMAANELAEVKKQLEELKEKGYIRPSTSPWGAPVIFVEKKDKTKRMCVDYRALNEVTIKNKYPLPRIDDLFDQLKGATVFSKIDLRSGYHQLRIREEDIPKTAFTTRYGLYEFTVMSFGLTNAPAFFMNLMNKVFMEYLDKFVVVFIDDILIYSQSEEDHQHHLRLVLGKLREHQLYAKLSKCEFWLSEVKFLGHVISAKGVAVDPETVTAVTDWKQPKTVTQIRSFLGLAGYYRRFIENFSKIARPMTQLLKKEEKFVWSPQCEKAFQTLKEKLVSSPVLILPNTRKDFMVYCDASRQGLGCVLMQDGHVVAYASRQLRPHEGNYPTHDLELAAVVHALKIWRHYLIGNRCEIYTDHKSLKYIFTQSDLNLRQRRWLELIKDYDVGIHYHPGKANVVADALSRKSHCNTLNVRGIPPELNQQMEALNLSIVGRGFLAALEAKPTLLDQIREAQKNDPDMHGLLKNMKQGKAAGFTEDEHGTLWNGKRVCVPDSRELKQLILQEAHESPYSIHPGSTKMYLDLKEKYWWVSMKREIAEFVALCDVCQRVKAEHQRPAGLLQPLQVPEWKWDEIGMDFITGLPKTQGGYDSIWVIVDRLTKVARFIPVKTTYGGNKLAELYFARIVSLHGIPKKIVSDRGSQFTSHFWKKLQEELGTRLNFSTAYHPQTDGQTERLNQILEDMLRACVLDFGKTWDKSLPYAEFSYNNSYQASIQMAPYEALYGRKCRTPLLWDQVGESQVFGTDILREAEAKVRIIRDNLKVAQSRQKSYADNRRRDLEFAVDDFVYLRVTPLRGVHRFQTKGKLAPRYVGPFRIIARRGEVAYQLELPASLGNVHDVFHVSQLKKCLRVPSEQADSEQIEVREDLTYVERPVKILDTMERRTRNRVIRFCKVQWSNHAEEEATWEREDELKAAHPGLFASSSESRGRDSV

SEQ ID NO: 19215 - protein, 1672 aa, Oryza sativa
  Clone ID: TF_OSC900144j.C1.p3.fg
MSWHRAGVLLLGAQSCLPVPGVPAVGGIESVLLSMARMGWKLCHVFRLYTVVMAGSVSRRGLDMTGFVLELRGMCVVLGYPHGVDYQGRPLPEQEGDDAEPHAAWEVTAVILTGSPERTSLAVTAGGDSFPAACQNAALLAIGTLHQRYPDELQHSPYRYHPRRGGARDYAIFRDASSEDDATIMHLARMVEAYDAARIDFHQMVRRGMVGNNMKILELRQENLQLKKDLDAVEAQLHQLKIAQGEMVKTRRNAATGDGNQPEGSNHNHQGSPPPPPPPPPPPPPDTNAILTQILAQQANMMTAFLHHLQNPPQQNAPPPPPQHSKLAEFLRIRPPTFSSSNNPVDALDWLHAVGKKLDTVQCSDEEKVIFAAHQLQGPASLWTHVPAGVVALKKREFRELKQGNRSVMEYLHELNNLARYAPEDVREDEEKQEKFLAGMDPELSVRLVSGDYPDFQRLMDKSIRLEAKHKELESHKRRLANFRNQQGANQRVRYTNPYPGGSSSQQQQQQQQPRSAPRPQFVPGQGRRDAQGPQRLCFNCFEPGHFADKCPKPRRQQGQAPPRSNNGGKDVIRGRVNHVTAEDVLTTPDVIVGTFLIHSIPATILFDSGASHSFISVPFVGRKQLGVERLRNPLLITTPGGVMTAKYYSPAVPIEIQGIPFPSDLILLDTKNLDVILRMNWLAQFQGVVDCARRTVTLYRGPEQPVVFFAPPTSVSSSELHQIGLSEIPIVREFGDVFPEELPGMPPKREIEFRIDLAPGTTPLYKRPYRMAANELAEKKDKMKRMCVDYRALNEVTIKNKYPLPRIDDMFDQLKGATVFSKIDLRSGYHQLRIREEDIPKTAFTTRYGLYEFTVMSFGLTNAPAFFMNLMNKVFMEYLDKFVVVFIDDILIYSQSEEDHQHHLRLVLGKLREHQLYAKLSKCEFWLSEVKFLGHVISAKGVAVDPETVTAVTDWKQPKTVTQVRSFLGLAGYYRRFIENFSKIARPMTQLLKKEEKFVWSPQCEKAFQTLKEKLVSSPVLILPDTRKDFMVYCDASRQGLGCVLMQDGHVVAYASRQLRPHEGNYPTHDLELAAVVHALKIWRHYLIGNRCEIYTDHKSLKYIFTQSDLNLRQRRWLELIKDYDVGIHYHPGKANVVADALSRKSHCNTLDVRGIPPELNQQMEALNLSIVGRGFLATLEAKPTLLDQIREAQKNDPDMRGLLKNMKQGKAAGFTEDEHGTLWNGNRVCVPDDRELKQLILQEAHESPYSIHPGSTKMYLDLKEKYWWVSMKREIAEFVALCDVCQRVKAEHQRPAGLLQPLQVPEWKWDEIGMDFITGLPKTQGGYDSIWVVVDRLTKVARFIPVKTTYGGNKLAELYFARIVSLHGVPKKIVSDRGSQFTSHFWKKLQEELGTRLNFSTAYHPQTDGQTERLNQILEDMLRACVLDFGKTWDKSLPYAEFSYNNSYQPSIQMAPYEALYGRKCRTPLLWDRVGESQVFGTDILREAEAKVRTIRDNLKVAQSRQKSYADNRRRNLEFAVDDFVYLRVTPLRGVHRFQTKGKLAPRYVGPFRIIARCGEVAYQLELPASLGNVHDVFHVSQLKKCLRVPSEQADSEQIEVREDLTYVERPVKILDTMERRTRNRVIHFCKVQWSNHAEEEATWEREDELKAAHPDLFASSSESRGRDSV

SEQ ID NO: 19216 - protein, 1803 aa, Oryza sativa
  Clone ID: TF_OSC900175j.C1.p10.fg
MGWKLCHVFRPYTVVMAGSVTRRGLSMTGFVLELRGMCVVLGYPHGVDYQARPLPEQEGEDAEPHAGWEVTAVILSGSPERTSLAVTAGGDSFPAACQNAALLAIGTLHQRYPDELQHSPYRYHPRRGGARDYATFRDASSEDDATVVHLARMVEAYDAARIDFHQMVRRGMVENNLKILELRQENLQLKKDLDALEAQLHQLKIAQGEDSRPKRRRVCRSQKITARKSTSRPELVRQSLAWTCFVETPRAEPAPVVPQEGEASGVGSSEGALLLTFRPGPSQRSLSLFAGSVWGFQMVTTRRNVNTGEGNQPEGSNHNHQGNPPPPPPPPPPPPPDTNAILTQILAQQANMMTAFLHHLQNPPQQNAPPPPPQHSKLAEFLRIRPPTFSSSNNPVDALDWLHAVGKKLDTVQCSDEEKVVFAAHQLQGPASLWWDHFQATQPEGQPITWARFTAAFRRTHVPAGVVALKKREFRELKQGNRSVMEYLHEFNNLARYAPQDVREDEEKQEKFLAGMDPELSVRLVSGDYPDFQRLVDKSIRLEAKHKELESHKRRLANFRNQQGANQRVRYTNPYPGGSSSQQQQQQQQPRSAPRPQFVVRIPQPQQQQNQQGTRAPRPPTPTVQPVQGRRDAQGQQRLCFNCFEPGHFADKCPKPRRQQGQAPPRSNNGGKDVIRGRVNHVTAEDVLTTPDVIVGTFLVHSIPATILFDSGASHSFISVSFVGRNQLGVERLRNPLLITTPGGVMTAKYYSPAVPIEIQGIPFPSDLILLDTKNLDVILGMNWLAQFQGVVDCARRTVTLYRGPEQPVVFFAPPTSVRSSELHQIGLSEIPIVREFGDVFPEELPGMPPKREIEFRIDLAPGTTPLHKRPYRMAANELAEVKKQLEELKEKGYIRPSTSPWGAPMIFVEKKDKTKRMCVDYRALNEVTIKNKYPLPRIDDLFDQLKGATVFSKIDLRSGYHQLRIREEDIPKTAFTTRYGLYEFTVMSFGLTNAPAFFMNLMNKVFMEYLDKFVVVFIDDILIYSQSEEDHQHHLRLVLGKLREHQLYAKLSKCEFWLSEVKFLGHVISAKGVAVDPETVTAVTEWKQPKTVTQVRSFLGLAGYYRRFIENFSKIARPMTQLLKKEEKFVWSPQCEKAFQTLKEKLVSSPVLILPDTRKDFMVYCDASRQGLGCVLMQDGHVVAYASRQLRPHEGNYPTHDLELAAVVHALKIWRHYLIGNRCEIYTDHKSLKYIFTQSDLNLRQRRWLELIKDYDVGIHYHPGKANVVADALSRKSHCNTLNVRSIPPELNQQMEALNLSIVGRGFLAALEAKPTLLDQIREAQKNDPDMHGLLKNMKQGKAAGFTEDEHGTLWNGKRVCVPDNRELKQLILQEAHESPYSIHPGSTKMYLDLKEKYWWVSMKREIAEFVALCDVCQRVKAEHQRPAGLLQPLQVPEWKWDEIGMDFITGLPKTQGGYDSIWVIVDRLTKVARFIPVKTTYGGNKLAELYFARIVSLHGIPKKIVSDRGSQFTSHFWKKLQEELGTRLNFSTAYHPQTDGQTERLNQILEDMLRACVLDFGKTWDKSLPYAEFSYNNSYQASIQMAPYEALYGRKCRTPLLWDQVGESQVFGTDILREAEAKVRIIRDNLKVAQSRQKSYADNRRRDLEFAVDDFVYLRVTPLRGVHRFQTKGKLAPRYVGPFRIIARRGEVAYQLELPASLGNVHDVFHVSQLKKCLRVPSEQADSEQIEIREDLTYVERPVKILDTMERRTRNRVIRFCKVQWSNHAEEEATWEREDELKAAHPDLFASSSESRGRDSV

SEQ ID NO: 19217 - protein, 1786 aa, Oryza sativa
  Clone ID: TF_OSC900176j.C1.p13.fg
MDEVGGRWTFSRANEGYTSCGPMAGSVTRRGLDMTGFVLELRGMCVVLGYPHGVDYQARPLPEQEGEDAEPHAGWEVTAVILSGSPERTSLAVTAGGDSSPAACQNAALLAIGTLHQRYPDELQHSPYRYHPRRGGARDFATFRDASLEDDATVVHLARMVEAYDAARIDFHQMVRRGMVENNLKILELRQENLQLKKDLDALEAQLHQLKIAQGEDSRPKRRRVCRSQKITARKSTSRPELVRQSLAWTCFVETPRAEPAPVVPQEGEASGVGSTEDALLLTFRPGPSQRRNVSTGEGNQPEGSNPNPQGNPPPPPPPDTNAILTQILAQQANMMTAFLHHLQNPPQQNAPPPPPQHSKLAEFLRIRPPTFSSSNNPVDALDWLHAVGKKLDTVQCSDEEKVIFAAHQLQGPASLWWDHFQATQPEGQPITWARFTAAFRRTHVPAGVVALKKREFRELKQGNRSVMEYLHEFNSLARYAPEDVREDEEKQEKFLAGMDPELSVRLVSGDYPDFQRLVDKSIRLEAKHKELETHKRRLANFRNQQGANQRVRYTNPYPGGSSSQQQQQQQQPRSAPRPQFVVRVPQPQQQQSQQGTRVARPPTPVVQPVQGRRDAQGQQRLCFNCFEPGHFADKCPKPRRQQGQAPPRSNNGGKDVIRGRVNHVTAEDVLTTPDVIVGTFLVHSIPATILFDSGASHSFISVPFVGKNQLGVERLRNPLLITTPGGVMTAKYYSPAVPIEIQGIPFPSDLILLDTKNLDVILGMNWLAQFQGVVDCARRTVTLYRGPEQPVVFFAPPTSVRSSKLHQIELSEIPIVREFGDVFPEELPGMPPKREIEFRIDLAPGTTPLHKRPYRMAANELAEVKKQLEELKEKGYIRPSTSPWGAPVIFVEKKDKTKRMCVDYRALNEVTIKNKYPLPRIDDLFDQLKGATVFSKIDLRSGYHQLRIREEDIPKTAFTTRYGLYEFTVMSFGLTNAPAFFMNLMNKVFMEYLDKFVVVFIDDILIYSQSEEDHQHHLRLVLGKLREHQLYAKLSKCEFWLSEVKFLGHVISAKGVAVDPETVTAVTEWKQPKTVTQIRSFLGLAGYYRRFIENFSKIARPMTQLLKKEEKFVWSPQCEKAFQTLKEKLVSSPVLILPDTRKDFMVYCDASRQGLGCVLMQDGHVVAYASRQLRPHEGNYPTHDLELAAVVHALKIWRHYLIGNRCEIYTDHKSLKYIFTQSDLNLRQRRWLELIKDYDVGIHYHPGKANVVADALSRKSHCNTLNVRGIPPELNQQMEALNLSIVGRGFLAALEAKPTLLDQIREAQKNDPDMHGLLKNMRQGKAAGFTEDEHGTLWNGKRVCVPDSRELKQLILQEAHESPYSIHPGSTKMYLDLKEKYWWVSMKREIAEFVALCDVCQRVKAEHQRPAGLLQPLQVPEWKWDEIGMDFITGLPKTQGGYDSIWVIVDRLTKVARFIPVKTTYGGNKLAELYFARIVSLHGIPKKIVSDRGSQFTSHFWKKLQEELGTRLNFSTAYHPQTDGQTERLNQILEDMLRACVLDFGKTWDKSLPYAEFSYNNSYQASIQMAPYEALYGRKCRTPLLWDQVGESQVFGTDILREAEAKVRIIRDNLKVAQSRQKSYADNRRRDLEFAVDDFVYLRVTPLRGVHRFQTKGKLAPRYVGPFRIIARRGEVAYQLELPASLGNVHDVFHVSQLKRCLRVPSEQADSEQIEVREDLTYVERPVKILDTRERRTRNRVIRFCKVQWSNHAEEEATWEREDELKAAHPDLFASSSESRGRDSV

SEQ ID NO: 19218 - protein, 1802 aa, Oryza sativa
  Clone ID: TF_OSC900179j.C1.p13.fg
MDEVGRRWTFSRANEGYTSCGPMAGSVTRRGLDMTGFVLELRGMCVVLGYPHGVDYQARPLPEQEGEDAEPHAGWEVTAVILSGSPERTSLAVTAGGDSFPAACQNAALLAIGTLHQRYPDELQHSPYRYHPRRGGARDHATFRDASSEDDATVVHLARMVEAYDAARIDFHQMVRRGMVENNMKILELRQENLQLKKDLDALEAQLHQLKIAQGEGSRPKRRRVCRSQKITARKSTSRPELVRQSLAWTCFVETPRAEPAPVVPQEGEASGVGSSEGALLLTFRPGPSQRSPSLFAGSVWGFQMVTTRRNVNTGEGNQPEGSNPNPQGNPPPPPPPDTNAILTQILAQQANMMNAFLHHLQNPPQQNAPPPPPQHSKLAEFLRIRPPTFSSSNNPVDALDWLHAVGKKLDTVQCSDEEKVVFAAHQLQGPASLWWDHFQATQPEGQPITWTRFTAAFRRTHVPAGVVALKKREFRELKQGNRSVMEYLHEFNNLARYAPEDVREDEEKQEKFLAGMDPELSVRLVSGDYPDFQRLVDKSIRLEAKHKELESHKRRLANFRNQQGANQRVRYTNPYPGGSSSQQQQQQPRPAPRPQFVVRVPQQQQQQNQQGTRAPRPPTPAVQPVQGRRDASGPQRLCFNCFEPGHFADKCPKPRRQQGQAPPRSNNGGKDVIRGRVNHVTAEDVLTTPDVIVGTFLVHSIPATILFDSGASHSFISVPFVGKNQLGVERLRNPLLITTPGGVMTAKYYSPAVPIEIQGIPFPSDLILLDTKNLDVILGMNWLAQFQGVVDCARRTVTLYRGPEQPVVFFAPPTSVRSSELHQISLSEIPIVREFGDVFPEELPGMPPKREIEFRIDLAPGTTPLHKRPYRMAANELAEVKKQLEELKEKGYIRPSTSPWGAPVIFVEKKDKTKRMCVDYRALNEVTIKNKYPLPRIDDLFDQLKGATVFSKIDLRSGYHQLRIREEDIPKTAFTTRYGLYEFTVMSFGLTNAPAFFMNLMNKVFMEYLDKFVVVFIDDILIYSQTEEDHQHHLRLVLGKLREHQLYAKLSKCEFWLSEVKFLGHVISAKGVAVDPETVTAVTEWKQPKTVTQIRSFLGLAGYYRRFIENFSKIARPMTQLLKKEEKFVWSPQCEKAFQTLKEKLVSSPVLILPDTRKDFMVYCDASRQGLGCVLMQDGHVVAYASRQLRPHEGNYPTHDLELAAVVHALKIWRHYLIGNRCEIYTDHKSLKYIFTQSDLNLRQRRWLELIKDYDVGIHYHPGKANVVADALSRKSHCNTLNVRGIPPELNQQMEALNLSIVGRGFLAALEAKPTLLDQIREAQKNDPDMHGLLKNMKQGKAAGFTEDEHGTLWNGKRVCVPESRELKQLILQEAHESPYSIHPGSTKMYLDLKEKYWWVSMKREIAEFVALCDVCQRVKAEHQRPAGLLQPLQVPEWKWDEIGMDFITGLPKTQGGYDSIWVVVDRLTKVARFIPVKTTYGGNKLAELYFARIVSLHGIPKKIVSDRGSQFTSHFWKKLQEELGTRLNFSTAYHPQTDGQTERLNQILEDLLRACVLDFGKTWDKSLPYAEFSYNNSYQASIQMAPYEALYGRKCRTPLLWDQVGESQVFGTDILREAEAKVRIIRDNLKVAQSRQKSYADNRRRDLEFAVDDFVYLRVTPLRGVHRFQTKGKLAPRYVGPFRIIARRGEVAYQLELPASLGNVHDVFHVSQLKKCLRVPSEQADSEQIEVREDLTYVERPVKILDTMERRTRNRVIRFCKVQWSNHAEEEATWEREDELKAAHPDLFASSSESRGRDSV

SEQ ID NO: 19219 - protein, 2242 aa, Oryza sativa
  Clone ID: TF_OSC900186j.C1.p18.gm
MAEQAKVHDLSPSVSGDDGEPNPRRRARTPPPPLQSPKQGEALERVDKSAASPIAGDAGERRDGERRLLVYGDGSTPQGALQAAGALLRHPPVVHDPESPAQRWLDDVANLVMMAQQRLGAGGRSATTKTSGAATTGSVSSRRRARRAAAAARHSAATPSSTPSTREDQHGEPDARLNIERRRNSRRTPRATEGASSSRVSPRHGREDQPSVPPVGGVGCRAFVASLRNVRWPPRFRPTITEKYDGSVNPTEFLQIYTTGIEAAGGDDRVMANFFPMALKGQARGWLMNLPPASRFCQVRNTIPCIPAHAVIYAFRGGVRHNRMLEKIASKEPQTTAELFQLADRVARKEEAWTWNPSGSGVAASAAPGSAAQTGRRDRRRKKRSAHSGDEGHVLAVEGAPRATRKGRPASDKKKEAGTPSRERPASKWCSVHNTSLHDLADCRAVKNLAERTRKWEEDRRQERREGKSAAVPSGKRRSEARQKAPAVGIDDGDDDLGFQEPGATIATVDGGACAHVSRRSFKAMRRELLAAAPTHEATRRARWSEVALTFDQTDHPPCVARGGQVAMVVSPTICNVKLGRVLIDGGAALNILSPAAFDAIKAPGMVLQPSQPIIGVTPGHTWPLGHIDLPVTFGGSANFRTERVNFDVADLSLPYNAVLGRPALVKFMAAVHYAYLQMKMPGPSGPISVRGDLKVALACMEQRADHLAAATKPEGGDERLGTSAPTAPRQRIATCDEVPEDALVSFLRANADVFAWRPADMPGVPREVIEHRLAVRPGARPVRQKVRRQAPERQAFIREEVARLLEAGFIREVIHPEWLANPVVVPKANGKLRMCIDYTDLNKACPKDPYPLPRIDQIVDSTAGCDLLCFLDAYSGYHQIRMAREDEEKTAFITPVGTYCYTSMPFGLKNAGPTFQRTTRISLGSQIGRNVEAYVDDLVVKTRNQETLLLDLAETFENLRSACIKLNPDKRARPPLSLTGGAHLSSSSSCRARRRARALAPPPPRIAPHPAVPARIKERGIIPRDSLSRFPRFPLSLSLGFVRIVAAFVAGAINGGRDLRGRFPSSPAALSPSRCYIFVARAPLFRFRRSPLALAVGIVLAPCSSLSAVAVDLRFAAAAAPDFLLTRRPLRPLRRVVADPVRRSASPADRRSTVALVIPSRAAVFLRSVRRFTAFAVSGANEDYTSCGPMAGSITRRGLSMTGFVLELRGMCVVLGYPHGVDYQARPLPEQEGEDAEPHAGWEVTAVILSGSPERTSLAVTAGGDSFPAACQNAALLAIGTLHQRYPDELQHSPYRYHPRRGGARDYATFRDASSEDDATVVHLARMVEAYDAARIDFHQMVRRGMVENNMKILELRQENLQLKKDLDALEAQLHQLKIAQGEDSRPKRRRVCRSQKITARKSTSRPELVRQSLAWTCFVETPRAEPAPVVPQEGEASGVGSSEGALLLTFRPGPSQRSPSLFAGSVWGFQMVTTRRNVSTGEGNQPEGSNPNPQGNPPPPPPPDTNAILTQILAQQANMMNAFLHHLQNPPQQNAPPPPPQHSKLAEFLRIRPPTFSSSNNPVDALDWLHAVGKKLDTVQCSDEEKVIFAAHQLQGPASLWWDHFQATQPEGQPITWTRFTAAFRKTHVPAGVVALKKREFRELKQGNRSVMEYLHEFNNLARYAPEDVREDEEKQEKFLAGMDPELSVRLVSGDYPDFQRLVDKSIRLEAKHKELESHKRRLANFRNQQGANQRVRYTNPYPGGSSSQQQQQQQQPRPAPRPQFVVRVPQPQQQQNQQGTRAPRPPTPAVQPVQGRRDAQGQQRLCFNCFEPGHFADKCPKPRRQQGQAPPRSNNGGKDVIRGRVNHVTAEDVLTTPDVIVGTFLVHSIPATILFDSGASHSFISVPFVGRNQLGVERLRNPLLITTPGGVMTAKYYSPAVPIEIQGIPFPSDLILLDTKNLDIGLSEIPIVREFGDVFPEELPGMPPKREIEFRIDLAPGTTPLYKRPYRMAANELAEVKKQLEELKEKGYIRPSTSPWGAPVIFVEKKDKTKRMCVDYRALNEVTIKNKYPLPRIDDLFDQLKDATVFSKIDLRSGYHQLRIREEDIPKTAFTTRYGLYEFTVMSFGLTNAPAFFMNLMNKVFMEYLDKFVVVFIDDILIYSQSEEDHQHHLRLVLGKLREHQLYAKLSKCEFWLSEVKFLGHVISAKGVAVDPETVTAVTDWKQPKTAGPPATLADGWDPPVIPLLSPRPPPTPVP

SEQ ID NO: 19220 - protein, 1737 aa, Oryza sativa
  Clone ID: TF_OSC900186j.C1.p7.fg
MDEVGRRWTFSRANEGYTSCGPMAGSVTRRGLDMTGFVLELRGMCVVLGYPHGVDYQARPLPDQEGDDAEPHAAWEVTAVILSGSPERTSLAVTAGGDSFPAACQNAALLAIGTLHQRYPDELQHSPYRYHPRRGGARDHATFRDASSEDDATVVHLARMVEAYDAARIDFHQMVRRGMVENNLKILELRQENLQLKKDLDALEAQLHQLKIAQGEDSRPKRRRVCRSQKITARKSTSRPELVRQSLAWTCFVETPRAAPAPVVPQEGEASGMVTTRRNVNTGEGNQPEGSNPNPQGNPPPPPPPDTNAILTQILAQQANLMTAFLHHLQNPPQQNAPPPPPQHSKLAEFLRIRPPTFSSSNNPVDALDWLHAVGKKLDTVQCSDEEKVIFAAHQLQGPASLWWDHFQATQPEGQPITWARFTAAFRRTHVPAGVVALKKREFRELKQGNRSVMEYLHEFNNLARYAPEDVREDEEKQEKFLAGMDPELSVRLVSGDYPDFQRLVDKSIRLEAKHKELESHKRRLANFRNQQGANQRVRYTNPYPGGSSSQQQQQQQQPRPAPRPQFVVRVPQPQQQNQQGTRASRPPTPAVQPVQGRRDASGPQRLCFNCFEPGHFADKCPKPRRQQGQAPPRSNNGGKDVIRGRVNHVTAEDVLTTPDVTVGTFLVHSIPATILFDSGASHSFISVPFVGKNQLGVERLRNPLLITTPGGVMTAKYYSPAVPIEIQGIPFPSDLILLDTKNLDVILGMNWLAQFQGVVDCARRTVTLYRGPEQPVVFFAPPTSVRSSELHQIELSEIPIVREFGDVFPEELPGMPPKREIEFRIDLAPGTTPLYKRPYRMAANELAEVKKQLEELKEKGYIRPSTSPWGAPVIFVEKKDKTKRMCVDYRALNEVTIKNKYPLPRIDDLFDQLKGATVFSKIDLRSGYHQLRIREEDIPKTAFTTRYGLYEFTVMSFGLTNAPAFFMNLMNKAFMEYLDKFVVVFIDDILIYSQSEEDHQHHLRLVLGKLREHQLYAKLSKCEFWLSEVKFLGHVISAKGVAVDPETVTAVTDWKQPKTVTQIRSFLGLAGYYRRFIENFSKIARPMTQLLKKEEKFVWSPQCEKAFQTLKEKLVSSPVLILPDTRKDFMVYCDASRQGLGCVLMQDGHVVAYASRQLRPHEGNYPTHDLELAAVVHALKIWRHYLIGNRCEIYTDHKSLKYIFTQSDLNLRQRRWLELIKDYDVGIHYHPGKANVVADALSRKSHCNTLNVRGIPPELNQQMEALNLNIVGRGFLAALEAKPTLLDQIREAQKNDPDMHGLLKNMKQGKAAGFTEDEHGTLWNGKRVCVPDSRELKQLILQEAHESPYSIHPGSTKMYLDLKEKYCVSRQSTSDRLDFSNLSKYQNGNGMKLGWISSPDFQKPKVARFIPVKTTYGGHKLAELYFARIVSLHGVPKKIVSDRGSQFTSHFWKKLQEELGTRLNFSTAYHPQTDGQTERLNQILEDMLRACVLDFGKTWDKSLPYAEFSYNNSYQASIQMAPYEALYGRKCRTPLLWDQVGESQVFGTDILREAEAKVRIIRDNLKVAQSRQKSYADNRRRDLEFAVDDFVYLRVTPLRGVHRFQTKGKLAPRYVGPFRITARRGEVAYQLELPASLGNVHDVFHVSQLKKCLRVPSEQADSEQIEVREDLTYVEKPVKILDTMERRTRNRVIRFCKVQWSNHAEEEATWEREDELKAAHPDLFASSSESRGRDSV

SEQ ID NO: 19221 - protein, 1826 aa, Oryza sativa
  Clone ID: TF_OSC900190j.C1.p21.fg
MEVDEVGGRWTFSRANEGYTSCGPVVEMSWHRAGVLLLGAQSCLPVPGVPAVGGIGSVLLSMARMGWKLCHSFRLYTVVMAGSVTRRGLDMTGFVLELRGMCVVLGYPHGVDYQARPLPEQEGEDAEPHAGWEVTAVILSGSPERTSLAVTAGGDSFPAACQNAALLAIGTLHQRYPDELQHSPYRYHPRRGGARDYATFRDASSEDDATIVHLARMVEAYDAARIDFHQMVRRGMVENNMKILELRQENLQLKKDLDAVEAQLQQLKIAQGEDCRPKRRRVCRSQKITARKSTSRPELVRQSLAWTCFVETPRAEPAPVVPQEGEASGVGSTEDALLLTFRPGPSQRRNANTGDGNQPEGSNHNRQGNPPPPPPPPPPPPPDTNAILTQILAQQANMMTAFLHHLQNPPQHNAPPPPPQHSKLAEFLRIRPPTFSSSNNPVDALDWLHAVGKKLDTVQCSDEEKVVFAAHQLQGPASLWWDHFQATQPEGQPITWARFTAAFRRTHVPAGVVALKKREFRELKQGNRSVMEYLHEFNNLARYAPEDVREDEEKQEKFLAGLDPELSVRLVSGDYPDFQRLVDKSIRLEAKHKELESHKRRLANFRNQQGANQRVRYTNPYPGGSSSQQQQQQQQPRSAPRPQFVVRVPQPQQQQNQQGTRAPRPPTPTVQPGQGRRDAQGQQRLCFNCFEPGHFADKCPKPRRQQGQAPPRSNNGGKDVIRGRVNHVTAEDVLTTPDVIVGTFLVHSIPATILFDSGASHSFISVPFVGRNQLGVERLRNPLLITTPGGVMTAKYYSPAVPIEIQGIPFPSDLILLDTKNLDVILGMNWLAQFQGVVDCARRTVTLYRGPEQPVVFFAPPTSVSSSELHQIGLSEIPIVREFIDVFPEELPGMPPKREIEFRIDLAPGTTPLHKRPYRMAANELAEVKKQLEELKEKGYIRPSTSPWGAPVIFVEKKDKTKRMCVDYRALNEVTIKNKYPLPRIDDLFDQLKGATVFSKIDLRSGYHQLRIREEDIPKTAFTTRYGLYEFTVMSFGLTNAPAFFMNLMNKVFMEYLDKFVVVFIDDILIYSQSEEDHQHHLRLVLGKLREHQLYAKLSKCEFWLSEVKFLGHVISAKGVAVDPETVTAVADWKQPKTVTQVRSFLGLAGYYRRFIENFSKIARPMTQLLKKEEKFVWSPQCEKAFQTLKEKLVSSPVLILPDTRKDFMVYCDASRQGLGCVLMQDGHVVAYASRQLRPHEGNYPTHDLELAAVVHALKIWRHYLIGNRCEIYTDHKSLKYIFTQSDLNLRQRRWLELIKDYDVGIHYHPGKANVVADALSRKGHCNTLNVLGIPPELNQQMEALNLSVVGRGFLAALEAKPTLLDQIREAQKNDPDMHGLLKNMKQDNRELKQLILQEAHESPYSIHPGSTKMYLDLKEKYWWVSMKREIAEFVALCDVCQRVKAEHQRPAGLLQPLQVPEWKWDEIGMDFITGLPKTQGGYDSIWVVVDRLTKVARFIPMKTTYGGNKLAELYFARIVSLHGVPKKIVSDRGSQFTSHFWKKLQEELGTRLNFSTAYHPQTDGQTERLNQILEDMLRACVLDFGKTWDKSLPYAEFSYNNSYQASIQMAPYEALYGRKCRTPLLWDQVGESQVFGTDILREAEAKVRIIRDNLKVAQSRQKSYADNRRRDLEFVVDDFVYLRVTPLRGVHRFQTKGKLAPRYVGPFRIVARRGEVAYQLELPASLGNVHDVFHVSQLKKCLRVPSEQADSEQIEVREDLTYVERPVKILDTMERRTRNRVIRFCKVQWSNHAEEEATWEREDELKAAHPDLFTSSSESRGRDSV

SEQ ID NO: 19222 - protein, 917 aa, Oryza sativa
  Clone ID: TF_OSC900190j.C1.p22.fg
MDISRTNEGYTSYGPVVEMSWHRAGVLLLGAQSCLPVPGVPAMAGSINCRGLDLTGFVLELRGMCVVLGYPHGVDYQGKQLPEQEGDDAEPHAAWEVTAVILTGSPERTSLAVTAGARDYATFRDAGSEDDSTIMHLARMVEAYDAARIDFHQMVRRGLVENNMKILELRQENLQLKKDLDAVEAQLRQLKVAQGEVCRPKRRRVCRSQKITARKSTSRPELVRQSLAWTCFVETPRAEPVLVMVTTRRSAATGEGSHPEGSNHNNHGSLPPPPPPPPPPPPDTNAILTQILAQQANMMAAFLHHIQNPPQHNAPPPPPQHSKLAEFLRIRPPTFSSSNNPVDALDWLHAVGKKLDTVQCSDEEKVIFTAHQLQGPASLWWDHFQATQPEGQPTTWARFTAAFWRTHVPAGVMALKKREFRELKQGNCSVMEYLHEFNNLARYAPEDVREDEEKQEKFLAGMDPELSVRLVSGDYPDFQHLVDKSIRLEAKHKERESHKRRLANFRNQQGANQRQQQQQQPRSAPRPQFVVRVPQPQQQQSQQGTRAPRPPTPAVQPSQGRRDVQGQQRLCFNCFEPGHFADKCPKPRRQQGQAPPHSNNGGKDVIRGRVNHVTAEDVLTTPDVIVGTFLIHSIPATILFDSGASHSFIYVPFVGRNQLGVERLRNPLLITTPGGVMTAKYYSPVVPIEIQGIPFPSDLILLDTKNLDVILGMNWLAQFQGVVDCARRTVTLYRGPEQPVVFFAPPTSVGSSELHQIGLSEIPIVRGFGDVFPEELPGMPPKREIEFRIDLAPGTTPQYKRPYRMAANELAKVKKQLEELKEKGYIRPSTSPWGAPVIFVEKKDKTKRMCIDYRALNEVTIKNKYPLPRIDDLFDQLKGAIVFSKIDLRSGYHNYVFVKKISLRPHSPRDTDCMNSR

SEQ ID NO: 19223 - protein, 1786 aa, Oryza sativa
  Clone ID: TF_OSC900190j.C1.p6.fg
MDEVGGRWTFSRANEGYTSCGPMAGSVTRRGLDMSGFVLELRGMCVVLGYPHGVDYQARPLPEQEGEDAEPHAGWEVTAVILSGSPKRTSLAVTAGGDSFPAACQNAALLAIGTLHQRYPDELQHSPYRYHPRRGGARDFATFRDASSEDDATVVHLARMVEAYDAARIDFHQMVRRGMVENNMKILELRQENLQLKKDLDALEAQLHQLKIAQGEDSRPKRRRVCRSQKITARKSTSRPELVRQSLAWTCFVETPRAEPAPVVPQEGEASGVGSSEGALLLTFRPGPSQRRNVNTGEGNQPEGSNPNPQGNPPPPPPPDTNAILTQILAQQANMMNAFLHHLQNPPQQNAPPPPPQHSKLTEFLRIRPPTFSSSNNPVDALDWLHAVGKKLDTVQCSDEEKVVFAAHQLQGPASLWWDHFQATQPEGQPITWARFTAAFRRTHVPAGVVALKKREFRELKQGNRSVMEYLHEFNNLARYAPEDVREDEEKQEKFLAGMDPELSVRLVSGDYPDFQRLVDKSIRLEAKHKELESHKRRLANFRNQQGANQRVRYTNPYPGGSSSQQQQQQQQPRPAPRPQFVVRVPQQQQQQNQQGTRAPRPPTPAGQPVQGRRDASGPQRLCFNCFEPGHFADKCPKPRRQQGQAPPRPNNGGKDVIRGRVNHVTAEDVLTTPDVIVGTFLVHSIPATILFDSGASHSFISVPFVGKNQLGVERLRNPLLITTPGGVMTAKYYSPAVPIEIQGIPFPSDLILLDTKNLDVILGMNWLAQFQGVVDCARRTVTLYRGPEQPVVFFAPPTSVRSSELHQIELSEIPIVREFGDVFPEELPGMPPKREIEFRIDLAPGTTPLHKRPYRMAANELAEVKKQLEELKEKGYIRPSTSPWGAPVIFVEKKDKTKRMCVDYRALNEVTIKNKYPLPRIDDLFDQLKGATVFSKIDLRSGYHQLRIREEDIPKTAFTTRYGLYEFTVMSFGLTNAPAFFMNLMNKVFMEYLDKFVVVFIDDILIYSQSEEDHQHHLRLVLGKLREHQLYAKLSKCEFWLSEVKFLGHVISAKGVAVDPETVTAVTDWKQPKTVTQIRSFLGLAGYYRRFIENFSKIARPMTQLLKKEEKFVWSPQCEKAFQTLKEKLVSSPVLILPDTRKDFMVYCDASRQGLGCVLMQDGHVVAYASRQLRPHEGNYPTHDLELAAVVHALKIWRHYLIGNRCEIYTDHKSLKYIFTQSDLNLRQRRWLELIKDYDVGIHYHPGKANVVADALSRKSHCNTLNVRGIPPELNQQMEALNLSMVGRGFLAALEAKPTLLDQIREAQKNDPDMHGLLKNMKQGKAAGFTEDEHGTLWNGKRVCVPDSRELKQLILQEAHESPYSIHPGSTKMYLDLKEKYWWVSMKREIAEFVALCDVCQRVKAEHQRPAGLLQPLQVPEWKWDEIGMDFITGLPKTQGGYDSIWVIVDRLTKVARFIPVKTTYGGNKLAELYFARIVSLHGIPKKIVSDRGSQFTSHFWKKLQEELGTRLNFSTAYHPQTDGQTERLNQILEDMLRACVLDFGKTWDKSLPYAEFSYNNSYQASIQMAPYEALYGRKCRTPLLWDQVGESQVFGTDILREAEAKVRIIRDNLKVAQSRQKSYADNRRRDLEFAVDDFVYLRVTPLRGVHRFRTKGKLAPRYVGPFRIVARRGEVAYQLELPASLGNVHDVFHVSQLKKCLRVPSEQANSEQIEVREDLTYVEKPVKILDTMERRTRNRVIRFCKVQWSNHAEEEATWEREDELKAAHPDLFASSSESRGRDSV

SEQ ID NO: 19224 - protein, 1943 aa, Oryza sativa
  Clone ID: TF_OSC900219j.C1.p9.fg
MDEVGGRWTFSRANEGYTSCGPMAGSVTRRGLDMTGFVLELRGMCVVLGYPHGVDYQARPLPEQEGEDAEPHAGWEVTAVILSGSPERTSLAVTAGGDSFPAACQNAALLAIGTLHQRYPDELQHSPYRYHPRRGGARDFATFRDASSEDDATVVHLARMVEAYDAARIDFHQMVRRGMVENNMKILELRQENLQLKKDLDALEAQLHQLKIAQGEDSRPKRRRVCRSQKITARKSTSRPELVRQSLAWTCFVETPRAEPAPVVPQEGEASGVGSSEAPSRFAGSVWGFQMVTTRRNVNTGEGNQPEGSNPNPQGNPPPPPPPDTNAILTQILAQQANMMNAFLHHLQNPPQQNAPPPPPQHSKLAEFLRIRPPTFSSSNNPVDALDWLHAVGKKLDTVQCSDEEKVIFAAHQLQGPASLWWDHFQATQPEGQPITWARFTAAFRRTHVPAGVVALKKREFRELKQGNRSVMEYLHEFNNLARYAPEDVREDEEKQEKFLAGMDPELSVRLVSGDYPDFQRLVDKSIRLEAKHKELESHKRRLANFRNQQGANQRVRYTNPYPGGSSSQQQQQQQQPRPAPRPQFVVRVPQQQQQQNQQGTRAPRPPTPAGQPVQGRRDASGPQRLCFNCFEPGHFADKCPKPRRQKGQAPPRSNNGGKDVIRGRVNHVTAEDVLTTPDVIVGTFLVHSIPATILFDSGASHSFISVPFVGKNQLGVERLRNPLLITTPGGVMTAKYYSPAVPIEIQGIPFPSDLILLDTKNLDVILGMNWLAQFQGVVDCARRTVTLYRGPEQPVVFFAPPTSVRSSELHQIELSEIPIVREFGDVFPEELPGMPPKREIEFRIDLAPGTTPLYKRPYRMAANELAEVKKQLEELKEKGYIRPSTSPWGAPVIFVEKKDKTKRMCVDYRALNEVTIKNKYPLPRIDDLFDQLKGATVFSKIDLRSGYHQLRIREEDIPKTAFTTRYGLYEFTVMSFGLTNAPAFFMNLMNKVFMEYLDKFVVVFIDDILIYSQSEEDHQHHLRQVLGKLREHQLYAKLSKCEFWLSEVKFLGHVISAKGVAVDPETVTAVTEWKQPKTVTQVRSFLGLAGYYRRFIENFSKIARPMTQLLKKEEKFVWSPQCEKAFQTLKEKLVSSPVLILPDTRKDFMVYCDASRQGLGCVLMQDGHVVAYASRQLRPHEGNYPTHDLELAAVVHALKIWRHYLIGNRCEIYTDHKSLKYIFTQSDLNLRQRRWLELIKDYDVGIHYHPGKANVVADALSRKSHCNTLNVRGIPPELNQQMEALNLNIVGRGFLAALEAKPTLLDQIREAQKNDPDMHGLLKNMKQGKAAGFTEDEHGTLWNGKRVCVPDSRELKQLILQEAHESPYSIHPGSTKMYLDLKEKYWWVSMKREIAEFVALCDVCQRVKAEHQRPAGLLQPLQVPEWKWDEIGMDFITGLPKTQGGYDSIWVIVDRLTKVARFIPVKTTYGGNKLAELYFARIVSLHGIPKKIVSDRGSQFTSHFWKKLQEELGTRLNFSTAYHPQTDGQTERLNQILEDMLRACVLDFGKTWDKSLPYAEFSYNNSYQASIQMAPYEALYGRKCRTPLLWDQVGESQVFGTDILREAEAKVRIIRDNLKVAQSRQKSYADNRRRDLEFAVDDFVYLRVTPLRGVHRFRTKGKLAPRYVGPFRIVARRGEVAYQLELPASLGNVHDVFHVSQLKKCLRVPSEQANSEQIEVREDLTYVEKPVKILDTMDGLLGSLLGFSEADVGALQIAAEGEDPLGDEGCLHGAEIQHPLDHHPEVLRVPVLFAPLVGPHDVLGPGVLPGAPGAPLERRDPATKVVAEHHGPCEPLGSQARQAVKNGVVAVSQIYRRPPAGGLRRGLARKSEARFVDEGGVEPVALPVVPLFAEDAGNVAVQHLPPRLEVAATDYRRRRHRLNGEEPPEQPERWPTSLSRWG

SEQ ID NO: 19225 - protein, 2614 aa, Oryza sativa
  Clone ID: TF_OSC900232j.C1.p8.gm
MAMTIGLTSARRGCGAGKRGPLVSGSGESGSPWTGTTRVVHRRSTEPTAQIALGADRTGGDRGGDVGAAAVAGAVARREVGEGPDRLGRRTSGCDTRPRAEGGHDASGHDAASLTVTAARPEARFRRRVSFCGIPPEEEGPSIGHGLEAVHGSNIVGGLGKPEASRRSLRGAGRSNQYRATPGRAPSCPHGEGASSSGVPRSSPRDGPPPTLSPGGTGCRAFVASLRNVRWPPKFRPNLTEKYDGSINPSEFLQIYTTIIVAAGGDDRVMANYFQMALKGQARGWLMTQPPDFIHSWEDLCQQFVTNFQGTYPRPGEEADLHAVRWKDDESLRSYIQRFCQVRNTIPCIPAHAVVYAFWNGMRHNRMLEKIASKEPKTTAELFELADKVAWKEAWAWNSPGTADGPSWAPCKGKATGDKPSSTAPSGEGRSADKWCLGRREGKAPATPADDRRGEAKKKAPTDDGDNSEDLEFQIPQGTVATLDLGGGGACAHTSRRGFKAIRRELLATVPTHEAARKAHWSEVKLTFDQSDHLTVLARGGKLALVVSPTIHNVRMKRVLVDGGASLSIISPAAFNALKAPGMKLQPSLPIIGVTPGHTWPLGHVELPITFGDSTNFRTERIDFDVADLNLPYNAVLGRPALVKFMAATHYAYLQMKIPGPSGPITVFGDVKVTLACAEQRADNLAVATEPQAPEASASHASKKRLTSADEESALVSFLRANSDVFEWKPSDMPGVPREVIEHRLAMRLDARPVRQKVRCQAPERQAFIREEVARLLEADFIREVIHPEWLANPVVVPKANGKLRMCIDYTDLNKACPKDPFPLPRIDQIVDSTAGFTLPKSSPAHQWSPRSPRRFPSPPAALSHSQPYLNAPRASLLRFRRPPLALPVGFELAPSSSLSAVAAELRFAAVVAPDLLPLRRRLLRLRRVLVDLVHSSVSPADRRSTIVLVDPSRAAASLRFGRRSRRRRQPGMAGSVTRRGLDMTGFVLELRGMCVVLGYPHGVDYQARPLPEQEGDDAEPHAAWEVTAVILAGSPERTSLTVTAGGDSFPAACQSAALLAIGTLHQRYPDELQHSPYRYHPRRGGARDHATFRDASSEDDATIVHLARMVEAYDAARIDFHQMVRRGMVENNLKILELRQENLQLKKDLDAVEAQLHQLKIAQGEICRPKRRRVCRSQKITARKSTSRPELMVMTRRNANTGDGNQPEGSNHNHQGNPPPPPPPPPPPPPDTNAILTQILAQQANMMTAFLHHLQNPPQLNPPPPPPQHSKLAEFLRIRPPTFSSSNNPVDALDWLHAVGKKLDTVQCSDEEKVIFAAHQLHGPASLWWDHFQAMQPEGQPVTWARFTAAFRRTHVPAGVVALKKREFRELKQGNRSVMEYLHEFNNLARYTPEDVRKDEEKQEKFLAGMDPELSVRLVSGDYPDFQRLVDKSIRLEAKHKELESHKRRLANFRNQQGANQRVRYTNPYPGGSSSQQQQQQQQPRSAPRPQFVVRVPQPQQQQNQQGTRAPRPPTPTVQPGQGRRDASGPQRLCFNCFEPGHFADKCPKPRRQQGQAPPRPNNGGKDVSRGRVNHVTAEDVLTTPDVIVGTFLIHSIPATILFDSGASHSFISVPFVGRNQLGVERLRNPLLITTPGGVMTAKYYSPAVPIEIQGIPFPSDLILLDTKNLDIGLSEIPIVREFGDVFPEELPGMPPKREIEFRIDLAPGTTPLYKRPYRMAANELAEVKKQLEELKEKGYIRPSTSPWGAPVIFVEKKDKTKRMCVDYRALNEVTIKNKYPLPRIDDLFDQLKGATVFSKIDLRSGYHQLRIREEDIPKTAFTTRYGLFEFTVMSFGLTNAPAFFMNLMNKVFMEYLDKFVVVFIDDILIYSQSEEDHQHHLRLVLGKLREHQLYAKLSKCEFWLSEVKFLGHVISAKGVAVDPETVTAVTDWKQPKTVTQVRSFLGLAGYYRRFIENFSKIARPMTQLLKKEEKFVWSPQCEKAFQTLKEKLVSSPVLILPDTRKDFMVYCDASRQGLGCVLMQDGHVVAYASRQLRPHEGNYPTHDLELAAVVHALKIWRHYLIGNRCEIYTDHKSLKYIFTQSDLNLRQRRWLELIKDYDVGIHYHPGKANVVADALSRKSHCNTLNVRGIPLELNQQMEALNLSIVGRGFLTTLEAKPTLLDQIREAQKNDPDMHGLLKNMKQGKAAGFTEDEHGTLWNGNRVCVPDNRELKQLILQEAHESPYSIHPGSTKMYLDLKEKYWWVSMKREIAEFVALCDVCQRVKAEHQRPAGLLQPLQVPEWKWDEIGMDFITGLPKTQGGYDSIWVVVDRLTKVARFIPVKTTYGGNKLAELYFARITDGQTERLNQILEDMLRACVLDFGKTWDKSLPYAEFSYNNSYQASIQMAPYEALYGRKCRTPLLWDQVGESQVFGTDILREAEAKVRTIRDNLKVAQSQQKSYADNRRRDLEFAVDDFVYLRVTPLRGVHRFQTKGKLAPRYVGPFRIVARRGEVAYQLELPASLGNVHDVFHVSQLKKCLRVPSEQADSEQIEVREDLTYVERPVKILDTMERRTRNRVIRFCKVQWSNHAEEEATWEREDELKAAHPDLFARPTRHPLPRAAPAASPVP

SEQ ID NO: 19226 - protein, 1867 aa, Oryza sativa
  Clone ID: TF_OSC900247j.C1.p14.gm
MDEVGGRWTFSRANEGYTSCGPVVEMSWQRVGALLLGAQSCLPVPEVPAVGGIGSMAGSVTRRGLDMTGFVLELRGMCVALGYPHGVDYQARPLPDQEGDDAEPHAGWEVTAVILSGSPERTSLAVTAGGDSFPAACQNAALLAIGTLHQRYPDELQHSPYRYHPRRGGAHDYATFRDASSEDDATIVHLARMVEVYDAARIDFHQMVRRGMVENNLKILELRQENLQLKKDLDAVEAQLHQLKIAQGEVCRPKRRRVCRSQKITARKSTSRPELVRQSLAWTCFVETPRAEPAPVVPQEGEASGIGSTEALSLFAGSVWGFQMVTTRRNAATGDGNQPEGSNHNHQGNPPPPPPPPPPPPPDTNAILTQILAQQANMMTAFLHHLQNPPQHNAPPPPPQHSKLAEFLRIRPPTFSSSNNPVDALDWFHAVGKKLDTVQCSDEEKVIFAAHQLQGPASLWWDHFQATQPEGQPITWARFTAAFRRTHVPAGVVALKKREFRELKQGNRSVMEYLHEFNNLARYAPEDVREDEEKQEKFLAGMDPELSVRLVSGDYPDFQRLVDKSIRLEAKHKELESHKRRLANFRNQQGANQRGRYTNPYPGGSSSQQQQQQQQPRPAPRPQFVVRFPQPQQQQNQQGTRAPRPPTPTVQPGQGRRDAQGQQRLCFNCFEPGHFADKCPKPRRQQGQAPPRSNNGGKDVIRGRVNHVTAEDVLTTPDVIVGLSEIPIVREFGDVFPEELPGMPPKREIEFRIDLAPGTTPLHKRPYRMAANELAEVKKQLEELKEKGYIRPSTSPWGAPVIFVEKKDKTKRMCVDYRALNEVTIKNKYPLPRIDDLFDQLKGATVFSKIDLRSGYHQLRIREEDIPKTAFTTRYGLYEFTVMSFGLTNALAFFMNLMNKVFMEYLDKFVVVFIDDILIYSQSEEDHQHHLRLVLGKLREHQLYAKLSKFIENFSKIARPMTQLLKKEEKFVWSPQCEKAFQTLKEKLVSSPVLILPDTRKDFMVYCDASRQGLGCVLMQDGHVVAYASRQLRPHEGNYPTHDLELAAVVHALKIWRHYLIGNRCEIYTDHRSLKYIFTQSDLNLRQRRWLELIKDYDVGIHYHPGKANVVADALSRKSHCNTLNVRGIPPELSQQMEALNLSIVSRGFLAALEAKPTLLDQIREAQKNDPDMHGLLKNMKQGKAAGFTEDEHRTLWNGKRVCVPDNRELKQLILQEAHESPYSIHPGSTKMYLDLKEKYWWVSMKREIAEFVALCDVCQRVKAEHQRPAGLLQPLQVPEWKWDEIGMDFITGLPKTQGGYDSIWVVVDRLTKVARFIPVKTTYGGNKLAELYFARIVSLHGVPKKIVSDRGSQFTSHFWKKLQEELGTRLNFSTAYHPQKDGQTERLNQILEDMLRACVLDFGKTWDKSLPYAEFSYNNSYQASIQLAPYEALYGRKCRTPLLWDQVGESQVFGTDILREAEAKVRIIRDNLKVAQSRQKSYADNRRRDLEFAVGDFVYLRVTPLRGVHRFQTKGKLAPRYVGPFRIVARRGEVAYQLELPASLGNVHDVFHVSQLNKCLRVPSEQADSEQIEVREDLTYVERPVKILDTMERRTRNRVIRFCKLQWSNHAEEEATWEREDELKAAHPDLLATARARGCGDAWDPRRRPASAACARSTVDREGDAWAPLPWTRPTVHGGPGARGWRRSAPWVPRVSRTRGRGRLTAGPTWQPRGRARGRPRRRGRRERRARAPMVTAGDHRRGGAAPEREEGRGKANGGPRLTPGQRRRRERRPERRKTAARLGMTMATALRRSASETEARTRSTAMRRCRGRWRRVRRKSGAAAAAERSSAAMAERAEHGASTNPTARASGERRKRKSGARATFK

SEQ ID NO: 19227 - protein, 1760 aa, Oryza sativa
  Clone ID: TF_OSC900255j.C1.p19.fg
MEVDEVGGRWTFSRANEGYTSCGPVVEMSWHRAGVLLLGAQSCLPVPGVPAVGGIGSVLLSMARMGWKLCHVFRLYIVVMAGSVTRRGLDMTGFVLELRGMCVALGYPHGVDYQARPLPEQEGDDAEPHAAWEVTAVILAGSPERTSLTVTAGGDSFPAACQSAALLAIGTLHQRYPDELQHSPYRYHPRRGGARDHATFRDASSEDDATIMHLARMVEAYDKARIDFHQMVRRGMVENNLKILELRQENLQLKKDLDAVEAQLHQLKIAQGEICRPKRRRVCRSQKITARKSTSRPELVRQSLAWTCFVETPRAEPAPVVPQEGEASGVGSTEDMVMTRRSANTGDGNQPEGSNHNHQGNPPPPPPPPPPPPPDTNAILTQILAQQANMMTAFLHHLQNPPQLNAPPPPPQHSKLAEFLRIRPPTFSSSNNPVDALDWLHAVGKKLDTVQCSDEEKVIFAAHQLQGPASLWWDHFQATQPEGQPITWARFTAAFRRTHVPAGVVALKKREFRELKQGNRSVMEYLHEFNNLARYAPEDVREDEEKQEKFLAGMDPELSVRLVSRDYPDFQHLVDKSIRLEAKHKELESHKRRLANFRNQQGANQRVRYTNPYPGGSSSQQQQQQQQPRSAPRPQFVVRVPQPQQQQNQQGTRAPRPPPPIVQPGQGRRDAQGPQRLCFNCFEPGHFADKCPKPRRQKGQAPPRPNNGGKDVIRGRVNHVTAEDVLTTPDVIVGTFLIHSIPATILFDSGASHSFISVPFVGRNQLGVERLRNPLLITTPGGVMTAKYYSPAVPIEIQGIPFPSDLILLDTKNLDVILGMNWLAQFQGVVDCARRTVTLYRGPEQPVVFFAPPTSVRSSELHQIELSEIPIVREFGDVFPEELPGMPPKREIEFRIDLASGTAPLYKRPYRMAANELAEVKKQLEELKEKGYIRPSTSPWGAPVIFVEKKDKMKRMCVDYRALNEVTIKNKYPLPRIDDLFDQLKEEDHQHHLHLVLGKLREHQLYAKLSKCEFWLSEVKFLGHVISAKGVAVDPETVTAVTDWKQPKTVTQVRSFLGLAGYYRRFIENFSKIARPMTQLLKKEEKFVWSPQCEKAFQTLKEKLVSSPVLILPDTHKDFMVYCDASRQGLGCVLMQDGHVVAYASRQLRPHEGNYPTHDLELAAVVHALKIWRHYLIENRCEIYTDHKSLKYIFTQSDLNLRQRRWLELIKDYDVGIHYHPGKANVVADALSQKSHCNTLNVRGIPPELNQQMEALNLSIVSRGFLAALEAKPTLLDQIREAQKNDPDMHGLLKNMKQGKAAGFTEDEHGTLWNGNRVCVPDNRELKQLILQEAHESPYSIHPGSTKMYLDLREKYWWVSMKREIAEFVALCDVCQRVKAEHQRPAGLLQPLQVPEWKWDEIGMDFITGLPKTQGGYDSIWVVVDRLTKVARFIPVKTTYGGNKLAELYFARIVSLHGVPKKIVSDRGSQFTSHFWKKLQKELGTRLNFSTAYHPQTDGQTERLNQILEDMLRACVLDFGKTWDKSLPYAEFSYNNSYQASIQMAPYEALYGRKCRTPLMWDQVGESQVFETDILREAEAKVRTIRDNLKVAQSRQKSYADNRRRDLEFAVDDFVYLRVTPLRGVHRFRTKGKLAPRYVGPFRIVARRGEVAYQLELPASLGNVHDVFHVSQLKKCLRVPSEQADSEQIEVREDLTYVERPMKILDTMERRTRNRVIRFCKVQWSNHAEEEATWEREDELKAAHPDLFASSSESRGRDSV

SEQ ID NO: 19228 - protein, 1805 aa, Oryza sativa
  Clone ID: TF_OSC900260j.C1.p1.fg
MDEVGGRWTFSRTNEGYTSCGPMAGSVTRRGLHMTGFVLELRGLCVVLGYPHGVDYQARPLPEQEGEDAEPHAGWEVTAVILSGSPERTSLAVTAGGDSFPAACQNAALLAIGTLHQRYPDELQHSPYRYHPRRGGASDHATFRDASSEDDATVVHLARMVEAYDVARIDFHQMVRRGMVENNMKILELRQENLQLKKDLDALEAQLHQLKVAQGEICRPKRRRVCRSQKITARKSTSRPELVRQSLAWTCFVETPRAEPAPVVPQEGEASGVGSSEGALLLTFRPGPSQRSPSLFAGSVWSLQMVSTRRNVNTGEGNQPEGSNPNPQGNPPPPPPPDTNAILTQILAQQANMMNAFLHHLQNPPQQNAPPPPPQHSKLAEFLRIRPPTFSSSNNPVDALDWLHAVGKKLDTVQCSDEEKVIFAAHQLQGPASLWWDHFQATQPEGQPITWARFTAAFRRTHVPAGVVALKKKEFRELKQGNRSVMEYLHEFNNLARYAPEDVREDEEKQEKFLAGMDPELSVRLVSGDYPDFQRLVDKSIRLEAKHKELESHKRRLANFRNQQGANQRVRYTNPYPGGSSSQQQQQQQQQSRSAPRPQFVVRVPQPQQQQNQQGTRAPRPPTPAGQPVQGRRDASGPQRLCFNCFEPGHFADKCPKPRRQQGQAPPRSNNSGKDVLRGRVNHVTAEDVLTTPDVIVGTFLVHSIPATILFDSGASHSFISVPFVGKNQLGVERLRNPLLITTPGGVMTAKYYSPAVPIEIQGIPFPSDLILLDTKNLDVILGMNWLAQFQGVVDCTRRTVTLYRGPEQPVVFFAPPTSVRSSELHQIGPSEIPIVREFEDVFPEELPGMPPKREIEFRIDLVPGTTPLHKRPYRMAANELAEVKKQLEELKEKGYIRPSTSPWGAPVIFVEKKDKTKRMCVDYRALNEVTIKNKYPLPRIDDLFDQLKGATVFSKIDLRSGYHQLRIREEDIPKTAFTTRYGLYEFTVMSFGLTNAPAFFMNLMNKVFMEYLDKFVVVFIDDILIYSQSEEDHQHHLRLVLGKLREHQLYAKLSKCEFWLSEVKFLGHVISAKGVAVDPETVTAVTDWKQPKTVTQIRSFLGLAGYYRRFIENFSKIARPMTQLLKKEEKFVWSPQCEKAFQTLKEKLVSSPVLILPDTRKDFMVYCDASRQGLGCVLMQDGHVVAYASRQLRPHEGNYPTHDLELAAVVHALKIWRHYLIGNRCEIYTDHKSLKYIFTQSDLNLRQRRWLELIKDYDVGIHYHPGKANVVADALSRKSHCNTLNVRGIPPELNQQMEALNLSIVGRGFLAALEAKPTLLDQIREAQKNDPDMHGLLKNMKQGKAAGFTEDEHGTLWNGKRVCVPDNREPKQLILQEAHESPYSIHPGSTKMYLDLKEKYWWVSMKREIAEFVALCDVCQRVKAEHQRPAGLLQPLQVPEWKWDEIGMDFITGLPKTQGGYDSIWVIVDRLTKVARFIPVKTTYGGNKLAELYFARIVSLHGVPKKIVSDRGSQFISHFWKKLQEELGTRLNFSTAYHPQTDGQTERLNQILEDMLRACVLDFGKTWDKSLPYAEFSYNNSYQASIQMAPYEALYGRKCRTPLLWDQVGESQVFGTDILREAEAKVRIIRDNLKVAQSRQKSYADNRRRDLEFAVDDFVYLRVTPLRGVHRFQTKGKLAPRYVGPFRIIARRGEVAYQLELPASLGNVHDVFHVSQLKKCLRVPSEQADSEQIEVREDLTYVERPVKILDTMERRTRNRVIRFCKVQWSNHAEEEATWEREDELKAAHPDLFASSSESRGRDSV

SEQ ID NO: 19229 - protein, 1778 aa, Oryza sativa
  Clone ID: TF_OSC900286j.C1.p20.fg
MSWHRAGVLLLGAQSCLPVPGVPAVGGIGSVLLSMARMGWKLCHVFRLYTVVMAGSVTRRGLDMTGFVLELRGMCVVLGYPHGVDYQARPLPEQEGDDAEPHAAWEVTAVILAGSPERTSLTVTAGGDSFPAACQSAALLAIGTLHQRYPDELQHSPYRYHPRRGGARDHATFRDASSEDDATIVHLARMVEAYDAARIDFHQMVRRGMVENNLKILELRQENLQLKKDLDAVEAQLHQLKIAQGEICRPKRRRVCRSQKITARKSTSRPELMVMTRRNANTGDGNQPEGSNHNHQGNPPPPPPPPPPPPPDTNAILTQILAQQANMMTAFLHHLQNPPQLNPPPPPPQHSKLAEFLRIRPPTFSSSNNPVDALDWLHAVGKKLDTVQCSDEEKVIFAAHQLHGPASLWWDHFQAMQPEGQPVTWARFTAAFRRTHVPAGVVALKKREFRELKQGNRSVMEYLHEFNNLARYTPEDVRKDEEKQEKFLAGMDPELSVRLVSGDYPDFQRLVDKSIRLEAKHKELESHKRRLANFRNQQGANQRVRYTNPYPGGSSSQQQQQQQQPRSAPRPQFVVRVPQPQQQQNQQGTRAPRPPTPTVQPGQGRRDASGPQRLCFNCFEPGHFADKCPKPRRQQGQAPPRPNNGGKDVSRGRVNHVTAEDVLTTPDVIVGTFLIHSIPATILFDSGASHSFISVPFVGRNQLGVERLRNPLLITTPGGVMTAKYYSPAVPIEIQGIPFPSDLILLDTKNLDVILGMNWLAQFQGVVDCARRTVTLYRGPEQPVVFFAPPTSVRSSELHQIGLSEIPIVREFGDVFPEELPGMPPKREIEFRIDLAPGTTPLYKRPYRMAANELAEVKKQLEELKEKGYIRPSTSPWGAPVIFVEKKDKTKRMCVDYRALNEVTIKNKYPLPRIDDLFDQLKGATVFSKIDLRSGYHQLRIREEDIPKTAFTTRYGLFEFTVMSFGLTNAPAFFMNLMNKVFMEYLDKFVVVFIDDILIYSQSEEDHQHHLRLVLGKLREHQLYAKLSKCEFWLSEVKFLGHVISAKGVAVDPETVTAVTDWKQPKTVTQVRSFLGLAGYYRRFIENFSKIARPMTQLLKKEEKFVWSPQCEKAFQTLKEKLVSSPVLILPDTRKDFMVYCDASRQGLGCVLMQDGHVVAYASRQLRPHEGNYPTHDLELAAVVHALKIWRHYLIGNRCEIYTDHKSLKYIFTQSDLNLRQRRWLELIKDYDVGIHYHPGKANVVADALSRKSHCNTLNVRGIPLELNQQMEALNLSIVGRGFLTTLEAKPTLLDQIREAQKNDPDMHGLLKNMKQGKAAGFTEDEHGTLWNGNRVCVPDNRELKQLILQEAHESPYSIHPGSTKMYLDLKEKYWWVSMKREIAEFVALCDVCQRVKAEHQRPAGLLQPLQVPEWKWDEIGMDFITGLPKTQGGYDSIWVVVDRLTKVARFIPVKTTYGGNKLAELYFARIVSLHGVPKKIVSDRGSQFTSHFWKKLQEELGTRLNFSTAYHPQTDGQTERLNQILEDMLRACVLDFGKTWDKSLPYAEFSYNNSYQASIQMAPYEALYGRKCRTPLLWDQVGESQVFGTDILREAEAKVRTIRDNLKVAQSQQKSYADNRRRDLEFAVDDFVYLRVTPLRGVHRFQTKGKLAPRYVGPFRIVARRGEVAYQLELPASLGNVHDVFHVSQLKKCLRVPSEQADSEQIEVREDLTYVERPVKILDTMERRTRNRVIRFCKVQWSNHAEEEATWEREDELKAAHPDLFASSSESRGRDSV

SEQ ID NO: 19230 - protein, 1792 aa, Oryza sativa
  Clone ID: TF_OSC900290j.C1.p5.fg
MSWHRAGVLLLGAQSCLPVPGVPAVGGVGSVLLSMARMGWKLCHVFRLYTVVMAGSVTRRGLDMTGFVLELRGMCVVLGYPHGVDYQARPLPEQEGDDAEPHAAWEVTAVILAGSPERTSLTVTAGGDSFPAACQSAALLAIGTLHQRYPDELQHSPYRYHPRRGGARDHATFRDASSEDDATIVHLARMVEAYDAARIDFHQMVRRGMVENNLKILELRQENLQLKKDLDAVEAQLHQLKIAQGEVCRPKRRRVCRSLKITARKSTSRPELVRQSLAWTCFVETPRAEPAPVVPQEGEASGIGSTEDALLLTFRPGPSQRRNANTGDGNQPEGSNHNHQGNPPPPPPPPPPPPPDTNAILTQILAQQANMMTAFLHHLQNPPQLNAPPPPPQHSKLAEFLRIRPPTFSSSNNPVDALDWLHAVGKKLDTVQCSDEEKVIFTAHQLQGPASLWWDHFQATQPEGQPITWARFTAAFRRTHVPAGVVALKKREFRELKQGNRSVMEYLHEFNNLARYAPEDVREDEEKQEKFLAGMDPELSVRLVSGDYPDFQRLVDKSIRLEAKHKELESHKRRLANFRNQQGANQRVRYTNPYPGGSSSQQQQPRSAPRPQFVPGQGRRDAQGPQRLCFNCFEPGHFADKCPKPRRQQGQAPPRPNNGGKDVVRGRVNHVTAEDVLTTPDVIVGTFPIHSIPATILFDSGASHSFISVPFVGRNQLGVERLRNPLLITTPGGVMTAKYYSPAVPIEIQGIPFPSDLILLDTKNLDVILGMNWLAQFQGVVDCARRTVTLYRGPERPVVFFAPPTSVRSSELHQIELSEIPIVREFGDVFPEELPGMPPKREIEFRIDLAPGTAPLYKRPYRMAANELAEVKKQLEELKEKGYIRPSTSPWGAPVIFVEKKDKTMRMCVDYRALNEVTIKNKYPLPRIDDLFDQLKGATVFSKIDLRSGYHQLRIREEDIPKTAFTTRYGLYEFTVMSFGLTNAPAFFMNLMNKVFMEYLDKFVVVFIDDILIYSQSEEDHQHHLRLVLGKLREHQLYAKLSKCEFWLSEVKFLGHVISAKGVAVDPETVTAVTDWKQPKTVTQVRSFLGLAGYYRRFIENFSKIARPMTQLLKKEEKFMWSPQCEKAFQTLKEKLVSSPVLILPDTRKDFMVYCDASRQGLGCVLMQDGHVVAYASRQLRPHEGNYPTHDLELAAVVHALKIWRHYLIGNHCEIYTDHKSLKYIFTQSDLNLRQRRWLELIKDYDVGIHYHPGKANVVADALSRKSHCNTLNVRGIPPELNQQMEALNLSIVSRGFLAALEAKPTLLDQIREAQKNDPDMHGLLKNMKQGKAAGFTEDEHGTLWNGNRVCVPDVRELKQLILQEAHESRYSIHPGSTKMYLDLKEKYWWVSMKREIAEFVALCDVCQRVKAEHQRPAGLLQPLQVPEWKWDEIGMDFITGLPKTQGGYDSIWVVVDRLTKVARFIPVKTTYGGNKLAELYFARIVSLHGVPKKIVSDRGSQFTSHFWKKLQEELGTRLNFSTAYHPQTDGQTERLNQILEDMLRACVLDFGKTWDKSLPYAEFSYNNSYQASIQMAPYEALYGRKCRTPLMWDQVGESQVFGTDILREAEAKVRTIRDNLKVAQSRQKSYADNRRRDLEFAVDDFVYLRVTPLRGVHRFRTKGKLAPRYVGPFRIVARRGEVAYQLELPASLGNVHDVFHVSQLKKCLRVPSEQADSEQIEVREDLTYVERPVKILDTMERRTRNRVIRFCKVQWSNHAEEEATWEREDELKAAHPDLFASSSESRGRDSV

SEQ ID NO: 19231 - protein, 1564 aa, Oryza sativa
  Clone ID: TF_OSC900319j.C1.p26.fg
MDTTSLPCHELIEGTPSHPLHMCSYLLDATGWGEGQQGRRRSSASQNMTGERLTHRVESVMRVSEFSSLPASCAGSSDHVVWLWGWTQLEHGVRSGLGGLATRSLGKFLTIGIRARFRKWTRDRALEGVFMPRRRSSSPIVRTPHDSGGRATGSGGGDRGLVIHRVVKEGGGSVNYPLLTKTNYNDWALLMKIKLQARCLWAAIEPDGVDVPLHEDRMALDAICSAVPPEMIGTLATKASAREAWECIKTMRVGNDRIRKASAQKVRSEYESLAFRGDETVEDFALRLTTIVNQLATLGDPEPADKVVEKYLRVARPRFNQLILSIETLLDISTLSMEEVTGRLKAAEDSGQSSSHTADGKLYLTEEEWAERQKKKDQEAKRGDSGGSGGRGKRRGGRGRTGGGGTASPESTNSGSARKGDKFRNCGKLGHWAKDCRSKSKREEQAHVAQEDEEEHTLMLLTGGCVDTVDAAAPEGDTPTPPHQAVVELVEMKVFAALDDAADHDPGRWIMDSGASNHMTGSRMAFADLDTNITGNVRLGDGSVVRIAGRGTILFACKNGEHRTLSNTYYLPRLAANIISIGQLDETGFKVLAEDGIMRVWDEQRRLLARIPRTPGRLYMLDINLARPVCLAAHADEDAWRWHARLGHINFRALCKMGKEELVRGLPCLSQVDQVCEACLARKHRRSPFPRQALCRSDEPLALLHGDLCGPITPATPSGNRYFLLLVDDYSRYMWVALLSTKDAAPAAIKRIQAVAERKSGRKLRALRTDRGGEFTSTQFAEYCAELGMRRELTAPYSPQQNGVVERRNQSVVGTARSMLKVKGLPGMFWGEAINTAVYLLNRSSSKGIGGKTPYALWNGVPPAVHHLRTFGCVAHVKTTTPNLKKLDDRSRPMIFVGYEPGSKAYRAYDPATRRVHISRDIVFDEAAQWDWDAEAAADLDTDFVVEYTTVYHPGSLSGTRQDAGEPPARSSSSPQTPSDSPTAGRTPSVHGDAPAVEFVSPPTGAAANLDADHDDAPLRFRTMDNVLGPAMLPGLANREVQEELMMVSGEEPATFAQAERDEDWRRAMLDEISSIEENKTWRLVDLPSGHRPIGLKWVYKLKKDAQGVVVKHKARLVAKGYVQRAGIDFDEVFAPVARLDSVRLLLALAAQEGWMVHHMDVKSAFLNGELIEEVYVVQPPGFEIDGQENKVYRLDKALYGLRQAPRAWNTKLDCTLKKLGFKQSPLEHGLYARGDGSGRLLVGVYVDDLVIVGGDSGMIKGFKEQMKAEFKMSDLGPLSFYLGIEVHQEAGIITLKQAAYASRIVEKAGLTGCNPCATPMEPRLKLSKESAGSLVDATEYRSLVGSLRYLVNTRPDLAYSVGYVSRFMEKPTDEHLAAVKRIIRYVAGTIHLGCRYVKEVEGGLQGYSDSDMAGDIDTRKSTTGVIFFLGKNPVSWQSQKQRVVALSSCESEYIAAATAACQGIWLARLLGDLRNAATEVVDLRVDNQSALALMKNPVFHDRSKHIQTKFHFIREAVENGEITPSYIGTEGQLADILTKPLSRIKFQELREKRRNYIHTCVFS

SEQ ID NO: 19232 - protein, 1385 aa, Oryza sativa
  Clone ID: TF_OSC900321j.C1.p10.fg
MSWHRAGVLLLGAQSCLPVQGVPAVGGIGSVLLSMARMGWKLCHVFRLYTVVATQPEGQPITWARFTAAFRRTHVPAGVMALKKREFRELKQGNRSVMEYLHEFNNLARYAPEDVREDEEKQEKFLAGMDPELSVRLVSGDYPDFQRLVDKSIRLEAKHKELESHKRRLANFRNQQGANQRIRYTNPYPGGSSSQQQQPRSAPRPQFVVRVPQPQQQQSQQGTHAPRPPTPAAQSGQGRRDVQGPQRLCFNCFEPGHFADKCPKSRRQQGQAPPCSNNGGKDVIRGRVNHVTAEDVLTTPDVIVGTFLIHSIPATILFDSGASHSFISVPFVGRNQLGVERLRNPLLITTPGGVMTAKYYSPAVPIEIQGIPFPSDLILLDTKNLDVILGMNWLAQFQGVVDCARRTVTLYRGPEQPVVFFAPPTSVSSSELHQIGLSEIPIVREFGDVFPEELPGMPPKREIEFRIDLAPGTTPLYKRPYRMAANELAEVKKQLEELKEKGYIHPRTSPWGAPVIFVEKKDKTKRMCVDYRALNEVTIKNKYPLPRIDDLFDQLKGATVFSKIDLRSGYHQLRIREEDIPKTAFTTRYGLYEFTVMSFGLTNAPAFFMNLMNKVFMEYLDKFVVVFIDDILVYSQSEEDHQHHLRLVLGKLREHQLYAKLSKCEFWLSEVKFLGHVISAKGVAVDPETVTAVTDWKQPKTVTQIRSFLGLAGYYRRFIENFSKIARPMTQLLKKEEKFVWSPQCEKAFKTLKEKLVSSLVLILPDTRKDFMLRPHEGNYPTHDLELPAVVHALKIWRHYLIGNRCEIYTDHKSLKYIFTQSDLNLRQRRWLELIKDYDVGIHYHPGKANVVADALSRKSHCNTLNVRGIPPELNQQMEALNLSIVGRGFLAALEAKPTLLDQIREAQKNDPDMHGLLKNMKQGKAAGFTEDEHGTLWNGNRVCVPDNRELKQLILQEAHESPYSIHPGSTKMYLDLKEKYWWVSMKREIAEFVALCDVCQRVKAEHQRPAGLLQPLQVPEWKWNEIGMDFITGLPKTQGGYDSIWVVVDRLTKVARFIHVKTTYGGNKLAELYFARIVSLHGVPKKIVSDRGSQFTSHFWKKLQEELGTRLNFSTAYHPQTDGQTERLNQILEDMLRACVLDFGNTWDKSLPYAEFSYNNSYQASIQMAPYEALYGRKCRTPLLWDQVGESQVFGTDILREAEAKVRTIRDNLKVAQSRQKSYADNRRRDLEFAVDDFVYLRVTPLRGVHRFQTKGKLAPRFVGPFRIIARRGEVAYQLELPASLGNVHDVFHVSQLKKCLRVPSEQADSEQIEVREDLTYVERPVKILDTMERKTRNRVIRFCKVQWSNHAEEEATWEREDELKAAHPDLFVSSSESRGRDSV

SEQ ID NO: 19233 - protein, 1829 aa, Oryza sativa
  Clone ID: TF_OSC900321j.C1.p18.gm
MAAGSSAPFPPRPAALSPSRPYINPPRASLHRFRHSPLSLPAGIELAPSPSLSVVAAELRSAAVVAPDHLSPRRRLLRLRRIPGDLVHPSVSLADRRSTVDPIHPSRATAFLRSGRRFRRRRRPGVSRGPPLLFPLPFPSLGRRSAVPMAAAGDHRGAGVLPPAAAPAWPPSGAPCGCRVGPGYQPPAPSAPRPYKDRSSGLCCKALPYFHMSSGTNEGYTSCGPVVEMSWHRAGVLLLGAQSCLPVPEVPAVGGIGSMAGSVSRRGLDMTGFVLELRGMCVVLGYPHGLDYQGRPLPEQEVTAGGDSFSAACQSAALLAISTLHQRYPDELQHSPYRYHPRRGGARDYATFRDASSEDDATIMHLARMVEAYDAARIDFHQMVRRGMVENNLKILELRQENLQLKKDLDAVEAQLHQLKIAQGEVCHPKRRRVCRSQKITARKSTSRPELVRQSLAWTCFVETPRAEPAPVVPQEGEASGVGSTEDALLLTFRPGPSQRSNNPVDVLDWLHAVGKKLDTVQCSDEEKVVFAAHQLQGPASLWWDHFQATQPEGQPITWARFTAAFRRTHVPAGVMALKKREFRELKQGNRSVMEYLHEFNNLARYAPEDVREDEEKQEKFLAGMDPELSVRLVSGDYPDFQRLVDKSIRLEAKHKELESHKRRLANFRNQQGANQRIRYTNPYPGGSSSQQQQPRSAPRPQFVVRVPQPQQQQSQQGTHAPRPPTPAAQSGQGRRDVQGPQRLCFNCFEPGHFADKCPKSRRQQGQAPPDVIVGTFLIHSIPATILFDSGASHSFISVPFVGRNQLGVERLRNPLLITTPGGVMTAKYYSPAVPIEIQGIPFPSDLILLDTKNLDIGLSEIPIVREFGDVFPEELPGMPPKREIEFRIDLAPGTTPLYKRPYRMAANELAEVKKQLEELKEKGYIRPSTSPWGAPVIFVEKKDKTKRMCVDYRALNEVTIKNKYPLPRIDDLFDQLKGATVFSKIDLRSGYHQLRIREEDIPKTAFTTRYGLYEFTVMSFGLTNAPAFFMNLMNKVFMKYLDKFVVVFIDDILVYSQSEEDHQHHLRLVLGKLRKHQLYAKLSKYEFWLSEVKFLGHVISAKGVAVDPETVTAVTDWKQPKTVTQIRSFLGLAGYYRRFIENFSKIARPMTQLLKKEEKFVWSPQCEKAFKTLKEKLVSSPVLILPDTRKDFMVYCDASRQGLGCVLMQDGHVVAYASRQLQPHEGNYPTHDLELAAVVHALKIWRHYLIGNRCEIYTDHKSLKYIFTQSDLNLRQRRWLELIKDYDVGIHYHPGKANVVADAQSRKSHCNTLNVRGIPPELNQQMEALNLSIVGRGFLAALEAKPTLLDQIREAQKNDPDMHGLLKNMKQGKAAGFTEDEHGTLWNGNRSSWPFVMCASVSRQSTNDRPDFSNLSKYQNGNGMKLGWISSPDFQKPKVDMILYGTAYHPQTDGQTERLNQILEDMLRACVLDFGKTWDKSLPYAEFSYNNSYQASIQMAPYEALYGRKCRTPLLWDQVGESQVFGTDILREAEAKVRTIRDNLKVAQSRQKSYADNRRRDLEFAVDDFVYLRVTPLRGVHRFQTKGKLAPRFVGPFRMIARRGEVAYQLELPASLGNVHDVFHVSQLKKCLRVPSQQADSEQIEVREDLTYVERPVKILDTMERRTRNRSTAVVAPDLLPLRRRLLRFRRNLADLVHPSVSLADRRNAAVPVYPSRAAAFLRSGRRSRCRRRPGVSCGPPIRFPLPFPLSGAAPPRRWSPAATIVARVRRLPSAVPAWPPSGAPRGCHVGPGRQPPAPSDAAASEDPLFVEVEADVWESEQGKSHHL

SEQ ID NO: 19234 - protein, 1753 aa, Oryza sativa
  Clone ID: TF_OSC900325j.C1.p13.fg
MSWHRAGVLLLGAQSCLPVPGVPAVGGVGSVLLSMARMGWKLCHVFRPYTVVMAGSINRRGLDLTGFALELRGMCVVLGYPHGVDYQGKQLPEQEGDDAEPHATWEVTVVILTGSPERTSLAVTADGASWVGREQQADPGAALGESAAEEGPRRSGGAAASAQDRPGRGLSPQASPRLPQPEDHRPQEYLQARACSSVPGVDLLRRDPSCRARAHGSSGGWSLRRWQHGGCAAAHLPPWPVAAVDEQLVGLRMVTTRRSAVTGEGSHPEGSNHNNHGSPHPPPPPPPPPPPDTNAILTQILAQQANMMAAFLHHIQNLPQHNAPPPPPQHSKLAEFLRIRPPTFASSNNPVDALDWLHAVGKKLDTVQCSDEEKVIFAAHQLQGPASLWWDHFQATQPEGQPITWARFTAAFRRTHVPAGVMALKKREFRELKQGNRSVMEYLHEFNNLARYAPEDVREDEEKQEKFLAGMDPELSVRLVFGDYSDFQRLVDKSIRLEVKHKELESHKRRLATFRNQQGANQRVRYTNPYPGGSSLQQQPRSAPRPQFVVRVPQPQQQQSQQGTRAPRPPTPAMQPGQGRGDVQGQQRLCFNCFEPGHFADKCPKPRRQQGQAPPRPNNGGKDVIRGRVNHVTAEDVLTTPDIIVGTFLIHSIPATILFDSGASHSFISVPFVGRNQLGVERLRNPLLITTPGGVMTAKYYSPAVPIEVQGIPFPSDLILLDTKNLDVILGMNWLAQFQGVVDCARRTVTLYRGPEQPVVFFAPPTSVGSSELHQIRLSKIPIVREFGDVFPEELPGMPPKREIEFRIDLAPGTTPQYKRPYRMASNELAEVKKQLEELKEKGYIRPSTSPWGAPVIFVEKKDKTKRMCVDYRALNEVTIKNKYPLPRIDDLFDQLKGATVFSKIDLHSGYHQLRIREEDIPKTAFTTRYGLYEFTVMSFGLTNAPAFFMNLMNKVFMEYLDKFVVVFIDDILVYSQSEEDHQHHLRLVLGKLREHQLYDKLSKCEFWLSEVKFLGHMISAKGVAVDPETVTAVTDWKQPKTVTQIRSFLGLAGYYRRFIENFSKIARPMTQLLKKEEKFVWSPQCEKAFQTLKEKLVSSPVLILPDTRKDFIVYCDASRQGLGCVLMQEGQVVAYASRQLRPHEGNYPTHDLELAAVVHALKIWQHYLIGNRCEIYTDHKSLKYIFTQSDLNLRQRRWLELIKDYDVGIHYHPGKANVVADALIRKSHYNTLDVRGIPPELNQQMEALNLSIVGRGFLATLEAKLTLLDQIREAQKNDPDMRGLLKNMKQGKAAGFTEDEHGTLWNGNRVCVPDDRELKQLILQEAHESPYSIHPGSTKMYLDLKEKYWWVSMKREIAEFVALCDVCQRVKAEHQRPAGLLQPLQVPEWKWDEIGMDFITGLPKTQGGYDSIWVVVDRLTKVARLIPVKTTYGGNKLAELYFARIVSLHGVPKKIVSDRGSQFTSHFWKKLQEELGTRLNFSTAYHPQTDGQTERLNQILEDMLRACVLDFGKTWDKSLPYAEFSYNNSYQASIQMAPYEALYGRKCRTPLLWDQVGESQVFRTDILREAEAKVRTIRDNLKVAQFRQKSYADNRRRNLKFAVDDFVYLRVTPLRGVHRFQTKGKLTPRFVGPFRIIARRGEVAYQLELPTSLGNVHDVFHVSQLKKCLRVPSEQADSEQIEVREDLTYVERPVKILDTMERRTRNRVIPFCKVQWSNHAEEEATWEREDEMKAAHPDLFASSSESRGRDSV

SEQ ID NO: 19235 - protein, 1048 aa, Oryza sativa
  Clone ID: TF_OSC9333j.C1.p2.gm
MVMPMVTTRRNAATGDGNQPEGSNHNHQGNPPPPPPPPPPPPPDTNAILTQILAQQANMMTAFLHHLQNPPQHNAPPPPQHSKLAEFLRIRPPTFSSSNNPVDALDWLHAVGKKLDTVQCSDEEKVIFAAHQLQGPASLWWDHFQATQPEGQPITWARFTAAFRRTHFNNLARYAPEDVREDEEKQEKFLAGMDPELSVRLVSGDYPDFQRLVDKSIRLEAKHKELESHKCRLANFRNQQGANQRVRYTNPYPGGSSSQQQQQQQQQPRSAPRPQFVVRIPQPQQQQNQQGTRAPRPPTPTVQPGQGRRDAQGQQRLCFNCFEPGHFADKCPKPRRQQGQAPPRSNNGGKDVIRGRVNHVTAEDVLTTPDVIVELHQIGLSEIPIVREFGDVFPEELPGMPPKREIEFRIDLAPGTTPLHKRPYRMAANELAEVKKQLEELKEKGYIRPSTSPWGAPVIFVEKKDKTKRMCVDYRALNEVTIKNKYPLPRIDDLFDQLKGATVFSKIDLRSGYHQLRIREEDIPKTAFTTRYGLYEFTVMSFGLTNAPAFFMNLMNKVFMEYLDKFVVVFIDDILIYSQSEEDHQHHLRLVLGKLREHQLYAKLSKCEFWLSEVKFLGHVISAKGVAVDPETVTAVTDWKQPKTVTQVRSFLGLAGYYRRFIENFSKIARPMTQLLKKEEKFVWSPQCEKAFQTLKEKLVSSPVLILPDTRKDFMVYCDASRQGLGCVLMQDGHVVAYASRQLRPHEGNYPTHDLELAAVVHALKIWRHYLIGNRCEIYTDHKSLKYIFTQSDLNLRQRRWLELIKDYDVGIHYHPGKANVVADALSRKSHCNTLNVRGIPPELNQQMEALNLSIVSRGFLAALEAKPTLLDQIREAQKNDPDMHGLLKNMKQGKAAGFTEDEHGTLWNGKRVCVPDNRELKQLILQEAHESPYSIHPGSTKMYLDLKEKYWWVSMKREIAEFVALRDVCQRVKAEHQRPAGLLQPLQVPEWKWDEIGMDFITGLPKTQGGYDSIWVVVDRLTKVARFIPVKTTYGGNKLAELYFARI

SEQ ID NO: 19236 - protein, 1808 aa, Oryza sativa
  unsure (1)..(1808): unsure at all Xaa locations
  Clone ID: TF_OSC9352j.C1.p1.np
LLHLSPKSDFKCCFSFCFCLXMAGSISRRGLDLTGFVLELRGMCVVLGYPHGVDYQGRLLLEQEGDDAEPHAAWEVTAVILTGSPERTSLAVTAGGDSFSAACQNAALLAIGTLHQRYPDELQHSPYRYHPRRGGARDYATFRDASSEDDATIMHLARMVEAYDAARIDFHQMVRRGMVENNMKILELRQENLQLKKDLDAVEAQLHQLKIAQGEVCRPKRRRVCRSQKITARKSTSRPELVRQSLAWTCFVETPRAEPAPVVPQEGEASGVGSTEDALLLTFRPGPSQRQLSLFAGSVWGFQMVTTRRSAATGDGNQPEGSNHNNHGSPPPPPPPPPPPPPDTNAILTQILAQQANMMTAFLHHLQNPPQQNAPPPPPQHSKLAEFLRIRPPTFSSSNNPVDALDWLHAVGKKLDTVQCSDEEKVVFAAHQLQGPASLWWDHFQATQPEGQPITWARFTAAFRRTHVPAGVMALKKREFRELKQGNRSVMEYLHEFNNLARYAPEDVREDEEKQEKFLAGMDPELSVRLVSGDYADFQRLVDKSIRLEAKHKELESHKRRLANFRNHQGANQRVRYTNPYPGGSSSQQQQQQQPRSAPRPQFMVRVPQPQQQQSQQGTRAPRPPMPAVQPGQGRRDVQGPQRLCFNCFEPGHFADKCPKPRRQQGQAPPRSNNGGKDVIRGRVNHVTAEDVLTTPDVIVGTFLIHSIPATILFDSGASHSFISVPFVGRNQLGVERLRNPLLITTPGGVMTAKYYSPAVPIEIQGIPFPSDLILLDSKNLDVILGMNWLAQFQGVVDCARRTVTLYRGPEQPVVFFAPPTSVSSSELHQIGLSEIPIVREFGDVFPEELPGMPPKREIEFWIDLAPGTTPLYKRPYRMAANELAEVKKQLEELKEKGYIRPSTSPWGAPVIFVEKKDKMKRMCVDYRALNEVTIKNKYPLPRIDDLFDQLKGATVFSKIDLRSGYHQLRIREEDIPKTAFTTRYGLYEFTVMSFGLTNAPAFFMNLMNKVFMEYLDKFVVVFIDDILVYSQSEEDHQHHLRLVLGKLREHQLYAKLSKCEFWLSEVKFLGHVISAKGVAVDPETVTAVTDWKXPKTVTQIRSFLGLAGYYRRFIENFSKIARPMTXLLKKEEKFVWSPQCEKAFQTLKEKLVSSPVLILPDTRKDFMVYCDASRQGLGCVLMQDGHVVAYASRQLRPHESNYPTHDLELATVVHALKIWRHYLNGNRCEIYTDHKSLKYIFTQSDLNLRQRRWLELIKDYDVGIHYHPGKANVVTDALSQKSHCNTLNVRGIPPELNQQMEALNLSIVGRGFLAALEAKPTLLDQIREAQKNDPDMHGLLNNMKQGKAAGFTEDEHGTLWNGNRVCVPDNRELKQLILQEAHESPYSIHPSSTKMYLDLKEKYWWVSMKREIAEFVALCDVCQRVKAEHQRPAGLLQPLQVPEWKWDEIGMDFITGLPKTQGGYDSIWVVVDRLTKVARFILVKTTYGGNKLAELYFARIVSLHGVPKKIVSDRGSQFTSHFWKKLQEELDTRLNFSTAYHPQTDGQTECLNQILEDMLRACVLDFGKTWDKSLPYAEFSYNNSYQASIQMAPYEALYGRKCRTPLLWDQVGESQVFGTDILREAEAKVRTIRDNLKVAQSRQKSYADNRRRNLEFAVDDFVYLRVTPLRGVHRFQTKGKLAPRFVGPFRIIARRGEVAYQLELPASLGNVHDVFHVSQLKKCLRVPSEQTDSEQIEVREDLTYVERPVKILDTMERRTRNRVIRFCKVQWSNHAEEEATWEREDELKAAHPDLFASSSESRGRDSV

SEQ ID NO: 19237 - protein, 1212 aa, Oryza sativa
  Clone ID: TF_OSC9451j.C1.p1.fg
MSGPALAPPVPSCPICPSADHGRPSVARMAGRVVTTGNNPTGVPDVRALILVPGGKAQHTQRQTRNSGRLGRRPQAQQQQNQQGTRAPRPPTPTVQPGQGRRDAQGQQRLCFNCFEPGHFADKCPKPRRQQGQAPPRPNNGGKDVIRGRVNHVTAEDVLTTPDVIVGTFLIHSIPATILFDSGASHSFISVPFVGKNQLGVERLRNPLLITTPGGVMIAKYYSPAVPIEIQGIPFPSDLILLDTKNLDVILGMNWEFGEVFPEELPGMPPKREIEFRIDLAPGTTPLHKRPYRMAANELAEVKKQLEELKEKGYIRPSTSPWGAPVIFVEKKDKTKRMCVDYRALNEVTIKNKYPLPRIDDLFDQLKGATVFSKIDLRSGYHQLRIREEDIPKTAFTTRYGLYEFTVMSFGLTNAPAFFMNLMNKVFMEYLDKFVVVFIDDILIYSQSEEDHQHHLRLVLGKLREHQLYAKLSKCEFWLSEVKFLGHVISAKGVAVDPETVTAVTDWKPPKTVTQVRSFLGLEGYYRRFIENFSKIARPMTQLLKKEEKFVWSPQCENAFQTLKEKLVSSPVLILPDTRKTSWCIVTLHAKDWAYASRQLRPHEGNYPTHDLELAAVVHALKIWRHYLIGNRCEIYTDHKSLKYIFTQSDLNLRQRRWLELIKDYDVGIHYHPGKANVVADALSRKSHCNTLNVRGIPPELNQQMEALNLSIVGRGFVAALEAKPILLDQIREAQKNDPDMHGLLKNMKQGKAAGFTEDEHGTLWNGNRVCVPDSRELKQLILLEAHESPYSIHPGSTKMYLDLKEKYWWVSMKREIAEFVALCDVCQRVKAEHQRPAGLLQPLQVPEWKWDEIGMDFITGLPKTQGGYDSIWVVVDRLTKVARFIPVKTTYGGNKLAELYFARIVSLHGVPKKIVSDRGSQFTSHFWKKLQEELGTRLNFSTAYHPQTDGQTERLNQILEDMLRACVLDFGKTWDKSLPYAEFSYNNSYQASIQMAPYEALYGRKCRTPLLWDQVGESQVFGTDILREAEAKVRIIRDNLKVAQSRQKSYADNRRRDLEFAVGDFVYLRVTPLRGVHRFQTKGKLAPRYVGPFRINARRGEVAYQLELPASLGNVHDVFHVSQLKKCLRVPSEQADSEQIEVREDLTYVERPVKILDTMERRTRNRVIRFCKVQWSNHAEEEATWEREDELKAAHPDLFASSSESRGRDSV

SEQ ID NO: 19238 - protein, 307 aa, Oryza sativa
  Clone ID: TF_OSC101197j.C1.p7.hg
MQEESDLRKHVDVFNQLVVDLSKLDVKLDDEDKAIILLCSLPPSYEHVVTTLMHGKDTIKTEEIISSLLARDLRRSKKNEAMEASQAESLLVKAKHDHEAGVLKSKEKGARCYKCHEFGHIRRNCPLLKKRKDGIASLAARGDDSDSSSHEILTVSNEKSGEAWMLDSASSYHVDSDRKTMNIMKDGKTVMIGERTSSCLYKLQGSAVAGGVMEDGYAGVAVHDPEGGEPGHSERERLPAATGRKIGFSMPSTPFPLSLHIQSIAGMLPALPPGVAALFGRSQPHGAPPLQGALALAVATLGLLSPH

SEQ ID NO: 19239 - protein, 556 aa, Oryza sativa
  Clone ID: TF_OSC21248j.C1.p6.fg
MAAFNREMTRRGAQVDGGGSDWRSNRWVGHFGRVARTFRCCQRYEEAQEVRVAAVCASCVEAEQRARFVPDFHRGGGGLGGEVTGGWRRILAGGAWRRGTRRRPSELEQELAAAAAAVLGEEPVQVFSGGAPRRCGSLLRGQRLPKVRRRDGSSQMRLKDLLAQQGISKALEETMPEKMDVGKWVEMKAQATAIIRLSLSDFVMYQVMDEKTPKEIWDKLASLYMSKSLTSKLYLKQQLYGLQMQEESDLRKHVDVFNQLVVDLSKLDVKLDDEDKAIILLCSLPPSFEHVVTTLTHGKDTVKTEEIISSLLARDLRRSKKNEAMEASQAESLLVKAKHDHEAGVSKSKEKGARCYKCHEFGHIRRNCPLLKKRKGGIASLAARGDNSDSSSHEILTVSNEKSGEAWMLDSASSYHVTSKWEWFSSYKSGDFGVVYLGNDTSYRVIGVGDIKFKMYDGNEVLLSDVRHVPGLRKSLISLGSLHETGWLYQVDSDRKTMNIMKDGKTVMTGERTSSCLYKLQGSAVAGGVMEDGHAGVAVHDPEGGKPGVGSSGGSA

SEQ ID NO: 19240 - protein, 408 aa, Oryza sativa
  Clone ID: TF_OSC400049j.C1.p5.fg
MAATAVSKFEVVKFDGTGNFVLWQMRLKDLLAQQGISKALQETMPEKIDADKWNEMKAQAAATIRLSLSDSVMYQVMDEKSPKEIWDKLASLHMSKSLTSKLYLKQQLYGLQVQEESDLRKHVDVFNQLVVDLSKLDVKLDDEDKAIILLCSLPLSYEHVVTTLTHGKDTVKTEEIISSLLARDLRRSKKNEATKASQGKSLLVKDKHDHEAGVSKSKEKGARCYKCHEFGHIRRNCPLLKKRKGGIASLAARGDDSDSGSHEILTVSDEMSGEAWMLDSASSYHVTSKREWFSSYKSGDFGVVYLGDGTSYRVVGVGDVNFKMYDGNEVLLSDVRHVPGLRKSLFRLGAYMRQDGKTVMTGERTSSCLYKLQGSAVTGGVMEDGYVGVAVHDPEGGEPGVGSSGGSA

SEQ ID NO: 19241 - protein, 425 aa, Oryza sativa
  Clone ID: TF_OSC400601j.C1.p65.fg
MAATVVSKFEVVKFDGTGNFVLWQMRLKDLLAQQGISKVLDETMPEMMDADKWDEMKAQVAATIRLSLSDSVMYQVMDEKSPKEIWDKLASLYMSKSLTSKLYLKQQLYGLQMQEESDLRKHVDVFNQFVVDLSKLDVKLDDEDKAIILLCSLPPSYEHVVTTLTHGKDTVKTEEIISSLLARDLRRSKKNEATEASQGESLLVKAKHDHETGVSKSKEKGARCYKCHEFGHIRRNCPLLKKRKGGIASLAARGDDSDSSSHEILTVSDEKSGEAWMLDSASSYHVTSKREWFSSYKSGDFGVVYLGDDTSYCVVGVGDVKFKMYDGNEMLLSDVRHVPGLRKSLISLGSLHETGWLYQVDSDRKTMNIMKDGKTVMTGERTSSCLYKLQGSAVAGGVMENGYAGVAVHDPEGGEPGIGSSGGSA

SEQ ID NO: 19242 - protein, 425 aa, Oryza sativa
  Clone ID: TF_OSC400934j.C1.p66.fg
MAVTVVSKFEMVKFDGTGNFVLWQMRLKDLLAQQGISKALEETMPEKMDAGKWEEMKAQAAATIRLSLSDSVMYQVMDEKTPKEIWDKLASLYMSKSLTSKLYLKQQLYGLQMQEESDLRKHVDVFNQLVVDLSKLDVNLYDEDKAIILLCSLPPSYEHVVTTLTHGKDTIKTEEIISSLLARDLRRSKKNEAMEASQAESLLVKAKHDHEAGVSKSNEKGARCYKCHEFGHIRRNCPLLKKRKDGIASLAARGDDSDSSSHEILTVSNEKSGEAWMLDSASSYHVTSKREWFFSYKSGDFGVVYLGDDTSYHVVGVDDVKFKMYDGNEVLLSDVRHVPGLRKSLISLGSLHETGWLYQVDFDRKTMNIMKDGKTVMTGERTSSCLYKLQGNAVAGGVMEDGYAGVAVHDPEGGEPGVSSTGGSA

SEQ ID NO: 19243 - protein, 371 aa, Oryza sativa
  Clone ID: TF_OSC401810j.C1.p11.fg
MPPIGTLRLPWGRLRSIGPDVEPLVVKPDKTQTKGRSAAPGTLRLAAYNVVFLKSSRRRQIYAAKGNCDIYRGAGKERKWRDRTYIAVKMNNAYVVEAYGRDENRSNTDFEADADSKPMTTSGFPNSTVNSHMQEESDLRKHVDVFNQLVVDLSKLDVKLDDEDKAIILLCSLPPSYEHVVTTLMHGKDTIKTEEIISSLLARDLRRSKKNEAMEASQAESLLVKAKHDHEAGVLKSKEKGARCYKCHEFGHIRRNCPLLKKRKDGIASLAARGDDSDSSSHEILTVSNEKSGEAWMLDSASSYHVDSDRKTMNIMKDGKTVMIGERTSSCLYKLQGSAVAGGVMEDGYAGVAVHDPEGGEPGVGSSGGSA

SEQ ID NO: 19244 - protein, 481 aa, Oryza sativa
  Clone ID: TF_OSC402366j.C1.p6.gm
MAAMVVSKFEVVKFDGTGNFILWQMRLKDLLAQQGISKALEETMPEKMDAGKWEEMKAQAAATIRLSLSDSVMYPVMDEKTPKEIWDKLASLYMSKSLTSKLYLKQQLYGLQMQEESDLRKHVDVFNQLVVDLSKLDVKLDDEDMAIILLCSLPPSYEHVVTTLMHGKDTVKTEEKISSLLARDLRRSNKNEAMEASQAESLLVKAKHDHEAGVSKSKDKGARCYKCHEFGHIRRNCPLLKKRKGGIASLAARGDDSDSSSHETLTVSNEKSGEAWMLDSASSYHVTSKREWFSSYKSGDFGVVYLGDDTSYRVVGVGDVKFEMYDGNEVDFDRKTMNIMKDGKTVMTGERTSSCLYKLQGSAVAGGVMEDRHAGVAVHDPEGGPRREARHQCHMEPVSAGRTQSEGLGSQLSPKRAVRSQEFGVNRKARGIPKPSQGPLKALELVQGIWRPMSRLKGSRALAMAPKPKPTEDTGNNYGAL

SEQ ID NO: 19245 - protein, 424 aa, Oryza sativa
  Clone ID: TF_OSC406022j.C1.p7.fg
MATTVVSKFEVVKFDGTGNFVLWQMRLKDLLAQQGISKALEETMPEKMDAGKWEEMKAQAAATIRLSLSDSVMYQVMDEKTSKEIWVKLTSLYMSKSLTSKLYLKQQLYGLQMQEESDLRKHVDVFNQLVVDLSKLDVKLDDEDKAIILLCSLPPSYEHVVTILTHGKDTIKTEIISSLLARDLRRSKKNEAMEASQAESLLVKAKHDHEAGVSKSKEKGARCYKCHEFGHIRRNCPLLKKRKDGIASLAARGDDSDSSSHEILTVSNEKSGEAWMLDSASSYHVTSKREWFSSYKSGDFGVVYLGDDTSYRVVGVGDVKFKMYDGNEVLLSDVRHVPGLRKSLISLGSLHEIGWLYQVDSDRKTMNIMKDGKTVMTGERTSSCLYKLQGSAVAGGVMEDGHAGVAVHDLEGGEPGEGSSGGSA

SEQ ID NO: 19246 - protein, 406 aa, Oryza sativa
  Clone ID: TF_OSC4861j.C1.p1.fg
MAATVVSKFEVVKFDGTGNFVLWQMRLKDLLAQQRISKALEETMLEKMDAGKWEEMKTQAAATICLSLSDSVMYQVMDEKTPKEIWDKLASLYMSKSLTSKLYLKQQLYGLQMQEESDLRKHVDVFNQLVVDLSKLDVKLDDEDKAIILLCSLPPSYEHVVTTLTHGKDTVKTEIISSLLARDLRRSKKNEAMEASQAESLLVKAKHDHEAGVSKSKEKGARCYKCHEFGHIRRNCPLLKKRKGGIASLAAHGDDSDSSSHEILTVSNEKSGEAWMLDSASSYHVTSKREWFSSYKSVGDVKFKMYDGNEVLLSDVRHVPGLRKSLISLGSLHETGWLYQVDSNRKTMNIMKDGKTVMTGERTSSCLYKLQGTAVVGGVMEDGHAGVAVHDPEGGESSVGSSGGLA

SEQ ID NO: 19247 - protein, 1486 aa, Oryza sativa
  unsure (1)..(1486): unsure at all Xaa locations
  Clone ID: TF_OSC900064j.C1.p39.np
DYVGDSEDDADQRRLRFNRGMARRRPRREVRNNDDSFGKIKFTIPTFDGKYDHDAYLSGELAVDQKFACHDVPVDKRVRAAGSEFTDFASVWWSKYHRTHINALPLTWDGLKXIMHARFVPSYYARDMLNKLQQLKQGDTSVEEYYQALQMGMLCYGLVEDEEAAMARFLVGLDREIYDILSYKEYNNMTQLFHYACKAEREVQGXRAQTRAIIPAGRTPWTARCGAAPAGHASASTSTSAPSNSNKARPTPSAASRHAAEAAAKPAKSASSVVSTGRTRDVXCHRCKGFGHMQRDCPSKRVLVVKDDGEYSFASDFDEDTLGLLATNNKGSEEEEHVGADVADQYERLIVQRVLSAQMGKVEQNQWHNLFQTKCVVNKRSCCTIIDGGSCRNLVSTEMVTKLALQTKPHPHPYYIQLFNNSGRIKVTQLVRLNFAIGSYYDFVDCDVVPMHACSLLLGRPWQYDKDTLHHDRTNQYSFMHNGKKIVLHPMTPEVVFENDVARANKEKNHNKKGSKSNHSKDHNKKGSKSNHSKDTVIKLNGPCLHATKSDIVNLDTSDTVCYALICKDALFSFENMPVSFPPAITNLLQEYEDVIPKDIPLGLPVRGIEHQIDLIPGASLPNRAPYRTNPEETKEIQRQVQDLLDKGYVRESLSPCAVPVIGSWRMCVDCRAINNITIRYCHPRLDDMLDELSGSTVFSKVDLRSGYHQIGIKLGDEWKTTFKTKFGLYEWLVMPFGLTNAPSTFMRLMNEVLLPFIEKFVVVYFDDILTYSKSLEDHLDHLRVVFKALRDARLFDNLEKCNFCTDRASFLGYVVTPQEIEVDQAKVQAIQSWSTPKTVSQVRSFLGLVGFYRHFVRDFSTIAAPLNELTKKGVPFTWGTSQENAHMLKDKLTHASLLQLPDFNKTFELEYDASGIGLGGVLVQEGKHVAYFSEKLSGPVLNYSTYDKELYALVRTLKTWQHYLWPKEFVIHSDHESLKHIHSQGKLNRRHAKWVEFIESFPYVIKHKKGKENVIADTLSRRYTLLTQLDNKFFGLEMIKDQYVHDDDFKDVLLHCKDGKTWNKFFLNDGFVFRAKKLCIPASSVRLLLLXEAHGSDLMGHFGAKKTVDILAGHFFWPKMRRDVDRFVARCATCQKAKSRFNPHGLYIPLPVPTIPWDISMDFVLGLPRTNRGCDSIFVVVDRFSKMSHFIPCNKTDDASHIADLFFREIVRLHGVPNTIVSDRDTKFLSYFWRTLWAKLGTKLLFTTTCHPQTDGQTEVVNRTLSTMLRAVSKKNIKMWEECLPHIEFAYNCSLHSTTKMCPFQFVYGLLPRAPIDLIALPSPEKLNFDAKQRAKLMLKLHETTKENIERMNAKYKFAGDKGRRELNFEPGDLVWLHLRKERFPDLQKSKLMPRADGPFKVLAKINENAYKLDLPADYGVSPTFNVADLKPYLGEEDELESRMTQMQEREYDEDINTNDITSTPPQVQLHGPITHAHARQLNYQ

SEQ ID NO: 19248 - protein, 1138 aa, Oryza sativa
  Clone ID: TF_OSC400483j.C1.p14.gm
MASRRRASTSNDETQTPDLTTLAGVMATQTQLLQAIANNQGNHEGSSFGEFMSTKPPTFTTTDEPMEAEDWLRIIEKKLTLIRVREADKVIFAVNQLEGPAGDWWDTYKEAREEDAGEPTWEEFTAAFRENFVPAAVMRMKKNEFRRLRQGNTTVQEYLNRFTQLARYAIGDLANEEEKIDKFIEGLNDELRGPMIGQDHESFQSLINKVVRLENDQRTVEHNRKRRLAMNRPPQGVPQRLKGATSSGWKPPIVATNRPAAPSNFNRPVAIQNRTPTPTLAAPGAKKNVDCFNCEEYGHYANNCPHPRKTPVRTSANAMTVRGTTIPIAGRGLFKTPQTNRTATRFGRGQVNHVRAEEAQEDQGILMDYRSLNEVTIKNKYPLPRIDDLFDQLKGAKVFSKIDLRSGYHQLKIRTGDIPKTTFSTRYGLYEFTVMSFGLTNAPAYFMNLMNKVFMDYLDKFVVVFIDDILIYSKDEEEHVEHLRLVLEKLRKHKLYAKFSKCEFWLKEVAFLGHVISAGGVAVDPAKVEAVTKWKAPKSVTEIRSFLGLAGYYRRFIEGFSKIARPMTQLLKKEKKFVWSEQCQESFEQLKEKLTSAPILVLPDIRKDFVIYCDASRQGLGGVLMQDRKVVAYASRQLRPHEENYPTHDLELAAVVHALKIWRHYLIGNHCDIYTDHKSLKYIFTQSDLNLRLRRWLELIKDYDLEVHYHPGKANVVADALSRKSHCHHLRTEGMDVQRNFQPMKKVFYGTKRGSMYPNRDLKEGYWWPNMKRDVTEYVALCDVCQMVKAEHQRPAGERAVFGPDIIKEAEEKLPENIADVHPVFHVSQLKKCLRVPEEQAPLEEIHISNDLTYPEHPVRILDEVEKRTRAKVWHMYKVQLSNHTEDKATWESEEFLKTEYPHLFEDRPNPPPTLPRAWPPRAPRCRSIASSPAPPSRRRPSPRVIAVAVAVALSRAPCRRCCAVAVGRPIAARPSGHRLAPRAPRAARPSRRRLAPRTLPRRSPVIVASPSPSRRAPRRAARPSPSPPATPRTACRVAMRPPTPPPRPYRTRPLPFSTPHPSSPFPPPLLLLHAPPPSCRRAAAFVRRAVASKPPRRARCGAERCRLAPPPPTGTDGKIGWYLGKASTVPGQLKTEP

SEQ ID NO: 19249 - protein, 287 aa, Oryza sativa
  unsure (1)..(287): unsure at all Xaa locations
  Clone ID: TF_OSC8260j.C1.p3.np
LVSMRDNFNGSGSHQFHGSTQLNSNSIPRQPLEDQPQPQVMANQTQIVEELLQQMRRRYQIYQMQQMQRQCQESRQCHPPQVRDQMPARNPNQSQSQEFPISAPKTPVKMQSRSPKITTAKSTSDQRTVSATCYDCGEQGHYVRNCPWKVFARSPEKDEKXCPGSNQAPSQSTDKKDEFTPEDAARIPKRQRGRNTFRGARQLTRHLIKYGPPRPEDDESGERFSADDNDDNDDDNDDNDDATLDCFRERVKFKACARCGIVGHTASYCLPTCRCGEYTHYSDACLQ

SEQ ID NO: 19250 - protein, 1636 aa, Oryza sativa
  Clone ID: TF_OSC13851j.C1.p2.fg
MPRYKPEYLFGFEGFVQELRTIGFGTAPLYAQIPHDRHEEKCRVKVTLNSNSEDIPSVMFEAGGGNYIHACQEVARIAIGELRDRYSDQLADTEYRYHPRQPQGSDRGSYLETEGIENDATTRHLVEMLWAMDETRAEVVLAAQDREDRNRGKICRLEDKVDRLKKELAALKGEAPPQKARIHLTARKRALFVPRYQLAPKVRVVEKEVTPALADPPVVNNKLAEFIRVRPPTFSSTTNPVEAGDWLHAIEKKLDLLQCTDQEKVSFASHQLHGPASKWWDHFRLNRTTAEPITWLEFTAAFRKTHIPSGAVSLKKKEFRSLTQGSRTVTEYLHEFNRLARYAPEDVRTDEERQERFLEGLNDELSYPLMTGDYHDFQKLVDKAIRQEDKYNRMEQKKRRIAHFKAQQGNSQRPRLTLGPQSMPQGGSSSVVRPQCQFFNNNAGNNIRNQAPRPVAAPTQQQPAKREQGSKPGVCFNCGDPGHYSDKCSKPRRVKVVPAQSNSTAPASKARVNHVAATEAQGAPDVILGTFLVNSVPTTVLFDSGATHSFLSMSFAGNHGMEVEDLIRPLMVSTPSNQALSLQRSPSVRIEIQEVPFLANLILLESKDLDVILGMDWLARYKGVIDCANRKVTLTSNDGRVVTVHALSSESLRSRLNQMTLEEIPIVREYPDVFPDDLPGMPPKRDIEFRIDLVPGTTPIHKRPYRMAANELAEVKRQVDDLLQKGYIRPSSSPWGAPVIFVEKKDHTQRMCVDYRALNDVTIKNKYPLPRIDDLFDQLKGATVFSKIDLRSGYHQLRIKEEDIPKTAFITRYGLFECTVMSFGLTNAPAFFMNLMNKVFMEYLDKFVVVFIDDILIYSRTKEEHEEHLRLALEKLREHQLYAKFSKCEFWLFEVKFLGHVISAGGVAVDPSNVESVTNWKQPKTVSEIRSFLGLAGYYRRFIENFSKIAKPMTRLLQKDVKYKWSEECEQSFQELKNRLISAPILILPDPKKGFQVYCDASKLGLGCVLMQDGKVVAYASRQLRPHEKNNPTHDLELAAVVHALKIWRHYLFGTRTEVYTDHKSLKYIFTQPDLNMRQRRWLELIKDYDMGIHYHPGKANVVANALSRKGYCNATEGRQLPLELCKEFERLNLGIVSRGFVAALEAKPTLIDQVREAQINDPDIQEIKKNMRRGKAISFLEDEQGTVWLGKRICVPDNKDLKDAILKEAHDTLYSIHPGSTKMYQDLKERFWWASMKREIAEYVAVCDVCQRVKAEHQKPAGLLQPLKIPEWKWEEIGMDFITGLPRTSLGHDSIWVIVDRLTKVAHFIPVKTTYSGSRLAELYMARIVCLHGVPKKIVSDRGSQFTSNFWKKLQEEMGSKLNFSTAYHPQTDGQTERVNQILEDMLRACALDFGGSWDKNLPYAEFSYNNSYQASLQMAPYEALYGRKCRTPLLWDQTGERQVFGTDILREAEEKVKIIQERLRVAQSRQKSYADNRRRDLAFEEGDYVYLRVTPLRGVHRFQTKGKLAPRFVGPFKIVSRRGEVAYQLELPPSMAGIHDVFHVSQLKKCLRVPTEEADPDRIELQEDLTYVEKPVRILEVSERNTRNRVIRFCKVQWSNHSEEEATWEREDELKSAHPHLFASSSESRGRDSV

SEQ ID NO: 19251 - protein, 1739 aa, Oryza sativa
  unsure (1)..(1739): unsure at all Xaa locations
  Clone ID: TF_OSC33758j.C1.p1.np
MADCPLTHQGQTMGGFVAELSRIAFVIGFPREPQYTSIHPLSGEFPHQVRLEIHIPTYLPNMEVTACGGTFEHACEEAALRMMAHLRELHDGVLNTTAYRFHPCRGSSSNSSTFKSAWGENDVTFGHMSDVMRSYDKLHAMLHKATKSLNDQKLVRIADLQDENARLKKEVPRLXGRPPPGGARIRTTPRKSTTAPVRIQLAPRNPPQPPPLAPPAAPAPAPVLAPAPSTAASSAPVLEFGFTFVPASAYRGLAGGSGGCFLXMVNTRNGSRAAGEGNNSEERTDGGYPNSASGNGPPPLPENPTLAXVMAHQTQMMAAMMXQMQQQHQQMHQRMQQQAEQQQQQFGPPPPXSKLLEFLRVRPPTFSSTTNPMEANDWLHAIEKKLNLLQCSDKEKVAFATHQLQGPASAWWDNHMATRPPGTEVTWAEFCRSFRKAQVLDEDVAQKKRVFRALHQGNRTVTEYLHEFNRLARYAPEDVRTDAEKXEKFLASLDDELTNQLISGDYANFEKLVDKAIRQEDQRNKMDRKRKATQFRSNQGSHQRPCFTSGXQGGPTTMIVRQHHPYNPSNFHPGSSGSHLGGQHNRGAAPRPPMAPVQQTAPVPPKKDTGGKPGACFNYGESGHFANKCPKPRRAGPKFVQARVNHASTEEAQAAPEVVLGTFPVNSIPATVLFDSDATHSFISKKFVGVHGLRKEELSTPMRVHTPGNSSTSVSYSPSVLIEIQISRFLPNLILLESKDLDVILGMDWLTKFKGVIDCANRTVTLTNEKGETMVYKSPVSPNQGISLNQIEVENPVVTEEKGSRKLEGIPIVCEYPEVFPEDLTTMPPKREIEFRIDLAPGTAPIYKRPYRMTANVLAEVKKQVDEQLQKGYIRPSTSPWGAPVIFVEKKDKTKRMCVDYCALNEVTIKNKYPLPRIDDLFDQLKGAKVFSKIDIRSGYHQLRIREEDNPKTAFTTQYELYECTVMSFELTNAPAFFMNLMNKVFMEFLDKFVMVFIDDILIYSKSEEEHEQHLRLVLEKLKEHXLYAKFSKCDFWLSEVKFLGHVITAQGVAVDPSNVEXVTXWTPPKTVSQIWSFLGLAGYFRRFIENFSRIARPMTQLLKKEEKFKWTAECDKSFEELKNKLVSAPVLILPDKTKDFQVFCDASRQGLGCVLMQEGQVVAYASRLLRPHESNYPTHDLELAAVVHALKIWRHYLVGNRCEVYTDHKSLKYIFTQPDLNLRQRRWLELIKDYDMGIHYHPGKANVVADALSRKSYCNALGIGDMSDKLLQELEPLNLGIVEHGYVAALEAQPMLVDQVRAAQVNDPEIAELKKNMRVGKAQDFHEDEHGTIWLGERLKDLILTEAHQTQYSIHPGSTKMYKDLKEKFWWASMRREIVEFVALCDVCQRVKAEHQRPAGLLQPLXIPEWKWEEIGMDFITGLPRTSSGHDCIYVMCLHGVPKKIVSDRGSQFTSKFWQKLQEELGTRLNFSTAYHPQTDGQTERVNQILEDMLRACALDFGGAWDKSLPYAEFSYNNSYEASLQMAPFEALYGRKCRTPLFWDQTGERQLFGTEVLTEAEEKVRTIRERLRIAQSRQKSYTDNRRRELTFEVGDYVYLRVTPLRGVHRFQIKGKLAPRFVGPYKILEQRGEVAYQLELPSNMAGIHDVFHVSQLKKCLRVLGEQANSEHIDIQEDLTYVEKPVRILETNERRTRNKVTRFYRVQWSHHSEEEATWEREDELKAAHPHLFASSSESRG

SEQ ID NO: 19252 - protein, 1636 aa, Oryza sativa
  Clone ID: TF_OSC900091j.C1.p16.fg
MPRYKPEYLFGFEGFVQELRTIGFGTAPLYAQIPHDRHEEKCRVKVTLNSNSEDIPSVMFEAGGGNYIHACQEVARIAIGELRDRYSDQLADTEYRYHPRQPQGSDRGSYLETEGIENDATTRHLVEMLWAMDETRAEVVLAAQDREDRNRGKICRLEDKVDRLKKELAALKGEAPPQKARIHLTARKRALFVPRYQLAPKVRVVEKEVTPALADPPVVNNKLAEFIRVRPPTFSSTTNPVEAGDWLHAIEKKLDLLQCTDQEKVSFASHQLHGPASKWWDHFRLNRTTAEPITWLEFTAAFRKTHIPSGAVSLKKKEFRSLTQGSRTVTEYLHEFNRLARYAPEDVRTDEERQERFLEGLNDELSYPLMTGDYHDFQKLVDKAIRQEDKYNRMEQKKRRIAHFKAQQGNSQRPRLTLGPQSMPQGGSSSVVRPQCQFFNNNAGNNIRNQAPRPVAAPTQQQPAKREQGSKPGVCFNCGDPGHYSDKCSKPRRVKVVPAQSNSTAPASKARVNHVAATEAQGAPDVILGTFLVNSVPTTVLFDSGATHSFLSMSFAGNHGMEVEDLIRPLMVSTPSNQALSLQRSPSVRIEIQEVPFLANLILLESKDLDVILGMDWLARYKGVIDCANRKVTLTSNDGRVVTVHALSSESLRSRLNQMTLEEIPIVREYPDVFPDDLPGMPPKRDIEFRIDLVPGTTPIHKRPYRMAANELAEVKRQVDDLLQKGYIRPSSSPWGAPVIFVEKKDHTQRMCVDYRALNDVTIKNKYPLPRIDDLFDQLKGATVFSKIDLRSGYHQLRIKEEDIPKTAFITRYGLFECTVMSFGLTNAPAFFMNLMNKVFMEYLDKFVVVFIDDILIYSRTKEEHEEHLRLALEKLREHQLYAKFSKCEFWLFEVKFLGHVISAGGVAVDPSNVESVTNWKQPKTVSEIRSFLGLAGYYRRFIENFSKIAKPMTRLLQKDVKYKWSEECEQSFQELKNRLISAPILILPDPKKGFQVYCDASKLGLGCVLMQDGKVVAYASRQLRPHEKNNPTHDLELAAVVHALKIWRHYLFGTRTEVYTDHKSLKYIFTQPDLNMRQRRWLELIKDYDMGIHYHPGKANVVANALSRKGYCNATEGRQLPLELCKEFERLNLGIVSRGFVAALEAKPTLIDQVREAQINDPDIQEIKKNMRRGKAISFLEDEQGTVWLGKRICVPDNKDLKDAILKEAHDTLYSIHPGSTKMYQDLKERFWWASMKREIAEYVAVCDVCQRVKAEHQKPAGLLQPLKIPEWKWEEIGMDFITGLPRTSLGHDSIWVIVDRLTKVAHFIPVKTTYSGSRLAELYMARIVCLHGVPKKIVSDRGSQFTSKFWKKLQEEMGSKLNFSTAYHPQTDGQTERVNQILEDMLRACALDFGGSWDKNLPYAEFSYNNSYQASLQMAPYEALYGRKCRTPLLWDQTGERQVFGTDILREAEEKVKIIQERLRVAQSRHKSYADNRRRDLSFDEGDYVYLRVTPLRGVHRFHTNGKLAPRFVGPYKIVSRRGEVAYQLELPQSLAGIHNVFHVSQLKKCLRVPTEEANLEQIEVQEDLTYVEKPIRILKIDERRTRNRVIHFCKVQWSNHSEEESTWEREDELKSAHPHLFASSSESRGRDSV

SEQ ID NO: 19253 - protein, 1451 aa, Oryza sativa
  Clone ID: TF_OSC900107j.C1.p19.fg
MTRRSANTGDGNQPEGINLNNHGSPPPPPPPPPPPPPDTNAILTQILAQQANMTAAFLHHIQNPPQHNAPPPPPPPQHSKLAEFLRIRPPTFSSSNNPVDALDWLHAVGKKLDTVQCNDEEKVIFATHQLQGPASLWWDHFQATQPEGQPITWARFTAAFRRTHVPAGVMALKKREFRELKQGNRSVMEYLHEFNNLARYAPEDVREDEEKQEKFLAGMDSELSVRLVSGDYPDFQRLVDKSILLEAKHKELESHKRRLANFRNQQGANQRVRYTNPYLGGSSSQQQQQQPRSAPRPQFVVRVPQPQQPQGQQGPRAPRPPAPAVQPGQGHRDVQGQQRLCFNCFEPGHFAEKCPKPRRQQGQAPPRPNNGGKDVARGHVNHVTAEDVLTTPDVIVGTLLIHSIPATILFDSGASHSFISVTFVGRNQLGVERLRNPMLITTPGGVMTAKYYSPAIPIEIQGIPFPSDLILLDTKNLDVILGMNWLAQFQGVVDCARRTVTLYRGPEQPVVFFAPPTSVSSSELHQIGLSEIPIVREFGDVFPEELPGMPPKREIEFRIDLAPGTTPLYKRPYRMAANELAEVKKQLEELKGKGYIRPSTSPWGAPVIFVEKKDKTKRMCVDYRALNEVTIKNKYPLPRIDDLFDQLKGATVFSKIDLRSGYHQLRIREEDIPKTAFTMRYGLYEFTVMSFGLTNAPAFFMNLMNKVFMEYLDKFVVVFIDDILVYSQSEEDHQQHLCLVLGKLREHQLYAKLSKCEFWLSEVKFLGHMISAKGVAVDPETVTAVTDWKQPKTVTQIRSFLGLAGYYRRFIENFSKIARPMTQLLKKEEKFVWSPQCEKAFKTLKEKLVSSPVLILPDTHKDFMVYCDASRQGLGCVLMQEGHVVAYASRQLRPHEGNYPTHDLELAAVRRWLELIKDYDVGIHYHPGKANVVADALSRKSHCNTLNVRGIPPELNQQMEALNLSIVGRGFLAALEAKPTLLDQIREAQKNDPDMRGLLKNMKHGKAAGFTEDEHGTLWNGNREAHESPYSIHPGSTRMYLDLKEKYWWVSMKREIAEFVALCDVCQRVKAEHQRPAGLLQPLQIPEWKWDEIGMDFITGLPKTQGGYDSIWVVVDRLTKVARFIPVKTTYGGNKLAELYFARIVSLRGVPKKIVSDRGSQFTSHFWKKLQEELGTRLNFSTAYHPQTDGQTERLNQILEDMLHACVLDFGKTWDKSLPYAEFSYNNSYQASIQMAPYEALYGRKCRTPLLWDQVGESQVFGTDILREAEATVRTIRENLKVAQSRQKSYADNRRHDLEFAVDDFVYLRVTPLRGVHRFQTKGKLAPRFVGPFRITARRGEVAYQLELPASLGNVHDVFHVSQLKKCLRVPSEQADSEQIEVREDLTYVERPVKILDTMERRTRNRVIRFCKVQWSNHAEEEATWEREEELKAAHPDLFASSSESRGRDSV

SEQ ID NO: 19254 - protein, 1810 aa, Oryza sativa
  unsure (1)..(1810): unsure at all Xaa locations
  Clone ID: TF_OSC900142j.C1.p3.np
LLHLLSKYNPXNVASLFCFCLXMAGSITRRGLDLTGFVLELRGMCIVLGYPHGVDYQGRPLPEQEGDEAEPVAAWEVTAVILFFSPERTSLAVTAGGDSFSAACQNAALLAIGTLHQRYPDELQHSPYRYHPRRGGARDYATFRDASSEDDATIMHLARMVEAYDAARIDFHQMVRRGLVENNLKILELRQENLQLKKDLDAVEAQLHQLKIAQGEVGRPKRRRVCRSQKITARKSTSRPELVRQSLAWTCFVETPRAEPAPVVPQEGETSGVGSTKDALLLTFCPGPSQRQLSLFAGSVWGFQMVMTRRSANTGDGNQPEGINLNNHGSPPPPPPPPPPPPPDTNAILTQILAQQANMTAAFLHHIQNPPQHNAPPPPPPPQHSKLAEFLRIRPPTFSSSNNPVDALDWLHAVGKKLDTVQCNDEEKVIFATHQLQGPASLWWDHFQATQPEGQPITWARFTAAFRRTHVPAGVMALKKREFRELKQGNRSVMEYLHEFNNLARYAPEDVREDEEKQEKFLAGMDSELSVRLVSGDYPDFQRLVDKSILLEAKHKELESHKRRLANFRNQQGANQRVRYTNPYLGGSSSQQQQQQPRSAPRPQFVVRVPQPQQPQGQQGPRAPRPPAPAVQPGQGHRDVQGQQRLCFNCFEPGHFAEKCPKPRRQQGQAPPRPNNGGKDVARGHVNHVTAEDVLTTPDVIVGTLLIHSIPATILFDSGASHSFISVTFVGRNQLGVERLRNPMLITTPGGVMTAKYYSPAIPIEIQGIPFPSDLILLDTKNLDVILGMNWLAQFQGVVDCARRTVTLYRGPEQPVVFFAPPTSVSSSELHQIGLSEIPIVREFGDVFPEELPGMPPKREIEFRIDLAPGTTPLYKRPYRMAANELAEVKKQLEELKGKGYIRPSTSPWGAPVIFVEKKDKTKRMCVDYRALNEVTIKNKYPLPRIDDLFDQLKGATVFSKIDLRSGYHQLRIREEDIPKTAFTMRYGLYEFTVMSFGLTNAPAFFMNLMNKVFMEYLDKFVVVFIDDILVYSQSEEDHQQHLCLVLGKLREHQLYAKLSKCEFWLSEVKFLGHMISAKGVAVDPETVTAVTDWKQPKTVTQIRSFLGLAGYYRRFIENFSKIARPMTQLLKKEEKFVWSPQCEKAFKTLKEKLVSSPVLILPDTHKDFMVYCDASRQGLGCVLMQEGHVVAYASRQLRPHEGNYPTHDLELAAVVHALKIWRHYLIGNRCEIYTDHKSLKYIFTXSDLNLRQRRWLELIKDYDVGIHYHPGKANVVADALSRKSHCNTLNVRGIPPELNQQMEALNLSIVGRGFLAALEAKPTLLDQIREAQKNDPDMRGLLKNMKHGKAAGFTEDEHGTLWNGNRVCVPDNRELKQLILXEAHESPYSIHPGSTRMYLDLKEKYWWVSMKREIAEFVALCDVCQRVKAEHQRPAGLLQPLQIPEWKWDEIGMDFITGLPKTQGGYDSIWVVVDRLTKVARFIPVKTTYGGNKLAELYFARIVSLRGVPKKIVSDRGSQFTSHFWKKLQEELGTRLNFSTAYHPQTDGQTERLNQILEDMLHACVLDFGKTWDKSLPYAEFSYNNSYQASIQMAPYEALYGRKCRTPLLWDQVGESQVFGTDILREAEATVRTIRENLKVAQSRQKSYADNRRHDLEFAVDDFVYLRVTPLRGVHRFQTKGKLAPRFVGPFRITARRGEVAYQLELPASLGNVHDVFHVSQLKKCLRVPSEQADSEQIEVREDLTYVERPVKILDTMERRTRNRVIRFCKVQWSNHAEEEATWEREEELKAAHPDLFASSSESRGRDSV

SEQ ID NO: 19255 - protein, 542 aa, Oryza sativa
  Clone ID: TF_OSC102322j.C1.p2.fg
MATKAALRSLWSAFDKQASSIIDKLVWPWLMPADDTEEGAKRRAEEITEELAQLEKTRMTTWARSVVESFDTAPPPFPPPLSATTPHPPPPSPATSSSRTATATATATPTSPTPTPPPSSVTMLWARSRPTKEDEGEGLQRRTDAVVVLVRMQRRARFAAWTNAALHNFWGVERLSPGWANVYRFWANKWYQSSGAMSGDGVYTPPPPPPIRRSSGGGGSSSGNGDGVYTPPPIRRGSGGGGSSSGNGGDGSLGGHELVVQQVKEAGVTLRYPMLGENNYGVWAVKMKIFMRAQGVWAAVEGNAADEKMDQMALAAIVQAVPEAMVMAISEKETAREAWDALKQMNMGEERVKKARVQTLKRVLHGMYMGNSEKINDFALKVTTIVNEIHSLGTKVEETTVVEKLLHSVPDKFQSLISTIEQWGDVSEMTVTETIRRLRAFEESSKGRRRENAGEEQLLIAGAEQRLTRTEWEAIVAKEKKSDEASGNGEKKFRGKFNKSKIECRRCGKFGHFADECDEPRKMAKAVTQLVIADADDEPTLL

SEQ ID NO: 19256 - protein, 641 aa, Oryza sativa
  Clone ID: TF_OSC23348j.C1.p2.gm
MGSGGNDRGLLIHRVVKEAGGPANNPVLMKTNYNVWSLLMKIKLQARCLWGAIDPGEVELHEDRMTLDAICSVVPAEMISTLATKETAKAAWDCIKTMRVVNDRIRKASAQKLRSEYEALAFRDGESVEDFAMRLNTVVTQLSTLGDPEPDDKVVEKYLCVARPRFSQLVLSIETLLDISTLTLEEVTGRLKAVEDSGQSSSSSSPGAGAKLYLTEEEWLERHKKKQQEAKKRNGGGNGRGKRRGGQGHTSGGGGGVGNADSTGVGPARKTDKCRNCGKLGHCAKDCRSKPKQEQAHVVQDEDEPTLMLMTGSCIDEVEETGAQCATPSPLAPQPRPDVIELVEQKVFTALDDATDHDNKCWILDTGASNHMTGSRAAFSDIDTNVAGNVWLGDSLLVRIGGRGTVLFACKNSEHRMLHNTYYLPRLAANIISVGQLDETGFKVVVEDGVMRVWDERRRLLACIARSPGRLYLLDINLARPVCLMARAGEDAWRWHARFGHINFAALRKMGRESLVRGLPVLSQVERVCEACLAGKHRRAPFAQEALHNATELLALIHGDLCGPITPATPSGNRYFLLLVDDYSRYMWLTLLATKDGAPAAIKRVQAAAERKSGRKLWALRTDRGGEFTVGHFTEYCAELG

SEQ ID NO: 19257 - protein, 620 aa, Oryza sativa
  Clone ID: TF_OSC25126j.C1.p1.fg
MATKAALRSLWSAFDKQASSIIDKLVWPWLMPADDTEEGAKRRAEEITEELAQLEKTRMTTWARSVVESFDTAPPPSPPPLSATTPHPPPPSPATSSSRTATATATATPTSPTPTPPPTSATLLWPRPRPTKEEEGEGLQRRTDAVLVKRLRRARFAAWTSAALHKFDFDDAAPTVPPPPPATMIPPPTVTATITPLWPPPPPTKKEEHEGLQRRTDAVVVLVRMQRRARFAAWTNAALHKFDFGAAPPTAPPPRQPLPVGNSPTLKWYQSSGAMSGDGVYTPPPPPPIRRSSGGGGSSSGNGDGVYTPPPIRRGSGGGGSSSGNGGDGSLGGHELVVQQVKEAGVTLRYPMLGENNYGVWAVKMKIFMRAQGVWAAVEGNAADEKMDQMALAAIVQAVPEAMVMAISEKETAREAWDALKQMNMGEERVKKARVQTLKRVLHGMYMGNSEKINDFALKVTTIVNEIHSLGTKVEETTVVEKLLHSVPDKFQSLISTIEQWGDVSEMTVTETIRRLRAFEESSKGRRRENAGEEQLLIAGAEQRLTRTEWEAIVAKEKKSDEASGNGEKKFRGKFNKSKIECRRCGKFGHFADECDEPRKMAKAVTQLVIADADDEPTLL

SEQ ID NO: 19258 - protein, 444 aa, Oryza sativa
  Clone ID: TF_OSC30021j.C1.p1.hg
MAALTDDANGEGASQPRTGPYSSGRAGGSRRAATAEQHDDEPSLAQLLANQNRLFERMVANSENMGAAMAQQANQAPSKLADVQRTHPPHFSSAADPLAADDWLRDIEIKLNLCRCDPVEKATFAAYYLQGAAAAWWETYKTLIPPDEPITWTVFREGFRSAHIPAGLMEIKKKEFLNLKQGNMPFMEFMERFNYLGRYAASDLNTETKKVELCRDRLAPELKHALAAHEITSMKTLVALRVESSEKEVVEDRKRKWAAKKFAGSSSSTRPRLAPSPAVRPMAPQPPRQMYVPPRPQTQLVRQVPRAVQAAGDASRNANVTCYNCGKKGHYSPSCPYPKTGTSGPYSQGAPQQPRGPPQVQPGQRGAPAVPKPAPTFGRGRLNHVTAEEATDAPGVVLGMPPDRDIEFVIDLIPGTAPIAKRPYRMTSENLMELKKKLNEQLAK

SEQ ID NO: 19259 - protein, 564 aa, Oryza sativa
  Clone ID: TF_OSC400011j.C1.p4.fg
MATKAALRSLWSAFDKQASSIIDKLVWPWLMPADDTEEGAKRRAEEITEELAQLEKTRMTTWARSVVESFDTAPPPSPPPLSATTPHPPPPSPATSSSRTATATATATPTSPTPTPPPTSATLLWPRPRPTKEEEGEGLQRRTDAVLVKRLRRARFAAWTSAALHKFDFDDAAPTVPPPPPATMIPPPTVTATITPLWPPPPPTKKEEHEGLQRRTDAVVVLVRMQRRARFAAWTNAALHKFDFGAAPPTAPPPPQPLPVGNSPTLKWYQSSGAMSGDGVYTPPPPPPIRRSSGGGGSSSGNGDGVYTPPPIRRGSGGGGSSSGNGGDGSLGGHELVVQQVKEAGVTLRYPMLGENNYGVWAVKMKIFMRAQGVWAAVEGNAADEKMDQMALAAIVQAVPEAMVTTIVNEIHSLGTKVEETTVVEKLLHSVPDKFQSLISTIEQWGDVSEMTVTETIRRLRAFEESSKGRRRENAGEEQLLIAGAEQRLTRTEWEAIVAKEKKSDEASGNGEKKFRGKFNKSKIECRRCGKFGHFADECDEPRKMAKAVTQLVIADADDEPTLL

SEQ ID NO: 19260 - protein, 1074 aa, Oryza sativa
  Clone ID: TF_OSC400258j.C1.p20.fg
MGVPAFYRWLAEKYPMVVVDVVEEEAVEIEGVKVPVDTSKPNPNGLEFDNLYLDMNGIIHPCFHPEDRPSPTTFAEVFQCMFDYIDRLFVMVRPRKLMYMAIDGVAPRAKMNQQRSRRFRAAKDAADAAAEEERLREEFEREGRKLPPKQQSQTCDSNVITPGTEFMAVLSIALQYYIHLRLNYDPGWKQVKVILSDANVPGEGEHKIMSYIRGQRNLPGFNPNTRHCLYGLDADLIMLALATHEVHFSILREVVYTPGQQDKCFLCGQVGHLAANCEGKVKRKAGEFDEKGEAIVPKKPYQFLNIWTLREYLEYEFRMQNPPFPIDFERIVDDFIFMCFFVGNDFLPHMPTLEIREGAINLLMAVYKKEFPSMGGYLTDACTPDLNKVEHFIQAVGSYEDKIFQKRARLHQRQAERIKREKAQAKRGDDLDPHVRDDLIVPVARFQGSRLASGPVPSPYEQNGSDKNNGGKNSRARKAARVSSSGSSIAAAIVEAENDLEAQERENKEDLKTMLKDALREKSDVFNSENPEEDKIKLGEPGWRERYYEEKFGARTPGQIEEIRRDVVLKYTEGLCWVMHYYYEGVCSWQWFYPYHYAPFASDLSGLGQLNITFELGSPFKPFDQLMGVFPAASSHALPVQYRQLMTDANSPIIDFYPTDFEVDMNGKRYSWQGIAKLPFIDEARLLAEIKKVEHTLTPEEARRNSIMFNMLFVNGSHPLSPYIYSLNSKFGHLPDRERNEIKEKIDPSSSCLVLCSGGMNGYISLCSGDPCPPVFRSPVDGLEDIMDNQVICTIYKLPDSHKHIARPPVGVIIPKKTVEATDLKPPPVLWHEDSGRRPHDNNNRRPYENSNRQNPAGAISGRQLGEAAHRLVVNSLNARSGGQYNTPSMPYQTIMNGMPYPNGIPPRMEQPAPGWHVPGDLPNGQVPPAYASSSGHYQNDRSGPSQYGRDNHGRYPYARDNHHDSRGRVPPYHQSGGNSYQSHSAPSAGPGRYAQPPPYAGGYGRSYQPAPYGGGQQWQQQQQQPYGSYAGSGPYGGGAPPARPNSRPQQSQNRYNTLDRNSNRRPPPGHGRH

SEQ ID NO: 19261 - protein, 1315 aa, Oryza sativa
  Clone ID: TF_OSC400562j.C1.p1.fg
MPFMEFMERFNYLGRYAASDLNTETKKVELCRDRLAPELKHALAAHEITSMKTLVALRVESSEKEVVEDRKRKWAAKKFAGSSSSTRPRLAPSPAVRPMAPQPPRQMYVPPRPQTQLVRQVPRAVQAAGDASRNANVTCYNCGKKGHYSPSCPYPKTGTSGPYSQGAPQQPRGPPQVQPGQRGAPAVPKPAPTFGRGRLNHVTAEEATDAPGVVLGTFLVHSIPLTVLFDSGATHSFMSTLKAKQLDLKTEFLSDAMRIQSPGSTMVTKLLCKGVELIIDGVKFKANLILLDTLGLDVILGMDWLTKHEGTIDCAHRTVTLRSTDGQFVRFTFEQTSTSNQPSIQSLSIPELKSVPIVNEYSDVFPDELPGMPPDRDIEFVIDLIPGTAPIAKRPYRMTSENLMELKKKLNEQLAKGFIRPSSSPWGCPVLFVPKKDGTMRMCVDYRPLNEVTIKNKYPLPRIDDLFDQLTGARVFSKIDLRLGYFQLKIRPEDIPKTAFTTRYGLFEYTVVSFGLTNAPASFMNMMNKIFMEYLDKFVVVFIDDILIYSKSEEEHAQHLRMVLDKLREHQLYAKFSKCEFWLKEVEFLGHVLSEGGIAVNPRNVQNVLNWKQPQNVPEIRSFLGLAGYYRRFIENFSKIARPLTQLLKKENKFIWSEACETSFHELKRRLTTAPVLVMPDVLKPFHVYCDASHHGLGCVLMQEGKVVAYASRQLRPHEINYPTHDLQLAAVVHALKIWRHYLVSNRCEIFTDHKSLKYFFTQPDLNLRQRRWLELIKDYDLGIHYHPGKANVVADTLSRKLHHLAVIETINQPSLSSEFQKLNLGLVEDGYVAALALQPTLYSQIKAAQSIDEEVAEIMKEINSKPQSIYTLNSDGMVMLGKRIFVPNNQHLRETILDEAHQTPLSIHPGCTKMYQDIRTQYWWPSLRRDIAAYVAICDVCQRVKAEHQRPAGLLQPLQVPEWKFDEVGMDFITGLPKTPNGHDSIWVIMDRLTKVAHFIPVHVTYGGAKLAELYLTHIVRLHGVPKVIVSDRGTQFTSRFWKNLHELLGTKLFLSTAFHPQTGGQVERTNQILEDMLRACVLEHNTNWEKCLSFAEFSYNNSFQSSIQMSPFEALYGRKCRTPLYWSEVGERQFFGPAIINEAEKNVTLIRDRLKEAQTRQKSYSDRRRRELSFDVGDHVYLKVSPMRGTQRFQIHGKLAPRYIGPYQIISKRGQVAYQLELPFQLSNIHDVFHVSQLKKCLRTPIEHTSLEDINLKPNLSYQEYPIRILEESERRTRKSSIKILRVQWSNHTADEATWEREDRLKAEFPSFF

SEQ ID NO: 19262 - protein, 1494 aa, Oryza sativa
  Clone ID: TF_OSC411214j.C1.p3.fg
MGWKLCHVFRPYTVVMAGSVTRRGLDMTGFVLELRGMCVVLGYPHGVDYQARPLPEQEGDDAEPRAGWEVTAVILSGSPERTSLAVTAGGDSFPAACQNAALLAIGTLHQRYPDELQHSPYRYHPRRGGARDHATFRDASSEDDATVVHLARMVEAYDAARIDFHQMVRRGMVENNLKILELRQENLQLKKDLDALEAQLHQLKIAQGEDSRPKRRRVCRSQKITARKSTSRPELVRQSLAWTCFVETPRAEPAPVVPQEGEASGVGSSEVLFVSSSSLFAGSVWGFQMVTTRRNVNTGEGNQPEGSNPNSQGNPPPPPPPDTNAILTQILAQQANMMNAFLHHLQNPPQQNAPPPPPQHSKLAEFLRIRPPTFSSSNNPVDALDWLHAVGKKLDTVQCSDEEKVIFAAHQLQGPASLWWDHFQATQPEGQPITWTRFTAAFRRTHVPAGVVALKKREFRELKQGNRSVMEYLHEFNNLARYAPEDVREDEEKQEKFLAGMDPELSVRLVSGDYPDFQRLVDKSIRLEAKHKELESHKRRLANFRNQQGANQRVRYTNPYPGGSSSQQQQQQQQPRPAPRPQFVLCFNCFEPGHFADKCPKPRRQQGQAPPRSNNGGKDVIRGRVNHVTAEDVLTTPDVIVGTFLVHSIPATILFDSGASHSFISVPFVGKSQLGVERLRNPLLITTPGGVMIAKYYSPAVPIEIQGIPFPSDLILLDTKNLDVILGMNWLAQFQGVVDCVRRTVTLYRGPEQPVVFFAPPTSVRSSELHQIGLSEIPIVREFGDVFPEELPGMPPKREIEFRIDLAPGTTPLYKRPYRMAANELAEVKKQLEELKEKGYIRPSTSPWGAPVIFVEKKDKTKRMCVDYRALNEVTIKNKYPLPRIDDLFDQLKGATVFSKIDLRSGYHQLRIREEDIPKTAFTTRYGLYEFTVMSFGLTNAPAFFMNLMNKVFMEYLDKFVVVFIDDILIYSQSEEDHQHHLRLVLGKLREHQLYAKLSKCEFWLSEVKFLGHVISAKGVAVDPETVTAVTDWKQPKTVTQIRSFLGLAGYYRRFIENFSKIARPMTQLLKKEEKFVWSPQCEKAFQTLKEKLVSSPVLILPDTRKDFMVYCDASRQGLGCVLMQDGHVVAYASRQLRPHEGNYPTHDLELAAVVHALKIWRHYLIGNRCEIYTDHKSLKYIFTQSDLNLRQRRWLELIKDYDVGIHYHPGKANVVADALSRKSHCNTLNVRGIPPELNQQMEALNLSIVGRGFLAAMEAKPTLLDQIREAQKNDPDMHGLLKNMKQGKAAGFTEDEHGTLWNGKRVCVPDSRELKQLILQEAHESPYSIHPGSTKMYLDLKEKYWWVSMKREIAEFVALCDVCQRVKAEHQRPAGLLQPLQVPEWKWDEIGMDFITGLPKTQGGYDSIWVVVDRLTKVARFIPVKTTYGGNKLAELYFARIVSLHGVPKKIVSDRGSQFTSHFWKKLQEELGTRLNFSTTYHPQTDGQTERLN

SEQ ID NO: 19263 - protein, 1397 aa, Oryza sativa
  Clone ID: TF_OSC900174j.C1.p17.fg
MGSGGNDRGLLIHRVVKEAGGPANNPVLMKTNYNVWSLLMKIKLQARCLWGAIDPGEVELHEDRMTLDAICSVVPAEMISTLATKETAKAAWDCIKTMRVVNDRIRKASAQKLRSEYEALAFRDGESVEDFAMRLNTVVTQLSTLGDPEPDDKVVEKYLCVARPRFSQLVLSIETLLDISTLTLEEVTGRLKAVEDSGQSSSSSSPGAGAKLYLTEEEWLERHKKKQQEAKKRNGGGNGRGKRRGGQGHTSGGGGGVGNADSTGVGPARKTDKCRNCGKLGHCAKDCRSKPKQEQAHVVQDEDEPTLMLMTGSCIDEVEETGAQCATPSPLAPQPRPDVIELVEQKVFTALDDATDHDNKCWILDTGASNHMTGSRAAFSDIDTNVAGNVWLGDSLLVRIGGRGTVLFACKNSEHRMLHNTYYLPRLAANIISVGQLDETGFKVVVEDGVMRVWDERRRLLACIARSPGRLYLLDINLARPVCLMARAGEDAWRWHARFGHINFAALRKMGRESLVRGLPVLSQVERVCEACLAGKHRRAPFAQEALHNATELLALIHGDLCGPITPATPSGNRYFLLLVDDYSRYMWLTLLATKDGAPAAIKRVQAAAERKSGRKLWALRTDRGGEFTVGHFTEYCAELGVQRELTAPYSPQQNGVVERRNQSVVGTARSMLKAKGLLGARPRALVARPHTSFGMESHWPCTTCAFRCVAHVKVTAPNMKKLDDRSRPMIFVGYEPGSKAYRVYDPATRRVHVSRDVVFDKEAQWNWDGEAAANVDSGFTIEYTTVYHLATAAPTQIGTEHGGAPASPRSPASGSTPPTPPLAEEPPVEFVSPPPDVEDDLDADHDDAPLRFHRIDDVLGPATPPGQAVRELSEELFAVTAEEPASFAEAEQHSYWRQSMIKEMRSIEANKTWRLVDPPARQHPIGLKWVYKAKKDAAGNITKYKACLVAKGYVQRQGIDFDEVFAPVARLKSVRLLLAHAACEGRAVHHMDVKSAFLNELLEEVYVAQPPGFVVDGQEHKVLHLDKALYGLRQAQRAWYAKLDASLLMLGFHRSDSEHAVYMRGMGVHRLVVGVYINDLIITGGHSGELMQFKEEMKGTFQMSDLGLLKYYLGLEVNQSEDGITVCQSAYAQKILEVAGMAGSNPSLTPMETRLKLSKSSTAPAVDATDYRRIVGSLRYLVNLRPDLAYYVGYVSRFMEKPTVEHLAAVKRVLRYIASTIGYGCHYMRKKEAASLVGFSDSDLAGDLDTRKSTSGVFFFLGDNPITWQSQKQKVVALSSCEAEYIAATTVACQGVWLARLLAELRGEEADAVTLKIDNQSAIMLSKNPIFHDRSKHIDTRYHYIRECIEEGRVKAEFIGTDGQLADILTKALGRDRFIELRSRIGLIEIKTPRKV

SEQ ID NO: 19264 - protein, 1306 aa, Oryza sativa
  unsure (1)..(1306): unsure at all Xaa locations
  Clone ID: TF_OSC9356j.C1.p1.np
MAGFANALRPDKFTGVHFKRWQIRVTLWLTAMKCFWVSTGKPEGVLTAEXQKQFEEATTLFVGCILSVLGDRLVEVYMHMTDAKELWDALNTKFGATDASNDLYIMEQFHDYKMADNRSIVEQAHEIQTMAKELELLKCVLPDKFVAGCIIAKLSPSWRSFGTALKHKRQEYSVEGLIASLDVEEKAQEKDAASKGDGGQSSANVVHKAQNKSKGKYKAQQTTNFKKQKKNNNNPNQDEWTCFVCGQLGHLASKCPQRKGMKTPAGQTSKSANVTIGNTRDGSGCGNLPTVFSVNQSTNWWVDTRANVHVCADISLFSSYQVARGSTVLMGNGSHASVHGVGTVDLKFTSGKIVQLKNVQHVSSIDRNLVSGSRLTRDGFKLFFESNKVVVSKHGYFIGKGYECGGLFRFLSDFCNKSVNHICGSVDDEANVXHSRLCHINFGLMSRLSSMCLIPKFSIVKGSKCHSCVQSKXPRKPHKAAEERNLAPLELLHSDLCEMNGVLTKGGKRYFMTLIDDATRFCYVYLLKTKDDALDYFKIYKAEVENQLDRKIKRLRSDRGGEFFSNEFDLFCEEHGIIHERMPPYSPESNGIAERKNRTLTDLVNAMLDTAGLPKAWWGEALLTLNHVLNRVPNRNKDKTPYEIWIGRKPSLSYLRTWCLAKVNVPITKKRKLGPKTMDCVILGYAYHSIAYRFLIVKSEEPDMHVGTIMESRDATFFESFFPMKDTHSSSSQSSEIIPSSITPPEQTEHTHEHVTEEDDSAAPRRSKRQRTAKSFGKDFTLYLVDDTPKSISEAYASPDADYWKETVRSEMDSIIANGTWEVTERPYGCKPMGCKWVFKKKLRPDGTIEKYKARLIAKGYTQKEGGDFFDTYSPVARLTTIRVLLSLAASHGLLVHQMDVKTTFLNGELDEEIYMDQPDGFVVEGQEGKVCKLLKSLYGLKQASKQWHEKFDKTLTSAGFAVNEADKCVYYRHGGGEGVILCLYVDDILIFETNLEVINEVKSFLSQNFDMKDLGVADIILNIKLIRGENGITLLQSHYVEKILNRFGYIDSKPSPTPDDPSLLLRKNKRIARNQLEYSQIIISLMYLASATRPDISFAVSKLNRFTSNPGDDHWRVLERVMRYLKGTVELGLHYTGYPAVLEGYSDSNWISDVDEIKATSGYVFTLGGGAVXWRSCKQTILTRSTMEAELMALDTATVEAEWLHDLLMDLPIVEKSTCEKTIEVCQEIKKLXSYNVGLHPNSXKPGRSFHEGTITKCDRQCIEGDGFETHSILQRTHLCELDCWSQSMEILGESSRKLTIDLGV

SEQ ID NO: 19265 - protein, 427 aa, Oryza sativa
  Clone ID: TF_OSC9356j.C1.p2.gm
MAKELELLKCVLPDKFVAGCIIAKLSPSWRSFGTALKHKRQEYSVEGLIASLDVEEKAQEKDAASKGDGGQSSANVVHKAQNKSKGKYKAQQTTNFKKQKKNNNNPNQDEWTCFVCGQLGHLASKCPQRKGMKTPAGQTSKSANVTIGNTRDGSGCGNLPTVARGSTVLMGNGSHASVHGVGTVDLKFTSGKIVQLKNVQHVSSIDRNLVSGSPSHGLLVHQMDVKTTFLNGELDEEIYMDQPDGFVVEGFAVNEADKCVYYRHGGGEGVILCLYVDDILIFETNLEVINESHYVEKILNRFGYIDSKPSPTPDDPSLLLRKNKRIARNQLEYSQIIISLMYLASATRPDISFAVSKLNRFTSNPGDDHWRVLERVMRYLKGTVELGLHYTGYPAVLEGYSDSNWISDVDEIKATSGYVFTLGGGAV

SEQ ID NO: 19266 - protein, 751 aa, Oryza sativa
  Clone ID: TF_OSC401845j.C1.p5.gm
MANQPASSDEEKHQGNAIPHQDYSFSLTPVPGQRNQNEKRKCRVRKDICCFNCQEMGHFADKCPKPRNIVASTSVHATPRNQKLAPQRIVIHASRSSPIARVAIAPTPLSALPQGVNAQFQPQPPVDKIETMKKDITPEIVHDQSVTRAINPDIMHEEDRTTISGTPKDLIAPEASSTPGVKSTWLRKVESAGHPPARVGTPPGRAVASPSPACPRFRRNAVARAGLTLRLAGVPSATPSAVPVRRGMFHAVLASVQLLPAALVASSPAPVVVVVHLLLSSFPVVMAFVPPSSRSRSPPVVRQVSCCSPIVVFILSSTSSSLVPAASRIRPRIAAEVVPSPFVSVVPGRLRRARSSLSFPRLVAWCRRRQQGYGKLLAEIRDDFISNFQGTFERPGTYFDLYNVIQKPSEYLQDYIRRFSEQRNKISDITDDVIIAAFTKGVHHELLVGKFGRKPPRTVKQMFENTNEYAKADDAVTASELSGSNWKPKKDAPAVGGSGSTNHKDCKRKPEDLVASTTPSSQQRSHINTFDKIMNAQCSHHPNSNHAAKDCFIYQQFAEQYAKKGRKPTDGEQSTSKKMDDEDDGPTGFQDSRKELNHIFGGPQAYESKRKQKLTDREINAVQPNTPQYLRWSETAIKFDRSDHPDRVVHLGRYPLVLDPVVRNVKLRRSLIDGGSALNILFAKTLDDMHIPHTELKLSSAPFHGVIPWLSSTPLGQITLPVTFGTWENFCTENICFQVADFEMAYHTTPT

SEQ ID NO: 19267 - protein, 1789 aa, Oryza sativa
  unsure (1)..(1789): unsure at all Xaa locations
  Clone ID: TF_OSC900110j.C1.p22.np
RRSSPVRGPDPPWTALPEPLTGELPHRVRLEVHGYVGTCLANMVVEASGGPADHACQEAAYLMMARLRERHNYIFHDTVYRFHPRRASSDDVSTFRPTAGENDTTFGHMCAVMRGLDRMHSDLDKATKALNDGKLMRIVALKDEIARLKRENAQLKGLPAPGGVRIRTTPRKTMTAPVRIQLAPRNPPPSAAPAAPPVPPAVPAAPAPAPASALSFAPASAARGPARGNGGWLSATPSGSHDRSSSGSESGSGETYLPGSGSRSEGPGMVYTRNGSRATGEGSNGEERTEGVHPNSNSGNGPPPLPENPTLAQVMAHQTQMMAAMMQQMQQQHQQMHQRMLQHAEQQHQQFGPPPPQSKLPEFLRVRPPTFSSTTNPMEANDWLHAIEKKLNLLQCNDQEKVAFATHQLQGPASAWWDNHMATRPPGTEVTWAEFCRSFRKAQVPDGVVAQKKREFRALHQGNRTVMEYLHEFNRLARYAPEDVRTDAEKQEKFMAGLDDELTNQLISGDYADFERLVDKAIRQEDQRNKMDRKRKAAQFRAPQGSHQRPRFAPGQQGGPTTMIVRQYRPFNPSNFPHGAGGSQTHHRGQSNRGAAPRPPMAPAQSGPPAQAKKETGAKPGSCFNCGELGHFADKCSKPRRAGPRFIRARVNHASAEEAQAAPEVVLGTFPVNSIPATVLFDSGATHSFISKKFVGMHGLIREELSTPMRVHTPRNSSTSVQFSPSITIEIQRSPFLANLILLESKDLDVILGMDWLTKFKGVIDCANRTVTLTNEKGETVVYKSLDSSKRGVFLNQIETEIPVDTVEKNLRKWEDIPIVCEYPEVFPEDLTTMPPKREIEFRIDLAPGTAPIYKRPYRMAANELAEVKKQVDEQLQKGYIRPSTSPWGAPVIFVEKKDKTKRMCVDYRALNEVTIKNKYPLPRIDDLFDQLKGAKVFSKIDLRSGYHQLRIREEDIPKTAFTTRYGLYECTVMSFGLTNAPAFFMNLMNKVFMEFLDKFVVVFIDDILIYSKSEEEHEQHLRLVLEKLKEHQLYAKFSKCDFWSTEVKFLGHVITAQGVAVDPSNVESVTKXTPPKTVSQIRSFLGLAGYYHQFIENFSRIARPMTQLLKKDEKFKWTAECDKSFEELKKKLVSAPVLILPDQMKDFQVYCDASRHGLGCVLMQEGRVVAYASRQLRPHEGNYPTHDLELAAVVHALKIWRHYLIGNRCEVYTDHKSLKYIFTQPDLNLRQXRWLELIKDYDMGIHYHPGKANVVADALSRKSYCTALCIEGMCEELRQEFEHLNVGIVEHGFVAALEARPTLVDQVRAAQVNDSEIAELKKNMRVGKARDFHEDEHGTIWLGERLCVPDDKELKDLILTEAHQTQYSIHPGSTKMYQDLKEKFWWVSMRREIAEFVALCDVCQRVKAEHQRPAGLLQPLQIPEWKWEEIGMDFITGLPRTSSGHDSIXVVVDRLTKVSHFIPVHTTYTGKRLAELYLSRIMCLHGVPKKIVSDQGSQFTSKFWQKLQEELGTRLNFSTAYHPQTDGQTERVNQILEDMLRACALDFGGAWDKSLPYAEFSYNNSYQASLQMAPFEALYGRKCRTPLFWDQTGERQLFGTEVLAEAEEKVRIIRERLRIAQSRQKSYADNRRRELTFEAGDYVYLRVTPLRGVHRFQTKGKLAPRFVGPYKILERRGEVAYQLELPSNMIGIHDVFHVSQLKKCIRVPEEQADSEHIDIQEDLTYVEKPVRILDTSERRTRNKITRFCRVQWSHHSEEEATWEREDELKAAHPHLFTSSSESRGRDSV

SEQ ID NO: 19268 - protein, 1110 aa, Oryza sativa
  unsure (1)..(1110): unsure at all Xaa locations
  Clone ID: TF_OSC25042j.C1.p1.np
MALVPARRTRXSAFLYRXLTSTNYTSWMIRVQAMMEDQGVXETIEPAAGAAVDPKKDKKAKTHLLQSLPEDLLMQVAKKWTAKEVWDCLKTRFVGADWVRNARLQTLKGTSMVVEAEETLNQYAGRITTMGVRNSALGATTSMVKKLFDIVPEKFISLVAVIEQFYDIDEIPFEEAVGYLKAYDERVCKKKAAVGGVIAYGXVLHTQVEWACFKKNGRETSPQKNKPYGEGANRGQDGCGRGRGRRAGRRGGAQNNNSGGGSGGGGHDKSHIKCFNCDEFGHYSTXCPHPKKKNTETHLAXTKDAGPALLLAMTEAVPRRVNCGLVVHEDHVWPRLMLAGNGAAAGDVWYLYNGASNHMNGDRRKFRELDKTVTGQVRFGDASSVQIIEKGSILFSFKNGDQWLLDDVYYIASLCCNMVSLGQLTETSHRVMMDGDDLEVFDKHCRLVIRVRRTVNRLYRIELKLASPVCLLASLDSRDLVWLWHARLGHVNFXALKHLVDKEMATGVPAVHHPNQLCQACFVAKPIRQPFPAIANYRAETPLELLHMDLCGPITPSTLAGNRYFMLIVDDFSRWMWVFVIKSKDQALTAFEKFKPLPENMAGRTIKTLRTDRGGEFLSSEFTSVCTEAGIECHLTAPYSPPQAFKLKKNTTGEVIKHKARLVAKGYVQRQGVDFDEVFAPVAWLDTVQAILAVAANRRWEVHHLDVKSAFLNGDLEEEVFVDQSEGFVKQGKEHLVYKLSKALYGLRQALRGWNTCLDWSMKELGFSRCAQKQAVYTRGTGNAGLIVGVYVDDLIVTGENSSEITTFKQQMVGEFDMSDLGLLTYYLGIEVIQCKVNGIAIKQAAYARKILTQFGMLHCNSTSIPIEHRSQLHKDAKGSPVDATQFRRVIGCLRYLLHTRPDLSYAVGVVSRLMERPTVMHFKVVKQILKYLKGTINCGFTFADGNGAVEITRFTDSDQAGNTDDCQSTSGMAFYLNNSLISWSSQKHKTVALSSCEAKFMAATAAACHALWLRGLLIEIIGAEPRPVKLYTNQLAIALMKNPVFYGRSKYIDTRYHFIRECVESGKIQIEFVRTKEQRADALTKGLPAARLETARHLLGVRDFGPXQN

SEQ ID NO: 19269 - protein, 401 aa, Oryza sativa
  unsure (1)..(401): unsure at all Xaa locations
  Clone ID: TF_OSC28312j.C1.p4.np
MKFDLVKFDGFGNFGLWQTRVKDLLAQQEVSKALKGVKPAKMEDDDCEEMQLQAAATIRRCLSDQIMYHVMEETSPKIIWEKLEAQFMSKTLTNKRYLKQKLYGLKMQEGADLTAHVNVFNQLVTDLVKMDVEVDDEDKAIVLLCSLPESYEHVVTTLTYGKETIKTKDITSALLARDXMRKNKEGETSSRGFASQRRAGHKVKKNKKKKMVKCFRCDEWGHIRRECPTLKGKAKANVATSSNDSDSDGCDLLTMSSAQSKDAEAWILDSASSFHVTPRKEWFSSYKSGEFGFVYLGDDTSYPAVGVGEVKIKLEDGGEHVLQGVRHVPGLKRNLISLGTLHEEGLIFRGNRNRKTIEIMKGKMTMMTGEKVESHLYKLRGCTVAGVVQEEALLSGDCSKM

SEQ ID NO: 19270 - protein, 478 aa, Oryza sativa
  Clone ID: TF_OSC28312j.C1.p5.fg
MTMRSWTVNTRVATAVRTVYGQRVWRRRKLHEFLGRRRTGAGGPSQADTIGSQDEIVKTNTDGTEKGEYSGGDRPVRSRVGKLAPTCMKFDLVKFDGFGNFGLWQTRVKDLLAQQEVSKALKGVKPAKMEDDDCEEMQLQAAATIRRCLSDQIMYHVMEETSPKIIWEKLEAQFMSKTLTNKRYLKQKLYGLKMQEGADLTAHVNVFNQLVTDLVKMDVEVDDEDKAIVLLCSLPESYEHVMRKNKEGETSQAEGLLVKEDHAGHKVKKNKKKKMVKCFRCDEWGHIRRECPTLKGKAKANVATSSNDSDSDGCDLLTMSSAQSKDAEAWILDSASSFHVTPRKEWFSSYKSGEFGFVYLGDDTSYPAVGVGEVKIKLEDGGEHVLQGVRHVPGLKRNLISLGTLHEEGLIFRGNRNRKTIEIMKGKMTMMTGEKVESHLYKLRGCTVAGVVQEEAVAGIAIAFGGGGSGADSSGGLR

SEQ ID NO: 19271 - protein, 1117 aa, Oryza sativa
  unsure (1)..(1117): unsure at all Xaa locations
  Clone ID: TF_OSC412101j.C1.p1.np
MGVPRSEGYVIELHRLMRRLRYSRFPIYRVRQCGSVWEARVEVHTXVPSESDYSFPTRYRRDLPETAMQDAAREAFLRLSSIHRAELASTEFAHHPFREESNSVYTVQDTPCCYNPIVTRLSRWAEAVDDFYEEALLEIDDQQRRVGELETEVTDLTVQQLQLEEEHQAWGSEIDSLKAQLQLGSSLETPIQVDSETEGTDTEPEIEPDITDPSEDETPVPHITFIGGPRTLSTARKSTRPPGKKPKPDPEATTSEPWGLRIIEKKLTLVRVREADKVIFAVHQLEGPAGDWWDTYKEAWEEDAGEPTWEEFTTVFRENFVPAAVMRMKKNEFRRLRQGNATVQEYLNQFTQLARYAIGDLADEEEKIDFIEGLNDELRGPMIGQDHESFQSLINKVVRLENDQRTVEHRXRRLAMNRPPQGVPQRLKGATLSGWKPPIVATNRPTVPSNFNRPVVIQNRTPTPTLAAPVAKRMWCFNCGEYGHYANNCPHPRKTPVRTGANAMTVRGTTTPTTGRGLFKTPQTNRTATGFGRGQVNHVRAEEAQEDQGILMGMFSINSTPVKVLFDSGASHSFISLKASQKHNLALVGLRKPMIVHSPRGEITVSHACIDVPIRLRNVVPSNLMVLIPKTLDVIGMNLTKNRGVIDCRRREVILTTPWGSDMRTTMDQDPRLAERAGGIFTMLPMKGMPVVQRFPDVFPEDLLGMPPDRDIEFIIDLIPRTAPISKRPYRMPVNELEELKKQIRXLQEKRFVRPSSSPWRAPVLFVKKKDGSMRMCVDYRSQKVTIKNKYPLPRIDDLFDQLKGAKVFSKIDLRSGYHQLKIRTGDIPKTAFSTRYGLYEFTVMSFGLTNTPAYFMNLMKKVFMDYLDKFVVVFIDDILIYSKDEEEHAKHLRLVLEKLRKHKLYAKFSKCEFWLKEVAFLGHVISAGGVAVDPAKVEAVTKCKAPKSMTEIRSFLGLAGYYRRFIEGFSRIARPMTQLLKKEKKFAWSEQCQESFEQLKEKLTSAPILVLPDIRKNFVIYCDASRQGLGGVLMQDGKVVAYASXQLRPHEENYPTHDLELAAVVHALKIWRHYLIGNHCDIYTDHKSLKYIFTQSDLNLRQRRWLELIKNYDLEV

SEQ ID NO: 19272 - protein, 538 aa, Oryza sativa
  Clone ID: TF_OSC13700j.C1.p1.fg
VLLTSLVRMVNTRTGSGSGSGHNEGDPTLAQQAQNQQANNNNQPPPPQNKLADFLRVRPPTFSSTTNPVEAGDWLHAVEKKLDLIQCTEQEKVSFASHQLHGPVAEWWDHFRLNRAAGEPITWREFTAAFKKTHIPSGVVALKKREFRAFNRGSRSVTEYLHDFNRLARYAPEDVRTDEERQEKFLEGLNDELSYALMAMEYRDFQQLVDKASRQEDKYNRMEQKKRRAAQFKAQQGSSQRPHIGMGPQAAPYPQGGSSSVVRPQRQFYNNNTGNRSNNNRNVVTRPVAAPTQNQSVRKEQGSKPGVCINCGDPGHYADKCPNPRRVKNAPVQNDSNAPAPKARVNHVVAAEAQNAPDVVLGTFPVNSIPATVLFDSGATVFSKIDLRSGYHQLQIREEDIPKTAFTTQYGLFECTVMSFGLTNAPSFFMNLMNKVFMEYLDKFVMVFIDDIHIYSKTKEKHEEHLRLALEKLREHQLYAKFSNCEFWLPEVKFLGHVISAGGVAVDPSNVESVLNWKQPVTSQNDPKIHPRNCAENN

SEQ ID NO: 19273 - protein, 1305 aa, Oryza sativa
  Clone ID: TF_OSC400795j.C1.p74.gm
MQRWILAGILGCLRAKVEEYEGELAGRDGGGSEVRLDKKKQQQLVVEEPLATPCSAVAPAVAAAREDRRRHRQVAAVLVRPFAAVETRRSFVAVDNPKVAAASFSSPSSSVPFPPPFWSPVCSPRCPLRAGALRWCRGAAVRRRVSAARAVFFVEPPPSSMPRYKPEYLFGVEGFVQELHTMSFVIGFGTAPFYAQIPHDRHEEKCRVKVTLNSNSEEVPSVMFEAGGRNYIHACQEVARIAIGELRDRYSDQLADTEYRYHPRQPQGSDRGSYLETEGIENDVTTKHLVEMLWAMDESRAETVLAAQDREDRNRGKICKLEDKVDRLEKELAALKGEAPPQKAKIRLTARKRALFVPRYQLAPKVRVVEKEVAPAQADPPVIIISSDEEEESKRNNSKIEWVATQDDEDEPSIDLRCLEELDTTNPVEASDWLHAIEKKLDLLQCTDQEKVSFASHQLHGPASEWWDHFRLNRTTAEPITWLEFTAAFRKTHIPSGVVSLKKKEFRSLSQGSRSVTEYLHEFNRLARYAPEDVRNDEERQEKFLGGLNDELSYPLMVGDYPDFQKLVDKAIRQEDKYNRMEQKKRRIAQFKTQQGNNQKPRLNLGPQSMPQGGSSSVVRPQRQFFNNNAGNNIRNQASRPVAAPAQQQPAKREQGSKPVVCFNCGDPGHYADKCGAHLSGPSPSSRRSRRAAAPATVAAPTSPPSPALVDHARACAASPAPTSLSLPLAPAPEMAGIRKSNPASLSSPTPHVGRRFPPLPATLAAVLRRRRRSIRVAEIHPVHPSSVEVLPEPVAVVLPSLIVAVRRRSSLAPAEPLGRLPPFPVNRRPVGPACQPRPSRLVPLPELKSFSVEDVSERLVSSLPSRSRLNQITLEEIPIVREYPDVFPDDLPANELAEVKRQVDDLLQKGYIRPSSSPWGAPVIFVEKKDHTQRMCVDYRALNDVTIKNKYPLPRIDDLFDQLKGATVFSKIDLRSGYHQLRIKEEDIPKTAFTTRYGLFECTVMSFGLTNAPAFFMNLMNKPSPSPLVVGRALAPCALALPSPPPLQPCSAVAPAVAAAREDRRRHRQVAAVLVRPFAAVETRRSFVAVDNPKVAAASFSSPSSSVPFPPPFWSPVCSPRCPLRAGALRWCRGAAVRRRVSAARAVFFVEPPPSSEGALQWIVLCEGYRHNSFPRYRGGIEAHGDMMWGCVLWVQWYTSGQSKTIRIAVPAVMGGGGSSSGSIRVLMLAVEDHAVGSHSAAFDSPTAGVIALHLAWIVSTAFFALSTIVSPRTPTESSLSSAAAAPGGDRDGAAPGCLPSKSR

SEQ ID NO: 19274 - protein, 665 aa, Oryza sativa
  Clone ID: TF_OSC401829j.C1.p21.gm
MVNTRTGSGSGSGHNEGDPTLAQEKVSFASHQLHGPVAEWWDHFRLNRAAGEPITWREFTAAFKKTHIPSGVVALKKREFRAFNRGSRSVTEYLHDFNRLARYAPEDVRTDEERQEKFLEGLNDELSYALMAMEYRDFQQLVDKASRQEDKYNRMEQKKRRAAQFKAQQGSSQRPHIAMGPQAAPYPQGGSSSVVRPQRQFYNNNTGNRSNNNRNVVTRPVAAPTQNQSVRKEQGSKPGVCINCGDPGHYADKCPNPRRVKNAPVQNDSNAPAPKARVNHVVAAEAQNAPDVVLDATASEDPLFVEVEADVWESEQGKLGSGCMVLMVAPRPYKDRSSGLCCKALPYFHMSSGANEGYTSCGPVVEMSWQRVGALLLGAQSCLPVPEVPAVGGIGSMAGSVTRRGLDMTGFVLELRGMCVVLGYPHGVDYQARPLPEQEGDDAEPHAGWEVTAVILSGSPERTSLAVTAGGDSFPTACQNAALLAIGTLHQRYPDELQHSPYRYHPRRGGARDYATFRDASSEDDATIVHLARMVEAYNAARIDFHQMVRRGMVENNMKILELRQENLQLKKDLDAVEAQLHQLKIAQGKVCRPKRRRVCRSQKITARKSTSRPELVRQSLAWTCFIETPRAEPAPVVPQEGEASGVGSTEDALLLTFRPGPSQQ

SEQ ID NO: 19275 - protein, 462 aa, Oryza sativa
  Clone ID: TF_OSC405043j.C1.p1.fg
MVKTRNDPRDSNDASGSEEQTDEAHTSGAPGSSSSPPPENPTVPQMMTMMMQQMQQHYHQMLQQAQQNQQFGPPPSHVSKLLDFLRIQPPTFSSTTNPMEANDWLRAIEKKLNLLQCNDQEKVAFATHQLQGPASVWKAQIPEGIMAQQKREFRALQQGTRTVTEYLHEFNRLARYAPKDVRTDAEKQEKFLFGLDDELTNQLISRVYEDFEKLVDKAIRQEEQRNKMDRKRKAAQISFPQGNKQKPRFMTGQLGGPSTLIVCQHRPYHPSNFNNDYNGGSHNNSKQHNHNSTPPPLMAPAQSDSPAVSAQSEQPKKGAVGKPGPCFNCGKHDHFASKCPKLNRTGPRFIQARANHVSAEEAQVAPKVVLGTFPVNSYPATVLFDSGASHSFISKRFAGTHGFYSTLTKAPCLYGSIPRSTKASTTNVDKAPSQILRLLDHSRTVGGSRQGIRNEEMVYPPR

SEQ ID NO: 19276 - protein, 2112 aa, Oryza sativa
  Clone ID: TF_OSC900110j.C1.p18.fg
MATTDTTIAHIMDEQDDIKIKSSKCWNPIRPPATLLTSNGYRICIRPPFSAHEYLMESSRSPLSNRSGLISRLHLVWPQIQKQGAASPVMGQWACNFVWDPGPSGAHVGNRVDLHRQDQQPTESYHNSPKDRANNSLECREELRVHQVVSELSFLGLRKGIREHRLLHLRRDMTTSSCDAYEEVQKSLQNEKNDMFEMSLPSLANEEMADAATLSEEGIKGKLNGAEITQGIGLICTGKINNPRRGVSIAKAQHNVSLAPILQEMVSTNQSAFIRKRAIHDNFMYVQNPVKRLHRRKTPTLLLKLDISKAFDSLLLDFLGAVQGFPTSYLAYLFTLENYGRGMDSPATPMNFSPLLSLAPRNEPCYTKEENQDVTISSLSLKKLAPEFQDECPRGRVDAHHKFAATIGDGPENKDEEGASHSPRTKGTIQYFTRKVKQHTERLETDLQVTNEKIGQLESTQIFTNTKLTGLETAVARIDTSLAALVRHFDALNAGGNGGGNDDDIDGEYVEDNLEDEYIADTEQDDRDARDHRRLHNNRREETEDAAMARFLGGLNREIYDIVDYKDYTNMTRLFHLACKTSSWQTRTTPPAGRTASPSSTPATSRAAPPPSSDKSATKAAQPALSASSVASTGRTRDVQCHRCKGFGHVQRDCPSKRVLVVKNDGRPWQFDRDSMHHGRSNQYSFLYHDKKIVLHPMSPEDILRDDVAKAAKSKCESDKKAQSNGKKPETINLKPKCLLATKSDINELIASPSVVYALEYSDVFPKEVPPGLPPVRGIEHQIDLIPGASLPNRAPYRTNPEETKEIQRQVHELLDKRLDDMLDELSGSIVFSKVDLRSGYHQIRMKLGDEWKTAFKTKFGLYEWLVMPFGLTNAPSTFMRLMNEVLRPFIGKFVVVYFDDILIYSKSMGEHFNHLRAVFNALRDARLFGNLEKCTFCTDRVSFLGYVVTLQGIEVDQAKVEAIQSWPTPKTVSQVRSFLGLAGFYRRFVQDFSTIATPLNALTKKGVPFTWGTSQENAFHMLKDKLTHAPLLQLPDFNKTFELECDASGIGLGGILLQEGKPVAYFSEKLSGPVLNYSTYDKELYALVRTLETWQHYLWPKEFVIHSDHESLKHIRSQGKLNCRHAKWVEFIESFPYVIKHKKGKENIIADALSRRYTLLTQLDYKIFGLETIKDQYAHDADFNDVLLHCKDGRIWNKFVINGGFVFRANKLCIPASSVRLLLLQEAHGGGLMAHFGAKKTHDILASHFFWPQMRRDVGRAVLKKNIKMWEECLPHIEFAYNRSLHSTTKMCPFQIVYGLLPRPPIDLMPLPSSEKLNFDAKQHAELMLKLHETTKENIERMNAKYKFAGDKDFRVSPTFNIADLKLYLGEEDELESRTTQMQEGEDDEDINTIDTSTFPPCTPSIHPRRLHVQHDGPITRARARQLNYQDECPRGRVDAHHKFAATIGDAFGQIRLIKPLDGSNYAKWKADVLLNLGILDYDYAIREDRPEEPFSVEHDYEEKLNLYHEKTNEWEKSNRISLMYIKSAISNVIIGGIVDSDDVKTYLENIDRNFRSSSKSYASSIIKRLMSMCYNYKDGNNQRDKWSIEEIISHSVEEEDRQKADKQKHKDQLNLLHGAKGGKKKFYRGESSNSQNKKKKPNTPSTQASNGAHKGKAQVLAGQNSAGKFLCKFCKAEGHAQTDCEGFRAWLAKKGTNVDIVSNVDELLYVEFSHKSWWIDSGATVHVANSLQGFRSVRTLRKGEWILRVADGAEIKVMAIGELHHRLPSDDFSRYGYVFPIKDRSKSLDKFKIFKAEVENQHDAKIKIHGIIAQYSMPGEPQQNGVAERRNRTLMDMRHLKQLHTYSVEFQTVVAPDENSGDTDYVENNNELNNDTQQTSGAQNEEILEEPSQPLVIESEPLTILQRERRSAILNYYEVYLGEDIGNVDDPTSFKEAIMSEHLSKWLEAMKDELKSMSHNGVWDLVEIPKGAKTAGCKWVYKTKLDSKGKIKRFKARLVAKGFSQREEIDYNEIFSPVSKKDSFRIVMALVAHYDLELHQMDVKTAFLNGDLHEDVYMAQPEGFVMEGKDHLACKLKKSIYGLKQASRQWYLKFDEIIKRFGFKENEVDN

SEQ ID NO: 19277 - protein, 260 aa, Oryza sativa
  Clone ID: TF_OSC6294j.C1.p1.gm
MRSRSPKITTAKSTSDQRKVSATCYDCGEQGHYVRNCPWKVFARSPEKDEKQCPGSNQAPSQSTDKKDGTLQRNSGANRTVIWKMDNGRTIIITSSEFTPEDAARIPKRERFSADDDDDNDDDNDDNDDATLDSFRERELKFKACARCGIVGHTASLCLPTCRCGEYTHYSDACPLRKLQWKPTMEEATSPRMFISLCLFPFQLPKCIIRSLHPKTKQVDYVATVVSQDIVSVIVLFQEQQRQFVVIHKLPALPTTPNDT

SEQ ID NO: 19278 - protein, 325 aa, Oryza sativa
  Clone ID: TF_OSC10584j.C1.p3.fg
MDRTLAELYGMLKTAEESIKKNSNHVMVMHKRKPNNKKTGQKRKLNSDEITSTGNSKTKVQKTGPAKDTECFFCKETGHWKRNCRKYLEHLKQMQQDGKSSTLGINVIEINLATSSTDSWVFDSSFSMKDLGEAVYILGIRIYRDRSNRLIGLSQSTYIDKVLKRLNIRTKVMFLVYGGQEELVVNGYTDASFQTDKDDFRSQSGFVFCLNGGAVSWKSSKQDIVADSTTKPEYIAASEAAKEAVWINKFVSQLGVMASASSPMDLYCDNSGAIAQAKEPRSHQKSKHILRRYHLIHEIVGRGDVKICKIHMDLNVADPLTKPLP

SEQ ID NO: 19279 - protein, 802 aa, Oryza sativa
  Clone ID: TF_OSC401685j.C1.p102.fg
MPVPCLPDQSAALLRLKRSFTITNDSQCTLASWRAGTDCCRWEGVRCGGANGDGRVRSLDLARCFLESAAIDPALFDLTSLRYLNLARNDFNGSELPATGFEPGAGPLCIHGYSDVYPRFLRKNRHLVCRIVELSSRTNLKSLAELSMMLIKTERVRRCMNIFFTPSYFEYPSLKSWARHWFERLKHLTHLNLSDASIQGKIPVGIRHLTNLVSLDLSTTFYLIDQDDYYLSFGTWSDPSWWVVEPNIGSLVANLSSLRELYLGRVDLSDNGEDWCTALTNSSTPQLQVLSLRHCRLFGPICTSLSSIHSLTEINLQYNDLYGPVPDSFADLHFLRVLDLADNDLEGLFPKRILQNRNLTTVHISYNTNIYGSLPNFSPDSSLTTLIVSSTNFSGPIPSSIGNLKSLNELGVASNDFRQELPSSIGQLTSLKLLEATGAGIVGTIPSWIANLTSLVLLRFSNCGLSGPIPSSIVRKREVCVRVSVWADKWYQNLVREMPKIGDGSKAVAGDDDNSKLVVQQVKEAGVTLRYPMLGENNYGIWAVKMKIFMHAQGVWAAVEGDAADEKIDQMALAAIVQAVPEAVVMAISEKETAKEAWDALKQMNMGEERVKKARVQTLKRELDGMYMSNSEKINDFALKVTTIVNEIRSLGTKVEETTVVEKLLHSVPDKFQPLISTIEQWGDVSEMTVTETIGRLRAFEESSKGQRRDKEGEQQLLAACAEPRLTRAEWEAKVAEESSGGSGSNGVGEKKFRGKFDKSKIECHRCGKFGHFADECDEPRKMTKAVVQLAIADADDEPTLL

SEQ ID NO: 19280 - protein, 943 aa, Oryza sativa
  Clone ID: TF_OSC413099j.C1.p1.fg
MSWHRAGVLLLGAQSCLPVPGVPAMAGSVSRRGLDLTGFVLELRGMCVVLGYSHGVDYQGRTLPEQEGDDAEPHAAWEVTVVILTGSPERTSLAVTAGGDSFSAACQSAALLAIGTLHQRYPDELQHSPYRYHPRRGGARDYATFRDASSEDDTTIMHLARMVEAYDTARIDFHQMVRRGMVEDNLKILELRQENLQLKKDLDAVEAQLHQLKIAQEEVCRPKRRCVCRSQKITARKSTSRPELVRQSLAWTCFVETPRAEPAPVVPQEGEASGVSSTEDALLLTFRPGPSQRRNAATSDGNQPEGSNHNNHGSPPPPPPPPPPPPPDTNAILTQILAQQANMMAAFLHHIQNPPQHNAPPPPPQHSKLAEFLRIRPPTFSSSNNPVDALDWLHAVGKKLDTVQCSDEEKVIFAAHQLQGPASLWWDHFQATQPVGQPITWARFTAAFRRTHVPAGVMALKKREFRELKQGNRSVMEYLHEFNNLAQYAPEDVREDEEKQEKFLAGMDPELSVCLVSGDYPDFQRLVDKSIRLEAKHKELESHKRRLANFRNQQGANQRIRYTNPYPGGSSSQQQQPRSAPRPQFVVRVPQPQQQQSQQGTRAPRPPTPAAQSGQGRRDVQGPQPLCFNCFEPGHFADKCPKPRRQQGQVPPRSNNGGKDVIWGRVNHVTAEDVLTTPDVIVGTFLIHSIPATILFDSGASHSFISVPFMGRNQLGVERLRNPLLITTPGGVMTANVSRQSTNDRPDFSNLSKYQNGNGMKLGWISSPDFQKPKVARFIPVKATYGGNKLAELYFARILRSAAVVAPDHLSPRRHLLRLRRIPGDLVHPSVSLADRRSTVDPVHPSRAAAFLRSGRRFRLRRRPGVSRGPPLLFPLPFPSLGRRSAVPMDAAGDHRGAGAPPPAAAPVWPSSGAPCGCRVGPGCQPPAPSGAADAWDPRRRPV

SEQ ID NO: 19281 - protein, 1951 aa, Oryza sativa
  Clone ID: TF_OSC419041j.C1.p8.fg
MSGQAGDGNNGDKGAKIPYDYPSTSTSYVSTYSGKAPYFNGTDYAAWKHKMKMHLKSINPSIWRIVEKGYVLQNPEDPTKEDDENEHKNAQAANAILSALSGSEFNRVDGIESAKVIWYTLRNLHEGTYSVRESKVEILKGQFERFVMLDGESPSDMYDRLSKIVNEIKGLDSKDMTDEVVVKKMVRAITPRNSTLVTIIRERPDYKTLTPHDLLGCILTHDMLVQESKDVIQYINQSSTASIKNEDLALKAKEEEEENRKSKSKAEINDEEMALFVKKFGKFMRRSGFFKGGSSKHYSNKSSGRHSAKVCYVCKAPGHFIVDCPHLKDGSHIKEDKKKSEKKDEKKEKHKHSKREHYGQAHLGMIFGSDSESSSSDEEGVATFAVKPSSPPRLFDYSSDEDAPVCLMAKEPKVPSPHKSFNVDLVSDEEDEVMDDELFKSITKESLPHLSELLGRIKDQYGTLERQESLLIRKKERSHELKSELAKEREKNEALVRLYKQTKESHANLEVANAQLQERVDGLDKAYLTLEEKFETLKNSVSLPSEPSCSKIVPSNEPCVRCKDIDIEACATNSISLSALQKQNEKLMGLLHNGLLKCHMGSKALKEYLDYQRDNFNHEGLGYVPPPKGKVDKSVMIKRPQGLSNFVKAKSIIPNDYASHCSFDASYVLRKNASGRIVAKYVGPRGKNISIKRVLWVPKALVTNMRGPKQEYVSGGRSWVIDSGCTNHMTGEESMFSTLDPNGTSQDNIVFGDNGKGKVMGLGNIAISNDLSIANVLLVKSLNYNLLSVSQLCSMGYNCLFTDVDVTVYRRNDSSVVFKGVLKGKLYLVDFSSSKAKHETCFVAKSNTGWLWHRRLAHVGMRNLHKLLKHDHILGLTNIQFEKDRVCSTCQAGKQIGAHHPVKNVMTTTRLLELLHMDLFGPIAYLSIGGNKYGLVIVDDFSRFTWVFFLHDKSETQAIFKKFARRAQNEFDLKINKARSSKFAPKVDEGFLLGYGSNEYAYRVFNKTSGIVEIARDVTFDETNGSQVEQVDSHVLGEEEDPSEAIKRLALGDVRPREPQQGASSSTQVEPPTSTQADDPSISSLDQGEEGEQVPPSPINLARPRIHQSIQRDHPTNNILGDINKGVSTRSRIANFCEYYSFVSSLEPLRVEEALNDPDWVMAMQEELNNFTRNEVWTLVERPRQNVIGTKWIFRNKQDEAGVVIRNKARLVAQGFTQIEGLDFGETFAPRLPQRAYQRVGIRGATTGLRHVYKLHKALYGLKQAPRAWYECLRNFLVKNGFEIGKADSTLFTKRHDNDIFVCQIYVDDIIFGSTNKSFSEEFSRMMTKRFEMSMMGELKFFLGLQIKQLKEGTFICQTKYLKDMLKKFGMENAKPIHTPMPSNGHLDLNKQGKDVDQKVYRSIIGSLLYLCASRPDIMLSVSMCARFQAAPKECHLVAVKRILRYLVHTPNLGLWYPKGARFDLIGYADADYAGCKVDRKSTSGTCQFLGRMPPRKQTSHKSKRPRDRSPTPSSHDDSDSDWSGGEDAVPQVARVARRSTQAHGGGGDGEGSSRQPQTPPHQPNVPIGPLRIHTPERDLAVIRQVYDWRRKSEVVAPRRDEDPRSLRRTATDPRFWTLFQQDFYESVIKSKAHPTVPMQWINWEELQAHNDPVIDSVIANCDLMGIRSFMTLHQNWCNELNLDDLHNLQIPANTEFLPLYTPNDPNVVLGKVDGLKPYFAYLNRMFRRSFVPKDGDASSINHLSRTVLLRFDPPPHRFHVYHFVWEEIRMASIQYKKGLVYAPHIMRMIETVTQLQFRHDVTHSQLHLRLLKAPRSSAARDIPSSSTQPPPAPERPASVARREPSPLFRILRSLFGLCSAKAKKNRRLRNSAKKTARDVKFLKARYYEDHHIDIPPSPPGFEAEPDEPEDEAIEDPFAGLPSDFDFFGYGHGYGYPPPPPPEDPPQAPFA

SEQ ID NO: 19282 - protein, 130 aa, Oryza sativa
  Clone ID: TF_OSC9385j.C1.p1.fg
MTGQKRKLNSDEITSTGNSKTKVQKTGPAKDTECFFCKETGHWKRNCRKYLEHLKQMQQDGKSSTLGINVIEINLATSSTDSWVFDSSFSMKDLGEAVYILGIRIYRDRSNRLIGLSQSTYIDKVLKRLN

SEQ ID NO: 19283 - protein, 787 aa, Oryza sativa
  Clone ID: TF_OSC401185j.C1.p9.gm
MGIVSVLMGLGNEWAVQALVLFSFTLQVTLLSLAWIRRHSIATMPKLVLWVAYQLADSTALFTLGHMAISSRSREEQPLMAFWAPFLILHLGGQDNITAYSFEDNRLWLRHLQTLVVQVMGASYVLYKYMPGKETLVMAAAVLIFVVGILKYGERIWALREATFDNIARCLDQQEDYASAREREGDDLLQHVLQGRSSMDEENVLIGAHGLLDICRGLFIGSRGGRRGYLRHVLLSFQMYVRLDKLMELELSLMYDILYTKATVIHTWIGCCIRVIALAATVTATFLFLLSSKHGHSRKDLAVTYVLLAGALLLEMISMVRAVFSTWTVVFLYKLKWYWLYGEVLSIRRVFRRLARTRPAIGSQPGVRAFKALGLDGSLGWRTIQDIGFEDSIMAWHLASDICLFSDRSNKLDLHEGVAVLSNYMMFLLVHRRYMLPGPVRRTRYEQVRDDLNKFMHRKGRARSPQDLFVWALRRGLHDHLNSDDPPAQYDTGVRLAAVLYHRLDRLDIIFGELCLFLTAPRTVHCMQEPCRLRRHTSRIRRIVNPARLLRAVVAVGLAPLGTWEDRMVLEAVLKAVPADLLPVLAVKEMTKDAWDAIKTMRVGVNRVRKSKAQELRKQFDAIEFKEGESVEEFSIRLSWLVNNFAYSGSSLRNQDTLSLEQLTGVKNSGPLVPRNRQSGEGSSGKKQASTTAAAVGKKKTEGAANGERCARDQLRDKCKNCGRLGHWEKDCRQPKKQAEAHAVQGEEEDDEPVLLMAHAVELAQPPPSPPPTEPFDLVEPKVFTLL

SEQ ID NO: 19284 - protein, 1511 aa, Oryza sativa
  Clone ID: TF_OSC401709j.C1.p24.fg
MVKTRNDPRDSSDARGSEEQTDGAHVSGASDSSSSPPLGNPTVTQMMTMMMQQMQQHHHQVLQQVQQNQRFAPPPSHLSKLLDFLRIQPPTFSSTTNPMEANDWLRVVEKKLNLLQCNDREKVAFATHQLQGPASAWWDNYVVTRPDATKVTWVEFCQNFRKAQIPEGIMAQQKREFRALQQGTRTVTEYLHEFNRLAHYAPEDVRTDAEKQEKFLFGLDDELTNQLISGVYEDFEKLVDKAIHQEEQRNKMDRKRKAAQISFPQGNNQKPRFMTGQLGGPSTLIVCQHRPYHPSNFNNDYNGGSHNNSKQHNHNSTPPPLMAPAQSDPPAVSAQSEQPKKGAVGKPGPCFNCGKHGHFASKCSKLNRTRPRFIQARANHVSAEEAQAASDVVLGTFPVNSYPATVLFDSGASHSFISKRFAGTHGLSVMELKIPMQVHTSGNDMKTSHYCPSVTIEIKRSQFLSNLILLESKDLDVILGMDWLTRHKGVIDCAGRTITLTNDKGEKITFRSPVSQKSVASLNQAAIEGQTETVEKSPRKLEDIPIVQEYPEVFPEDLTTMPPKREIEFRIDLAPGTAPIYKRPYRMAANELAEVKKQVDEQLQKGYIRPSTSPWGAPVIFVEKKDKTKRMCVDYRALNEVTIKNKYPLPRIDDLFDQLKGAKVFSKIDLRLGYHQLRIREEDIPKTAFITRYGLFECTVMSFGLTNAPAFFMNLMNKVFMEFLDKFVVVFIDDILVYSKSEEEHEHHLRLVLEKLKEHQLYAKFSKCDFWLSEVKFLGHVISAQGVAVDPSNVESVTKWTPPKTVSQIRSFLGLAGYYRRFIENFSKIARPMTQLLKKDEKFKWSAECNQSFEELKKRLVSAPVLILPDQTKDFQVYCDASRQGLGCVLMQEGRVVAYASRQLRPQETNYPTHDLELAAVVHALKIWRHYLIGNRCEVYTDHKSLKYIFTQPDLNLRQRRWLELIKDYDMGIHYHPGKANVVADALSRKSYCNALCTEDMCGKLQQDLEHLNLGIVEHGYVAALEARPTLVDQVRAAQVNDPEIAELKKNMRVGKARDFHEDEHGTIWLGERLCVPDDKELKDLILTEAHQTQYSIHPGSTKMYQDLKEKFWWVSMRREIAEFVALCDVCQRVKAEHQRPAGLLQPLQIPEWKWEEIGMDFITGLPRTSSGHDSIWVVVDRLTKVAHFIPVHTTYTGKRLAELYLSRIMCLHGVPKKIVSDRGSQFTSKFWQKLQEELGTRLNFSTAYHPQTDGQTERVNQILEDMLRACALDFGGAWDKSLPYAEFSYNNSYQSSLQMAPFEALYGRKCCTPLFWDQTGERQLFGTEVLTEAEEKVRTVRERLRIAQSRQKSYADNRRRELTFEAGDYVYLRVTPLRGVHRFQTKGKLAPRFVGPYRILERRGEVAYQLELPSNMVGIHDVFHVSQLKKCLRVPKEQASSEHIDIQEDLTYVEKPIRILETSERRTRNKVIRFCKVQWSHHSEEEATWERAAHPHLFANSSESRGRDSV

SEQ ID NO: 19285 - protein, 2382 aa, Oryza sativa
  Clone ID: TF_OSC900175j.C1.p19.gm
MEYKAGPPATLADGWGPPVIAYLAPRPPPARALGPPPPPPNPPHPAVPARHKEGEITPRDSLSLFPRFSLSLSLGFVWNLSRNPRRRNQWRPDPPRRFPSPPAALSHSRRYIIAPRASLLRFRHSPHTLPVGFVPAPSSSLSAVAAELRFAAVVAPDLLPTRRHLLRLRRVPVDLVHPFVSPADCRSAAVLVDPNRAAAFLRSGCRFRRPRRPGVSHGPPPSLPPSLPSLGRRSAAPLVAGGDHRGAGAPPPVGRAGEAAFGRAPRLPGGPGRQPPAPAGAADAWDPRRRSASAACTRSTVDREADAWAPLPWTRLGSGCMVLMVAPRPYKDRSSGLCCKALPYFHMSSGANEGYTSCGPVVEMSWHRAGVLLLGAQSCLPVPGVPAVGGIGSMAGSVTRRGLGMTGFVLELRGMCVALGYPHGVDYQARPLPEQEGDDAEPRAAWEVTAVILAGSSERTSLTVTAGGDSFPAACQSAALLAIGTLHQRYPDELQHSPYRYHPRRGGARDYATFRDASSEDDATIVHLARMVEAYDAARIDFHQMVRRGMVENNMKILELRQENLQLKKDLDAVEAQLHQLKIAQGEVCRPKRRRVCRSQKITARKSTSRPELVRQSLAWTCFVETPRAEPAPVVPQEGEASGVGSTEALSVAGSVWGFQMVTTRRNAVTGDGNQPEGSNHNHQGNPPPPPPPPPPPPPDTNAILTQILAQQANMMTAFLHHLQNPPQHNAPPPPPQHSKLAEFLRIRPPTFSSSNNPVDALDWLHAVGKKLDTVQCSDEEKVIFAAHQLQGPASLWWDHFQATQPEGQPITWARFTAAFRRTHVPAGVVALKKREFRELKQGNRSVMEYLHEFNNLARYAPEDVREDEEKQEKFLAGMDPELSVRLVSGDYPDFQRLVDKSIRLEAKHKELESHKRRLANFRNQQGANQRVRYTNPYPGGSSSQQQQQQQQPRSAPRPQFVVRVPQPQQQQGQQGTRAPRPPTPTVQPGQGRRDAQGQQRLCFNCFEPGHYADKCPKPRRQQGQAPPRSNNGGKDVIRGRVNHVTAKDVLTTPDVIVGTFLVHSIPATILFDSGASHSFISVPFVGRNQLGVERLRNPLLITTPGGVMTAKYYSPAVPIEIQGIPFPSDLILLDTKNLDIGLSEIPIVREFGDVFPEELPEKKDKTKRMCVDYRALNEVTIKNKYPLPRIDDLFDQLKGATVFSKIDLHSGYHQLRIREEDIPKTAFTTRYGLYEFTVMSFGLTNAPAFFMNLMNKVFMEYLDKFVVVFIDDILIYSQSEEDHQHHLRLVLGKLREHQLYAKLSKREFWLSEVKFLGHVISAKGVAVDPETVTAVTDWKQPKTVTQVRSFLGLAGYYRRFIENFSKIARPMTQLLKKEEKFVWSPQCEKAFQTLKEKLVSSPVLILPDTRKDFMVYCDASRQGLGCVLMQDGHVVAYASRQLRPHEGNYPTHDLELAAVIHDLKIWRHYLIGNRCEIYTDHKSLKYIFTQSDLNLRQRRWLELIKDYDVGIHYHPGKANVVADALSRKSHCNTLNVRGIPPELNQQMEALNLSIVSRGFLAALEAKPTLLDQIREAQKNDPDMHGLLKNMKQGKAAGFTEEEHGTLWNGNREKYWWVSMKREIAEFVALCDVCQRVKAEHQRPAGLLQPLQVPEWKWDEIGMDFITGLPKTQGGYDSIWVVVDRLTKVARFIPVKTTYGGNKLAELYFARIVSLHGVPKKIVSDRGSQFTSHFWKKLQEELGTRLNFSTAYHPQTDGQTERLNQILEDMLRACVLDFGKTWDKSLPYAEFSYNNSYQASIQMAPYEALYGRKCRTPLLWDQVGESQVFGTDILREAEAKVRIIRENLKVAQSRQKSYADNRRRDLEFAVDDFVYLRVTPLRGVHRFQTKGKLAPRYVGPFRIIARRGEVAYQLELPASLGNVHDVFHVSQLKKCLRVPSEQADSEQIEVREDLTYVERPVKILDTMERRTRNRAGPPATLADGWGPPVIAYLAPRPPPARALAPPPPPPNPPHPAVPVRHKEGEITPRDSLSLFPRFSLSLSLGFVWNLSRNPRRRNQWRPDPPRRFPSPPAALSHSRRYIIAPRASLLRFRHSPHTLPVGFVPAPSSSLSAVAAELRFAAVVAPDLLPTRRHLLRLRRVPVDLVHPFVSPADCRSAAVLVDPNRAAAFLRSGCRFRRPRRPGVSHGPPPSLPPSLPSLGRRSAAPLVAGGDHRGAGAPPPVGRAGEAAFGRAPRLPGGPGRQPPAPAGAADAWDPRRRSASAACTRSTVDREADAWAPLPWTRLGSGCMVLMVAPRPYKDRSSGLCCKALPYFHMSSGANEGYTSCGPVVEMSWHRAGVLLLGAQSCLPVPGVPAVGGIGLAQFFPSPEEELLEDEGFGV

SEQ ID NO: 19286 - protein, 734 aa, Oryza sativa
  Clone ID: TF_OSC15176j.C1.p1.np
MPRYKPEYLFGVEGFVQELRTMSFVIGFGTAPFYAQIPHDRHEEKCRVKVTLNSNSEDVPSVMFEAGGRNYIHACQEVARIAIGELRDRYSDRLADTEYRYHPRQPQGSDRGSYLETEGIENDATTRHLVEMLWAMDESRAETVLAAQDREDWNRGKICKLEDKVDRLEKELAALKGEAPPQKARIRLTARKRALFVPRYQLAPKVRVVEKEVAPADPPVIIISDDEEEESKRTHSKIEWVATQDDEDEPNEPTIDLRCSEELDNGNGPNSNNNNNNGENPTLAQVLAQQTQLMNMMMQQLQNQQNQGNNHAPPQNKLAEFLRVRPPIFSSTTNPVEAGDWLHAIEKKMDLLQCTDQEKVSFASHQLLGPASEWWDHFRLNRITAEPITWLEFTAAFRKTHIPSGVVSLKKKEFRSLTQGSRSVTEYLHEFNRLARYAPEDLRNDEERQEKFLGGLNDELSYPLMVGDYPDFQKLVDKAIRQEDKYNRMEQKKRRIAHFKAQQGSNQKPRLTLGPQSVPQGGSSSIVRPQRQFFNNNAGNNIRNQVPRPVAASTQQQPAKRKQGSKPVVCFNYGDPGHYADKCPKPRRVKVVPAQNNSAVPASKARVNHVAAAEAQDAPDVILGTFPVNSVPATVLFDSSATHSFLSMSFAGNHGMEVEDLRRPLMVSTPSNQALSLQRSPSVRIEIQGVPFLANLILLESKDLDVILGMDWLAKHKGVIDCANRKVTLISNDG

SEQ ID NO: 19287 - protein, 1393 aa, Oryza sativa
  Clone ID: TF_OSC16841j.C1.p2.fg
MVLTRSNGNGPNSNNNNNNGENPTLAQVLALQTQLMNMMMHQLQNQQNQGNNHAPPQNKLAEFLRVRPPIFSSTTNPVEAGDWLHAIEKKMDLLQCTDQEKVSFASHQLLGPASEWWDHFRLNRITAEPITWLEFTAAFRKTHIPSGVVSLKKKEFRSLTQGSRSVTEYLHEFNRLARYAPEDLRNDEERQEKFLGGLNDELSYPLMVGDYPDFQKLVDKAIRQEDKYNRMEQKKRRIAHFKAQQGSNQKPRLTLGPQSVPQGGSSSIVRPQRQFFNNNAGNNIRNQVPRPVAASTQQQPAKRKQGSKPVVCFNYGDPGHYADKCPKPRRVKVVPAQNNSAVPASKARVNHVAAAEAQDAPDVILGTFPVNSVPATVLFDSSATHSFLSMSFAGNHGMEVEDLRRPLMVSTPSNQALSLQRSPSVRIEIQGVPFLANLILLESKDLDVILGMDWLAKHKGVIDCANRKVTLISNDGRVVTVHALSSEFLRSRLNQITLGEIPIVREYPDVFPDDLPGMPPKRDIEFRIDLVPGTTPIHKRPYRMAANELAEVKRQVDDLLQKGYIRPSSSPWGAPVIFVEKKDHTQRMCVDYRALNDVTIKNKYPLPRIDDLFNQLKGATVFSKIDLRSGYHQLRIKEYGLFECTVMSFGLTNAPAFFMNLMNKVFMEYLDKFVVVFIDDILIYSRTKEEHEEHLRLALEKLREHQLYAKFSKCEFWLSEVKFLGHVISAGGVAVDPSNVESVTNWKQPKTVSEIHSFLGLAGYYRRFIENFSKIAKPMTRLLQKYVKYKWSEECEQSFQELKSRLISAPILILPDPKKGFQVYCDASKLGLGCVLMQDGKVVAYASRQLRPHEKNYPTHDLELAAVVHALKIWHHYLFGTRTEEFERLNLGIVSRGFVAALEAKPTLIDQVREAQISDPDIQEIKKNMRRGKAIGFLEDEQGTVWLGERICVPDNKDLKDAILKEAHDTLYSIHPGSTKMYQDLKERFWWASMKREIAEYVAVCDICQRVKAEHQKPAGLLQPLKIPEWKWEEIGMDFITGLPRTSSGHDSIWVIVDRLTKVAHFIPVKTTYSGSRLAELYMARIVCLHGVPKKIVSDRGSQFTSNFWKKLQEEMGSKLNFSTAYHPQTDGQTERVNQILEDMLRACALDFGGSWDKNLPYAEFSYNNSYQASLQMAPYEALYGRKCRTPLLWDQTGERQVFGTDILREAEEKVKIIQERLRVAQSRHKSYADNRRRDLSFEEGDYVYLRVTPLRGVHRFHTKGKLAPRFVGPYKIVSRRGEVAYQLELPQSLAGVYNVFHVSQLKKCLRVPTEEANIEQIEVQEDLTYVEKPIRILETNERRTRNRVIRFCKVQWSNHSEEESTWEREDELKSAHPHLFASSSESRGRDSV

SEQ ID NO: 19288 - protein, 596 aa, Oryza sativa
  Clone ID: TF_OSC32899j.C1.p2.gm
MVLTRSNGNGPNSNNNNNNGENPTLAQVLAQQTQLMNMMMQQLQNQQNQGNNHAPPQNKLAEFLRVRPPIFSSTTNPVEAGDWLHAIEKKMDLLQCTDQEKVSFASHQLLGPASEWWDHFRLNRITAEPITWLEFTAAFRKTHIPSGVVSLKKKEFRSLTQGSRSVTEYLHEFNRLARYAPEDLRNDEERQEKFLGGLNDELSYPLMVGDYPDFQKLVDKAIRQEDKYNRMEQKKRRIAHFKAQQGSNQKPRLTLGPQSVPQGGSSSIVRPQRQFFNNNAGNNIRNQVPRPVAASTQQQPAKRKQGSKPVVCFNYGDPGHYADKCPKPRRVKVVPAQNNSAVPASKARVNHVAAAEAQDAPDVILDLDVILGMDWSRLNQITLGEIPIVREYPDVFPDDLPGYYRRFIENFSKIAKPMTRLLQKYVKYKWSEESLEAKPTLIDQVREAQISDPDIQEIKKNMRRGKAIGFLEDEQGTVWLGERICVPDNKDLKDAILKEAHDTLYSIHPGSTKMYQDLKERFWWASMKREIAEYVAPSPSLGKTTVVLAKSSPSSSASSLSPEITGAASPSSTRRFPPLPPRRRHRPLVFRHRLGH

SEQ ID NO: 19289 - protein, 1333 aa, Oryza sativa
  Clone ID: TF_OSC400415j.C1.p9.fg
MSNEVNHVGKAPMFNGTNYSTWKIKMSTHLKAMSFHIWSIVDVGFAITGTPLTEIDHHNLQLNAQAMNALFNSLSQEEFDRVSNLETAYEIWNKLAEIHEGTSEYKDAKLHFLKIQYETFSMLPHESVNDMYGRLNVIVNDLKRLGANYTDLEVAQKMLRALPEKYETLVTMLINSDMSRMTPASLLGKINTNDMYKLKKKEMEEASPSKKCIALQAEVEDKSKSKVNEVNEDLEEEMVLLARRFNDLLGRRKERGRGSNSNRRRNRRPNKTLSNLRCFECGEKGHFASKCPSKDDDGDKSSKKKSGGYKLMKKLKKEGKKIEAFIGEWDSNEESSASSGSKEEGGDDASSKKKKMAVVAIKEAPSLFAPLCLMAKGSSKVTSLSDSESDDDCDDVSYDELVSMFEELHAYSEKEIVKFKALKKDHASLEVLYEELKTSHERLTISHEKLKEAHDNLLSTTQHGAHIDVGISCDLLDDSATCHIAHVASSSISTSCDDLMDMPSPSSSSSSCVSICDASLIVENNELKEQLAKLNKSLERCFKGKNTLDKILSEQRCILNKEGLGFIPKKGKKPSHHATRFVKSNGKYCSKCREVGHLVNYRTGGSHWMLDSGCTQHMTGDRAMFTTFEVGGNEQEKVTFGDNSKGKSIVAELFKKFAKRAQNEFSCTLVKIRNDNGSEFKNTNIEDYCDDLGIKHELSATYSPQQNGVVERKNRTLIEMARTMLDEYGVSDSFWAEAINTACHATNRLYLHRLLKKTSYELIVGRKPNVAYFRVFGCKCYIYRKGVRLTKFESRCDEGFLLGYASNSKAYRVYNKNKGIVKETADVQFDETNGSQEEHENLDDVGDEGLMGAMKNMSIGDVKPIEMEDKPSTSTQDEPSTSASPNEALCDPDWMNAMHEELNNFARNKVWTLVERPRDHNVIGTKWIFRNKQDENGLVVRNKARLVAQGFTQVEDPKNPNHVYKLSKALYGLKQAPKAWYERLRDFLLSKDFKIEKVDTTLFTKIIGDDFFVCQIYVDDIIFGSTNEVFCKKFGDMMSREFEMSMIGELSFFLGLQIKQLKDGTFVSQTKYIKDLLKRFGLEDVKPIKTPMATNGHLDLDEGGKPVDLKLYRSMIGSLLYLTASRPDIMFSVCMCARFQAAPKECHLVAVKRILRYLKHSSTIGLWYPKGAKFKLVGYSDSDYAGCKVDRKSTSGSCQMLGRSLVSWSSKKQNSVDLSTVEAEYVSAGSCCAQLLWMKQTLLDYGISFTKTPLLCDNDSAIKIANNPVQHSRTKHIDIRHHFLRDHVTKCDIVISHIRTEDQLADIFTEPLDETRFCKLRNELNVIDFSNVA

SEQ ID NO: 19290 - protein, 1156 aa, Oryza sativa
  unsure (1)..(1156): unsure at all Xaa locations
  Clone ID: TF_OSC400979j.C1.p3.np
IPSFPESSFSPEKSLKSSKASKATPGLEWYIPGLEIELCSRDGCSEWLGLCNRMPRYKPEYLFGVEGFVQELRTMSFVIGFGTAPFYAQIPHDRHEERCRVKVTLNSNSEDILSVMFEAGGRNYIHACQEVARIAIGELRDRYSDQLADTEYRYHPRQPQGSDRGSYLETEGIENDATTRHLVEMLWAMDESHAETVLAAQDREDWNRGKICKLEDKVDRLEKELAALKGEAPPQKARIRLTARKRALFVPRYQLAPKMVNTRSNGNGPNLNNPNNNNNNEGNPTLAQVLAQQTQLMHMMMQQLQNQQNQGNNHAPPQNKLAEFLRVRPPIFSSTTNPVEAGDWLHAIEKKLDLLQCTDQEKVSFASHQLLGPASEWWDHFRLNRTTAEPITWLELTAAFRKTHIPSGVVSLKKKEFRSLTQGSRSVTEYLHEFNRLARYAPEDVRNDEERQEKFLEGLNDELSYPLMTGDYSNFQKLVDKAIRQEDKYNRMEQKKRRIAQFKIQQGNNQKPRLTFVPQSMPHGGSSSVVRPQRQFFNNNAGNNIRNQAPRPVAAPTQQPPAKREQGSKPVVCFNYGDPGHYADKCPKPRRVKVVPAXSNSTIPASKARVNHVAAAEAQDAPDVILGTFPVNSVHATVLFDSGATHSFLSMSFAGNHGMEVEDLRRPLMVSTPSNQALSLQRSPSVRIEIKGVPFLANLILLESKDLDVILGMDWLTRHKGVIDCANRKVTLTSSDGRVVTVHALSSESLRSRLNQITLEEIPIVREYPDVFPDDLPGMPPKRDIEFRIDLVPGTTPIHKRPYRMAANELAEVKRQVDDLLQKGYIRPSSSPWGAPVIFVEKKDHTQRMCVDYRALNDVTIKNKYPLPRIDDLFDQLKGATVFSKIDLRSGYHQLRIKEEDIPKTAFTTRYGLFECTVMSFGLTNAPAFFMNLMNKVFMEYLDKFVVVFIDDILIYSRTREEHEEHLRLALEKLREHQLYAKFSKCEFWLSEVKFLGHVISAGGVAVDPSNVESVTNCKQLKTVSEIRSFLGLAGYYRRFIENFSKITKPMTRLLQKDVKYKWSEECEQSFQELKNRLISAPILILPDPKKGFQVYCDASKLGLGCVLMQDGKVVTYASRQLRPHEKNYPTHDIELAAVVHALKIWRHYYLDTRSV

SEQ ID NO: 19291 - protein, 1092 aa, Oryza sativa
  Clone ID: TF_OSC401018j.C1.p32.gm
MARGLGPREWGPHGSLTPRGAPEGGLAGTADGRRRTRAPMVAGGDLRRDGAAPERGEGRGKRNGRSMAHPGSTATTGTATEAEEGGGAARVDEDGGVPAVGGRNEGVDEIGEDAANPKKATPKREEARGDDGGGPELGGDGGERGRRRELDSDGERERRVAETKEGGTGSVYMPRYKPEYLFGVEGFVQELRTMSFVIGFGTAPFYAQIPHDRHEEKCRVKVTLNSNSEDVPSVMFEAGGRNYIHACQEVARIAIGELRDRYSDRLADTEYRYHPRQPQGSDRGSYLETEGIENDATTRHLVEMLWAMDESRAETVLAAQDREDWNRGKICKLEDKVDRLEKELAALKGEAPPQKARIRLTARKRALFVPRYQLAPKVRVVEKEVAPADPPVIIISDDEEEESKRTHSKIEWVATQDDEDEPNEPTIDLRCSEELDNGNGPNSNNNNNNGENPTLAQVLAQQTQLMNMMMQQLQNQQNQGNNHAPPQNKLAEFLRVRPPIFSSTTNPVEAGDWLHAIEKKMDLLQCTDQEKVSFASHQLLGPASEWWDHFRLNRITAEPITWLEFTAAFRKTHIPSGVVSLKKKEFRSLTQGSRSVTEYLHEFNRLARYAPEDLRNDEERQEKFLGGLNDELSYPLMVGDYPDFQKLVDKAIRQEDKYNRMEQKKRRIAHFKAQQGSNQKPRLTLGPQSVPQGGSSSIVRPQRQFFNNNAGNNIRNQVPRPVAASTQQQPAKRKQGSKPVVCFNYGDPGHYADKCPKPRRVKVVPAQNNSAVPASKARVNHVAAAEAQDAPDVILDLDVILGMDWSRLNQITLGEIPIVREYPDVFPDDLPGYYRRFIENFSKIAKPMTRLLQKYVKYKWSEESLEAKPTLIDQVREAQISDPDIQEIKKNMRRGKAIGFLEDEQGTVWLGERICVPDNKDLKDAILKEAHDTLYSIHPGSTKMYQDLKERFWWATVAVAREDHRRARQVVAVLVRLFAVAGDHRSSIAVVNPKVPAASSSSPSPSVGLPPPFRSPVSSPRCPLRLGALRLRPSAAVRRRACAVRAVSSAEPPPLSVTSPLTSSGSSAVSRRGPDRSRPSVLDQVDLGRPFV

SEQ ID NO: 19292 - protein, 733 aa, Oryza sativa
  Clone ID: TF_OSC404369j.C1.p33.gm
MVNTRSNGNGPNNNNNNNNEGNPTLAQVLAQQTQLMNMMMQQLQNQQNQGNNHTPPQNKLAEFLRVRPPIFSSTTNPVEAGDWLHAIEKKLDLLQCTDQEKVSFASHQLHGPASEWWDHFRLNRITAEPITWLEFTAAFRKTHIPSGVVSLKKKEFRSLTQGSRSVTEYLHEFNRLARYAPEDVRNDEERQEKFLEGLNDELSYPLMTGDYSDFQKLVDKAIRQEDKYNRMEQKKRRIAQFKRQFFNNNAGNNIRNQAPRPVAAPTQQQPAKREQGSKPVVCFNYGDPGHYADKCPKPRRAKVVPTQSNSIAPASKARVNHVAAAEAQDAQDVILVREYPDVFPDDLPANELAEVKRQVDDLLQKGYIRPISSPWGAPVIFVEKKDHTQRMCVDYRALNDVTIKNKYPLPRIDDLFDQLKGATVFSKIDLRSGYHQLRIKEEDIPKTAFTTRYGLFECTVMSFGLTNAPAFFMNLMNKVFMEYLDKFVVVFIDDILIYSRTKEEHEEHLRLALEKLREHQLYAKFSKCEFWLSEVKFLGHVISAGGVAVDPSNVESVTNWKQPKTVSEIRSFLGLAGYYRRFIENFSKIAKPMTQLLQKDVKYKCRAPPPFRSSSSLGKIAIVVAKSSPSSSAPSPPPKTAGAPPPSSSRRSPPLLPRRRRRPLLLRRFFGHRWVRRAVRYPLVPFVRAEAPPFAGEFARPSRRAAAGGDVTADVIVAVCQEEFYNDADGVED

SEQ ID NO: 19293 - protein, 1441 aa, Oryza sativa
  Clone ID: TF_OSC411591j.C1.p1.fg
MSNEVNQVGKAPMFNGTNYSTWKIKMSTHLKAMSFHIWSIVDVGFTITGTPLTEIDHRNLQLNAQAMNALFNSLSQEEFDRVSNLETAYEIWNKLAEIHEGTSKYKDAKLHFLKIQYETFSMLPHESVNDMYGRLNVIVNDLKGLGANYTDLEVAQKMLRALPEKYETLVTMLINSDMSRMTPASLLGKINTNDMYKLKKKEMEEASPSKKCIALQAEVEDKSKSKVNEVNKDLEEEMVLLARRFNDLLGRRKERGRGSNSNRRRNRRPNKTLSNLRCFECGEKGHFASKCPSKDDDGDNMFEELHAYSEKEIVKFKALKKDHASLEVLYEKLKTSHERLTIPHEKLNATCHIAHVASSNISTSCDDLMDMPSPSSSSSSCVSICDASLVVENNELKEQVAKLNKSLERCFKGKNTLDKILSEQRCILNKEGLGFIPKKGKKPSHSATRFVKSNGKYCSKCREVGHLVNYRTGGSHWVLDSGCTQHMTGDRAMFTTFEVGGNEQEKVTFGDNSKGKVIGLVAKTSLGWLWHRRLAHVGMNQLSKLSKRDLVVGLKDVKFEKDKLCSAYQAGKQVACSHPTKSIMSTSRPLELLHMDLFGPTTYKSIGGNSHCLVIVDDYSRYTWVFFLHDKSIVAELFKKFAKRAQNEFSCTLVKIRSDNGSEFKNTNIEDYCDDLGIKHELSATYSPQQNGVVERKNRTLIEMARTMLDEYGVSDSFWAEAVNTACYATNRLYLHRLLKKTSYELIVGRKPNVAYFRVFGCKCYIYRKGVRLTKFESWCDEGFLLGYASNSKAYRVYNKNKGIVEETANVQFDETNGSQEGHENLDDVGDEGLMRAMKHMSIGDVKLIEVEDKPSTSTQNEPSTSASPSQAQVEVEEEKAQDPPMPPRIHTALSKDHPIDQVLGDISKGVQTRSRVASICEHYSFVSCLEPKHVDEALCDPDWMNAMHEELNNFARNKVWTLVERPRDHNVIGTKWVFRNKQDENGLVVRNKARLVAQGFTQVEGLDFGETFAPVTRLEAIRIFLAFASCFDIKLFQMDVKSAFLNGEIAELVFVEQPPGFEDPKYPNHVYKLSKAFYGLKQAPRAWYERLKDFLLSKDFKIGKVDTTLFTKIIGDDFFVCQIYVDDIIFGSTNEVFCKEFGDMMSREFEMSMIGELSFFLGLQIKQLKDGTFVSQTKYIKDLLKRFGLEDAKPTKTPMATNRHLDLDEGGKPVDLKLYCSMIGSLLYLTASRPDIMFSVYMCARFQATPKECHLVAVKRIPRYLKHSSTIGLWYPKCAKFKLVGYFDSDYAGCKVDRKSTSDSCQMLGRSLVSWSSKKQNSVALSTAEAEYVSAGSCCAQLLWMKQTLLDYGISFTKTPLLCDNDSAIKIANNPVQHSRTKHIDIRHHFLRDHVDKCDIVISHIRTENQLADIFTKPLDETRFCKLRNELNVIDFSNVA

SEQ ID NO: 19294 - protein, 1530 aa, Oryza sativa
  unsure (1)..(1530): unsure at all Xaa locations
  Clone ID: TF_OSC9403j.C1.p3.np
MPRYKPEYLFGVEGFVQELRTMSFAIGFGTAPFYAQITHDRHEEKCRVKVTLNSNSEDIPSVMFEAGGRNYIHACQEVARIAIGELRDRYSDQLADTEYRYHPPVVNVSDDEGEESKRTHSKIEWGATQADEDEPNEPSITPMLGRPRKPCRTVVLDRCVSLLVLSLVVCLACDLHQWWDVSACVCLLLSVRKLVSLVVXESSVCNNETHLRSIKVKVILCKXFPPVSLLVPCPYQMVNTRSNGNGPNNPNNNNNGENPTLAQVLAQQTQLMNMMMQQLQNQQNQGNNHAPPQNKLAEFLRVRPPTFSSTANPVEAGDWLHAIEKKLDLLQCTDQEKVSFASHQLHGPASEWWDHFRLNRTTAEPITWLEFTAAFRKTHIPSGVVSLKKKEFRSLTQGSRSVTEYLHEFNRLARYAPEDVRNDEERQEKFLEGLNDELSYPLMTGDYHDFQKLVDKAIRQEDKYNRMEQKKRRIAQFKTQQGNNQKPRLTLGPQSMPQGGSSSVVRPKRXFFNNNAGNNIRNQAPRPVAAPAQQQPAKREQSSKPVVCFNYGDPGHYADKCPKPRRVKVVPTQSNSTAPASKARVNHVAAAEAQDAPDVILGTFLVNSVPATVLYDSGATHSFLSMSFAGNHGMEVEDLRRPLMVSTPSSQALSLQRSPSVRIEIKGVPFLANLILLESKDLDVILGMDWLARHKGVIDCANRKVTLTSNDGRVVTVHALSSEFLRSRLNQIILEKIPIVREYPDVFPDDLPGMPPKRDIEFRIDLVPGTTPIHKRPYRMAANELAEVKRQKDKDHTQRMCVDYRALNDVTIKNKYPLPRIDDLFDQLKGATVFSKIDLRSGYHQLRIKEEDIPKTAFTTRYGLFECTVMSFGLTNAPAFFMNLMNKVFMEYLDKFVVVFIDDILIYSRTKEEHEEHLRLALEKLREHQLYAKFSKCEFWLSEVKFLGHVISARGVAVDPSNVESVTNWKQPKTVSEIRSFLGLAGYYRRFIENFSKIAKPMTRLFQKDVKYKWSEECEQSFQELKSRLISAPILILPDPKKGFQVYCDASKFGLGCVLMQDGKVVAYASRQLRPHEKNYPTHDLELAAVVHALKIWRHYLFGTRTEVYTDHKSLKYIFTQPDLNMRQRRWLELIKDYDMGIHYHLGKANVVVDALSRKGYCNATEGRQLSLELCKEERLNLGIVSRGFVAALEAKPTLIDQVREAQINDPDIQEIKKNMRRGKAIGFLEDEHGTVWLGERICVPDNKDLKDAILKEAHDTLYSIHPGSTKMYQDLKERFWWASMKREIAEYVAVCDVCQRVKAEHQKPAGLLQPLKIPEWKWEEIGMDFITGLPRTSSGHDSIWVIVDRLTKVAHFIPVKTTYSESRLAELYMARITDGQTERVNQILEDMLRACALDFGGSWDKNLPYAEFSYNNSYQASLQMAPYEALYGVHNVFHVSQLKKCLRVPTEEANLEQIKDQEDLTYVERPIRILEIDERRTRNRVIRFCKVQWSNHSEEESTWEREDELKSAHPHLFASSSESRGRDSV

SEQ ID NO: 19295 - protein, 1748 aa, Oryza sativa
  Clone ID: TF_OSC100051j.C1.p2.fg
MTSGGDSFVRMMSEDTDVEVLMPNEDLRTSTNGAKGSAKRSSNYTRKEDIQLCISWQSISSDPIIGNEQPGKAYWQRIAEHYHANRDFESDRNANSLEHHWGNIQKEVSKFQGCYNQIERHHPSGIPHQELVLEAEALYSSTAPKNRAFQFNHCWLKLRNSPKFQTLESHKRPRSRKSLTPIERAGEEDEGDDASKSTAPDLSQPSAKKRPIGRKQAKEKLKNGGEDGPYKEAMKDLLDAKEKEAKLKEERWKETKEIQERKLLFAERKLVWDQEQKIMFCDVSTLEPDVRTYVLAMRAQIAASKVAALNGGFDGSSGFGDIESPKYISSDEDINTIDTSMSPHIQHDGPITRARARQLNYQDECPRGRVDAHHKFAATIGDGPEDKDEEGASHSPRTKGIIQYFTRQVKQHTEGLDTDLQISTNTKLTGLETAVARIDTSLAALVRHFDALNAGGNGGGNDDDIDGEYIEDNLEDEYIADTEQDDRDAQDRRRLHNNRRGMGGRRRREVRNNDDAFSKIKFKIPPFDGKYDPDAFLSWEIAVDQKFAYHEFPENTRVRAATSEFTDFASVWWIEHGKKNPNNMPQTWDALKRVMRARFVPSYYARDLLNRLQQLRQGAKSVEEYYQELQMGLLRCNLEETEDTAMARFLGGLNREIYDIVDYKDYTNMTRLFHLACKAEREVQGRRASAKANFSAGKTSSWQTRTTPPAGRTASPSSTPTTSRAAPPPSSDKSVTKAAQPAPSASSMVSTGRMRDVQCHRCKGFGHVQRDCPSKRVLVVKNDGEYSSASDFDDDTLALLAADHADNEPPEEHIGAAFADHYESLIVQRVLSAQMEKAEQNQRHTLFQTKCVLKERCCRMIIDGGSCNNLASSEMVEKLALSTKPHPHPYYIQWLNNSGKVKVTKLVHINFAIGNYHDVVECDVVPMQACNILLGRPWQFDRDSMHHGRSNQYSFLYHDKKIVLHPMSSEDILRDDVAKAAKSKCESDKKAQSDGKKPETINLKPKCLLATKSDITELIASPSVAYALEYSDVFPKEVPPGLPPVRGIEHQIDLIPGASLPNRAPYRTNPEETKEIQRQVHELLDKGYVRESLSPCAVPVILVPKKDGSWRMCVDCRAINNITIRYRHPIPRLDDMLDELSGSIVFSKVDLRSGYHQIRMKLGDEWKTTFKTKFGLYEWLVMPFGLTNAPSTFMRLMNEVLRPFIGKFVVVYFDDILIYSKSMGEHFNHLRAVFNALRDARLFGNLEKCTFCTDRVSFLGYVVTPQGIEVDQAKVEAIQSWPTPKTVSQVRSFLGLAGFYRRFVQDFSTIAAPLNALTKKGVPFTWGTSQENAFHMLKDKLTHAPLLQLPDFNKTFELECDASGIGLGETWQHYLWPKEFVIHSDHESLKHIRIQGKLNRRHAKWVEFIESFPYVIKHKKGKENIIADALSRRYTLLTQLDYKIFGLETIKDQYAHDADFNDEAHGGSLMGHFGAKKTHDILASHFFWPQMRRDVGRAVLKKNIKMWEECLPHIEFAYNRSLHSTTKMCPFQIVYGLLPRAPIDLMPLPSSEKLNFDAKQRAELMLKLHETTKENIERMNAKYKFAGDKGRRELNFEPGDMVWLHLRKERFPDLRKSKLMPRADGPFKVLAKINENAYKIDLPADFRVSPTFNVADLKPYLGEEDELESRTTQMQEGEDDEDINTIDTSTSPHIQHDGPITRARTRQLNYQDECPCGRVDAHHKFAATIGDGVSVAKVQRLWTVVVGP

SEQ ID NO: 19296 - protein, 1641 aa, Oryza sativa
  unsure (1)..(1641): unsure at all Xaa locations
  Clone ID: TF_OSC100644j.C1.p3.np
MVGPEDKDEEGASHSPRTKGIIQYFTRQVKQHTEGLDTDLQVTNEKIGQLESMQISTNTKLTGLETAVACIDTSLAALVRHFDALNAGGNGGGNDDDIDGEYVEDNLEDEYIADTEQDDRDAQDRRRLHNNRRGMGGHRRREVRNNDDAFSKIKFKIPPFDGKYDPDAYLSWEIAVDQKFACHEFPENTRVRAATSEFTDFASVWWIEHGKKNPNNMPQTWDALKRVMRARFVPSYYARDLLNRLQQLRQGAKSVEEYYQELQMGLLRCNLEETEDAAMARFLGGLNREIYDIVDYKDYTNMTRLFHLACKAEREVQGRRASAKANFSAGKTSSWQTRTTPPAGRTASPSSTPTTSRAAPPPSSDKSATKAAQPAPSASSMASTGRMRDVQCHRCKGFGHVQRDCPSKRVLVVKNDGEYSSASDFDDDTLALLAADHADNEPPEEHIGAAFADHYESLIVQRVLSAQMEKAEQNQRHTLFQTKCVVKERCCRMIIDGGSCNNLASSEMVEKLALSTKPHPHPXYIQWLNNSGKAKVTKLVHINFAIGNYHDVVECDVVPMQACNILLGRPWQFDRDSMHHGRSNQYSFLYHDKKIVLHPMSPEDILRDDVAKAAKSKCESDKKAQSDGKKPETINLKPKFLLATKSDINELIASPSVAYALVCKDALISLHDMQHSLPPAVANILQQYSDVFPKEVPPGLPPVRGIEHQIDLIPGASLPNRAPYRTNPEETKEIQRQVHELLDKGYVRESLSPCAVPVILVPKKDGSWRMCVDCRAINNITIRYRHPIPRLNDMLDELSGSIVFSKVDLRSGYHQIRMKLGDEWKTAFKTKFGLYEWLVMPFGLTNAPSTFMRLMNEVLRPFIGKFVVVYFDDILIYSKSMGEHFNHLRAVFNALRDARLFGNLEKCTFCIDRVPFLGYVVTPQGIEVDQAKVEAIQSWPTPKTVSQVRSFLGLAGFYRRFVQDFSTIAAPLNALTKKGVPFTWGTSQENAFHMLKDKLTHAPLLQLPDFNKTFELECDASGIGLGGVLLQEGKPVAYFSEKLSGPVLNYSTYDKELYALVRTLETWQHYLWPKEFVIHSDHESLKHIRSQGKLNRRHAKWVEFIESFPYVIKHKKGKENIIADALSRRYTLLTQLDYKIFGLETIKDQYAHDADFNDVLLHYKDGRTWNKFVINDGFVFRANKLCIPASSVRLLLLQEALGGGLMGHFGAKKTHDILASHFFWPQMRRDVGRFVARCATCQKAKSRLHPHGLYMPLPVPTVPWEDISMDFVLGLPRTKRGRDSIFVVVDRFSKMAHFIPCHKTDDASHIADLFFREIVRLHGVPNTIVSDRDTKFLSHFWRTLWAKLGTKLLFSTTCYPQTDGQTEVVNRTLSTMLRAVLKKNIKMWEECLPHIEFAYNRSLHSTTKMCPFQIVYGLLPRAPIDLMPLPSSEKLNFDAKQRAELMLKLHETTKENIERMNAKYKFAGDKGRRELNFEPGDLVWLHLRKERFPDLRKYKLMPRADGPFKVLAKINENAYKIDLPADFGVSPTFNVADLKPYLGEEDELESRTTQMQEGEDDEDINTIDTSTSPHIQHDGPITRARARQLNYQDECPRGRVDAHHKFAATIGDDRATNPSGFASGWVGGFTTLDFGNIHITW

SEQ ID NO: 19297 - protein, 1218 aa, Oryza sativa
  Clone ID: TF_OSC10830j.C1.p4.fg
MRARFVPSYYARDLLNRLQQLRQGAKSVEEYYQELQMGLLRCNLEETEDAAMARFLGGLNREIYDIVDYKDYTNMTRLFHLACKAEREVQGRRASAKANFSAGKTSSWQTRTTPPAGRTASPSSTPTTSRAAPPPSSDKSAAKAAQPAPSASSMASTGRMRDVQCHRCKGFGHVQRDCPSKRVLVVKNDGEYSSASDFDDDTLALLAADHADNEPPEEHIGAAAFADHYESLIVQRVLSAQMEKAEQNQRHTLFQTKCVVKERCCRMIIDGGSCNNLASSEMVEKLALSTKPHPHPYYIQWLNNSGKAKVTKLVHINFAIGNYHDVVECDVVPMQACNILLGRPWQFDRDSMHHGRSNQYSFLYHDKKIVLHPMSPEDILRDDVAKAAKSKCESDKKEQSDGKKPETINLKPKCLLATKSDITELIASPSVAYALVCKDALISLHDMQHSLPPAVANILQEYSDVFPKEVPPGLPPVRGIEHQIDLIPGASLPNRAPYRTNPEETKEIQRQVHELLDKGYVRESLSPCAVTVILVPKKDGSWRMCVDCRAINNITIRYRHPIPRLDDMLDELSGSIVFSKVDLRSGYHQIRMKLGDEWKTAFKTKFGLYEWLVMPFGLTNAPSTFMRLMNEVLRPFIGKFVVVYFDDILIYSKSMGEHFNHLRAVFNALRDARLFGNLEKCTFCTDRVSFLGYVVTPHGIEVDQAKVEAIQSWPTPKTVSQVRSFLGLAGFYRRFVQDFSTIAAPLNALTKKGVPFTWGTSQENAFHMLKDKLTHAPLLQLPDFNKTFELECDASGIGLGGVLLQEGNPVAYFSEKLSGPVLNYSTYDKELYALVRTLETWQHYLWPKEFVIHSDHESLKHIRSQGKLNRRHAKWVEFIESFPYVIKHKKGKENIIADALSRRYTLLTQLDYKIFGLETIKDQYAHDADFNDEAHGGGLMGHFGAKKTHDILASHLFWPQMRRDVGRAVLKKNIKMWEECLPHIEFAYNRSLHSTTKMCPFQIVYGLLPRAPIDLMPLPSSEKLNFDAKQRAELMLKLHETTKENIERMNAKYKFAGDKGRRELNFEPGDLVWLHLRKERFPDLRKSKLMPRADGPFKVLAKINENAYKIDLPADFGVSPTFNVADLKPYLGEEDELESRTTLMQEGDDDEDINTIDTSTSPHIQHDGPITRARARQLNYQDECPRGRVDAHHKFAATIGDGVSVAKAQRLWTVVVGP

SEQ ID NO: 19298 - protein, 983 aa, Oryza sativa
  Clone ID: TF_OSC21171j.C1.p1.fg
MAGPEDKDEEGASHSPRTKGIIQYFTRQVKQHTEGLDTDLQVTNEKIGQLESTQISTNTKLTGLETAVARIDTSLAALVRHFDALNAGGNGGGNDDDIDGEYVEDNLEDEYIADTEQDDRDARDRRRLHNNRRGMGGRRRREVRNNDDAFSKIKFKIPPFDGKYDPDAYLSWEIAVDQKFACHEFPESTRVRAATSEFTDFASVWWIEHGKKNPNNMPQTWDALKRVMRARFVPSYYARDLLNRLQQLRQGAKSVEEYYQELQMGLLRCNLEETEDAAMARFLGGLNREIYDIVDYKDYTNMTRLFHLACKAEREVQGRRASAKANFSAGKTSSWQTRTTPPAGRTASPSSTPTTSRAAPPPSSDKSATKAAQPAPSASSMASTGRMRDVQCHRCKGFGHVQRDCPSKRVLVVKNDGEYSSASDFDDDTLALLAADHADNEPPEEHIGAAFADHYESLIVQRVLSAQMEKAEQNQRHTLFQTKCVVKERCCRMIMDGGSCNNLASSEMVEKLALSTKPHPHPYYIQWLNNSGKAKVTKLVHINFAIGNYHDVVECDVVPMQACNILLGRPWQFDRDSMHHGRSNQYSFLYHDKKIVLHSMSPEDILRDDVAKAAKSKCESDKKAQSDGKKPETINLKPKCLLATKSDINELIASPSVAYALEYSDVFPKEVPPGLPPVRGIEHQIDLIPGASLPNRAPYRTNPEETKEIQRQFMSCLIKGMYASLLVHVRFRAINNITIRYRHPIPRLDDMLDELSGSIVFSKVDLRSGYHQIRMKLGDEWKTAFKTKFGLYEWLVMPFGLTNAPSTFMRLMNEVLRPFIGKFVVVYFDDILIYSKSMGEHFNHLRAVFNALRDARLFGNLEKCTFCTDRVSFLGYVVTPQGIEVDQAKVEAIQSWPTPKTVSQVRSFLGLAGFYRRFVQDFSTIAAPLNVLTKKGVPFTWGTSQENAFHMLKDKLTHAPLLQLPDFNKTFELECDASGIGLG

SEQ ID NO: 19299 - protein, 1567 aa, Oryza sativa
  Clone ID: TF_OSC27261j.C1.p2.fg
MAGLEDKDEEGASHSPRTKGIIQYFTRQVKQHTEGLDTDLQVTNEKIGQLESTQISTNTKLTGLETAVARIDTSLAALVRHFDALNAGGNGGGNDDDIDGEYVEDNLEDEYIADTEQDDRDARDRRRLHNNRRGMGGRRRREVRNNDDAFSKIKFKIPPFDGKYDPDAYLSWEIAVDQKFACHEFPENTRVRAATSEFTDFASVWWIEHGKKNPNNMPQTWDALKRVMRARFVPSYYARDLLNRLQQLRQGAKSVEEYYQELQMGLLRCNLEETEDAAMARFLGGLNREIYDIVDYKDYTNMTRLFHLACKAKREVQGRRASAKANFSAGKTSSWQTRTTPPAGRTTSPSSTPTTSRAAPPPSGDKSAIKAAQPAPSASSMASTGRMRDVQCHRCKGFGHVQRDCPSKRVLVVKNDGEYSSASDFDDDTLALLAADHADNEPPEEHIGAAFADHYESLIVQRVLSAQMEKAEQNQRHTLFQTKCVVKERCCRMIIDGGSCNNLANSEMVEKLALSTKPHPHPYYIQWLNNSGKAKVTKLVHINFAIGNYHDVVECDVVPMQACNILLGRPWQFDRDSMHYGRSNQYSFLYHDKKIVLHPMSPEDILRDDVAKAAKSKCESDKKAQSDGKKPETINLKPRCLLATKSDINELIASPSVAYALVCKDALISLHDMQHSLAPAVANILQEYSDVFPKEVPPGLPPVRGIQHQIDLIPGASLPNRAPYRTNPEETKEIQRQVHELLDKGYVRESLSPCAVPVILVPKKDGSWRMCVDCRAINNITIRYRHPIPRLDDMLDELSGSIVFSKVDLRSGYHQIRMKLGDEWKTAFKTKFGLYEWLVMPFGLTNAPSTFMRLMNEVLRPFIGKFVVVYFDDILIYSKSMGEHFNHLRAVFNALRDARLFGFQHHCCTIECASKKGVPFTWGTSQENAFHMLKDKLTHAPLLQLPDFNKTFELECDASGIGLGGVLLQEGKPVAYFSEKLSGPVLNYSTYDKELYALVRTLETWQHYLWPKEFVIHSDHESLKHIRSQGKLNRRHAKWVEFIESFPYVIKHKKGKENIIADALSRRYTLLTQLDYKIFGLETIKDQYAHDADFNDVLLHCKDGRTWNKFVINDGFVFRANKLCIPASSVRLLLLQEAHGGGLMGHFGAKKTHDILASHFFWPQMRRDVGRFVARCATCQKAKSRLHPHGLYMPLPVPTVPWEDISMDFVLGLPRTKRGRDSIFVVVDRFSKMAHFIPCHKTDDASHIADLFFREIVRLHGVPNTIVSDRDTKFLSHFWRTLWAKLGTKLLFSTTCHPQTDGQTEVVNRTLSTMLRAVLKKNIKMWEECLPHIEFAYNRSLHSTTKMCPFQIVYGLLPRAPIDLMPLPSSEKLNFDAKQRAELMLKLHETTKENIERMNAKYKFAGDKGRRELNFEPGDLVWLHLRKERFPDLRKSKLMPRADGPFKVLAKINENAYKIDLPADFGVSSTFNVADLKPYLGEEDELESRTTQMQEGEDDEDINTIDTSTSPHVQHDGPITRARARQLNYQDECPRGRVDAHHKFAATIGDGVSVAKAQRLWTVVVGP

SEQ ID NO: 19300 - protein, 1431 aa, Oryza sativa
  Clone ID: TF_OSC28357j.C1.p1.fg
MATTDTTIAHIMDEQDDIKIKSSKCWNPIRPPATLLTSNGYRICIRPPFSAHEYLMESSRSPLSNRSGLISRLHLVWPQIQKQGAASPVMGQWACNFVWDPGPSGAHVGNRVDLHRQDQQPTESYHNSPKDRANNSLECREELRVHQVVSELSFLGLRKGIREHRLLHLRRDMTTSSCDAYEEVQKSLQNEKNDMFEMSLPSLANEEMADAATLSEEGIKGKLNGAEITQGIGLICTGKINNPRRGVSIAKAQHNVSLAPILQEMVSTNQSAFIRKRAIHDNFMYVQNPVKRLHRRKTPTLLLKLDISKAFDSLLLDFLGAVQGFPTSYLAYLFTLENYGRGMDSPATPMNFSPLLSLAPRNEPCYTKEENQDVTISSLSLKKLAPEFQDECPRGRVDAHHKFAATIGDGPENKDEEGASHSPRTKGTIQYFTRKVKQHTERLETDLQVTNEKIGQLESTQIFTNTKLTGLETAVARIDTSLAALVRHFDALNAGGNGGGNDDDIDGEYVEDNLEDEYIADTEQDDRDARDHRRLHNNRREETEDAAMARFLGGLNREIYDIVDYKDYTNMTRLFHLACKTSSWQTRTTPPAGRTASPSSTPATSRAAPPPSSDKSATKAAQPALSASSVASTGRTRDVQCHRCKGFGHVQRDCPSKRVLVVKNDGRPWQFDRDSMHHGRSNQYSFLYHDKKIVLHPMSPEDILRDDVAKAAKSKCESDKKAQSNGKKPETINLKPKCLLATKSDINELIASPSVVYALEYSDVFPKEVPPGLPPVRGIEHQIDLIPGASLPNRAPYRTNPEETKEIQRQVHELLDKRLDDMLDELSGSIVFSKVDLRSGYHQIRMKLGDEWKTAFKTKFGLYEWLVMPFGLTNAPSTFMRLMNEVLRPFIGKFVVVYFDDILIYSKSMGEHFNHLRAVFNALRDARLFGNLEKCTFCTDRVSFLGYVVTLQGIEVDQAKVEAIQSWPTPKTVSQVRSFLGLAGFYRRFVQDFSTIATPLNALTKKGVPFTWGTSQENAFHMLKDKLTHAPLLQLPDFNKTFELECDASGIGLGGILLQEGKPVAYFSEKLSGPVLNYSTYDKELYALVRTLETWQHYLWPKEFVIHSDHESLKHIRSQGKLNCRHAKWVEFIESFPYVIKHKKGKENIIADALSRRYTLLTQLDYKIFGLETIKDQYAHDADFNDVLLHCKDGRIWNKFVINGGFVFRANKLCIPASSVRLLLLQEAHGGGLMAHFGAKKTHDILASHFFWPQMRRDVGRAVLKKNIKMWEECLPHIEFAYNRSLHSTTKMCPFQIVYGLLPRPPIDLMPLPSSEKLNFDAKQHAELMLKLHETTKENIERMNAKYKFAGDKDFRVSPTFNIADLKLYLGEEDELESRTTQMQEGEDDEDINTIDTSTFPPCTPSIHPRRLHVQHDGPITRARARQLNYQ

SEQ ID NO: 19301 - protein, 471 aa, Oryza sativa
  Clone ID: TF_OSC29471j.C1.p1.fg
MAGPEDKDEEGASHSPRTKGIIQYFTRQVKQHTEGLDTDLQVTNEKIGQLESTQISTNTKLTGLETAVARIDTSLAALVRHFDALNAGGNGGGNDDDIDGEYVEDNLEDEYIADTEQDDRDAQDRRRLHNNRRDSSFDGKYDPDAYLSWEIAVDQKFACHEFLENTRVRAATSEFTDFASVWWIEHGKKNPNNMPQTWDALKRVMRARFVPSYDACDMLNRLQQLRQGAKSVEEYYQELQMGLLRCNLEETEDAAMARFLGGLNREIYDIVDYKDYTNMTRLFHLACKAEREVQGRRASAKANFSTGKTSSWQRTTPPAGRIASLSSTPTTSRAAPPPSSDKSATKAAQPAPSASSMASIGQMRDVQCHRCKGFGHVQRDCPSKRVLVVKNDGEYSSASDFDDDTLALLAADHADNEPPEEHIGAAFADHYESLIVQRVLSAQMEKAGAKSATHVVPNKVCRQRALLPHDH

SEQ ID NO: 19302 - protein, 339 aa, Oryza sativa
  Clone ID: TF_OSC400436j.C1.p27.gm
MERIQREEDSRGVDSDCRAAPTSDGRHDFMRTPIWDECPRGRVDAPHKFAATIGDAHQQLHHKPDYSLTGLVATAPIHLVPRLLTCGLLSPSCGQGPEDKDEEGASHSPRTKGIIQYFTRQVKQHTEGLDTDLQVTNEKIGQLESTQISTNTKLTGLETAVARIDTSLAALVRHFDALNAGGNGGGNDDDIDGEYVEDNLEDEYIADTEQDDRDARDRRRLHNNRRGRMRDVQCHRCKGFGHVQRDCPSKRVLVVKNDGEYSSAIDFDDDTLALLAADHADNEPPEEHIGAAFADHYESLIMQHVLSAQMEKAEQNQRHTLFQTKCVVKERCCRMIIDG

SEQ ID NO: 19303 - protein, 1394 aa, Oryza sativa
  Clone ID: TF_OSC400452j.C1.p7.fg
MGNLRGHEFKDWNGVVQYRGIHASKFVSFEGGIHASSGFKVWALQQLLAWKTQSLKGAISILGPTTNNSNGTHISPIVSKVLMWLKNTVGAGFSYFNTYSAVLCASFCRSEASSTVAAPLQCRSTRLQIFPGSYSLQAFGRMMRSLIELLRLFILYTCDLMPQDSIAGDGSGVDLVDECPCGQVDAHHKFAVTIGDGVSVAKAQRLWTVTNEKIGQLKSTQISTNTKLTVLETAVARIDTCLAALVRHFDALNAGGNGGGNDDDIDGKYVEDNLEDEYIADTEQDDRDARDRRRLHNNRREHGKKNPNNMPQTWDALKRVMRARFVPSYYTRDLLNRLQQLRQGAKSVEEYYQELQMGLLRCNLEETEDAAMARFLGGLNREIFDIVDYKDYTNMTRLFHLTCKAEREVQGRRASAKANFSAGKTSSWQTRTTPPAGRTASPSSTPTISRAAPPPSSDKSATKAAQPALSASSMASTGRTRDVQCHRCKGFGHVQRDCPSKRVLVVKKDGEYSSASDFDDDTLALLAADHADNEPPEEHIGAAFADHYESLIVQRVLGAQMEKAEQNQQHTLFQTKCVVKERCCRMIIDGGSCNNLASSEMVEKLALSTKPYPHPYYIQWLNNSGRPWQFDRDSMHHGRSNQYFFLYHDKKIVLHPMSPEDILRDDVAKATKSKCESDKKAQSDGKKPETINLKPKCLIATKSDINELIASPSVAYALEYSDVFPKEVPPGLPPVLPYPTVRHTGPTLRKPRRFSVKFMSCLIKGMYASLLVHVRFRFDDMLDELSGSIVFSKVDLRSGYHQIRMKLGDEWKIAFKTKFRLYEWLVMPFGLTNAPSTFMRLMNEVLRPFIGKFVVVYFDDILIYSKSMGEHFNHLRAVFNALRDARLFGNLEKCSFCTDRVSFLGYVVTPQGIEDFSTIAALLNALTKKGVPFTWGTSQENAFHMLKDKLTHTPLLQLPDFNKTFELECDASGIGLGGVLLQEGKPVAYFSEKLSGPVLNYSTYDKELYALVRTLETWQHYLWPKEFVIHSDHESLKHIRSQGKLNSRHAKWVEFIESFPYVIKHKKGKENIIADALSRRYTLLTQLDYKIFGLETIKDQYAHDADFNEAHGGGLMGHFGAKKTHDILASHFFWPQMRRDVGRAVLKKNIKMWEECLPHIEFAYNRSLHSTTKMCPFQIVYGLLPRAPIDLMPLPSSEKLNFDAKQCAELMLKLHETTKENIERMNAKYKFAGDKGRRELNFEPRDLVWLHLRKERFPDLRKSKLMPRADGPFKVLAKINENAYKLDLPADFGVSPTFNVADLKPYLGEEDEHESRTTQMQEGEDDEDINTIDTSTSPHVQHDGSITRARARQLNYQDECPRGRVDAHHKFASTIGDGVSVAKAQRLWTVVVGP

SEQ ID NO: 19304 - protein, 1163 aa, Oryza sativa
  Clone ID: TF_OSC400454j.C1.p10.fg
DECPCGQVDAHHKFAVTIGDGVSVAKAQRLWTVTNEKIGQLKSTQISTNTKLTVLETAVARIDTCLAALVRHFDALNAGGNGGGNDDDIDGKYVEDNLEDEYIADTEQDDRDARDRRRLHNNRREHGKKNPNNMPQTWDALKRVMRARFVPSYYTRDLLNRLQQLRQGAKSVEEYYQELQMGLLRCNLEETEDAAMARFLGGLNREIFDIVDYKDYTNMTRLFHLTCKAEREVQGPRANAKANFSAGRTRDVQCHRCKGFGHVQRDCPSKRVLVVKKDGEYSSASDFDDDTLALLAADHADNEPPEEHIGAAFADHYESLIVQRVLGAQMEKAEQNQQHTLFQTKCVVKERCCRMIIDGGSCNNLASSEMVEKLALSTKPYPHPYYIQWLNNSGRPWQFDRDSMHHGRSNQYFFLYHDKKIVLHPMSPEDILRDDVAKATKSKCESDKKAQSDGKKPETINLKPKCLIATKSDINELIASPSVAYALEYSDVFPKEVPPGLPPVLPYPTVRHTGPTLRKPRRFSVKFMSCLIKGMYASLLVHVRFRFDDMLDELSGSIVFSKVDLRSGYHQIRMKLGDEWKIAFKTKFRLYEWLVMPFGLTNAPSTFMRLMNEVLRPFIGKFVVVYFDDILIYSKSMGEHFNHLRAVFNALRDARLFGNLEKCSFCTDRVSFLGYVVTPQGIEDFSTIAALLNALTKKGVPFTWGTSQENAFHMLKDKLTHTPLLQLPDFNKTFELECDASGIGLGGVLLQEGKPVAYFSEKLSGPVLNYSTYDKELYALVRTLETWQHYLWPKEFVIHSDHESLKHIRSQGKLNSRHAKWVEFIESFPYVIKHKKGKENIIADALSRRYTLLTQLDYKIFGLETIKDQYAHDADFNEAHGGGLMGHFGAKKTHDILASHFFWPQMRRDVGRAVLKKNIKMWEECLPHIEFAYNRSLHSTTKMCPFQIVYGLLPRAPIDLMPLPSSEKLNFDAKQCAELMLKLHETTKENIERMNAKYKFAGDKGRRELNFEPRDLVWLHLRKERFPDLRKSKLMPRADGPFKVLAKINENAYKLDLPADFGVSPTFNVADLKPYLGEEDEHESRTTQMQEGEDDEDINTIDTSTSPHVQHDGSITRARARQLNYQDECPRGRVDAHHKFASTIGDGVSVAKAQRLWTVVVGP

SEQ ID NO: 19305 - protein, 1234 aa, Oryza sativa
  Clone ID: TF_OSC400675j.C1.p16.fg
MAGPEDKDEEAASHSPRTKGIIQYFTRQVKQHTEGLDTDLQVTNEKIGQLESTQISTNTKLTGLETAVARIDTSLAALVRHFDALNAGGNGGGNDDDIDGEYVEDNLEDEYIADTEQDDRDARDRRRLHNNRRGMGGRRRREVRNNDDAFSKIKFKIPPFDGKYDPDAYLSWEIAVDQKFACHEFPESTRVRAATSEFTDFASVWWIEHGKKNPNNMPQTWDALKRVMRARFVPSYYARDLLNRLQQLRQGAKSVEEYYQELQMGLLRCNLEETEDAAMARFLGGLNREIYDIVDYKDYTNMTRLFHLACKAEREVQGRRASAKANFSAGRMRDVQCHRCKGFGHVQRDCPSKRVLVVKNDGEYSSASDFDDDTLALLAADHADNEPPEEHIGAAFADHYESLIVQRVLSAQMEKAEQNQRHTLFQTKCVVKERCCRMIIDGGSCKNLASSEMVEKLALSTKPHPHPYYIQWLNNSGKAKVTKLVHINFAIGNYHDVVECDVVPMQACNILLGRPWQFDRDSMHHGRSNQYSFLYHDKKIVLHPMSPEDILRDDVAKAAKSKCESDKKAQSDGKKPETINLKPKCLLATKSDINELIASPSVAYALEYSDVFPKEVPPGLPPVRGIEHQIDLIPGASLPNRAPYRTNPEETKEIQRQVHELLDKGTFMRLMNEVLRPFIGKFVVVYFDDILIYSKSMGEHFNHLRAVFNALRDARLFGNLEKCTFCTDRVSFLGYVVTPQGIEVDQAKVEAIQSWPTPKTVSQVRSFLGLAGFYRRFVQDFSTIAAPLNALTKKGVPFTWGTSQENAFHMLKDKLTHAPLLQLPDFNKTFELECDASGIGLGGVLLQEGKPVAYFSEKLSGPVLNYSTYDKELYALVRTLETWQHYLWPKEFVIHSDHESLKHIRSQGKLNRRHAKWVEFIESFPYVIKHKKGKENIIADALSRRYTLLTQLDYKIFGLETIKDQYAHDADFNDVLLHCKDGRTWNKFVINDGCEEMLAGSLLAALHVKRLSHAYIHMIVYGLLPRAPIDLMPLPSSEKLNFDAKQRAELMLKLHETTKENIERMNAKYKFAGDKGRRELNFEPRDLVWLHLRKERFPDLRKSKLMPRADGPFKVLAKINENAYKIDLPADFGVSPTFNVADLKPYLGEEDELESRTTQMQEGEDDEDINTIDTSMSPHVQHDGPITRARARQLNYQDECPRGRVDAHHKFAATIGDGVSVAKAQRLWTVVVGP

SEQ ID NO: 19306 - protein, 1619 aa, Oryza sativa
  Clone ID: TF_OSC400675j.C1.p24.fg
MAGPEDKDEEGASHSPRTKGIIQYFTRQVKQHTEGLDTDLQVTNEKIGQLESTQISTNTKLTGLETAVARIDTSLAALVRHFDALNAGGNGGVNDDDIDGEYVEDNLEDEYIADTEQDDRDARDRRRLHNNRRGMGGRRRREVCNNDDAFSKIKFKIPPFDGKYDPDAYLSWEIAVDQKFACHEFPESTRVRAATSEFTDFASVWWIEHGKKNPNNMPQTWDALKRVMRARFVPSYYARDLLNRLQQLRQEETEDAAMARFLGGLNREIYDIVDYKDYTNMTRLFHLACKAEREVQGRRASAKANFSAGKTSSWQTRTTPLAGRTASPSSTPTTSRAAPPPSSDKSATKAAQPAPSASSMASTGRMRDVQCHRCKGFGHVQRDCPSKRVLVVKNDGEYSSASDFDDDTLALLAADHADNEPPEEHIGAAFADHYESLIVQRVLSAQMEKAEQNQRHTLFQTKCVVKERCCRMIIDGGSCNNLASSEMVEKLALSTKPHPHSYYIQWLNNSGKAKVTKLVHINFAIGNYHDVVECDVVPMQACNILLGRPWQFDRDSMHHGRSNQYSFLYHDKKIVLHPMSPEDILRDDVAKAAKSKCESDKKAQSDGKKPETINLKPKCLLATKSDINELIASPSVAYALVCKDALISLHDMQHSLPPAVANILQEYSDVFPKEVPPGLPPVRGIEHQIDLIPGASLPNRAPYRTNPEETKEIQRQVHELLDKGYVRESLSPCAVPVILVPKKDGSWRMCVDCRAINNITIRYRHPIPRLDDMLDELSGSIVFSKVELRSGYHQIHMKLGDEWKTAFKTKFGLYEWLVMPFGLTNAPSTFMRLMNEVLRPFIGKFVVVYFDDILIYSKSMGEHFNHLRAVFNALRDARLFGNLEKCTFCTDRVSFLGYVVTPQGIEVDQAKVEAIQSWPTPKTVSQVRSFLGLAGFYCRFVQDFSTIAAPLNALTKKGVPFTWGTSQENAFHMLKHKLTHAPLLQLPDFNKTFELECDASGIGLGGVLLQEGKLVAYFSEKLSGPVLNYSTYDKELYALVRTLETWQHYLWPKEFVIHSDHESLKHIRSQGKLNRRHAKWVEFIESFPYVIKHKKGKENIIANALSRRYTLLTQLDYKIFGLETIKDQYAHDADFNDVLLHCKDGRTWNKFVINDGFVFRANKLCIPASSVRLLLLQEAHGGGLMGHFGAKKTHDILASHFFWPQMRRDVGRFVARCATCQKAKSRLHPHGLYMPLPVPTVPWEDISMDFVLGLPRTKRGRDSIFVVVDRFSKMVHFIPCHKTDDASHIADLFFREIVRLHGVPNTIVSDRDTKFLSHFWRTLWAKLGTKLLFSTTCHPQTDGQIEVVNRTLSTMLRAVLKKNIKMWEECLPHIEFACNRSLHSTTKMCPFQIVYSLLPRAPIDLMPLPSSEKLNFDAKQRAELMLKLHETTKENIERMNAKYKFAGDKGRRELNFEPGDLVWLHLRKERFPDLRKSKLMPRADGPFKVLAKINENAYKIDLPADFGVSPTFNVADLKPYLGEEDELESRTTQMQEGEDDENINTIDTSTSPHVQHDGPITRARARQLNYQVSSFLSSYSSSLYPGDACTRVLLRNDGEDPKGRGFAWGGFGLQGSANF

SEQ ID NO: 19307 - protein, 2447 aa, Oryza sativa
  Clone ID: TF_OSC401054j.C1.p75.fg
MAGPEDKDEEGASHSPRTKGIIQYFTRQVKQHTEGLDTDLQVTNEKIGQLESTQISTNTKLTGLETAVARIDTSLAALVRHFDALNAGGNGGGNDDDIDGEYVEDNLEDEYIADTEQDDRDARDRRRLHNNRRGMGGRRRREVRNNDDAFSKIKFKIPPFDGKYDPDAYLSWEIAVDQKFACHEFPESTRVRAATSEFTDFASVWWIEHGKKNPNNMPQTWDALKRVMRARFVPSYYARDLLNRLQQLRQGAKSVEEYYQELQMGLLRCNLEETEDAAMARFLGGLNREIYDIVDYKDYTNMTRLFHLACKAEREVQGRRASAKANFSAGKTSSWQTRTTPPAGRTASPSSTPTTSRAAPPPSSDKSATKAAQPAPSASSMASTGRMRDVQCHRCKGFGHVQRDCPSKRVLVVKNDGEYSSASDFDDDTLALLAADHADNEPPEEHIGAAFADHYESLIVQRVLSAQMEKAEQNQRHTLFQTKCVVKERCCRMIIDGGSCNNLASSEMVEKLALSTKPHPHPYYIQWLNNSGKAKVTKLVHINFAIGNYHDVVECDVVPMQACNILLGRPWQFDRDSMHHGRSNQYSFLYHDKKIVLHSMSPEDILRDDVAKAAKSKCESDKKAQSDGKKPETINLKPKCLLATKSDINELIASPSVAYALVCKDALISLHDMQHSLPPAVANILQEYSDVFPKEVPPGLPPVRGIEHQIDLIPGASLPNRAPYRTNPEETKEIQRQVHELLDKGYVRESLSPCAVPVILVPKKDGSWRMCVDCRAINNITIRYRHPIPRLDDMLDELSGSIVFSKVDLRSGYHQIRMKLGDEWKTAFKTKFGLYEWLVMPFGLTNAPSTFMRLMNEVLRPFIGKFVVVYFDDILIYSKSMGEHFNHLRAVFNALRDARLFGNLEKCTFCTDRVSFLGYVVTPQGIEVDQAKVEAIQSWPTPKTVSQVRSFLGLAGFYRRFVQDFSTIAAPLNVLTKKGVPFTWGTSQENAFHMLKDKLTHAPLLQLPDFNKTFELECDASGIGLGGVLLQEGKPVAYFSEKLSGPVLNYSTYDKELYALVRTLETWQHYLWPKEFVIHSDHESLKHIRSQGKLNRRHAKWVEFIESFPYVIKHKKGKENIIADALSRRYTLLTQLDYKIFGLETIKDQYAHDADFNDVLLHCKDGRTWNKFVINDGFVFRANKLCIPASSVRLLLLQEAHGGGLMGHFGAKKTHDILASHFFWPQMRRDVGRFVARCATCQKAKSRLHPHGLYMPLPVPTVPWEDISMDFVLGLPRTKRGRDSIFVVVDRFSKMAHFIPCHKTDDASHIADLFFREIVRLHGVPNTIVSDRDTKFLSHFWRTLWAKLGTKLLFSTTCHPQTDGQTEVVNRTLSTMLRAVLKKNIKMWEECLPHIEFAYNRSLHSTTKMCPFQIVYGLLPRAPIDLMPLPSSEKLNFDAKQRAELMLKLHETTKENIERMNAKYKFAGDKGRRELTFEPGDLVWLHLRKERFPDLRKSKLMPRADGPFKVLAKINENAYKIDLPADFGVSPTFNVADLKPYLGEEDELESRTTQMQEGEDDEDINTIDTSTSPHIQHDGPITRARARQLNYQDECPRGRVDAHHKFAATIGDDRATNPSGFASYGLYEFTVMSFGLTNAPAFFMNLMNKVFMEYLDKFVVVFIDDILVYSQSEEDHQHHLRLVLGKLREHQLYAKLSKCEFWLSEVKFLGHVISAKGVAVDPETVTAVTDWKQPKTVTQIRSFLGLAGYYRRFIENFSKIARPMTQLLKKEEKFVWSPQCEKAFQTLKEKLVSSPVLILPDTRKDFMVYCDASPQGLGCVLMQEGHVVAYASRQLWPHEGNYPTHDLELAAVVHALKIWRHYLIGNRCEIYTDHKSLKYIFTQSDLNLRQRRWLELIKDYDVGIHYHPGKANVVADALSRKSHCNTLGVRGIPPELNQQMEALNLSIVSRGFLATLEAKPTLLDQIREAQKNDPDMRGLLKNMKQGKAAGFIEDEHGTLWNRNRVCVPDVRELKQLILQEAHESPYSIHPGSTKMYLDLKEKYWWVSMKREIAEFVALCDVCQRVKAEHQRPAGLLQPLQVPEWKWDEIGMDFITGLPKTQGGYDSIWVVVDRLTKVARFIPVKTTYGGNKLAELYFARIVSLHGVPKKIVSDRESQFTSHFWKKLQEELGTRLNFSTAYHPQTDGQTERLNQILEDMLHACVLDFGKTWDKSLPYAEFSYNNSYQASIQMAPYEALYGRKCRTPLLWDQVGESQVFGTDILREAEAKVRTIWDNLKVAQSRQKSYADNRRRNLEFAVDDFVYLRVTPLRGVHRFQTKGKLAPRFVGPFRIIARRGEVAYQLELPASLGNVHDVFHVSQLKKCLRVPSEQADSEQIEVREDLTYVERPVKILDTMERRTRNRVIRFCKVQWSNHAEEEATWERENELKAAHPDLFASSSESRGRDSV

SEQ ID NO: 19308 - protein, 1475 aa, Oryza sativa
  Clone ID: TF_OSC401286j.C1.p4.fg
MSNEVNHVGKAPMFNGTNYSTWKIKMSTHLKAMSFHIWSIVDVDFAITGTPLTEIDHRNLQLNAQAMNALFNSLSQEEFDRVSNLETAYEIWNKLAEIHEGTSEYKDAKLHFLKIQYETFSMLPHESVNDMYGRLNVIVNDLKGLGANYTDLEVAQKMLRALPEKYETLVTMLINSDMSRMTPASLLGKINTNDMYKLKKKEMEEASPSKKCIALQAEVEDKGKGKVNEVNEDLEEEIALLDRRFNDLLGRRKERGRGSNSNRRRNKRPNKTLSNLKCFECGEKGHFASKCSSKDDDGDKSSKKKSGGYKLMKKLKKEGKKIEAFIGEWDSNEESSASSGSEEEGGDDASSKKKKMAVVAIKEAPSLFAPICLMAKGSSKVTSLSDSESDDDCDDVSYDELVSMFEEFHAYSEKEIVNFKALKKDHASLEILYEELKTSHERLTISHEKLKKAHENLLFTTQHGALIDVGISCDLLDDSATCHIAHVASSSISTSCDDPVDMPSSSSSSCISIYDASLVVENNELKEQVAKLNKSLERCFKGRLIMVALLLDMWVPLYSVVNYRTGGSHWVLDSGCTQHMTGDRAMFTTFEEGGKEQEKVTFGDNSKGKGVRLTKFESRCDEGFLIGYASNSKAYRVYNKNKGDEGLMRAMKNMSIGDVKPIEVEDKPSTSTQDEPSTSATPSQAQVEVEEEKAQDPPMPPRIHTALSKDHPIDQVLGDISKGVQTRSRVASICEHYSFVSCLEPKHIDEALCDPDWMNAMHEELNNFARNKVWTLVERPRNHNVIGTKWVFRNKQDENGLVVRNKARLVAQGFTQVEGLDFGETFAPVARLEVIRILLAFASCFDIKLFQMDVKSAFLNGKIAELVFVEQPPGFEDPKNPNHVYKLSKALYGLKQAPWAWYERLRDFLLSKDFKIGKVDTTLFTKIIGDDFFVCQIYVDDIIFGSTNEVFCKEFGDMISREFEMSTIGELSFFLGLQIKQLKDGTFVSQTKYIKDLLKRSGLEDAKPIKTPMATNGHLDLNEGVMPPRTCHGRRAPTPDAVSEPEESSGDDYAQSDEEVEANVEGASEEASGDDNSGSGEDEDEGSDNMHIDPSIQFVVNMRNPSQYTILRHHDQFLRPRDTPDPRFHTAFQKSVYEQDLFKTVGIDWIVTLKQDYNEDLIRQFYVTVWVAGDYSEMKWMSDTLHCSISRRQFRRLLNIRLDFGDDLHEKHTHNLLSIDYLSQFYEDGVRYTHGKVAGLRTIPSVVNRIVRATILPRLGNNDDIRGVAWHVIDAIIQGRQFDIVSLMMQEIAISKGTFTQGIYYAPYIMRLIQDKLGAAGQNLKKHKQYKPRLQLGAPCAPRAAPSSHPGASSSSAPLPPPPPGYDPNTFFHPQYAYFGMQPNEYFNPVLGAINTLSESIQRLSTGHEALHEDVRGLRTDVGDLNASVGRLHTRVGTLDSRVQMLESSQAFVYHRSHDAPYPSTLVRPPSPPQE

SEQ ID NO: 19309 - protein, 1667 aa, Oryza sativa
  Clone ID: TF_OSC401345j.C1.p7.fg
MAGPEDKDEEGASHSPRTKGIIQYFTRQVKQHTEGLDTDLQVTNEKIGQLESTQISTNTKLTGLETAVARIDTSLAALVRHFDALNAGGNGGGNDDDIDGEYVEDNLEDEYIADTEQDDRDARDRRRLHNNRRGMGGRRRREVRNNDDAFSKIKFKIPPFDGKYDPDAYLSWEIAVDQKFACHEFPESTRVRAATSEFTDFASVWWIEHGKKNPNNMPQTWDALKRVMRARFVPSYYARDLLNRLQQLRQEETEDTAMARFLGGLNREIYDIVDYKDYTNMTRLFHLACKTSSWQTRTTPPAGRTVSPSSTPTTSRAAPPPSSDKSATKAAQPAPSASSMASTGRMRDVQCHRCKGFGHVQRDCPSKRVLVVKNDGEYSSAIDFDDDTLALLAADHADNEPPEEHIGAAFADHYESLIMQHVLSAQMEKAEQNQRHTLFQTKCVVKERCCRMIIDGGSCNNLASSEMVEKLALSTKPHPHPYYIQWLNNSGKAKVTKLVHINFAIGNYHDVVECDVVPMQACNILLGRPWQFDRDSMHHGKKIVLHPMSPEDILRDDVAKAAKSKCESDKKAQSDGKKPETINLKPKCLLATKSDINELIASPSVAYALEYSDVFPKEVPPGLPPVRGIEHQIDLIPGASLPNRAPYRTNPEETKEIQRQVHELLDKGYVRESLSPCAVLVILVPKKDGSWRMCVDCRAINNITIRYRHPIPRLDDMLDELSGSIVFSKVDLRSGYHQIRMNLGDEWKTAFKTKFGLYEWLVMPFGLTNAPTTFMRLMNEVLRPFIGKFVVVYFDDILIYSKSMGEHFNHLRAVFNALRDARLFGNLEKCTFCTDRVSFLGYVVTPQGIEVDQAKVEAIQSWPTPKTVSQVRSFLGLAGFYRRFVQDFSTIAAPLNALTKKGVPFTWGTSQENAFHMLKDKLTHAPLLQLPDFNKTFELECDASGIGLGGVLLQEGKPVAYFSEKLSGPVLNYSTYDKELYALVRTLETWQHYLWPKEFVIHSDHESLKHIHSQGKLNRRHAKWVEFIESFPYVIKHKKGKENIIADALSRRYTLLTQLDYKIFGLETIKDQYVHDADFNDEAHGGGLMGHFGAKKTHDILASHFFWPQMRRDVGRAVLKKNIKMWEECLPHIEFAYNRSLHSTTKMCPFQIVYGLLPRAPIDLMPLPSSEKLNFDAKQRAELMLKLHETTKENIERMNAKYKFAGDKGRRELNFEPGDLVWLHLRKERFPDLRKSKLMPRADGPFKVLAKINENAYKIDLPADFGVSLTFNVADLKPYLGEEDEFESRTTQMQEGEDDEDINTIDTSMSSHVQHDGPITRARERQLNYQWDKPDHSSDPHPLTGDGDFGDREDKGQICNYISQNQSAFVRKRAIHDNFLYVQNMVKLLHRTKKQSLFIKIDIAKAFDTVNWSYLLEILRQFGFGNRWLNWITNLFSTSSSQVLLNGSPGQKINHARGLRQGDPLSPMLFILAMKPFHRILKEAENVNVLAPLGVRNGRFRCSLYADDVAVFANPKQEELTALSHILACFAQASGLHTNINKTEIYPIRCEGIDLQNLLAGWPGQTKYFPCKYLGLPLHFRKLRKIDFLPLIDKIGSRLPGWKGRFFTSAGRQALVSSVLSAMPTHHLTVLQAPKWVFKRIDRFRRSFLWKGEDPDHSNPGDSLINW

SEQ ID NO: 19310 - protein, 1448 aa, Oryza sativa
  Clone ID: TF_OSC411423j.C1.p3.fg
MDCVVQGVLSQLLSEMPRYKPEYLFGVEGFVQELRTMSFVIGFGTAPFYAQIPHDRHEEKCRVKVTLNSNSEDIPSVMFEAGGRNYIHSCQEVARIAIGELRDRYSDQLADTEYRYHPRQPQGSDRGSYLETEGVENDVTTRHLVEMLWAMDETRAETVLAAQDREDRNRGKICKLEDKVDRLEKELAALKGEAPPQKARIRLTARKRALFVPRYQLAPKVRVVEKEVTPALADPPVIIISDDEEEESKRNHSKIEWVATQDDEDEPNEPSIDLRCSEELECHFPPVSLLVPCPCQMVNTRSNGNGPNNNNNNNNNNNEGNPTLAQVLAQQTQLMNMMMQQLQNQQNQGNNHAPPQNKLAEFLHVRPPIFSSTTNPVEAGDWLHAIEKKLDLLQCTDQEKTHIPSGVVSLKKKEFRSLTQGSHSVTEYLYEFNRLARYAPEDVRNDEERQEKFLEGLNDELSCPLMTGDYPDFQKLVDKAIRQEDKYNRMEQKKRRIAQFKTQQGNNQKPRLTLGPQSMPQGGSSSVVRPQRQFFNNNAGNNIRNQAPCPVAASTQQQPAKREQGSKPVVCFSCGDPGHYADKCSKPRRVKVVPAQSNTTAPAPKARVNHVAAAEAQDAPDVILSTFLVNSVPATVLFDSGATHSFLSMSFAGNHGMEVEDLRRPLMVSTPSNQALSLQRSPSVRIEIQGVPFLANLILLESKDLNVILGMDWLARHKGVIDCANRKVTLTSNDGRVVTVHALSSEFLRSRLNQITLEEIPIVREYPDVFPDDLPGMPPKRDIEFRIDLVPGTTPIHKRPYRMAANELAEVKRQVDDLLQKGYIRPSSSPWGAPLKGATVFSKIDLRSGYHQLRIKEEDILKTAFTTRYGLFECTVMSFGLTNAPAFFMNLMNKVFMEYLDKFVVVFIDDILIYSRTKEEHVEHLRLALEKLREHQLYAKFSKCEFWLSEVKFLGHVISAGGVAIDPSNVESVTNWKQPKTVSEIRSFLGLAGYYRRFIENFSKIAKPMTRLLQKDVKYKWSEECEQSFQELKNRLISAPILILPDPKKGFQVYCDASKLGLGCVLMQDGKVVAYASRQLRPHEKNYPTHDLELAAVVHALKIWRHYLFGTRTEVYTDHKSLKYIFTQPDLNMRQRRWLELIKDYDMGIHYHPGKANVVADALSRKGYCNATEGRPLPFELCKEFERLNLGIVRRGFLAALEAKPTLIDQVREAQINDPDIQEIKKNMRRGKAIGFLEDEQGTVWLGERIFVPDNKDLKDAILKEAHDTLYSIHPGSTKMYQYLKERFWWASMKREIAEYVAVCDVCQRVKAEHRKPAGLLQPLKIPEWKWEEIGMDFITGLPRTSSGHDSIWVIVDRLTKVAHFIPVKTTYSGSRLAELYMARIVCLHGVRKKIVSDRGSQFTSNFWKKLQEEMGSKLNFSTAYHPQTDGQTERVNQILEDMLRVCV

SEQ ID NO: 19311 - protein, 932 aa, Oryza sativa
  Clone ID: TF_OSC423400j.C1.p4.gm
MAAGWMGKVVTRVKCDSQVLRPSVYDHCRTGHPTATNKPEDPTNEDDENEHKNVQAANAILSALSGSEFNRVDDIESAKVIWDTLRNLHEGTDSVRESKVEILKGQFERFVILDGESPSDMYDRLNKIVNEIKGFGSKDMIDEVVVKKMIRAITPRNSILVTIIRERPDYKTLTPYDLLGHTLAHDMLKQESKEVIQFINQSSTTSIKKEDLALKGSSSKHYSNKSSGRHSARVCYMCKEPEHFIADCPHINEEKKKIEKKVEKKEKHKHSKHDHYGQSHLGMIFGSDSESSSSNEEGVATFAVKPSSAPRLFNYSSDEDAPICLMAKKPKVPSSLKSFNVDLVSDEEDDVQDEVMDEELFKSITKESLPHLSEFLGRIEDQYATLERQEALLIREKERSHELKGPQIGTTATFTELGKREKVASVNALCKLFDQPTAIQQWSTVTALISSYATARRRGHGSFPSAASHGCRSGGSRLSACGGAARRRRLWQRHLLPLLRRRQHPGGGPFYLVRQTTASEAVKAATAATADRSSSVVSDGEYYALAQCRADVPAGDCSRCLAACLGVIGGSGDDLCEKAAVRYDDRCLLRFAKGDDFTGFDVDEHTATVFDGGRSGLTVAEEVPTRLLATVAAAAPASRSRTAAGIASYGGGGSLYGLAQCTTQIPAPDCARCLRGALSRLSEDFNSTAAGMQLLRSSCMLRYGSSLFFNQSSPLLPVAHLAIAPAGGGAGPPAAAPPSPGHRPARARTIAISAGQPGYQTLVNSTGKFAERNKLGSGGCGTVYKGILHNNEEIAVKKLTRKDLREVEREVSLVAQLQHENIVKFLGHCFRHDKMFLVYEYLSNGTLSRYFKSDCQKLDWPKWLNIIRGIARGLSYLHRDSGKDIVHRDLKPSNVLLIPTSMQRLLTLILQDHTTGTKAMRALKREQAPSMF

SEQ ID NO: 19312 - protein, 1629 aa, Oryza sativa
  Clone ID: TF_OSC900333j.C1.p19.fg
MAGLEDKDEEGASHSPRTKGIIQYFTRQVKQHTEGLDTDLQVTNEKIGQLESTQISTNTKLTGLETAVARIDTSLAALVRHFDALNAGGNGGGNDDDIDGEYVEDNLEDEYIADTEQDDRDARDRRRLHNNRRGMGGRRRREVRNNDDAFSKIKFKIPPFDGKYDPDAYLSWEIAVDQKFACHEFPENTRVRAATSEFTDFASVWWIEHGKKNPNNMPQTWDALKRVMRARFVPSYYARDLLNRLQQLRQDAKSVEEYYQELQMGLLRCNLEETEDAAMARFLGGLNREIYDIVDYKDYTNMTRLFHLACKAEREVQGRRASAKANFSASKTSSWQTRTTPPAGRTTSPSSTPTTSRAAPPPSGDKSAIKAAQPAPSASSMASTGRMRDVQCHRCKGFGHVQRDCPSKRVLVVKNDGEYSSASDFDDDTLALLAADHADNEPPEEHIGAAFADHYESLIVQRVLSAQMEKAEQNQRHTLFQTKCVVKERCCRMIIDGGSCNNLASSEMVEKLALSTKPHPHPYYIQWLNNSGKAKVTKLVHINFAIGNYHDVVECDVVPMQACNILLGRPWQFDRDSMHHGRSNQYSFLYHDKKIVLHPMSPEDILRDDVAKAAKSKCESDKKAQSDGKKPETINLKPRCLLATKSDINELIASPSVAYALVCKDALISLHDMQHSLPPAVANILQEYSDVFPKEVPPGLPPVRGIEHQIDLIPGASLPNRAPYRTNPEETKEIQRQVHELLDKGYVRESLSPCAVPVILVPKKDGSWRMCVDCRAINNITIRYRHPIPRLDDMLDELSGSIVFSKVDLRSGYHQIRMKLGDEWKTAFKTKFGLYEWLVMPFGLTNAPSTFMRLMNEVLRPFIGKFVVVYFDDILIYSKSMGEHFNHLRAVFNALRDARLFGNLEKCTFCTDRVSFLGYVVTPQGIEVDQAKVEAIQSWPTPKTVSQVRSFLGLAGFYRRFVQDFSTIAAPLNALTKKGVPFTWGTSQENAFHMLKDKLTHAPLLQLPDFNKTFELECDASGIGLGGVLLQEGKPVAYFSEKLSGPVQNYSTYDKELYALVRTLETWQHYLWPKEFVIHSDHESLKHIRSQGKLNRRHAKWVEFIESFPYVIKHKKGKENIIADALSRRYTLLTQLDYKIFGLETIKDQYAHDADFNDVLLHCKDGRTWNKFVINDGFVFRANKLCIPASSVRLLLLQEAHGGGLMGHFGAKKTHDILASHFFWPQMRRDVGRFVARCATCQKAKSRLHPHGLYMPLPVPTVPWEDISMDFVLGLPRTKRGRDSIFVVVDRFSKMAHFIPCHKTDDASHIADLFFREIVRLHGVPNTIVSDRDTKFLSHFWRTLWAKLGTKLLFSTTCHPQTDGQTEVVNRTLSTMLRAVLKKNIKMWEECLPHIEFAYNRSLHSTTKMCPFQIVYGLLPRAPIDLMPLPSSEKLNFDAKQRAELMLKLHETTKENIERVNAKYKFAGDKGRRELNFEPGDLVWLHLRKERFPDLRKSKLMPRADGPFKVLAKINENAYKIDLPADFGVSSTFNVADLKPYLGEEDELESRTTQMQEGEDDEDINTIDTSTSPHVQHDGPITRARARQLNYQDECPRGRVDAHHKFAATIGDGVSVAKAQRLWTVVVEP

SEQ ID NO: 19313 - protein, 62 aa, Oryza sativa
  Clone ID: TF_OSC30329j.C1.p1.np
LSGLKRLCNNSKEPGHFSRDCPQPKRNLRHHSGHYARRRQVTRLVVTGANAVPVRPHVNSNP

SEQ ID NO: 19314 - protein, 1386 aa, Oryza sativa
  Clone ID: TF_OSC401329j.C1.p3.fg
MAGTSSSSNTSTGGYSLMGCIKDIPTLKGDNYAEWKRKLDLAFILGEVDWVLTTPCPIEPTELVRGENESDADWQKRQRDNAPLVMSYDIEQKKWSLANKKCLAVVKNTIEPTILGSIPECDAVSEYLERIKSQFTGSSKTYATQLIKQLVTERYHGGGVRDHILRMSNMASKLKPMDLGITDDFLVHLVMASLPKQFDNFIVNYNISPEKWNFEKLIANCVQEEERIKESNGGSINYVKDKKKNHKSPTSKGKQSQHLPQQQQFAVEKDQCLHCKKTGHYKRDCPDFLKMIMAKKGENIITFVNESHYVGYSRSTWWIDSGATIHACNCLKAFRSTRTTQRRESTIRVANGVEEKVEAVGDFPLELANGFILLLRDVFYVPSLQRNLISVSKLDFDGYDCRFGSGKCELWHNNACIGLAVLRDELYLLSLSENVNVVSSLTKENKKRKGRIERLVKNEILPPLEFSDLEQCIECIKGKFVKSIKKGAKRSAGILEIIHTDICGPFPVKSVDGYDSFITFTDDYSRYGYIYPIKERSEALDKFKIFKAEVENQHDIKIKVVRSDRGGEYYGRHTPYGQVPGPFARFLLENGIVAQYSTPGEPQQNGVAERRNRTLMDMVRSMMSYSTLPLGLWMEALKTAIHILNRVPSKSVPKTPYELWTGRVPSLTHLRVWGSPAEAKVFNPNIGKLDPKTVSCHFIGYPERSKGYRFYCPNSYTKFVETRHAVFLEDEMIRGSSVVREIDLEERRVSVPAPSTQEPFFSLPADVVPAMPVIEVPAPVVTLPVATMNESEEPVIQDSTEMVATPEEELQQSQIDNVPVQETHQEPQVQDVPNVQAPRRSERVRRSAIRDDYKVYNIEESHMEDDPTSYEEAMRSARSSEWLESMKDEMESMKLNDVWDLEEIPKGAKTVGCKWVYKTKYDSRGNIEKFKARLVAKGFTQREGIDYNETFSPVSCKDSFRIIMALVAHYDLELHQMDVKTAFLNGDLEEKVYMAQPKGFVMKGNENMGCRLKRSIYGLKQASRQWYLKFDGTIKKFGFQENVEDNCIYSKFKNGRFIFLILYVDDILLASSDVSLLQETKKFLSSNFDMKDLGEASYVLGIEIHRDRTKYALGLSQKTYIEKVLKKFNMYRCSATPAPIMKGEKYGASQCPRNQYELNEMKTKPYASAVGSLQYAQVCTRPDLAFVTGLLGRFQSNPGLEHWKLVKKVLRYLQGTKGLMLSYRRSESLQIVGYSDSDFAKDNTKSTSGYVFTLAGGAISWKSSKQTITAGSTMYAEFIACYEATGQVNWLKKFIPGLKVVDSIEKPLKLYCDNEPAVMYAHNNQSSGAAKHIDIKYYVVKDKVRDQTISLEHIKTERMLADPLTKGLPPNVFKEHVAGMGLREAL

SEQ ID NO: 19315 - protein, 1296 aa, Oryza sativa
  Clone ID: TF_OSC411956j.C1.p3.fg
MATPSTRSRGYSLMGCIKDIPTLKGDNYAEWKRKLDLAFILGEVDWVLTTPCPIELAELIRGENESDADWQKRQRDNAPLVMSYDIEQKKWSLANKKCLAVVKNTIEPTILGSIPECDAVSEYLERIKSQFTGSSKTYATQLIKQLVTERYHGGGVRDHILRISNMASKLKPMDLGITDDFLVHLVMASLPKQFDNFIVNYNISPEKWNFEKLIANCVQEEERINESNGGSINYVKDKKKNHKSPTSKGKQSQHLPQQQQFAVEKDQCLHCKKTGHYKRDCPDFLKMIMAKKGENIITFVNESHYVGYSRSTWWIDSGATIHACNCLKAFRSTRTTQRRESTIRVANGVEEKVEAVGDLPLELANGFILLLRDVFYVPSLQRNLISVSKLDFDGYDCRFGSGKCELWHNNACIGLAVLRDELYLLSLSENVNVVSSLTKENKKRKGRIERLVKNEILPPLGFSEQCIECIKGKFVKSIKKGAKRSAGILEIIHTDICGPFPVKSVDGYDSFITFTDDYSRYGYIYPIKERSEALDKFKIFKAEVENQHDIKIKVVRSNRGGEYYGRHTPYGQVPGPFARFLLENGIVAQYSTPGEPQQNGVAERRNRTLMDMVRSIMSYSTLPLGLWMEALKTAIHILNRVPSKSVPKTPYELWIGRVPSLTHLRVWGSPTEAKVFNPNIGKLDPKTVSCHFIGYPERSKGYRFYCPNSYTKFVETRHAVFLEDEMIRGSSVVREIDLEERRVSVPAPSTQEPFFSLPADVVPAMPVIEVPTPVVTPPVATMNESEEPVIQDSTEMVATPEEELQQPQIDNVPVQETHQEPQVQDVPNVQAPRRGNIEKFKARLVAKGFTQREGIDYNETFSPVSCKDSFRIIMALVAHYDLELHQLDVKTAFLNGDLEEKVYMAQPKGFVMKGNENMGCRLKRSIYGLKQASRQWYLKFDGTIKKFGFQENVEDNCIYSKFKNGRFIFLILYVDDILLASSDVSLLQETKKFLSSNFDMKDLGEASYVLGIEIHRDRTKYALGLSQKTYIEKVLKKFNMYRCSATPAPIMKGEKYGASQCPRNQYELNEMKTKPYASAVGSLQYAQVCTRPDLAFVTGLLGRFQSNPGLEHWKLVKKVLRYLQGTKGLMLSYKRSESLQIVGYSDSDFAKDNTKSTSGYVFTLAGGAISWKSSKQTITAGSTMYAEFIACYEATGQVNWLKKFIPGLKVVDSIEKPLKLYCDNEPAVMYAHNNQSSGAAKHIDIKYYVVKDKVRDQTISLEHIKTERMLADPLTKGLPPNVFKEHVAGMGLREAL

SEQ ID NO: 19316 - protein, 1693 aa, Oryza sativa
  Clone ID: TF_OSC414037j.C1.p3.fg
MAGTSSSSNTSTGGYSLMGCIKDIPTLKGDNYAEWKRKLDLAFILGEVDWVLTTPCPIEPTELVRGENESDADWQKRQRDNAPLVMSYDIEQKKWSLANKKCLAVVKNTIEPTILGSIPECDAVSEYLERIKSQFTGSSKTYATQLIKQLVTERYHGGGVRDHILRMSNMASKLKPMDLGITDDFLVHLVMASLPKQFDNFIVNYNISPEKWNFEKLIANCVQEEERIKESNGGSINYVKDKKKNHKSPTSKGKQSQHLPQQQQFAVEKDQCLHCKKTGHYKRDCPDFLKMIMAKKGENIITFVNESHYVGYSRSTWWIDSGATIHACNCLKAFRSTRTTQRRESTIRVANGVEEKVEAVGDFPLELANGFILLLRDVFYVPSLQRNLISVSKLDFDGYDCRFGSGKCELWHNNACIGLAVLRDELYLLSLSENVNVVSSLTKENKKRKGRIERLVKNEILPPLEFSDLEQCIECIKGKFVKSIKKGAKRSAGILEIIHTDICGPFPVKSVDGYDSFITFTDDYSRYGYIYPIKERSEALDKFKIFKAEVENQHDIKIKVVRSDRGGEYYGRHTPYGQVPGPFARFLLENGIVAQYSTPGEPQQNGVAERRNRTLMDMALKTAIHILNRVPSKSVPKTPYELWTGRVPSLTHLRVWGSPAEAKVFNPNIGKLDPKTVSCHFIGYPERSKGYRFYCPNSYTKFVETRHAVFLEDEMIRGSSVVREIDLEERRVSVPAPSTQEPFFSLPADVVPAMPVIEVPAPVVTLPVATMNESEEPVIQDSTEMVATPEEELQQSQIDNVPVQETHQEPQVQDVPNVQAPRRSERVRRSAIRDDYKVYNIEESHMEDDPTSYEEAMRSARSSEWLESMKDEMESMKLNDVWDLEEIPKGAKTVGCKWVYKTKYDSRGNIEKFKARLVAKGFTQREGIDYNETFSPVSCKDSFRIIMALVAHYDLELHQMDVKTAFLNGDLEEKVYMAQPKGFVMKGNENMGCRLKRSIYGLKQASRQWYLKFDGTIKKFGFQENVEDNCIYSKFKNGRFIFLILYVDDILLASSDVSLLQETKKFLSSNFDMKDLGEASYVLGIEIHRDRTKYALGLSQKTYIEKVLKKFNMYRCSATPAPIMKGEKYGASQCPRNQYELNEMKTKPYASAVGSLQYAQVCTRPDLAFVTGLLGRFQSNPGLEHWKLVKKVLRYLQGTKGLMLSYRRSESLQIVGYSDSDFAKDNTKSTSGYVFTLAGGAISWKSSKQTITAGSTMYAEFIACYEATGQVNWLKKFIPGLKVVDSIEKPLKLYCDNEPAVIIVLEKKTFLVERFDKYVKTLGSGIHVLAPLVDHIAYVHSLKEEAIPIPDQSAITKDNISIQIDGVLYVKNFWGNFKLHVLDEALLAFKKAVTTSDGIFLNWREQDVDPCNWKDVRCDSHTKRLKARRGSVSWESGVRCFSIGPSELVARGSKVWLSTRAGGHLEAGGVDDAEGGDGDPGGPAGRLPLAARGGEGDEQCAGGEEAKLGDEEGARLGYDPLHGHHGRAPEEEGRHQRRPLPPLPPHECRRGRDAILLLGDPREAFDEALDVRARADAVNRVRRGGRHRLAAEGFRTWAVVDVALNVGGPCRRSQPRHRVRRRVAGRGRRREPPRDVARHGHRAGRSRQWRAGGWSTAGRGKTEYGGAGVRRGGAALTEGGGGREWRQRREWTG

SEQ ID NO: 19317 - protein, 723 aa, Oryza sativa
  unsure (1)..(723): unsure at all Xaa locations
  Clone ID: TF_OSC100686j.C1.p4.np
VKTGNDPRASNDARGSEEQTDGAHISGASDSSSSPPPENPTVTQMMTMMIQQMQQHYHQMLQQAQQNQQQAQQNQQSGPPSSQSKLLDFHHIQPPTFSSTTNPMXANDWLRAIEKKLNLLQCNDQEKVAFATHQLQGPASAWWDNYVVTRPDSTEVTWAEFCQSFRKAQIPEGIMAQKKREFRALHQETRIVTEYLHEFNRLARYAPKDVRTDAEKQEKFLFGLDDKLTNQLISGVYDDFEKLVDKAIRQEEQRNKMDRNRKVAQISFPQGNNXKPRFMTGQLGEPSTLIIRQHHPYHPSNFNNDYNGGSHNNSKQHNHNSTSPPLMAPAQSDPPAMSAQSEQLKKESAGKPRPCFNCGKHGHFAGKCPKLKRVGPRFVQARVNHASAEKAQASPEVVLGTFPVNSYPATVLFDSGASHSFISKRFAGAHGLSVVELKILMQVHTPGNDMRTAHYCPSVTIEIKRSRFLSNLILLESKDLDVILGMDWLTRHKGVIDCASRTITLSNDKGEKITFRSPVSQKSVASLNQAVIEDQTEIAEKNPKKLEDIPIVQEYPEVFPEGLTTMPPKREIEFQIDLAPGTAPIYKRPYRMAANELAEVKKQVDEQLQKGYIRPSTSPWGAPVIFVEKKDKTKRMCVDYRALNEVTIKNKYPLPRIDDLFDQLKGAKVFSNIDLRSGYHQLRIREEDIPKTAFATRFALFSPTPEEFSDTNEKTNFITRLKT

SEQ ID NO: 19318 - protein, 1244 aa, Oryza sativa
  Clone ID: TF_OSC21389j.C1.p4.fg
MEANDWLRAIEKKLNLLQCNDQEKVAFATHQLQGPASAWWDNYVVTRPDATKVTWVEFCQNFRKAQIPEGIVAQQKREFRALQQGTRTVTEYLHEFNRLARYAPEDVRTDAEKQEKFLFGLDDELTNQLISGVYEDFEKLVDKAIRQEEQRNKMDRKRKAAQISFPQGNNQKPRFMTGQLGGPSTLIVCQHRPYHPSNFNNDYNGGSHNNSKQHNHNSTPPLLMAPAQSDLPAVSAQSEQPKKGAVGKPRPCFNCGKHGHFAGKCPKLNRTGPRFIQAHANHVSAEEAQAAPEVVLGTFPVNSYPATVLFDSGASHSFISKRFAGTHGLSVVELKIPMQVHTPGNDMRTAHYYPSVTIEIKRSPFLSNLILLESKDLDVILGMDWLTRNKGVIDCASRTITLTNDKGEKITFRSPASQKSVASLNQAAIEGQTETVEKSPRKLEDIPIVQEYPEVFPEDLTTMPPKREIEFRIDLAPGTAPIYKRPYRMTANELAEVKKQVDEQLQKGYIRPSTSPWGAPVIFVEKKDKTKRMCVDYRALNEVTIKNKYPLPRIDDLFDQLKGAKVFSKIDLRSGYHQLRIREEDIPKTAFTTRYGLFECTVMSFGLTNEPAFFMNLMNKVFMEFLDKFVVVFIDDILIYSKSEEEHEQHLRLVLEKLKEHQLYAKFSKCDFWLSEVKFLGHIISAQGVAVDPSNVESVTKWTPLKTVSQIRSFLGLAGYYRRFIENFSKIARPMTQLLKKDEKFKWSAECNQSFEELKKRLVSAPVLILPDQTKDFQVYYDASRQGLGCVLMQEGRVVAYASRQLRPHETNYPTHDLELAAVVHALKIWRHYLIGNRCEVYTDHKSLKYIFTQPDLNLRQRRWLELIKDYDMGIHYHPDKANVVADALSRKSYCNALCTEDMCGKLQQDLEHLNLGIVEHGTKMYQDLKEKFWWASMRREIAGFVALCDVCRRVKAEHQRPAGLLQPLQIPEWKWEEIGMDFITGLPRTSSGHDSIWVVVDRLTKVAHFIPVHTTYTGKSYQASLQMAPFKALYGRKCRTPIFWDQIGERQLFGTEVLTEAEEKVRTVRERLRIAQSRQKSYADNRRRELTFEAGDYVYLRVTPLRGVHRFQTKGKLAPRFVGPYRILERRGEVAYQLELPSNMVGIHDVFHVSQLKKCLRVPEEQASSEHIDIQEDLTYVEKPICILETSERWTRNKVIRFCKVQWSHHSEEEATWEREDELKAAHPHLFASSSESRGRDSV

SEQ ID NO: 19319 - protein, 1240 aa, Oryza sativa
  Clone ID: TF_OSC400910j.C1.p23.fg
MASGSGEGKGRRHQDNIPSVVLLELWGHVADDDHRPDATTATSTTSTGLPISVTLCAATPPSLSHLSVDCPGLVDLDPNPLDKFVAPTVISTDADLVLLRVPVDRFARFDHCFSDYFVYKVHSHSESAKLHRLPSPRGRGFADDNIAILSCGNDDDDSYAVAALQPLHHVHFRLHLCRSTPDGKPGSWTSHQLTVEEPLRGTVCPVPDSALRRIFHATTKVITLGGAKGTVGWVDLWRGILLCDVLDEIESPKLRDLPLPLPSTGNWPLFLNRCPYYCRDIVVNQSRDTIKYVEMEFTILNSSQDPRSSYHEWVASQEFRSSHLDILVDDGSLKINTWNMPIPIFSQLFASNLEEKGIPLPTTRGAAKMVFTLNMRARVLEELEKLHSMSHLGFMRCFLSTGISKHLKPTVGKQNGVGSCHAQKFPNRIPSRMCIKIPVQDQPGMQRYEPIEQLPQHLQFRPQFLQLQFQLPRSLSPSLQHQPPGVQPVAPEMVYTRTGSRATGEGSNGEERADGVHPNSDSGNGPPPLPENPTLAQVMAHQTQMMAAMMQQMQQQHQQMHQRMMQHAEQQHQQFGPPPPQSKLPEFLRVRPPTFSSTTNPMEANDWLHAIEKKLNLLQCNDQEKVAFATHQLQGPASAWTVTEYLHEFNRLARYAPEDVRTDAEKQEKFMAGLDDELTNQLISGDYADFERLVDKAIRQEDQRNKMDRKRKAAQFRAHQGSHQRPRFTPGQQGGPTTMIVRQHRPFNPSNFHQGTSGSQNHHGGQPNRGAAPRPSVAPAQSGQPAQAKKETGAKPGSCFNCDELGHFADKCPKPRRAGPRFIQARVNHASAEEAQAAPEVVLGTFPVNSIPATVLFDSSATHSFISKKFVGMHGLIREELSTPMRVHTPGNSSTSVQFSPSITIEIQRSPFLANLILLESKDLNVILGMDWLTKFKGVIDCASRTVTLTNEKGETVIETEIPVDTVEKNLRKLEDIPIVCEYPEVFPEDLTTMPPKREIEFRIDLAPGTAPIYKRPYRMAANELAEVKKQVDEQLQKGYIRPSTSPWGAPVIFVEKKDKTKRMCVDYRALNEVTIKNKYPLPRIDDLFDQLNGAKVFSKIDLRSGYHQLRIREEDIPKTAFTTRYGLYECTVMSFGLTNAPAFFMNLMNKVFMEFLDKFVVVFIDDILIYSKSEEEHEQHLRLVLEKLKEHQLYAKFSKCDFWLTEVKFLGVTGAPVASLVFCKVNVQPSSHMSRPEIH

SEQ ID NO: 19320 - protein, 645 aa, Oryza sativa
  Clone ID: TF_OSC5283j.C1.p1.fg
MSAQSKQLKKESAGKPRPCFNCGKHGHFAGKCPKLKRIGPRHKGVIDCASRTITLTNDKGEKITFRSPTKIAEKNPKKLEDIPIVQEYPEVFPEDLTTMPPKREIKFRIDLAPGTAPIYKRPYRMAANELAEVKKQVDEQLQKGYIRPSTSPWGAPVIFVEKKDKTKRMCVDYRALNEVTIKNKYPLPRIDDLFDQLKGAKLRIREEDIPKTAFTTRYGLFECTVMSFGLTNAPAFFMNLMNKVFMEFLDKFVVVFIDDILIYSKSEEEHEQHLCLVLEKLKENQLYAKFSKCDFWLSEVKFLGHVITAQGVVVDPSNMESVTKWTPPKTVSQIRSFLGLVGYYRRFIENFSKIARPMTQLLKKDEKLKWSAKCNQSFEELKKSNYPTHDLELAAVVHALKIWRHYLIGNRCEVYTDHKSLKYIFTQPDLNLRQRRWLELIKDYDMGIHYHPGKANVVADALSRKSYCNAVCTEGMCDKLQQDLEHLNLGIVEHGYVAALEARPTLVDQVRAAQVNDPEITELKKNMRVGKARDFHEDEHGTIWLGERLCVPDDKEFKDLILTEVHQTQYSIHPGSTKMYQDFKEKFWWVSMRREIAEFVALCDVCQTNVPSLGGNTLAPAGDERLEALVLTGWGEACVRLPVAT

SEQ ID NO: 19321 - protein, 749 aa, Oryza sativa
  Clone ID: TF_OSC5418j.C1.p1.fg
MWALRGCTGRWNPKKLEDIPIVQEYPEVFPEDLTTMPPKREIEFQIDLAPGTAPIYKRPYRMAANELAKVKKQVDEQLQKGYIRPSTSPWGAPVIFVEKKDKTKRMCVDYRALNEVTIKNKYPLPRIDDLFDQLKGAKMVKTGNDPRASNDARGSEEQTDGAHISGASDSSSSPPPENPTANDWLRAIEKKLNLLQCNDQEKVAFATHQLQGPASAWWDNYVVTRPDSTEVTWAEFCQSFRKAQIPEGIMAQKKREFRALHQETRIVTEYLHEFNRLARYAPKDVRTDAEKQEKFLFGLDDKLTNQLISGVYDDFEKLVDKAIRQEEQRNKMDRNRKLGEPSTLIIRQHHPYHPSNFNNDYNGGSHNNIRSASYVSSVRQLKKESAGKPRPCFNCGKHGHFAGKCPKLKRVGPRFVQARVNHASAEKAQASPEVVLGTFPVNSYPATVLFDSGASHSFISKRFAGAHGLSVVELKILMQVHTPGNDMRTAHYCPSVTIEIKRSRFLSNLILLESKDLDVILGMDWLTRHKGVIDCASRTITLSNDKGEKITFRSPVSQKSVASLNQAVIEDQTEIAEKNPKKLEDIPIVQEYPEVFPEGLTTMPPKREIEFQIDLAPGTAPIYKRPYRMAANELAEVKKQVDEQLQKGYIRPSTSPWGAPVIFVEKKDKTKRMCVDYRALNEVTIKNKYPLPRIDDLFDQLKGAKVFSNIDLRSGYHQLRIREEDIPKTAFATRSCSLFPHTRVEVLLS

SEQ ID NO: 19322 - protein, 767 aa, Oryza sativa
  Clone ID: TF_OSC5447j.C1.p2.fg
MWALRGCTGRWNPKKLEDIPIVQEYPEVFPEDLTTMPPKREIEFQIDLAPGTAPIYKRPYRMAANELAKVKKQVDEQLQKGYIRPSTSPWGAPVIFVEKKDKTKRMCVDYRALNEVTIKNKYPLPRIDDLFDQLKGAKMVKTGNDPRASNDARGSEEQTDGAHISGASDSSSSPPPENPTANDWLRAIEKKLNLLQCNDQEKVAFATHQLQGPASAWWDNYVVTRPDSTEVTWAEFCQSFRKAQIPEGIMAQKKREFRALHQETRIVTEYLHEFNRLARYAPKDVRTDAEKQEKFLFGLDDKLTNQLISGVYDDFEKLVDKAIRQEEQRNKMDRNRKLGEPSTLIIRQHHPYHPSNFNNDYNGGSHNNSKQHNHNSTSPPLMAPAQSDPPAMSAQSEQLKKESAGKPRPCFNCGKHGHFAGKCPKLKRVGPRFVQARVNHASAEKAQASPEVVLGTFPVNSYPATVLFDSGASHSFISKRFAGAHGLSVVELKILMQVHTPGNDMRTAHYCPSVTIEIKRSRFLSNLILLESKDLDVILGMDWLTRHKGVIDCASRTITLSNDKGEKITFRSPVSQKSVASLNQAVIEDQTEIAEKNPKKLEDIPIVQEYPEVFPEGLTTMPPKREIEFQIDLAPGTAPIYKRPYRMAANELAEVKKQVDEQLQKGYIRPSTSPWGAPVIFVEKKDKTKRMCVDYRALNEVTIKNKYPLPRIDDLFDQLKGAKVFSNIDLRSGYHQLRIREEDIPKTAFATRSCSLFPHTRVEVLLS

SEQ ID NO: 19323 - protein, 335 aa, Oryza sativa
  Clone ID: TF_OSC900148j.C1.p3.fg
MAASQPSVHGENHDEPDSPITRAEVQQIGNNLLQAMEHLLNARLPAAGGGAVQPPFGDPKDDIVDAQSADVADSELHGPPNGGGRGFVAAGARGGENDLEQQHARPCRGAVLGNGEHHRGHHDRDDSDNVARMFPYNTLQDLLDQAQCTERSIQQEWRNWFSSGRSNAAPWRRTQQATTFVGNHSQGASTRASPPAATAKPQPSSASSPAACTESRRPTAPTPTSSSRSRDIVCHKCQGHGHIAAECPSRRTMLVTETGEWESASETKDDSLREDEMVNKQADSDAIQVDNGDNNCFISRRVLSVQVAKEDNGQRHNIFHTRAATTLLVWSWWKD

SEQ ID NO: 19324 - protein, 1458 aa, Oryza sativa
  Clone ID: TF_OSC400150j.C1.p3.fg
MPKMVVEVADRYTARRDGRPNNSGEADGEVRGDVPAKPRAGRGGGRCGVAEGGDGDVGRRSGAATGAAGGDVDEEEGEAGAGDGVPAKFGRGGGDAGEEGDAAVSKEETAASIGAPAMNSSRLEGVQWHQCHWLPAGAPFRRVSGEETMPPHSPRNLIKVLGFVRELRLMAFEVGYEVAPEYRRISHDPNEEKCRVRVTLASDREDLPSIKFEAGGRSYSHACQEAALVAIGELRQRFEEELDSSAFYAMDAVSVERDKAAHDRENWNRGKICKLESKLASKIRVMGEVVPDRAEPVIDIMVNTRTGSGSGAANNGGDPTLAQILAQQTQLINLLVQQAQNQQANNQNQNPPPPPQNKLADFLRVRPPTFSSTTNPVEAGDWLHAVEKKLDLIQCTEQEKVSFASHQLHGPAAEWWDHFRQGRAEGEPITWQEFTAAFKKTHIPTGVVALKKREFRALNQGSRSVTEYLHDFNRLARYAPEDIRTDEERQEKFLEGLNDELSYALMSTDFRDFQQLVDKAIRQEDKYNRMEQKKRRAAQFKAQQGSNQRPRLVTGPQAPSYPQGGSSSVVRPQRQFYDNNTGNRGNDNRNMVARPAATPAQNQPVRKEQGSKPGVCFNYGDPGHYADKCPKPRRVKNAPAPNNSNAPAPKARVNHVAAAEAQNAPDVVLEIEEVPFPSSLILLESKDLDVILGMDWLSRHRGVIDCANRKVTLTSSNGETVSFFVSSPKYHGVFLNQVALQEIPIVQDYPDVFPEDLLGMPPKRDIEFRIDLVPGTNPIHKRPYRMAANELAEVKRQVDDLLQKGYIRPSTSPWGAPVIFVEKKDHTQRMCVDYRALNEVTIKNKYPLPRIDDLFDQLEGATVFSKIDLRSGYHQLRIREEDIPKTAFTTRYGLFECTVMSFGLTNAPAFFMNLMNKVFMEYLDKFVVVFIDDILIYSKTKEEHEEHLRLALEKLREHQLYAKFSKCEFWLSEVKFLGHVISSGGVAVDPSNVESVLSWKQPKTVQKFRSFLDLAGSEVQVDRDCEQSFQELKKRLVTAPVLFLPDSRKSFQVYCDASRLGLGCVLMQEGKVVAYASRQLRPHENNYPTHDLELAAVVHALKIWRHYLFGNRTEMYTDHKSLKYIFTQPDLNMRQRRWLELIKDYDMEIHYHPGKANVVADALSRKSYCNMSEGRHLPWELCQEFEKLNLDIVSKGFVATLEAQPTLFDQVREAQVNDPDIQEIKKNMRRGKAIGYVVDEQGTVWLGERICVPDNKELKDTIMKEAHETLYSIHPGSTKMYQDLKQQFWWASMRREIAEYVALCDVCQRVKAEHQKPAGLLQPLKIPEWKWEEIGMDFITGLPRTSAGHDSIWVVVDRLTKVAHFIPVKTTYTGNKLAELYMARVVCLHGVPKKIVSDRGSQFTSKFWQKLQVEMGTRLNFSTAYHPQTDCHARKFTSNFRTYLCIKSSSRNQPRYTN

SEQ ID NO: 19325 - protein, 153 aa, Oryza sativa
  Clone ID: TF_OSC405457j.C1.p1.gm
SKGGELQGVTNRMERKKRRIAHFKAQQGNSQRPRLTLGPQSMPQGGSSSVVRPQRQFFNNNAGNNIRNQAPRPVAASTQQQPAKKEQGIKPGVCFNYGDPGHYADKCPKPRRVKIVPAQSNSTAPASKARVNHVAAAEAQGMINGNLWETWNA

SEQ ID NO: 19326 - protein, 1867 aa, Oryza sativa
  Clone ID: TF_OSC102121j.C1.p13.fg
MATTGTATGAERGGGTARVDGDGGVPAVGDRNGEVDEVGEDAAKLKEAVPKREMVRGNDGGEPELGGDGGERGRRRELDSDGERERRVAETVERGTGSVYIEPGAREGGRGREETGAGENDFYFGMNLSGRDTHGVDYQGKPVPEQEGDDAEPVAAWEVTAVILSGSPERTSLAVTAGGDSFSAACQNAALLAIGTLHQRYPDELQHSPYRYHPRRGGARDYATFRDASSEDDATIMHLARMVEAYDAARIDFHQMVRRGMVDNNMKILELRQENLQLKKDLDVLEAQLCQLKVAQGEVCRPKRRRVCRSQKITARKSTSRPELVCQSLAWTCFVETPRAEPAPVVPQEGEASGVGSTEDALLLTFRPGPSQRVVWGMVMPMVTTRRSANTGDGHQPEGSNLNNHGSPPPPPPPPPPPPPDTNAILTQILAQQANMMAAFLHHIQNPPQHNAPPPPPPPQHSKLAEFLRIRPPTFSSSNNPVDALDWLHAVGKKLDTVQCNDEEKATQPEGQPITWARFTAAFRRTHVPAGVMALKKRAFRELKQGNRSVMEYLHEFNNLARYAPEDVREDEEKQEKFLAGMDPELSVRLISGDYPDFQRLVDKSIRLEAKHKELESHKRRLANFRNQQGANQRVRYTNPYPGGSSSQQQQQQPPSAPRPQFVVRVPQPQQPQGQQGTRAPRPPAPAVQPGQGHRDVQGQQSLCFNCFEPGHFADKCPKPRRQQGQAPPRSNNGGKDVIRGRVNHVTAEDVLTTPDVIVGTFLIHSTPATILFDSGASHSFISVPFVGRNQLGVERLRNPMLITTPGGVMTAKYYSPAVPIEIQGIPFPSDLILLDTKNLDVILGMNWLAQFQGVVDCARRTVTLHRGPEQPVVLFAPPTSVSSSELHQIGLLEIPIVREFGDVFPEELPGMPPKREIEFRIDLAPGTTPLYKRPYRMAANELAEIKKQLEELKEKGYIRPSTSPWGAPVIFVEKKDKTKRMCVDYRALNEVTIKNKYPLPRIDDLFDQLKGATVFSKIDLRSGYHQLRIREEDIPKTAFTTRYGLYEFTVMSFGLTNAPAFFMNLMNKVFMEYLDKFVVVFIDDILVYSQSEEDHQQHLRLVLGKLREHQLYAKLSKCEFWLSEVKFLGHVISAKGVAVDPETVTAVTDWKQPKTVTQIRSFLGLAGYYRRFIENFSKIARPMTQLLKKEEKFVWSPQCEKAFKTLKEKLVSSPVLILPDTRKDFLVYCDASRQGLGCVLMQEGHVVAYASRQLRPHEGNYPTHDLELAAVVHALKIWRHYLIGNRCEIYTDHKSLKYIFTQSDLNLRQRRWLELIKDYDVGIHYHPGKANVVADALSRKSRCNTLGVRGIPLELNQQLEALNLSIVSHGFLATLEAKPTLLDQIREAQKNDLDMHGILKNMKQGKAAGFTEDEHGTLWNGNRVCVPDVRELKQLILQEAHESPYSIHPGSTKMYLDLKEKYWWVSMKREIAEFVALCDVCQRVKAEHQRPAGLLQPLQVPEWKWDEIGMDFITGLPKTQGGYDSIWVVVDRLTKVARFIPVKTTYGGNKLAELYFARIVSLHGVPKKIVSDRGSQFISHFWKKLQEELGTRLNFSTAYHPQTDGQTERLNQILEDMLRACVLDFGKTWDNSLPYAEFSYNNSYQASIQMAPYEALYGRKCRTPLLWDQVGESQVFGTDILREAEAKVRTIWENLKVAQSRQKSYADNRRRDLEFAVDDFVYLRVTPLRGVHRFQTKGKLAPRFVGPFRITARRGEVAYQLELPASLGNVHDVFHVSQLKKCLRVPSEQADSEQIEVREDLTYVERPVKILDTMERRTRNRVIRFCKVQWSNHAEEEATWEREDELKAAHPDLFASSSESRGRDSV

SEQ ID NO: 19327 - protein, 1859 aa, Oryza sativa
  unsure (1)..(1859): unsure at all Xaa locations
  Clone ID: TF_OSC19731j.C1.p2.np
RPGPTWQPRGAPEGGLAGTADGRRRARAPMVAGGGHRHGGAAAERGEGRGKRNGRSMAHPGSMATTGTATGAERGGGAARVDGDGGVPAVGDRNGEVDEVGEDAAKPKEAVPKREMVRGNDGGEPELGGDGGERGRRRELDSDGERERRVAETVERGTGSVYIEPGARGMNLSGRDTHGVDYQGKPVPEQEGDDAEPVAAWEVTAVILSGSPERTSLAVTAGGDSFSAACQNAALLAIGTLHQRYPDELQHSPYRYHPRRGGARDYATFRDASSEDDATIMHLARMVEAYDAARIDFHQMVRRGMVDNNMKILELRQENLQLKKDLDVLEAQLCQLKVAQGEVCRPKRRRVCRSQKITARKSTSRPELVCQSLAWTCFVETPRAEPAPVVPQEGEASGVGSTEDALLLTFRPGPSQRRSANTGDGHQPEGSNLNNHGSPPPPPPPPPPPPPDTNAILTQILAQQANMMAAFLHHIQNPPQHNAPPPPPPPQHSKLAEFLRIRPPTFSSSNNPVDALDWLHAVGKKLDTVQCNDEEKVIFATHQLQGPASLWWDHFXATQPEGQPITWARFTAAFRRTHVPAGVMALKKRAFRELKQGNRSVMEYLHEFNNLARYAPEDVREDEEKQEKFLAGMDPELSVRLISGDYPDFQRLVDKSIRLEAKHKELESHKRRLANFRNQQGANQRVRYTNPYPGGSSSQQQQQQPPSAPRPQFVVRVPQPQQPQGQQGTRAPRPPAPAVQPGQGHRDVQGQQSLCFNCFEPGHFADKCPKPRRQQGQAPPRSNNGGKDVIRGRVNHVTAEDVLTTPDVIVGTFLIHSTPATILFDSGASHSFISVPFVGRNQLGVERLRNPMLITTPGGVMTAKYYSPAVPIEIQGIPFPSDLILLDTKNLDVILGMNWLAQFQGVVDCARRTVTLHRGPEQPVVLFAPPTSVSSSELHQIGLLEIPIVREFGDVFPEELPGMPPKREIEFRIDLAPGTTPLYKRPYRMAANELAEIKKQLEELKEKGYIRPSTSPWGAPVIFVEKKDKTKRMCVDYRALNEVTIKNKYPLPRIDDLFDQLKGATVFSKIDLRSGYHQLRIREEDIPKTAFTTRYGLYEFTVMSFGLTNAPAFFMNLMNKVFMEYLDKFVVVFIDDILVYSQSEEDHQQHLRLVLGKLREHQLYAKLSKCEFWLSEVKFLGHVISAKGVAVDPETVTAVTDWKQPKTVTQIRSFLGLAGYYRRFIENFSKIARPMTQLLKKEEKFVWSPQCEKAFKTLKEKLVSSPVLILPDTRKDFLVYCDASRQGLGCVLMQEGHVVAYASRQLRPHEGNYPTHDLELAAVVHALKIWRHYLIGNRCEIYTDHKSLKYIFTQSDLNLRQRRWLELIKDYDVGIHYHPGKANVVADALSRKSRCNTLGVRGIPLELNQQLEALNLSIVSHGFLATLEAKPTLLDQIREAQKNDLDMHGILKNMKQGKAAGFTEDEHGTLWNGNRRVKAEHQRPAGLLQPLQVPEWKWDEIGMDFITGLPKTQGGYDSIWVVVDRLTKVARFIPVKTTYGGNKLAELYFARIVSLHGVPKKIVSDRGSQFISHFWKKLQEELGTRLNFSTAYHPQTDGQTERLNQILEDMLRACVLDFGKTWDNSLPYAEFSYNNSYQASIQMAPYEALYGRKCRTPLLWDQVGESQVFGTDILREAEAKVRTIWENLKVAQSRQKSYADNRRRDLEFAVDDFVYLRVTPLRGVHRFQTKGKLAPRFVGPFRITARRGEVAYQLELPASLGNVHDVFHVSQLKKCLRVPSEQADSEQIEVREDLTYVERPVKILDTMERRTRNRVIRFCKVQWSNHAEEEATWEREDELKAAHPDLFASSSESRGRDSV

SEQ ID NO: 19328 - protein, 905 aa, Oryza sativa
  Clone ID: TF_OSC29055j.C1.p1.gm
MALKKRAFRELKQGNRSVMEYLHEFNNLARYAPEDVREDEEKQEKFLAGMDPELSVRLISGDYPDFQRLVDKSIRLEAKHKELESHKRRLANFRNQQGANQRVRYTNPYPGGSSSQQQQQQPPSAPRPQFVVRVPQPQQPQGQQGTRAPRPPAPAVHPGQGHRDVQGQQSLCFNCFEPGHFADKCPKPRRQQGQAPPRSNNGGKDVIRGRVNHVTAEDVLTTPDVIVGTFLIHSTPATILFDSGASHSFISVPFVGRNQLGVERLRNPMLITTPGGVMTAKYYSPAVPIEIQGIPFPSDLILLDTKNLDVILGMNWLAQFQGVVDCARRTVTLHRGPEQPVVLFAPPTSVSSSELHQIGLLEIPIVREFGDVFPEELPGMPPKREIEFRIDLAPGTTPLYKRPYRMAANELAEIKKQLEELKEKGYIRPSTSPWGAPVIFVEKKDKTKRMCVDYRALNEVTIKNKYPLPRIDDLFDQLKGATVFSKIDLRSGYHQLRIREEDIPKTAFTTRYGLYEFTVMSFGLTNAPAFFMNLMNKVFMEYLDKFVVVFIDDILVYSQSEEDHQQHLRLVLGKLREHQLYAKLSKCEFWLSEVKFLGHVISAKGVAVDPETVTAVPDWKQPKTVTQIRSFLGLAGYYRRFIENFSKIARPMTQLLKKEEKFVWSPQCEKAFKTLKEKLEGHVVAYASRQLRPHEGNYPTHDLELAAVVHALKIWRHYLIGNRCEIYTDHKSLKYIFTQSDLNLRQRRWLELIKDYDVGIHYHPGKANVVADALSRKSRCNTLGVRGIPLELNQQLEALNLSIVSHGFLATLEAKPTLLDQIREAQKNDLDMHGILKNMKQGKAAGFTEDEHGTLWNGNRPFVMCASVSRQSTNDRPDFSNLSKYQNGNGMKLGWILSLDFQKPK

SEQ ID NO: 19329 - protein, 461 aa, Oryza sativa
  Clone ID: TF_OSC400193j.C1.p3.fg
MARRSTRQIRAPNRFGFEEEPVQPEIPDQPVNQADEQEAESDHMAVSGSVNDVSRGNRPPPVDFHQHMAMQTHIIQGMVQNIIAMQQQHTQERQPHMVQDDGQSKLNDFLGSRPPEFSQTNEPIEADDWIKDMERKLNLVQCTPQEKTLYAAHQLRGPAADWWDNYCATHTDASTIVWTEFAGAFRSAHIPESIIDLKKEEFANIKQGSSCINEYLSRFNRLARYAPEDVDTDKKKIRKFLKGMDAKLQVKLLAHDFPTFQQMVDKSLLLEDAEEEMQEYKRRKVMSLEIQAKEGLCRKTNLPAQYYQRASQHSNGSGSTSRSTMSEPGQQATMINSNSHEGSNSVPCPTPSKRRGYKAGVECFICHEMGHYSWDCPQKAKIKCLHKVKTKPVQPTTILPNIPGSKGSKSPNSGSASLTSLPVGQGRLNHVQVETNEKVVNLEQVEGAGEEQVPQARAKPQ

SEQ ID NO: 19330 - protein, 377 aa, Oryza sativa
  Clone ID: TF_OSC400601j.C1.p74.fg
MPLSSQLPLVGSQDQNQYVFDRAFATQVDKLPMPEEDVPFCHDCRERGHCALNCPWVYAKEAPSFGLAGQTSLNQPPHTKSSLQPSVQSREPNGENPWNPGKCFPPSLSYHVGSRTKQAKRKKSKNQKRKAPMRTEEEVCKMTITSTEWPPAGITIPRRQRGNTFRGARQLTQHLLSHGGRVSDSEGSDQVSSDDEDESPRHLGEEEMESKACTRCGEIGHIASMCLTLCSYCEEDHPPGECPTRKVTCFLCEGTNHVPKDCQLSVLLTKTAEIQRTTLRLSHQLVSSNSNIDDIIHSTNAPPAAPDSAINHSNNTFSTNHSLHRQPQQRFVIDRRSCVSPRPTPGRAKGNQPQEDDTKQKTVIRFNQQSEGSFPCE

SEQ ID NO: 19331 - protein, 542 aa, Oryza sativa
  Clone ID: TF_OSC401916j.C1.p3.fg
MRYPWVGLGKALSRTSDTGQCLDWTLGVRENEKGSGSRLIKWNGSGKPRSNDLTRETVGSAAAVVVGVRLVRVVGCILGLSELQPKLSQISAALKQMARRSTRQTLAPNRFGVEEELVQSEIPDQPVNQTDEQEAESDHMAASGSVNDVSRGNRPPPVDLHQLMAMQTHILQGVIQNIIAMQQQHTQECQPHMVQDNGRSKLNDFLRSRPPEFSQTTEPIEADDWIKDVERRLNLLRGPAADWWDNYCATHTDASTIVWTEFAGAFRSAHIPESIIDLKKEEFANIKQGSSCINEYLSRFNRLARYAPEDVDTDKKKIRRFLKGMDAKLRVKLLAHDFPTFQQMVDKSLLLEDAEQEMQEYKRRKVMSLEIQAKEGLCRKTNSPAQYYQKASQHSNGSGSTSRSTMSEPGQQATMINSNSHEGSNSVPCPTPSKRRGHKAGVECFICHEMGHYSWDCPQKAKIKCLHKVKTKPVQPTTILPNIPGSKGSKSPNSGSVLLTSPPVGQGRLNHVQVETNGKVVNLEQVEGAGEEQVSQARAEPQ

SEQ ID NO: 19332 - protein, 1479 aa, Oryza sativa
  Clone ID: TF_OSC20908j.C1.p1.fg
MATRLRPKMTAAAAARKRSTAAAAARMRSVAAAAARIRPTAAAAVRMRSMAAVAAARLRPTAAAAARMRSVAAAAARMRPTTAAAARMRPVAAAAARMRPKVAAAARMRPAAVVAALMLPTAALLLSLAAMTALLWPTSASVAQGLWGAVEPEGDDLVDYRQDRQALAAILRAVPAEMLATLAVKETAQEAWEAIKTRRIGVQCVREANAQQLRREFGDILFEDGETVDNFSMRIGGLANNLRTLGDNITEAEVVQKLLQVVPEHLQQIAISIETLLDVNELSLEEVTGRLRSVEQRKQRKTAAASSRVDANGRLLFTEEEWLAKFRKAASLQDAAHSSGSNGDRRGRGHGKKDDGAPKEAQPKPANPGGRNPGNCKNCGKRGHWAKDYRSEPKAQQAYVAQEEDEEPALLLAKLDDGGEHDPAMWILDTSATNHMTGSRSAFAELDTAVTGTVRFGDGSVVRIEGRGTVLFSCRFGEHRGIAGVYYIPRLTANIVSLGQLDRSGSKVLIHHGVLRVWDPRGHLLVRLRCSDDCLYTIKLDIDRPVCLAARSAEPAWRWHARYGHLNFPALRKLVQQEMVRGLPLLQQVTQVCDGCLLGKQRRAAFPTQSKYRADEHLELVHGDLCGPIEPATPAGNRYFLLLVDDMSRYMWLTLIRSKDEAANAMKHFQARAEVESGRKLRALRTDRGGEFTSIEFGEYCANLGVGRQLTAPYSPQQNGVVERRNQTIVTTARSMMKAKGVPGRFWGEAMSTATPYEAWYGQQPAVHFLRTFGCVGHVKITKPGLKKLDDRSAPMVLLGYEQGSKAYRLYDPVSERVHVSRDVVFDEDAAWDWGPVTPDGAPQLEPFTVEQVVTTTIGTAPASSLTPPSPPSPAPSAPTTPAPPSPPSPEAVEFVTPPTQDSILDADTDDDVVPRYRLVDNLLGNASPPGHAPRVLEQLELHVVSADEPASLAEAEADPNWRGAMQDELNAIVDNDTWSLTDLPHGHCAIGLKWVYKLKRDEQGAIVRYKACLVAKRSSEHGVYTRTRGGRRLTVGVYVDDLIITGEHDDEIRSFKGEMMKLFKMSDLGALRYYLGIEVTQDSDGITLGQAAYAGKILEKAGLNDCNPCQTPMEVRLKLRKGSNFPLVDATLYRSLVGSLRYLVNTRPDLAFSVGYVSRFMESPREDHLAAVRRILRYVAGTRCWGIRFGPGARCALPMLVGYSDSDLAGDPDERKSTSGQIFFINGGPVTWQSSKQKVVALSSCEAEYIAAAAATCQGVWLARLLAEVLGDEITAPLLKVDNQSTISLIKNPVHHDRSKHIDVKYHYIRECAEKKLIEMMFVGTAEQLGDIFTKSLGRTRVAGSGTLLSLCLRAVASTLGVPFGLSSSSSDSMVNSVFLWRRPTGINGSSSGLHAKGDLRLTEEDGANSLHTAVQGSETHKRTWNCNARVKKRFYPSSPHHCEFVIIDNSNRVLAWGLGKKAAASMMIREICMEELV

SEQ ID NO: 19333 - protein, 686 aa, Oryza sativa
  Clone ID: TF_OSC33100j.C1.p2.gm
MELEPGELSPPATGHSGHGDLNSPPPAAPAGASSPAATSAQCSSGSSSGSQEKVDWDFSDDDEVVESPPSPARQMAGQASAAHEATPLAAPRQSVVSAPFTASTSRKEDSGEGGRKAISSAITPASARRTWSSFINLARGETEILVAPGQGTSSGHGVQAPNHRNCRDPPRCYICKRSGHISSGCPSKYKNKPSIFSCIYSTHPAPPSKQEIPNPLAFPPLTGHKAPVRERLGPKMDYIPGLPENHPACGYAVVVADAAMEHEAMRLYNHGAVIKARLPNYDVSAKEMAQALQQQVGTPNYDNPNLLPRVSVFTLFPAGVGQVLETGGMPTPSQEVASAPLGRVRHLLIHLDMVEDWRPLPARSSNSSGSTDSDDPPRRRVHRFDWHLGYEDGVSPPPLQPPQPPLPGGCRVPLAPRLEREEDDDENFGGGNGRALPHPPWRQSPLRRPSGGSLPSQAPIQAAFSPPALLPVALAKQGASCGLGESLSSRVRFPRWRRKRQRQDEQQARLSCLGQATQRRSANTTSALFCCPCSSSRRSRPLLLCPRPGGGGDTGGGGPDVSRAGGGGSVPRGEVSERIYPRSWGVGSYWVSGSSWAGGAYWASFSWAGGASWAGWVSCVPWLDSFSWAWASRAGDEAVAEYIKRFQDPLPTVVVQGIRALTGLDSGKPLPPDVTEEADGATPEWV

SEQ ID NO: 19334 - protein, 1334 aa, Oryza sativa
  unsure (1)..(1334): unsure at all Xaa locations
  Clone ID: TF_OSC414410j.C1.p1.np
MADFADALRPDKFTGVHFKRWQIMVTLWLTAMKCFWVSIGKPEGVLTAEQQKQFEEATTLFVGCILSVLGDRLVEVYMHMTDAKKLWDALNTKFGATDASNDLYIMEQHDYKMADNRSIVEKAHEIQTMAKELELLKCVLPDKFVAGCIIAKLPPSWRSFGTALKHKRQEYSVEGLIASLDVEEKAQEKDAAYKGDGGQSNANVVHKAQHKSKGKYKAQQTTNFKKQKKNNNNPNQDERIXFVCGQPGHLARKCPQRKGMKAPAGQTSKSANVTIGNTGDGRGYGNLSTVFSVNQSTNWWVDTGANVHVCADISLFSSYQVARGSTVLMGNGSHASVHGVGTVDLKFTSGKIVQLKNVQHVPSIDRNLVSGSRLTRDGFKLVFESNKVAVSKHGYFIGKGYECGGLFRFFLSDFCNKSVTHICGSVDDEANVWHSRLCHINFGLMSRLSSMCLIPKFSIVKGYTRHSCVQSKQPRKPHKAAEERNLAPLELLHSDICEMNGVLTKGGKRYFMTLIDDATRFCYVYLLKTKDEAVDYFKIYKAEVENQLDRKIKRLRSDRGGEFFSNEFDLFCEEYGIIHERTPPYSPESNGIAERKNRTLTDLVNAMLDTAGLPKAWWGEALLTSNHVLNRVNRNKDKTPYEIWIGRKPSLSYLCTWGCLAKVNVPITKKHKLGPKTVDYIFLGYAHHSIAYRFLIVKSEVPDMHVGTIMESRDATFFESFFPMKDTHSSSSQPSEIIPSSITPPEQTEYTHEHVTEEDDSEAPRRSKRQRTAKFFGDDFTVYLADDTPKSISEAYASPDADYXKEAVRSEMDSIITNGTWEVTERPYGCKPVGCKWVFKKKLRPDGTIEKYKAWLVAKGYTQKEGEDFFDTYSPVARLTTIRVLLSLAASHGLLVHQMNVKTAFLNGELDEEIYMDQPDGFVVEGQEDKVCKLLKSLYGLKQAPKQWHEKFDRTLTSAGFAVNEADKCVYYRHGGGEGVILCLYVDDILIFRTNLEVINEVKSFLSQKFDRKDLGVADVILNIKLIRGENKITLLQSHYVEKILNRFGYIDSKPSPTSYDPSLLLRKNKRIARNQLEYSQIIGSLMYLASATRPDISFAVSKLSRFTSNPGDDHWHALERVMRYLKGTMELGLHYFGYPAVLEGYSDSNWISDVDDIKATSGYVFTLGGGVVSWRSCKQTILMRSTMEAELTALDTATVEAEWLRDLLMDLPIVEKPVPAIFMNCDNQTTCEKTIEVCQEVEKLRTCEKTIEVCQEVEKLRSYNVGLHPNNXKPGRSLHEGTITKCDRQCIEGDGFETHSILERTHLCELDCWSQSMKILSESSRKLTKDLGV

SEQ ID NO: 19335 - protein, 2741 aa, Oryza sativa
  Clone ID: TF_OSC900086j.C1.p19.fg
MALWNGLGQVANIAQLAGVDAYGLIKMIVEAAQTAKRNRETCQKLARHVKMIGDLLQRLQSTELMQHQETRNPVEQLEETLRHTYMLILSCQDSSYLHSCFMGGKQAHQLREVQSDITFYLQLFPLVSFVDTTRTWERLLRRAQPSCTEDTADELQKVHHSDHRIRNHVQDYAHKYIKLIELHWQFIFRFNTEILNATEFGDQSVTQCPEVFEEKRSEQASIRSLNLDQLVVNDIGKGAVLTFSQILAATNNFSGRSLIGQGGFGPVYKGKLPNGLEIAVKRHDTSSHQGEEEFMAEIDVIPKLRRKNIIELIGFCVQGKEYETKRILLNWSKRLKIIEGISDGLLYLHNHSPKCIVHRDIKASNILLDYEMNAKISDFGLAIKLAPKATTEVLVRGTWGYADPEYVATGVISEKTDVYSFGIVLLEIISGKLETWRGGMRGRGERGDLAGDGPTTAAVTSGGRSSALTIDLPPLLPSPAGISKLRLPSPARALNLSQVRPGEAFQNLILHLFHCPVTPIATTLGPSKIIPTPIWLCAAPSKPLNSLYVKNALNFWFSSSFSSFSVSSLGFGLFLSHVANKDVATSLFLAGSSVLKSAGLSIHLTKDSAAKDIQENVTRFLVQFEGSSSVPSLVGEKVVPALQTVKPAFTATSRHIGCSQQSSKTSTPSVPTGPALKSVYCPVTNSFRDALLSQPKPKPPARSATSRLPSRGRKNLTMLNRCFRCLGSDHQVKDCRDPLICASCRRAGHRQDSCRSSMASNISPRRSSSSFHPSTANSTSRFTTRWVRRALNTPAPPPPRLPTAPYPRSNHSSPPPDNLAIVPYVPPLTHVDAQLEDVIAMLESSLCSSPVRSVTAGPLVPMEVSENAVTSSVASPLPDVRNALVCVQDSSISVAALVPVLACAVNDLETVSTEVVPATVSLVSVMPTRAAAVAEVAHATVESVVVPSSVSEDLSPAVNLSSMPPRLRCKNKGFLAWYGACPSSRQPSSVPPQEPRDIFVCSEQLSANPILSPPQDPDSTRSPPPTLSGPSAAEQIRRALAGLSPEGSIHSASLSPGRVPVITSNDTTAAQDFAFGEPDPVNISGDSDDDILDIFIPFVDMRVTAHYATAYVTPPCECPGRVIRKAMQDAHPRFQFTLISACRGAMTLRFIHSQDRDFAVDHQENLTAEGHLVRLERPEDSAARFIQHNTMLSELDCIDFPPEMLFPNKIRNAFENYGELMEVDDQCLYGDEQSSLRLVVLHYPGKRMSPRFRLRYNLGIVCTVYVRVLRTWELAMNVDEDGNYIKHYEQFLFPHQLDPPRSGPTVGPEAELDNLNQAPSNQISNNQGLQNRGRLLAILPAASTVFIEEISDTPEIFVPPSIHSAPSSIHDCLQDLVPSDTENEHELSARKRRRQKKRTIDSDVKRRYSERLAAKEGHLYISMESKAARAKKLKEQLAKCSSKLNDAVHKHNLLDLNFKTTPKALEDLAIACSLNDHDIAQLRKLFFSSLVSSLPSLCSLSVYLLHETKLQNIPPEKAKTILPPNLANYDFVGSYGSRGGMLTAWNADFTKTSFISRHFSLTISFTSTFTDLSFSLTNIYGPAELDQKQDFLHELLEIDPLIQGPRLLIGDFNLTRSPSDKNSQNFSTGLAAAFNQTINSLSLFELPLPDRLYTWSNKREVPVLARLDRAFFNNAWNNTLPNTSLSSCTRTTSDHVPLLLTASTSIPKSKTFRFENHLLLDRDFLPSVMHRWPQQLNMNDPAACLAAKLKQTRSIIKVWMKEHRKRSSLNEDCKFTIDLLDYIEELRPLNDGERCLRNLVQEKLFQAIQSKVAYWKQRGKVKRLKIGIDNSAFFKAHASKNYRNSRIRSIKHNGSEIADHNGKALLLHSFFQHFLGSDCQPLWDFDLSTLYSEDERDYNLLASQGLQFSTEEIITSIKGMNSNSAPGPDGFGPSFYNSAWNSIKEDIIKLAASFCSNSVQLERINRAHIVLIPKPGKENTVDGYRPISLQNCSVKILSKVLANRLQKVLTRMIHLDQTGFLKGRCISENLIYATELIQACHARKCKTLIIKLDFAKAFDSVLWTSLFQILAVRGFPNNWISWIKSLLQTSKSAVLLNGIPGKWINCKKGLRQGDPLSPYLFILVADVLQRLLEKNFQIRHPIYQDRPCATIQYADDTLVICRAEEDDVLALRSTLLQFSKATGLQINFAKSTMISLHIDRSKESSLSELLQCKLESLPMSYLGLPLSLHKLTNNDLQPIVVKVDSFLTGWEASLLSQAERLILVNAVLSSVPVYAMSAFKLPPKVIEAIDKRRRAFFWTGDDTCSGAKCLVAWDEVCTAKEKGGLGIKSLKTQNEALLLKRLFNLFSDNSSWTNWIWKEFDGRSLLKSLPLGQHWSVFQKLLPELFKITTVHIGDGSRTSFWHDRWTGNMTLAAQFESLFSHSTDDLATVEQILSFGIYDILTPRLSSAAQNDLQELQTILQNFSLTNESDTRLNNRLGNLTTKTIYDLRSPPGFPSPNWKFIWDCRMPLKIKLFAWLLVRDRLSTKLNLLKKKIVQTATCDICSTTDETADHLSFNCPFAISFWQALHIQPIINETKYLSQLKAPATIPTRHFQSFFMLCFWVLWNHRHDVVFRGRPPSIASCLQRGISESSLWAETFTPDDRFVIDVWKDISSSINAMTIQVGNLSPPALKNRKKLHKLIDPSLGAKKHERAQIMQCLRVAMLCVRDRAEHRPTMSEVVTMLPSIKTPKDRKAVVNVRF

SEQ ID NO: 19336 - protein, 470 aa, Oryza sativa
  Clone ID: TF_OSC15265j.C1.p3.fg
MECRGSRGFGSSMNIKSKSKVGIDQSKGAVFENGSTRDRESHLEVLSGTSWHQGEVEKFHKCCPEVPGTFTRKLLAGFQFKLDAHLIWNTLEERYDKSECDEAKLAIEEPLVECSNSSTICKEPQVILSNEQDSLATFTSSPTHVSIKGNEMVEVCGKKWPSEEFTSPRCSSSHLDEYSCIMEKSYLEKENLELKAQLVELTSKHVDLQEKYDELLCSHGNLVDSHAMLEVTHEVIIITVKSYVPHVQVDFTCANSCCSQANIFLRTTCDLDYVGKKDKYIDHGFVCNAQPSQDNRESMLKKLEKGSTVACTKFYQEDNKSNNKSKGQDQSKNKASITCFKCKKMGHHVRDCPWKKQKKLSKNEDLAHSSSNPPKRDTLPQVVLARLMMKPHFQERHQESTEGSATVALRRGMKLDFVRTRRMIIAIDQARGKPATSKSRSKIKAKLNFATIAGQRDILVKIVPLVITCV

SEQ ID NO: 19337 - protein, 420 aa, Oryza sativa
  Clone ID: TF_OSC402930j.C1.p2.np
MAPQPTCQTCVRNYLGSKEDPALSENPNQLAEQVTNQVAKTDNTVPGPNKEPKVNPDKSKNEAAEIQGTQSVEGTDTHKEKNKEFLNVMITGMKTPLRANNCPNLQNSINKSVSRENSMIKEGSCHKRKTLPSEVDMQDVPQCQTMQSCQNLPKSPTLKSKKIRHVPGFICFICHKIGHYMRHCPQKPYMDAPLQANMSTSRMPFYPQGSPNSPNVNAVRSTFPDDKRAKASCDMCQDIQEKKEMQEYKRRKVMSLEIQAKEDLCRKTNSPAQYYQKASQHSTSSGSTSRSTMSEPGQQATMINSNSHEGSNSVPCPTPSKRRGYKAGVECFICHEMGHYSWCPQKVKSKRVQPTTSLPNVSGPKSSKSPNSGSASLTSPPVGQGRLNHVQVETNGKVVNLEQVEGAGEEQVPQARAEPQ

SEQ ID NO: 19338 - protein, 2483 aa, Oryza sativa
  Clone ID: TF_OSC900058j.C1.p11.fg
MGDLALMSFLSGKRERQRQLCHRQIGRGRGSITSVAKTERKGLHYQLKENVYLPEDILRLIHAMMPLRDAARAACASHIFLQSWRCRPNLIFTGETLGLIINGTGKDDAKRDFINIVQRILLNHSGIGVKTLKLELLHFSDLDLGCLEAWLQIAVAPGIEELTLMFPCVRYKFPCSLLFERGGNSVRYLHLMVCTFRPTIGLGCLIKLTQLHLSFVWITGDELELLSKCVALEWLKLSYCPEIICLKVPCMLRQLGSLEVAECRYLKVIEICAPNLSNFYLTGFLVRTSFENPLLVKKLRIMCLRQGNFVSYARTKLPSLVPNVETLTVASNEATGQAIPTDRRPLRPRRPPPCAGSHPGADAHHPRLSCPIALPLEPARPPLDVAGQMRLASLPPSWPALQPAHPTLLRHHKPVIPSQPLSGPPLSPRSSTPRRNPQFWLESPPPPPSRSAVPFSADDVSHVSESPDPRSSPTPAMPRSFADAVRLDFNPAKGDGLPVFKSPHGQPPPRPKLKSAITIPAWSTFQRRAYRATPGEEMGVRRIHGTARPGRFNGEWKEVKPRHWWRRSPHSPESQRPASRRQDAHSRRSLAPAASASLRLFRERTAGKCFNCLARDHRAARCRDPVRCFRCFRSGHKANSCSRREPRPRQPRQSPQKALRRQASTPPPPQNTSHRQASTPSPSLPRATRPRQPRQSPQNTSCRQASTPPLQLPLPPKPSCNTRMALLGDPATRPDEDHCFVPTPFATEAERKEWESSAVVSWAMRAPASTTAQDVEAAFREEFRLRRGEVTVTRHHPEAFLIKFEHSSHCYEAMRKGFVKRNGIELHFIKWRSLSAALGIALMFRRLIARTCGLEEIETNLIHPVDTRTVDVWAWTGNPSSIPKRMWLTFTGSTRGAKPEQILVSDRPPAHWQHGAKFCVYIHLEEIHDYTTVAVDLDGNEACAPSKRRLPEWHLGVADGDPVPTRAFENFPHHPPPPRTRQGREPERIDDRDDRRRRAKDDRDRSRPRRSYNDDHPDHDRDQAWRRRDDDDDRDGRGGRGREAWRGRESRKVSGLDGQRVRERSPRRRDWAEDDRRGDRRHHVQAAVALPATIPPLKLAPKQAPRENLRETGERLVNRVNNFAAAVDDASQPGGEEAWSDRRPSRVHDVPIRQVFDRLKHCLFPAGIHSTPSHSGQVMPHDERASIGARGNTAAATAVASKTVTPPQLITAAPTTEQDEHQDAGNKNTLQVLESLFSTPPRAVLPRPTSPALTTTQATPAPAPAPPGGHGMERRRSARLAAKPPMPTMQRCTRVLLKRLGMLHDDKTLDEVLSDYIAMFNGPLPQHVIAALTSIFDIDADAIMEANHVDNTLLEVVGEGVADLVEECTALNELIAETSCNLVCIQETKLRAVDDQLARFLGAYRLDSYAFKPSRGTRGGILLLWNSTAISVHSTRIGRYSLTANITVLRCGTSFMLTTVYGPTRHREKDSFLRHIRSLKPSPGNKWLILGDFNLVYRARDKNNNNLNLGRMNRFRAALNRCELKEIHLQNRKFTWSNERRRPTLMRLDRFFCNEEWDLSFDRHILHALSTGPSDHCPLLLTDPSCPRKPRPFKFENFWIKLPGFKEVVEQAWGKPSNHTEPMHRLAYKLRDMAKELKRWARTTCSQTKLKYHMALDVILRLDVAQEQRTLSPEEGNLRAALKRRVLGLAVIERARKRQASRITNIRAGDANTKFFHLKVNSTRRKNHIHRLRKQNGWAVTHEEKSQAIFDHFSLFMGRPQERQLDLNWQSLGLETTDLNSLNEPFTVDEIKRAICHMPTDKAPGPDGFTGCFFKACWETIKNDVTTAFNAIYNHRCNHLNLLNSASVVLIPKKDGAEQVSDFRPISLIHGFAKIFSKLLALRLQPLMHKLVSTSQSAFIRGRSIHDNFLYVRTLFATSSSKILLNGIPGTKIIHGQGLRQGDPLSPLLFILAIDPLQRLLSKATELKLLSKLRGKSVTLCTSLYADDAAVFIKPGKSEVQNFTAILHRFGLATGLRANIEKTQVVAIRCENVDLDEVLQNTPATRASLPMKYLGLPLTTGRLRKADLQLLFDKSAGKMAAWRGRNLGLAGRTTLVKSVLSSQPVYLLIALKVSKESMETLDKQRKSFLWAGSEKLTRGKCKVNWKRTCSPTVYGGLGILNLENFARALRIRWLWQEWKAPERTWIGRDNPCDNTEKTLFAAATTITVGDGETASFWNSAWMQGRRPRDVMPLVYAISKRKNRSLKEGVTDNVWVQDLNFSSPDAITVELLDQIVTLWSIIQSVQLSPDVTDEITWKFTNHGEYTTSSAYKMQFLGSINANYDAIIWKPWAPNKCKIFAWLAIQNRVWTAGRLTTRGWPNNTFCPLCRHTRETVFHLLVDCRYSRRIWENLACWTSQEHIKPGNWAQPASLQDWWTAIATHPGTPRKGNRTLLLLVTWEIWKERNQRIFQRNELSILSLCTKIKEEAKTWTLAGAKRLSEIIP

SEQ ID NO: 19339 - protein, 1718 aa, Oryza sativa
  Clone ID: TF_OSC400601j.C1.p78.fg
MAQGAGDAVLPASHITADRHLSLPRKIMPEGAALRAGESRPRPRYSDRFVHLLSFAMVGLVPPFSRFFHEVLDFYEIHALHLAPNAVMTLAIFAHLCEMFVRVRQTMRLFQFFFVPQLLQAWLAASELGEQYDAVRDRLRGLRSQGLTGAMVFGDYFHCRIAPLQERSREAWKYIGPNDLMRTHVGERWDWGEEDAKTIPTFPESPFLQEKNLKSSKASKATPGLEWYIPGLEIELCSRDGCSEWLGLCNRMPRYKPEYLFGVEGFVQELRTMSFAIGFGTAPLYAQIPHDRDEEKCQVKVTLNSNSEDILSVMFEAGGGNYIHACQEVARIAIGELRDRYSDQLADTEYRYHPRQPQGSDRGSYLETEGIENDATTRHLVEMLWAMDETRAETVLAAQDREDRNRGKICKLEDKMVLTRSNGNGPNIKNNNNNRENPTLAQVLAQQAQLMNMMMQQLQNQQNQGNNHAPPQNKLAEFLCVRPPTFSSTTNPVKAGDWLHAIEKKLDLLQCTDQEKVSFASHQLHGPASEWWDHFRLNRTTAEPITWLEFTAAFRKTHIPSGVVSLKKKEFRSLTQGSRTVTEYLHEFNRLARYAPEDVRTDEERQERFLEGLNNELSYPLMTGDYHDFQRLVDKAIRQEDKYNRMEQKKRRIAHFKAQQGNSQRPRLTLGPQSMPQGGSSSVVRSQREFFNNNAGNNIRNQAPRPVAASTQQQPAKREQGSKPGVCFNCGDPGHYADKYPKPRRVKVVPAQSNSTAPASKARVNHVAAAEAQGAPDVILGTFLVNSVPATVLFDSGASHSFLSMSFAGNHGMEVEDLRRPLMVSTPSNQALSLQRNPSVRIEIQGVPFLANLILLEAKDLDVILGMDWLARYKGVIDCANRKVTLTNNDGRVVTVHALSSESLRSSLNQIALEEIPIVQEYPDVFPDDLPGMPPKRDIEFRIDLVPRTTPIHKRPYRMAANELAEVKRQVDDLLQKGYIRPSSSPWGAPVIFVEKKDHTQRMCVDYRALNDVTIKNKYPLPRIDDLFDQLKGATVFSKIDLRSGYHQLRIKEEDIPKTAFTTRYGLFKCTVMSFGLTNAPAFFMNLMNKVFMEYLDKFVVVFIDDILIYSRTKEEHEEHLRLALEKLREHQLYAKFSKCEFWLSEVKFLGHVISAGGVAIDPSNVESVTNWKQPKTVSEIRSFLGLAGYYRRFIEKFSKIAKPMTRLLQKDVKYKWSEECEQSFQELKSRLISAPILILPDPKKGFQVYCDASKLGLGCVLMQDGKVVAYASRQLRPHEKNYPTHDLELAVVVHALKIWRHYLFGTRTEVNTDHKSLKYIFTQPDLNMRQQRWLELIKDYDMGIHYHPGKANVVADALSRKGYCNATEGRQLPLELCKEFERLNLGIVSRGFVAALEAKPTLIDQVREAQINDPDIQEIKKNMRRGKAIGFLEDEQGTVWLGERICVPDNKDLKDAILKEAHDTLYSIHPGSTKMYQDLKERFWWASMKREIAEYVAPLKIPEWKWEEIGMDFITGLPRTSSGHDSIWVIVDRLTKVAHFVPVKTTYSESRLAELYMARIVCLHGVPKKIVSDRGSQFTSKFWKKLQEEMGSKLNFSTAYHPQTDGQTERVNQILEDMLRACALDFGGSWDKNLPYAEFSYNNSYQASLQMAPYEALYGRKCRSPLLWDQTGERQVFGTDILREAEEKVKIIQERLREAQSRHKSYADNRRRDLSFE

SEQ ID NO: 19340 - protein, 634 aa, Oryza sativa
  unsure (1)..(634): unsure at all Xaa locations
  Clone ID: TF_OSC900179j.C1.p14.np
KVRCSGLCCARGTVTAPFRAPGLEWYIPGLELELCSRDGCSEWLGLCNRMPRYKPEYLFGVEGFVQELRTMSYVIGFGTAPFYAXITHDRHEEKCRVKVTLNSNSEDIPSVMFEAGGRNYIHACQEVARIAIGELRDRYSDQLADTEYRYHPRQPQGSDCGSYLETEGIENDATTRHLVEMLWAMDETRAETVLAAQDREDRNRGKICKLEDKVDRLEKELAALKGEAPPQKARIRLTARKRALFVPRYQLAPKMVLTRSNGNGPNNNNNNNNGENPTLAQVLAQQAQLMNMMMQQLQNQQNQGNNHAPPQNKLAEFLRVRPPTFSSTTNPVEAGDWLHDLLQCTDQEKVSFASHQLHGPASEWWDHFRLNRTTAEPITWLEFTAAFRKTHIPSGVVSLKKKEFRSLTQGSRSVTEYLHEFNRLARYAPEDVRTDEERQERFLEGLNDELSYPLMTGDYHDFQKLVDKAIRQEDKYNRMEQKKRRIAHFKAQQGNSQRPRLTLGPQSMPQGGSSSVVRPQRQFFNNNAGNNIRNXAPRPVAAPTQQQPAKKEQGIKPGVCFNCGDPGHYADKYPKPQRVKVVPVQSNSTAQASTLRGGRAHVGSSEGGMLVQRNCXNREERLTSGSHTCFSPPL

SEQ ID NO: 19341 - protein, 1377 aa, Oryza sativa
  Clone ID: TF_OSC26838j.C1.p2.fg
MRAQVSTRMPSFTSSRSNMRHSPCCLMSVNDMYGRLNVIVDDLKGLGANYTDLEVAQKMLRALPEKYETLVTMLINSDMSRMTPASLLGKINTNDMYKLKKKEMEETSPSKKCIARQAEVEDKGNGKVNEANENLEEEIALLARRFNDLLGRRKERGRGSNSNRRRNRRPNKTLSNLRCFECGEKGHFALKCPSKDDDGDKSSKKKSGGYKLMKKLKNSASSGSEEEDGDDTSSKKKKMAVVAIKEAPSLFAPLCLMAKGSSKVTSLSDSESDDDCDDVSYDELVSMFEELYAYSEKEIVKFKALKKDHASLEVLYEELKTSHERLTISHEKLKEAQDNLISTTQHGALIDVGISCDLLGDSATCHIAHVASSSISTSCDDLVDMSSSSSTSCVSICDASLVVENNELKEQVAKLNKSLERCFKDKNTLDKILSEQRCILNKEGLGFIPKKGKKPSHCATRFVKSNGRLMMVALLLDMWVPLYSVVNYRTGGSHWVFDSGCTQHMTGDRAMFTTFEVGGNKQEKVTFGDNSKGKVIGLGKIAISNDLSIDNVSLVKSLNFNLLSVARICDLGLSCAFLPQEVIVSSLLDKSCVFKGFRYGNLYLVDFNSSEANLKTCLVAKTSLGWLWHRRLAHVGMNQLSKLSKRDLVVDLKDVKFEKDKLCSACQAGKQVACSHPTQSIMSTSRPLELLHMDLFGPTTYKSIGGNSHCLVIVDDYSRYTWVFFLHDKSIVAELFKKFAKRAQNEFSCTLVKIRSDNGSEFKNTNIEDYCDDLGYASNSKAYQVYNKNKGIVEETADVQFDETNGSQEGHENLDDVGDEGLMRAMKNMSIGDVKPIEVEDKPSTSTQDKSSTSATPSQAQVEVEEEKAQDPPIPPRIHTALSKDHPIDQVLGDISKGVQTRSRVASICEHYSFVSCLEPKHVDEALCDLDWMNAMHEELNNFARNKVWTLVERPRDHNVIGTKWVFRNKQDENGLVVRNKARLVAQGFTQVEGLDFGETFAPVARLKAILILLAFASCFDIKLFQMDVKSAFLNDFKIGKVDTTLFTKIIGDDFFVCQIYVDDIIFGSTNEVFCKEFGDMMSREFDMSMIGELSFFLGLQIKQLQDGTFVSQTKYIKDLLKRFGLEDAKPIKTHMATNGHLDLDEGGKPVDLKLYRSMIVSLLYLTASRPDIMFSVCMCARFQAAPKECHLVAVKRILRYLKHSSTIGLWYPKGAKFKLVGYSDSDYAGCKVDRKSTSCSFQMLGRSLVSWSSKKQNSVALSTAEAEYVSAGSCCAQLLWMKQILLDYGISFTKTPLLCDNDSAIKIANNPVQHSRTKHIDIRHHFLRDHVAKCDIVISHIRTKDQLADIFTKPLDETRFCKLRNELIVIDFSNVA

SEQ ID NO: 19342 - protein, 1379 aa, Oryza sativa
  Clone ID: TF_OSC31509j.C1.p2.fg
MASRRRATTSNDETQTPDLTTLAGVMATQTQLLQAIANNQGNRGGSSFGEFMRTKPPTFATAEEPMDAEDWLRIIEKKLTLVRVREANKVIFAANQLEGPAGDWWDTYKEAREEDAGEPNWEEFTTAFRDNFVPAAVMRMKKNEFRRLRKGNTTVQEYLNRFTQLARYATRDLADEEEKIDKFIEGLNDELRGPMIGQDHDSFQSLINKVVRLENDRKVVEHNRKRRLAMNRSPQTAPQRPKGTTSSAWRPTVVTTSRPAASSNFHRSVTIQNRAPAPNQAATGSVRTGSCFNCGEYEHFANKCPHPNKTPIRTGANATAIHGTATPAAGRGLFRTPQTNRTATGFGRGQVNHVRAEEAQEDQGVLMGMFSLNSTPVKVLFDSGASHSFISLKASQQHNLTRVKLRQPMLVHSPGVEIAVDTACIDVPIRLRDVVFLYNLMVLIPQTLDVILGMDWLAKHRGIIDCRHREVTLTTPWGSDMRATMDQDPRLTERAGGIFTMLPLKGMPVVQRFPDVFPEDLPGMPPDRDIEFIIDLIPGTASISKRPYQMPVNELEELKKQIRELQEKGFVRPSSSPWGAPVLFVKKKDGSMRMCVDYRSLNEVTIKNKYPLPRIDDLFDQLNGAKVFSKIDLRSGYHQLKIRTGDIPKTAFSTCYGLYEFTVMSFGLTNAPAYFMNLMNKVFMDYLDKFVVVFIDDILIYSKDEEEHAEHLRLVLEKLRKHKLYAKFSKCEFWLKEVAFLGHVISAGGVAVDPAKVEAVTEWKAPKSVTEIRSFLGLAGYYRRFIEGFSKIARPMTQLLKKEKKFVWSEQCQESFEQLKEKLTSAPILVLPDIRKDFVIYCDASRQGLGGRHYLIGNHCDIYTDHKSLKYIFTQSDLNLRQRRWLELIKDYDLEVHYHPGKANVVAEALSRKSHCNHLRMEGMVPELREEIAQLNLHIVPRGRINTLDIQPLLRTQIEEAQKDNEEVREVKERLAAGRAKEFSTDEKDVLWYKKRIYVPEQGGLRGLILKEAHESAYSLHPGSTKMYQDLKEGYWWPNMKRDVVEYVALCDVCQKVKAEHQRPAGLLQPLRIPEWKWDEIVCLHGVPKKIISDRGTQFTSHFWEKVHEALGSYLAVSTAYHPQTDGQTERTNQVLEDMLRACALDFSKDWERCLPYAEFSYNNSFQASLKMSTNEALFGRQCRTPLMWSETGERAVFGPDIIQEAEEKVRLIRDRLKVAQSRQKSYADTRRRNLEFKEGDYVYLKVSPMRETKRFKVKGKLAPRYVGPFQIIAKRGEVAYQLQLPENIADVHPVFHVSQLKKCLRVPEEQAPLEEIHISNDLTYPEHPIRILDEAEKRTRSKVWRMYKVQWSNHTEDEATWESEEFLRTEYPHIFENW

SEQ ID NO: 19343 - protein, 1430 aa, Oryza sativa
  Clone ID: TF_OSC400100j.C1.p2.fg
MASRRRATTSNDETQTPDLTTLAGVMATQTQLLQAIANNQGNRGGSSFGEFMRTKPPTFATAEEPMDAEDWLRIIEKKLTLVRVREANKVIFAANQLEGPAGDWWDTYKEAREEDAGEPNWEEFTTAFRDNFVPAAVMRMKKNEFRRLRKGNTTVQEYLNRFTQLARYATRDLADEEEKIDKFIEGLNDELRGPMIGQDHDSFQSLINKVVRLENDRKVVEHNRKRRLAMNRSPQTAPQRPKGTTSSAWRPTVVTTSRPAASSNFHRSVTIQNRAPAPNQAATGSVRTGSCFNCGEYEHFANKCPHPNKTPIRTGANATAIHGTATPAAGRGLFRTPQTNRTATGFGRGQVNHVRAEEAQEDQGVLMGMFSLNSTPVKVLFDSGASHSFISLKASQQHNLTRVKLRQPMLVHSPGVEIAVDTACIDVPIRLRDVVFLYNLMVLIPQTLDVILGMDWLAKHRGIIDCRHREVTLTTPWGSDMRATMDQDPRLTERAGGIFTMLPLKGMPVVQRFPDVFPEDLPGMPPDRDIEFIIDLIPGTASISKRPYQMPVNELEELKKQIRELQEKGFVRPSSSPWGAPVLFVKKKDGSMRMCVDYRSLNEVTIKNKYPLPRIDDLFDQLNGAKVFSKIDLRSGYHQLKIRTGDIPKTAFSTCYGLYEFTVMSFGLTNAPAYFMNLMNKVFMDYLDKFVVVFIDDILIYSKDEEEHAEHLRLVLEKLRKHKLYAKFSKCEFWLKEVAFLGHVISAGGVAVDPAKVEAVTEWKAPKSVTEIRSFLGLAGYYRRFIEGFSKIARPMTQLLKKEKKFVWSEQCQESFEQLKEKLTSAPILVLPDIRKDFVIYCDASRQGLGGRHYLIGNHCDIYTDHKSLKYIFTQSDLNLRQRRWLELIKDYDLEVHYHPGKANVVAEALSRKSHCNHLRMEGMVPELREEIAQLNLHIVPRGRINTLDIQPLLRTQIEEAQKDNEEVREVKERLAAGRAKEFSTDEKDVLWYKKRIYVPEQGGLRGLILKEAHESAYSLHPGSTKMYQDLKEGYWWPNMKRDVVEYVALCDVCQKVKAEHQRPAGLLQPLRIPEWKWDEIGMDFIVGLPKTATGYDSIWVIVDRLTKTARFIPVKTNYSSAKLAELYMTRIVCLHGVPKKIISDRGTQFTSHFWEKVHEALGSYLAVSTAYHPQTDGQTERTNQVLEDMLRACALDFSKDWERCLPYAEFSYNNSFQASLKMSTNEALFGRQCRTPLMWSETGERAVFGPDIIQEAEEKVRLIRDRLKVAQSRQKSYADTRRRNLEFKEGDYVYLKVSPMRETKRFKVKGKLAPRYVGPFQIIAKRGEVAYQLQLPENIADVHPVFHVSQLKKCLRVPEEQAPLEEIHISNDLTYPEHPIRILDEAEKRTRSKVWRMYKVQWSNHTEDEATWESEEFLRTEYPHIFENW

SEQ ID NO: 19344 - protein, 1534 aa, Oryza sativa
  Clone ID: TF_OSC9141j.C1.p1.fg
MSAHGNVSWGCVLWVQLYTSDQSKTIRIAVPAVMGGRPDSQWVVLSLALFSPTPELKFFSAGAVSERFAACGLAGGRYHVLVMVKTRNDPRDSNGASGSEEQINGAHTSGASSNIPSPPPENPMVIQMMTMMMQQMQQHYHEMLQQAQQNQQSGPPPLHLSKLLDFLYIKPLTFSSTTNLMEANDWLHAIEKKLNLLQCNDQEKVAFATHQLQGRHRFPRGSWHKRREFRALQQGTRTVTEYLHEFNRLVRYAPEDVRTDAKRQEKFLFGLDDELTNQLISGVYEDFKKLVDKAIHQEEQRNKMDRKRKAAQFRTPQGNSQKPRFMTGQLGEPSTLIVRQHRPYHSGNFNNDYNGGSHNSSEQHHHNSTPPPLMAPAESELPAMSAQSEQLKKESAGKPGPCFNYGKHGHFASKCPKLKRAGPKFVQARINHASAEEAQAAPEVVLGTFLVNSYPATVLFDSGATHSFISKKFAGTHGLSVVELKIPMRVHTPGNDMNTAHYCPSMTIEIKRSPFLSNLILLESKDLDVILGMDWLTRHKGVIDCASRTITLTNDKGEKITFRSPVSQKSVASLNQAAIKEQTEIVEKSPKELEDIPIVQEYPEVFPEDLTTMPPKREIEFWIDLAPGTAPIYKRPYRMAANELAEVKEQVDEQLRKGYIRLSTSPWGAPIIFVEKKDKTKRMCVNYRALNEVIIKNKYPLPRIDDLFDQLKGAKVFSKIDLRSGYHQLRIREEDIPKTAFTTRYGLFECTVMSFGLTNAPAFFMNLMNKVFMEFLDKFVVVFIDDILIYSKSEEEHEQHLRLVLEKLKEHQLYAKFSKCNFWLSEVKFLGHVITAQGVAVDPSNVESVTKWTPPKTIFQIRSFLGLAGYYRRFIENFSKIARPMTQLLKKDENFKWSVECNQSFEELKKKLVSAPVLILPDQMKDFQVYCDASRQGLGCVLMQEGRVVAYASRQLRPHETNYPTHDLELVAVVHALKMWRHYLIGNCCEVYTDHKSLKYIFTQPDLNLRQRRWLELIIDYDMSIHYHPGKANVVADALSRKSYCNALGTEGMCKELQQELEHLNLGIVEHGFVAALEARPTLMDQVRAAQINDPEIAELKKNMRVRKARDFLEDEHGTIWLGERLCVCVPDDKELKDLILTEAHQTQYSIHPGSTNMYQDLKEKFWWASMRREIAEFVALCDVCQRVKAEHQRPAGLLQPLQIPEWKWEEIGMDFFTGLPRTSSGHDSIWVAVDRLTKVAHFIRVHTTYTDKRLAELYLSRIMCLHGVPKKIVSDRGSQFTSKFWQRLQEELGTRLNFSTAYHPQTDGQTKRVNQILEDMLRACALDFGGAWDKSLPYAEFSYNNSYQASLQMAPFEALERLRIAQSRQKSYTDNRRRELTFEAGDYVYLRVTPLRGVHRFQTKGKLAPRFVGPYKILERRGEVAYQLELPSNMAGIHDVFDVSQLKKCLRVPEEQANSEHIDIQEDLTYVEKPVRILETSERRTRNKVTRFCRVQWSHHSEEEAIWEREDELKAAHPHLFASSSESRGRDSI

SEQ ID NO: 19345 - protein, 1405 aa, Oryza sativa
  unsure (1)..(1405): unsure at all Xaa locations
  Clone ID: TF_OSC30406j.C1.p2.np
LGVDRRRRRHGVAGTGSAKGKGGGAGSTYRGGQGGGRQLVVQRIVKEDGSVYYPILRRSNYSDWAVLMRVNLQAQGLWDAVDTGDVPYQEDCQALSAILRAVPAEMVRPLAEKDSAKDAWDALKSMRVGADRVKESRAQKLRQTFESMRFKNGEHLEDFSLRLQLGDDLSEEKVVXKLLRVVPRRYRQMALSIETLIDLTLLSIEDLTGRLLTVDDHPDSDGEDAGQVLFSEKEAPAHSNKEAGQNSAGGRASSSRQPHRSRRERDGNGSDGKSGSSQAANRNVSKDKCRYCGKLGHWAKDCCKAKRDREKLAQANLLITEPAQAADEGEPTLLMAQVCELAPATDPVITDEVTLKEERAHVSLQDEGPVDLDWILDTGASNHMTGYRDVFSELHTTVRGTVKFGDASRVWIEGRGMVLFACKNGDHCALTSVYYIPKLRSNMVSLGXLDEAHCKTVIEDGVLTLHDPQRQLLCRVRQGVGRLYVLHVELAQPVSLLAKGKDQAWVWHARYGHLNFDALRSLASRGMVRGIPTLERVTKVCDGCLISKQRRAPFPTAALHRATIHLDLVHGDICGPITSSTHGSKKYFLLLIDDLTRYMWLFLLTSKSEAPATIKRFKAGVEVETGCKLRVLHTDRGGEFTSVEFGLYCTNEGVARQLTTPYSPQQNSVIEHRNQTVVAMARCMMKAKNMPGEFXGEAVTTAVYILNRAPTKSVRDKTPFESWHGQTPVVHYFHTFGCVVYVKEVKPHIKLDDRSKVMVFLGYEPGSKAYRIYDPVAKRIVVSRDAVFDEAASWPWASPGEEASPQETFTVRYEVVAVDVPSRHSDSMSSPAHMGTPVPSISASPGVAVEFVSLPAETPDVDDEGPRRFWMVAKILDTTSPIELDSDELHVAAAEEPSNHAEAAQDALWMRAMQEXLKSIEENNTWTLADLPADKRPIGLKWVFKLKKDETGAIVKHKARLVAKGYVQRQGIDFDEVFAPVARMESVRLLLAIAAHLGSSVHHMNVKSAFLNGELEEEVYVAQPLGFIDDKHPHQVLRLNRALYGLRQAPRAWNAKLDVSLHELGFTRGITEHAVYTRGTGNARLIIGIYVDDLIITGAHSKTIQSFKEEMHSLFRMSDLGLLSYYLGIEVHQGNDGITINQSTYAQKLLKMGGLAASASVPMEPRLKLTKNSDRPSVDSTFYRGLVGSLRYLVHSRPDIAFAVGYVSRFMESPRNDHLTAVKHILRYVAGTMNYGCKFVNSGEEGIHLLGFSDSDLGGDAHDRKSTCGALFFLGSSPIVWQSQKQKVVALSSSKAEYIAATGAACLGIWLARLLAEVLGSDPGKALLKVDNKSAISLCKNPVFHDRSKHIDTRYHFIRQCIEEKVEVEFVPSDEXVADILTKPLGRIKFQEFRSQAGMDQAHQE

SEQ ID NO: 19346 - protein, 370 aa, Oryza sativa
  Clone ID: TF_OSC419957j.C1.p9.fg
MKAQAAATIRLSLSDSVMYQVMDEKSPKEIWDKLANLYMSKSLTSKLYLKQQLYGLQMQEESDLRMHVDVFNQLIVDLSKLDVKLDDEDKAIILLCSLPPSYEHVVTTLTYGKDTVKTEEIISSLLARDLRRSKKNEAMEASQAESLLVKAKHDHEAGVSKSKEHDHVCYKCHEFGHIRRNCPLLKKRRSASASLVAHSDDSESSSHEILTVSNEKSGEAWMLDSASSYHVTSKREWFSSYKSGDFGAVYLGDDTSYRVVGVGDVKFKMYDGNEVLLSYVRHVLGLRKSLISLGSLHETGWLYQVDSDRKTMNIMKDGKTVMTGERTSSCLYKLQGSAVAGGVMENGYAGVAVHDPEGGEPGVGSSGDSA

SEQ ID NO: 19347 - protein, 1616 aa, Oryza sativa
  Clone ID: TF_OSC900379j.C1.p17.fg
MSGQTGNGKDGDKGATFPYDYPSTSTSYVSTYSGKAPYFNDTDYATWKHKMKMHLKSINPLIWRIVEKGYVLQNPEEPTKEDDENEHKNAQAANAILSALSGSEFNRVDGIESAKVIWDTLRNLHEGTDSVRESKVEILKGQFERFVMLDGESPSDMYDRLSKIVNEIKGLGSKDMTDEVVVKKMVRAITPRNSTLVTIIRERPDYKTLTPHDLLGRILAHDMLEQESKEVIQYINQTSITSIKKEDLALKAKEEEEESRKSKSKAEIDDEEMALFVKKFGKFMKQSGFFKGSSSKYSSNKSSGRHSARVCYVCKEPRHFIADCPHIKDCLHFKEDKKLEKKEKHKHSKHDRYGQAHLGMIFGSDSESSSSDEEGVATFAVKPSSPPRFFNYSSDEDAPICLMAKESKVPSPLNSFNVDLVSDEEEDVEDEVMDDELFKSITKESIPHLSELLGRLEDQYATLERQEALLIREKKRSHELKSELAKEREKNEALVRLYKQTKESHANLEVANAQLQERVDGLDKAYLSLEEKFETLKNSVSLPMLCKSKMRSLCDSFTMALLKCHMGSKALKEYLGYQRDNFNHEGLGYVPPPKGKVDKSVMIKRPQGLSNFIKAKSILPNDYASHCSFDASYVLRKNASGRVVAKYVGPRGKNVSIKRVLWVPKALVTNMRGPKQESLSGGRSWVIDSGCTNHMTGEESMFCSLDLNGTSQENIVFGDNGKGKVMGLDRVCSACQAGKQIGAHHPVKNVMTTTRPLELLHMDLFGPIAYLSIGGNKYGLVIVDDFSRFTWVFFLHDKSETQAIFKKFAKRAQNEFDLKIKNIRSDNGKEFKNMCIESFLDEEGIKHEFSAPYSPQQNGVAERKNRTLIEMARTMLDEYKTSDCFWAEAVNTACHAINRLYLHRLLKKTPDELLTGNKPNVSYFRVFGSKCDILNKKARSSKFAPKVDEGFLLGYGSNECAYRVFNKTSNIVEIARDVTFDETNGSQVEQVDSHVLGEEEDPSEAIKRLALGDVRPREPQQGASSSTQVEPPTSTQADNPSTSSLDQGEEGEQVPPSPINLAHPRIHQSIQRDHPTDNILGDINKGVSTRSRIANFCEHYSFVSSIEPLRVEEALNDPDWVMAMQEELNNFTQNEVWTLVERPRQNVIGTKWIFRNKQDEAGVVIRNKARLVAQGFTQIEGLDFGETFAPVARLESIRILLAFATNLNFKLYQMDVKSAFLNGPINELVYVEQPPGFEDPKYPNHVYKLHKALYGLKQAPRAWYECFHNFLVKNGFEIGKADSTLFTKRHDNDIFVCQIYVDDIIFGSTNKSFSEEFSRMMTKCFEMSMMGELKFFLGLQIKQLKEGTFICQTKYLKDMLKKFGMENAKPIHTPMPSNGHLDLNEQGKDVDQKVYRSIIGSLLYLCASRPDIMLSVCMCARFQAAPKECHLVAVKRILRYLVHTSNLGLWYPKGARFDLICYADADYAGCKVDRKSTSGTCQFLGRSLVSWSSKKQNSVALSTAEAEYISAGSCCAQLLWMKQTLRDYGLNVSKILLLCDNESAIKIANNPVQHSRTKHIDIRHHFLRDHSTRGDIDIQHVRTDKQLADIFTKPLDEARFCELRSELNILDSRNVA

SEQ ID NO: 19348 - protein, 735 aa, Oryza sativa
  unsure (1)..(735): unsure at all Xaa locations
  Clone ID: TF_OSC23942j.C1.p1.np
PAIIMIIILFFGIKICXFMTKFPTFQKFDRSFLVVGFVALLKPHAFDGPNYKRWKACALLWLMAMQCFFASRGKMSEQPVSPEKEAKFEVTDCLFRVALINVLADNIVDMYMHMPSGKDMWDALEAKFGVSDAGSELYVMEQFYDYNMVDDXSVVEQAHEIQMLAKELENNKCVLSDKLVAGGIIAKLPHSWSDFATSLKHKRQEFSVTDFIGSLGVGEKARAKDNRGXKVEGGSSANLVQKKNPHASHNNKKVKPDVKPKTTINSKKKGKEKVKGDYFVCGKLGHWAKDCPDRKDKNSANMVVSNGRGTMGYGNLPTILSIFHSPNWRVDNGANSHLCADIFLFSSYQIAGGSSLLMGNRSLAAIHGVGMVVLKFTSGKTLQLKNVQHVPSIKRNLVSGSSCRDGFILVFKSNRCVVSKYGTFIGXGYDSGGLFRFSLDDRCNIVVNHVSNDDESNVWQXPLCHVNFGCMTRLANMSLISKFTLAKGSKCHTCVQSKQPRKPHKSEARNLAPLELVHSDMCEMNVVLTKGGKKYFMTLIDDCTRFCVYLLKTNDEALHYFMICKAEVNQLERKIKQLGSDQGGEYFSTEFTSFCEEFGIFHERMPLYSPQSNGVAERKNRTLTELVNAMLDTAGLSKEWWGEAILTACHVLNRISTKKEVTSFEEWEKKKLNLSYLRTXGCLAKVNVPIVKKRKLRLKTVDCVFLGYVIHGVGYRFLIANSRVSQQPAXSFLSS

SEQ ID NO: 19349 - protein, 271 aa, Oryza sativa
  Clone ID: TF_OSC419129j.C1.p1.fg
MSIVEHSASRSMREGGVSLPYPMLTSTNYSTWAIKMEANMEAQGIWDAIESAADDVVEKKKDKMALACLFGAVPDEVLQQIANKKTAKEAWESLKTRFLGVDRVKKARVQTLKSEFKALCMKKTETIDEFAGKISGLANAMSGLGATMTDDELVKKLLDSVPEKFLHIIAAIEQFCDLDTMPFEEAIGRLKAFEERIRKHSDNYGEQLLLTTRNTDDGAGRARSKRFDKSKVMCYHCQELGHFAFECPAKKKNKEIALLATASSDDEPTLL

SEQ ID NO: 19350 - protein, 320 aa, Oryza sativa
  Clone ID: TF_OSC900350j.C1.p20.fg
MEQTTFMKTKLNCMWSAARSSRIASKTRGEIPNNWYQSQFMPKILRFNKMSIVEHSASRSMREGGVSLPYPMLTSTNYSTWAIKMEANMEAQGIWDAIESAADDVVEKKKDKMALACLFGAVPDEVLQQIANKKTAKEAWESLKTRFLGVDRVKKARVQTLKSEFKALCMKKTETIDEFAGKISGLANAMSGLGATMTDDELVKKLLDSVPEKFLHIIAAIEQFCDLDTMPFEEAIGRLKAFEERIRKHSDNDGEQLLLTTRNTDDGAGRARGKRFDKSKVMCYHCQELGHFAFECPAKKKNKEIALLATASSDDEPTLL

SEQ ID NO: 19351 - protein, 498 aa, Oryza sativa
  Clone ID: TF_OSC402013j.C1.p4.fg
MDISRTNEGYTSCGPVVEMSWYRAGVLLLGAQSCLPVPEVPAVGGVGSVLLFMARMGWELCHVFRPYTVVLKCGMVGLGWLGTSWDPGSGCQFGLNHRRPWVKAGLKCLCNNMFNREKGKNVSGYASSNSSFQLNPPLASRELTRAHPWSIPSMRLSSQLPLVGSQDQNKYVFDRAFATQANELPMPEEHVPFCHDCREQGHYALNCPWVYAKEAPSFGLAGQTSLSQPPRTKSSLQPSVQSREPNEENPLNPGKCFLSSLSYHVGSHTKQAKGKKSKNQKRKAPMRTEEEVRKMTITSTEWPPAGITIPRRQRGNTFRGARQLTQHLLSHGGRVYDSEGSDQVSSDYEDESPRHLGEEEMESKACNRCGEIGHIASMCLTLCPHCGEDHPPGECPTRKVTCFLCEAPTILCTDSLSKELSSMEEVVSLPDLLQAEQRAINLRRAIPSRRPFSASNSNQKEASPVNDSNMQSYHIITEPIKDAVTRTMPAIPLQNQNE

SEQ ID NO: 19352 - protein, 415 aa, Oryza sativa
  Clone ID: TF_OSC402037j.C1.p4.fg
MSWHRAGVLLLGGSILPACPGGSGRRWGWMFNREKGKNVSGYASSNSSFQLNPPLASRELTRAHPWSIPSMRLSSQLPLVGSQDQNKYVFDRAFATQANELPMPEEHVPFCHDCREQGHYALNCPWVYAKEAPSFGLAGQTSLSQPPRTKSSLQPSVQSREPNEENPLNPGNCFLSSLSYHVGSHTKQAKGKKSKNQKRKAPMRTEEEVRKMTITSTEWPPAGITIPRRQRGNTFRGARQLTQHLLSHGGRVYDSEGSDQVSSDYEDESPRHLGEEEMESKACNRCGEIGHIASMCLTLCPHCGEDHPPGECPTRKVTCFLCEAPTILCTDSLSKELSSMEEVVSLPDLLQAEQRAINLRRAIPSRRPFSASNSNQKEASPVNDSNMQSYHIITEPIKDAVTRTMPAIPLQNQNE

SEQ ID NO: 19353 - protein, 313 aa, Oryza sativa
  Clone ID: TF_OSC858j.C1.p1.fg
MPEEHVPFCHDCREQGHYALNCPWVYAKEAPSFGLAGQTSLSQPPRTKSSLQPSVQSREPNEENPLNPGNCFLPSLSYHVGSHTKQAKGKKSKNQKRKAPMRTEEEVRKMTITSTEWPPAGITIPRRQRGNTFRGARQLTQHLLSHGGRVYDSEGSDQVSSDYEDESPRHLGEEEMESKACNRCGEIGHIASMCLTLCPHCEEDHPPGECPTRKVTCFLCEAPTILCTDSLSKELSSMEEAVSLPDLLQAEQRAINLRRAIPSRRPFSASNSNQKEASPVNDSNMQSYHIITEPIKDAVTRTMPAIPLQNQNE

SEQ ID NO: 19354 - protein, 1524 aa, Oryza sativa
  unsure (1)..(1524): unsure at all Xaa locations
  Clone ID: TF_OSC900038j.C1.p7.np
VKTRNGSRDSSNVSGSEEQISGARANSASDNSPSPPPENPTIAQVLDNQTQMMSMMMQQMQQQYHQVLQQVQQQAQQQQQNLQFGLPPPQSKLLEFLHVKLPTFSSTTNPIETNDWLHAIEKKLNLLQCNDQEKVAFATHXLQGPASVWWDNYVGTRPARTEVTWAEFCQSFNKAQVPEGIVAPKKREFRSLQQGTRTVIEYLHEFNRLARYAPEDVRTDAERQEKFLSGLDDELTNQLISRDYEDFQKLVDKAIRQEEQGNKMNRKRKASXFRTSQGNSQKPRFTMGHQGGPSTMIIRHHRPYHPDNFNSINNSGSHRNSEQHSLNPTPSPLMIPAQSVQSAQQEQPKKFGEKPELCFNCNEPRHMVRMCPKPRRARLKFVQARVNHASAEEAQSAPEVILGTFPVNSTPAVILFDSGATHSFISKRFAGAHGLSLVKLKIPMRVHTPGGGMTTTHYCPSMTVEIQGLIFPANLILLESKDLDVILGMDWLTRYRGVIDCASRTIKLTNAKGEVVTFQSPVPQKPGISLNQAAGEEQEVAVEKTTKKLEDIPIVREYPEVFPDDLTTMPPKRDIEFRIDLVPRTAPIHKRPYRMRANELAEVKNQVDEQLQKGYIRPSTSPWGALVIFVEKKDKTKRMCVDYRALNEVTIKNKYPLPRIDDLFDQLKGATVFSKIDLRSGYHQLRIREEDIPKTAFIARXGLFECTVMSFGLTNAPAFFMNLMNKVFMEFLDKFVVVFIDDILIYSKSEEEHEQHLRLVLEKLKEHQLYAKFSKCDFWLKEVQFLGHIVNAQGVAVDPANVESVTKWTPPRTVTQVQSFLXLAGYYRRFIENFSKIAKPMTQLLKKEEKFIWSAECNRSFEELKRRLVSAPVLILPDQTKVLQVYCDASRQGLGCVLMQDGKVVSYASWQLRPHEGNYPTHDLELAAVVHALKIWWHYLIGNRCEVYTDHKSLKYIFTQPDLNLRQRRWLELINDYDMGIHYHPGKANVVADALSRKSYCNVAWVEQLCCEVQCDLEHLNLGIVEHGFVAALEAQPTLVEQVRIAQASDPKIAELKKNMRVGKARGFVEDEQGTIWMGERLCVPENKELKDLIMTEAHQTQYSIHPGSTKMYQDLKEKFWWVNMRREIAEFVALCDVCQRVKAEHQRPAGLLQPLQIPEWKWEEIGMDFITGLPRTSSGHDSIWVVVDRLTKVAHCIPVHTTYSGKRLAELYLTRIMCLHGVPKKIVSDRGSQFTSKFXQKLQEELGTLLNFSTAYHPQTDGXTERVNQLLEDMLRACTLDFGGAWDKSLPYAEFSYNNSYQASLQMAPFEALYGWRCRTLLFWDQTGERQLFGTXVLNEAEEKVRAVRERLRIAQCRQKSYVDNRRRELIFETEDYVYLRVTPLRGVHHFQTKGKLAPRFVGPYRILERRGEVAYQLELPSNMLGIHNVFHVSQLKKCLRVPEEQASPDQIEIQKDLTYVEKPTRILETSERRTRNKVIRFCKVQWSHHSEEEATXERENELKTAHPHLFTNSSESRGRDSV

SEQ ID NO: 19355 - protein, 813 aa, Oryza sativa
  Clone ID: TF_OSC400433j.C1.p8.gm
MDLALQELARRIFCGVQIAFQEWPESRFGSLPHASAVDRASVPCAISCSPSLPLPRWLSSPPPDVFVRPDLCTAHLLLPDPILCARCLRSSVRLRTCTGRRAIKFLGSASSATALVLRGYCCYIGAFTKMSTEIGDKKMNDINGGNTASKSSGGTFSGVLADNIVDVYMHMPSGKDMWDALKAKFGAHEIQMLAKELENNNCELPDKFVAGVIIAKLPPSWTDFGTSLKHKRQEFSVTDLIGSLGVEEKARAKDNRGKKIEGGSSANLVQKKNPHASHNNNKKVKPDVKPKATTNFKKKGKGKAKGGCFVCGKSGYWAKDCPERKDKKSGNMVISEGGGTSRYGCKWVFKEKLRPDGTIEKYKARLVAKGYTQKEGEDFFDTYSSVARLTTIRVLLALAASHGLLVHQMDVKTAFLNGELDEEIYMDQPDGYVLEGQKGMVCKLLKSLYGLKQAPKQWHEKFDNTLTSAGFVVNEADKCVYYRYGGGEGVILCLYVDDILIFETSLNVIEEVKDFLSKSFEMKDFDCKAAPTPYDPSVLLRKNRRIARDQLRYSKIIGSLMYLASATRPDISFAVNKLGRFVSNPGDDHWHALERVMRYLKGIMSYEIHYVGYPKVLEGYSESNWIFDADEIKATSGYVFTLGGGAVSWKSCKQTILTRSTMEAELTALDTATVKAEWLRELLMDLPVVEKPVPAILMNCDNQTVIIKVNSSKDNMKSSRHVKRRLKCLRSSVRLRTCTGRRAIKFLGSASSATALVLRGYCCYIGAFTKMSTEIGDKKMNDINGGNTASKSSGMGGARPTPAPPGGFATGGG

SEQ ID NO: 19356 - protein, 1003 aa, Oryza sativa
  Clone ID: TF_OSC15301j.C1.p1.fg
MAGFADALRPDKFTGMHFKRWQIRVTLWLTAMKCFWVSTGKPMGVLNADQQKEFDEATTLFVGCILSVLGDRLVENKSKGKYKAQQTTNFKKKKNNNNPNQDERTCFVCGQPGYLARKCPQHKGMKAPAGQTSKSANVTIGNTGDGSGYGANIHVCADISLFSSYQAARGSTVLMGNGSHDSIDRNLVSGSRLTRDGFKLVFESNKVVVSKHGYFIGKGYECGGLFCFSLFDFCNKSVNHISGSVDDEANGGKRYFMTLIDDATRFCYVYLLKTKDEALDYFKIYKAEVENQLDRKIKRLWSDRGGEFFSNEFDLFCKEHGIIHERTPPYSPESNGIAERKNRTLTDLVNAMLDTAGLPKAWWGEALLTSNHVLNRVPNRNKDKTPYEIWIGRKPSLSYLRTWGCLAKINVPITKKRKLGPKTMDCVFLGYAHHSIAYRFLIVKSEVPDMHVGTIMESRDAIFFESFFPMKDTHSSSSQPSEIIPSSITPPEQTEYTHEYVTKDDDSEAPRRSKRQRMAKSFGDDFTVYLVDDTPKSISEAYASPDADYWKEAVRSEMDSIIANGTWEVTERPYGCKPVGCKWVFKKKLRPDASHGLLVHQMDVKTTFLNGELDEDIYMNQPDGFVVEGQEGKVCKLLKSLYGLKQAPKQWHEKFDKTLTSAGFAVNEVDKCVYYHHGGGEGVIPCLYVDDILIFGTNLEVINEVKSFLSQNFDMKDLGVADVILNMKLIRSENGITLLQSHYVEKILNRFGYIDNKPSPTPYDPSLLLRKNKRIARNQLQYSQIIGSLMYLASATRPDISFAMSKLSRFTSNPGDDHWRALERVMRYLKGTMELGFHYSGYPTVLEGYSDSNWISDMDEIKATSGYVFTLGGGAVSWRSCNQTILTRSTMEAELTALDTATVEAEWLRDLLMDLPIVEKPVPAILMNCDNQTVILKVNSSKDNMKSSRHVKRQVKSVRKLRNSGVITLDYIQTARNLADPFTKGLSRNVIDNASKEMGLRPM

SEQ ID NO: 19357 - protein, 996 aa, Oryza sativa
  Clone ID: TF_OSC379j.C1.p2.fg
MAPANPRHRLIAPIHAAAAAGGGGGGAGATSPSGLPSLVGIAHLLVSLGIVLASDKFLKQAFAAASIKFPSALFGMFCVFSVLVVLDAFAPALAKGFMDFFEPATLFIQRWLPLFYVPSLVVLPLAVRDVPAASGLKIFLIIFGGWFASLMVAGYTALTVRKIVQTQLIPAEPMSKPSPFATLEFWAWGAVFVASFAVAYVNPTALGTTARTCLPFLLASTVLGYMVGSGIPSGVKKVLHPIICCALSADLAAIAYGYLSRSGVDAVLGDYLTKAPSNPGAGDVLMGFLGSVIISFAFSMFKQRKLVKRHAAEIFTSIAIASTFSLYSTAILGRVIGLEPSLTISILPRCITVALALSIVSFFEGVNSSLTAAVVVLTGLIGANFVQAAMDKLGLNDPIARGIGTASSAHGLGTAALSAKEPEALPFCAIAYGLTGIFENMNTPRRENAKAIFTKSKTNYEVQGKSQARTARTSAGTGGRQEAAPRQQEAFGWEEASAAKVDSDEDDAAEECDDGAVVLGGVEREVAGEEVLQVLQPPDAIGAQHLDHAVHQLDEDILYYYPLAKTQKSSANLSVPKNCLSPGNLNLLGLGQPHLGRIVIILVEMRGILEYKEYNTVNRLFQFACKAEREVQGRNKHRSSFAGATSTRQSTPRQFTTAVRPPTSTPSHAQETSKNASVQTPAKSATSVASTGRTRDITCHRCHGIGHIARDYPNQRALFVNDDGEYTSTSDCDDEYALVATDHVGGQDNDDIEEVHLHPESLDQYPSLIVKLALSAKEKCEEQNQRHNLFQSKVLVKGHTVKVIIDSGSCNNLASEEMVKKLGLTTHPHPHPYHIQWFNTCGKMKEYEGAFHDEIPPRMTPGRQSEHDQEDGIESRTTPIQEGEDDEDITSSETHITSHVPMIIPSPSPFRPPETALTSNGPSAFLPTPIWVILDFVESYLATFQTHSVSCPNSSRVNGNHQNKTVMLLKPNLGLGPCNRLGPSRKCLPPPPRIST

SEQ ID NO: 19358 - protein, 1021 aa, Oryza sativa
  Clone ID: TF_OSC400758j.C1.p37.fg
MPTQPLLLLLLLPPSGGNLHGSRQSSPPPHRPDPRRRRRRRRRRRRGRHLSLGPTQRESSISQNARSLVAISHDLPIELTCFLKQAFAAASIKFPSALFGMFCVFSVLVVLDAFAPALAKGFMDFFEPATLFIQRWLPLFYVPSLVVLPLAVRDVPAASGLKIFLIIFGGWFASLMVAGYTALTVRKIVQTQLIPAEPMSKPSPFATLEFWAWGAVFVASFAVAYVNPTALGTTARTCLPFLLASTVLGYMVGSGIPSGVKKVLHPIICCALSADLAAIAYGYLSRSGVDAVLGDYLTKAPSNPGAGDVLMGFLGSVIISFAFSMFKQRKLVKRHAAEIFTSIAIASTFSLYSTAILGRVIGLEPSLTISILPRCITVALALSIVSFFEGVNSSLTAAVVVLTGLIGANFVQAAMDKLGLNDPIARGIGTASSAHGLGTAALSAKEPEALPFCAIAYGLTGIFENMNTPRRENAKAIFTKSKTNYEVQGKSQARTARTSAGTGGRQEAAPRQQEAFGWEEASAAKVDSDEDDAAEECDDGAVVLGGVEREVAGEEVLQVLQPPDAIGAQHLDHAVHQLDEDILYYYPLAKTQKSSANLSVPKNCLSPGNLNLLGLGQPHLGRIVIILVEMRGILEYKEYNTVNRLFQFACKAEREVQGRNKHRSSFAGATSTRQSTPRQFTTAVRPPTSTPSHAQETSKNASVQTPAKSATSVASTGRTRDITCHRCHGIGHIARDYPNQRALFVNDDGEYTSTSDCDDEYALVATDHVGGQDNDDIEEVHLHPESLDQYPSLIVKLALSAKEKCEEQNQRHNLFQSKVLVKGHTVKVIIDSGSCNNLASEEMVKKLGLTTHPHPHPYHIQWFNTCGKMKEYEGAFHDEIPPRMTPGRQSEHDQEDGIESRTTPIQEGEDDEDITSSETHITSHVPMIIPSPSPFRPPETALTSNGPSAFLPTPIWVILDFVESYLATFQTHSVSCPNSSRVNGNHQNKTVMLLKPNLGLGPCNRLGPSRKCLPPPPRIST

SEQ ID NO: 19359 - protein, 1304 aa, Oryza sativa
  unsure (1)..(1304): unsure at all Xaa locations
  Clone ID: TF_OSC422113j.C1.p1.np
MAGFADALRPDKFTGVHFKRWQIRVTLWLTAMKCFWVSTDKPMGVLNADQQKEFDEATTLFVGCILSVLGDRLVEVYMHMTDAKELXDALNTKFGATDASNDLYIMEQFHDYKMADNRSVVEQAHEIQTTAKELELLKCVLPDKFVAGCTIAKLTPSWRGFGTALKHKRQEYSVEGLIASLDVEEKAREKDAASKGDGGQSTANVVHKAQNKSKGKYKAQQTTNFKKKNNNNNPNQDERTCFVCGQPGYLARKCPQRKGMKAPAGQTSKSANVTIGNTGDGSGYGNLPTVFSVNQSTNWWVDTGANAHVCADISLFSSVARGSTVLMGNRSHAFVHGVGTVDLKFTSGKIVQLKNVQHVPSIDRNLVSGSRLTRDRFKLVFESKVVVSKHGYFIGKGYECGGLFCFSLSDFCNKSMNHICGSVDDEANVWHSRLCHINFGLMSRLSSMCLIPKFSIVKGSKCHSCVQSKQPRKPHKAAEERNLAPLELLHSDLCEMNRVLTKGEKRYFMTLIDDATRFCYVYLLKTKDEALDYFKIYKAEVENQLDRKKKRLRSDRDVEFFXNEFDLFCEEHDIIHERTPPYSPESNGFAESENRTLTDLVNAMLDTAGLPKAWWGEALLTSNHVLNRVPNRNKDKTPYKIWIGRKPSLSYLRTWGCLAKVNASITKKRKLGPKTVDCVFLGYAHHSIAYRFLIVKSEVPDMHLGTIMESRYATFFESFFPMKDTHSSSSQPSEIIPSSITLPEQTEHTHEHVTEEDDSEAPRRSKRQRTAKSFGDDFTVYLVDDTPKSILEAXASPDADYWKXAVRSEMDSIIANGTWEVTERPYGCKPMGCKWVFKKKLRPDGTIEKYKARLVAKGYTQKEGEDFFDTYSPVARLTTVRMLLSLAASHGLLVHQMDVKTAFLNGELDEEIYMDQPDGFVVEGQEGKVCKLLKSLYGLTQAPKQWHEKFDKTLTSAGFAVNEADKCVYYRHGGGEGVILXLYVDDILIFGTNLEVINEVKSFLSQNFDIKDLGVADVILNIKLIRGENGITLLQSHYVEKIFNRFGYIDSKPSPTPYDPSLLLRKNKRIARNQLEYSQIIGSLMYLASATRPDISFAVSKLSQFTSNPGDDHWRAVERVMRYLKGTMELGLHYSGYPAVLEGYSDSNWISDVDEIKATSGYVFTLGGGAVSWRSCKQTILTRSTMEAELTALDTATVEAEWLCDLLMDLPIVEKPTCEKTIEVCQEIEKLRSYNVGLHPNNXKPSRSLHEGTITKCDRXCIEGDGFETHSILERTHLCKLDCWSQSMKILSESSRKLTKDLGV

SEQ ID NO: 19360 - protein, 1388 aa, Oryza sativa
  Clone ID: TF_OSC101253j.C1.p7.fg
MGCIKDIPTLKGDNYAEWKRKLDLAFILGEVDWVLTTPCPIEPADLVRGENESDADWQKRQRDNAPLVMSYDIEQKKWSLANKKCLAVVKNTIEPTILGSIPECDAVSEYLERIKSQFTGSSKTYATQLIKQLVTERYHGGGVRDHILRMSNMASKLKPMDLGITDDFLVHLVMASLPKQFDNFIVNYNISPEKWNFEKLIANCVQEEERIKESNGGSINYVKDKKKNHKSPTSKGKQSQHLPQQQQFAVEKDQCLHCKKTGHYKKDCPDFLKMIMAKKGENIITFVNESHYVGYSRSTWWIDSGATIHACNCLKAFRSTRTTQRRESTIRVANGVEEKVEAVGDLPLELANGFILLLRDVFYVPSLQRNLISVSKLDFDGYDCRFGSGKCELWHNNACIGLAVLRDELYLLSLSENVNVVSSLTKENKKRKRTPDVSSKLWHCRLGHISRGRIERLVKNEILPPLEFSDLEQCIECIKGKFVKSIKKGAKRSAGILEIIHTDICGPFPVKSVDGYDSFITFTDDYSRYGYIYPIKERSEALDKFKIFKAEVENQHDIKIKVVRSDRGGEYYGRHTPYGQVPGPFARFLLENGIVAQYSTPGEPQQNGVAERRNRTLMDMVRSMMSYSTLPLGLWMEALKTAIHILNRVPSKSVPKTPYELWTGRVPSLTHLRVWGSPAEAKVFNPNIGKLDPKTVSCHFIGYPERSKGYRFYCPNSYTKFVETRHAVFLEDEMIRGSSVVREIDLEERRVSVPAPSTQEPFFSLPADVVPAMPVIEVPAPVVTPPVATMNESEEPVIQDSTEMVATPEEELQQPQIDNVPVQETHQEPQVQDVPNVQAPRRSERVRRSAIRDDYKVYNIEESHMEDDPTSYEEAMRSARSSEWLEAMKDEMKSMKLNDVWDLEEIPKGAKTVGCKWVYKTKYDSRGNIEKFKARLVAKGFTQREGIDYNETFSPVSCKDSFRIIMALVAHYDLELHQMDVKTAFLNGDLEEKVYMAQPKGFVMKGNENMGCRLKRSIYGLKQASRQWYLKFDGTIKKFGFQENVEDNCIYSKFKNGRFIFLILYVDDILLASSDVSLLQETKKFLSSNFDMKDLGEASYVLGIEIHRDRTKYALGLSQKTYIEKVLKKFNMYRCSATPAPIMKGEKYGASQCPRNQYELNEMKTKPYASAVGSLQYAQVCTRPDLAFVTGLLGRFQSNPGLEHWKLVKKVLRYLQGTKGLMLSYRRSESLQIVGYSDSDFAKDNTKSTSGYVFTLAGGAISWKSSKQTITAGSTMYAEFIACYEATGQVNWLKKFIPGLKVVDSIEKPLKLYCDNEPAVMYAHNNQSSGAAKHIDIKYYVVKDKVRDQTISLEHIKTERMLADPLTKGLPPNVFKEHVAGMGLREAL

SEQ ID NO: 19361 - protein, 355 aa, Oryza sativa
  Clone ID: TF_OSC101253j.C1.p8.gm
MPQTVPPKTAPRKPPPPTAVDRPISCCCCLGGEEKEARRCGRRGGAGEAERRRGRRGGYSLMGCIKDIPTLKGDNYAEWKRKLDLAFILGEVDWVLTTPCPIEPADLVRGENESDADWQKRQRDNAPLVMSYDIEQKKWSLANKKCLAVVKNTIEPTILGSIPECDAVSEYLERIKSQFTGSSKTYATQLIKQLVTERYHGGGVRDHILRMSNMASKLKPMDLGITDDFLVHLVMASLPKQFDNFIVNYNISPEKWNFEKLIANCVQEEERIKESNGGSINYVKDKKKNHKSPTSKGKQSQHLPQQQQFAVEKDQCLHCKKTGHYKKDCPDFLKMIMAKKGIPFDEDYAKKRKHH

SEQ ID NO: 19362 - protein, 694 aa, Oryza sativa
  Clone ID: TF_OSC11286j.C1.p1.fg
GYSLMGCIKDILTLKGDNYAEWKRKLDLAFILGDVDWVLTTPCPIEPAELIRGENESDADWQKRQRDNAPLVMSYDIEQKKWSLANKKCLAVVKNTIEPTILGSIPECDAVSEYLERIKSQFTGSSKTYATQLIKQLVTERYHGGGVRDHILRMSNMASKLKPMDLGITDDFLVHLVMASLPKQFDNFIVNYNISPEKWNFEKLIANCVQEEERIKESNGCSINYVKDNKKKNHKSSPTSKAKQSQHLPQQQQFAVEKDQCLHCKKTGHYKKDCPDFLKMIMARKDELYLLSLSENVNVVSSLTKENKKRKRTPDVSSKLWHCRLGHISRGRIERLVKNEILPPLEFSDLEQCIECIKGKFVKSIKKGAKRSTGILEIIHTDICGSFPVKSVDGYDSFITFTDHYFRYGYIYPIKERSEALDKFKIFKAEVENQHDIKIKVVRSNRGGEYYVDIHLMGKSMDLLQGEPQQNGVAERRNRTLMDMVRSMMSYSTLPLGLWMEALKTAIHILNRVPSKSMPKTPYELWTGRVPSLAHLRVWGSPAEAKVFNPNIGKLDPKTVSCHFIGYPERSKGYRFYCPNSYTKFVETRHAVFLEDEMIRGSSVVREIDLEERRVSVPAPSTQEPFFSLPADVVPAIPVIDVPAPVVTSPVATMNENEEPVIQDSTEMVATPEEELQQPQIDNVPVQETQQEPQ

SEQ ID NO: 19363 - protein, 1395 aa, Oryza sativa
  Clone ID: TF_OSC14708j.C1.p1.fg
MATPSTRSRGYSLMGCIKDIPTLKGDNYAEWKRKLDLAFILGEVDWVLTTPCPIEPADLVRGENESDADWQKRQRDNAPLVMSYDIEQKKWSLANKKCLAVVKNTIEPTILGSIPECDAVSEYLERIKSQFTGSSKTYATQLIKQLVTERYNGGGVRDHILRMSNMASKLKPMDLGITDDFLVHLVMASLPKQFDNFIVNYNISPEKWNFEKLIANCVQEEERIKESNGGSINYVKDKKKNHKSPTSKGKQSQHLPQQQQFAVEKDQCLHCKKTGHYKKDCPDFLKMIMAKKGENIITFVNESHYVGYSRSTWWIDSGATIHACNCLKAFRSTRTTQRRESTIRVANGVEEKVEAVGDLPLELANGFILLLRDVFYVPSLQRNLISVSKLDFDGYDCRFGSGKCELWHNNACIGLAVLRDELYLLSLSENVNVVSSLTKENKKRKRTPDVSSKLWHCRLGHISRGRIERLVKNEILPPLECIECIKGKFVKSIKKGAKRSAGILEIIHTDICGPFPVKSVDGYDSFITFTDDYSRYGYIYPIKERSEALDKFKIFKAEVENQHDIKIKVVRSDRGGEYYGRHTPYGQVPGPFARFLLENGIVAQYSTPGEPQQNGVAERRNRTLMDMVRSMMSYSTLPLGLWMEALKTAIHILNRVPSKSVPKTPYELWTGRVPSLTHLRVWGSPAEAKVFNPNIGKLDPKTVSCHFIGYPERSKGYRFYCPNSYTKFVETRHDVFLEDEMIRGSSVVREIDLEERRVSVPAPSTQEPFFSLPADVVPAMPVIEVPAPVVTPPVATMNESEEPVIQDSTEMVATPEEELQQPQIDNVPVQETHQEPQVQDVPNVQAPRRSERVRRSAIRDDYKVYNIEESHMEDDPTSYEEAMRSARSSEWLEAMKDEMKSMKLNDVWDLEEIPKGAKTVGCKWVYKTKYDSRGNIEKFKARLVAKGFTQREGIDYNETFSPVSCKDSFRIIMALVAHYDLELHQMDVKTAFLNGDLEEKVYMAQPKGFVMKGNENMGCRLKRSIYGLKQASRQWYLKFDGTIKKFGFQENVEDNCIYPKFKNGRFIFLILYVDDILLASSDVSLLQKTKKFLSSTFDMKDLGEASYVLGIEIHRDRTKYALELSQKTYIEKVLKKFNMYRCSATPAPIMKGEKYGASQCPRNQYELNEMKTKPYASAVGSLQYAQVCTRPDLAFVTGLLGRFQSNPGLEHWKLVKKVLRYLQGTKGLMLSYRRSESLQIVGYSDSDFAKDNTKSTSGYVFTLAGGAISWKSSKQTITAGSTMYAEFIACYEATGQVNWLKKFIPGLKVVDSIEKPLKLYCDNEPAVMYTHNNQSSGAAKHIDIKYYVVKDKVRDQTISLEHIKTERMLADPLTKGLPPNVFKEHVAGMGLREAL

SEQ ID NO: 19364 - protein, 1395 aa, Oryza sativa
  Clone ID: TF_OSC14723j.C1.p1.fg
MATPSTRSRGYSLMGCIKDIPTLKGDNYAEWKRKLDLAFILGEVDWVLTTPCPIEPADLVRGENESDADWQKRQRDNAPLVMSYDIEQKKWSLANKKCLAVVKNTIEPTILGSIPECDAVSEYLERIKSQFTGSSKTYATQLIKQLVTERYNGGGVRDHILRMSNMASKLKPMDLGITDDFLVHLVMASLPKQFDNFIVNYNISPEKWNFEKLIANCVQEEERIKESNGGSINYVKDKKKNHKSPTSKGKQSQHLPQQQQFAVEKDQCLHCKKTGHYKKDCPDFLKMIMAKKGENIITFVNESHYVGYSRSTWWIDSGATIHACNCLKAFRSTRTTQRRESTIRVANGVEEKVEAVGDLPLELANGFILLLRDVFYVPSLQRNLISVSKLDFDGYDCRFGSGKCELWHNNACIGLAVLRDELYLLSLSENVNVVSSLTKENKKRKRTPDVSSKLWHCRLGHISRGRIERLVKNEILPPLECIECIKGKFVKSIKKGAKRSAGILEIIHTDICGPFPVKSVDGYDSFITFTDDYSRYGYIYPIKERSEALDKFKIFKAEVENQHDIKIKVVRSDRGGEYYGRHTPYGQVPGPFARFLLENGIVAQYSTPGEPQQNGVAERRNRTLMDMVRSMMSYSTLPLGLWMEALKTAIHILNRVPSKSVPKTPYELWTGRVPSLTHLRVWGSPAEAKVFNPNIGKLDPKTVSCHFIGYPERSKGYRFYCPNSYTKFVETRHDVFLEDEMIRGSSVVREIDLEERRVSVPAPSTQEPFFSLPADVVPAMPVIEVPAPVVTPPVATMNESEEPVIQDSTEMVATPEEELQQPQIDNVPVQETHQEPQVQDVPNVQAPRRSERVRRSAIRDDYKVYNIEESHMEDDPTSYEEAMRSARSSEWLEAMKDEMKSMKLNDVWDLEEIPKGAKTVGCKWVYKTKYDSRGNIEKFKARLVAKGFTQREGIDYNETFSPVSCKDSFRIIMALVAHYDLELHQMDVKTAFLNGDLEEKVYMAQPKGFVMKGNENMGCRLKRSIYGLKQASRQWYLKFDGTIKKFGFQENVEDNCIYSKFKNGRFIFLILYVDDILLASSDVSLLQETKKFLSSNFDMKDLGEASYVLGIEIHRDRTKYALGLSQKTYIEKVLKKFNMYRCSATPAPIMKGEKYGASQCPRNQYELNEMKTKPYASAVGSLQYAQVCTRPDLAFVTGLLGRFQSNPGLEHWKLVKKVLRYLQGTKGLMLSYRRSESLQIVGYSDSDFAKDNTKSTSGYVFTLAGGAISWKSSKQTITAGSTMYAEFIACYEATGQVNWLKKFIPGLKVVDSIEKPLKLYCDNEPAVMYTHNNQSSGAAKHIDIKYYVVKDKVRDQTISLEHIKTERMLADPLTKGLPPNVFKEHVAGMGLREAL

SEQ ID NO: 19365 - protein, 1217 aa, Oryza sativa
  unsure (1)..(1217): unsure at all Xaa locations
  Clone ID: TF_OSC15718j.C1.p5.np
DFLVHLVMASLPKQFDNFIVNYNISEKXNFEKLIANCVQEEERIKESNGGSINYVKDKKNHKSPTSKGKQSQHLPSNNFAVEKDQCLHCKKTGHYKKDCPDFLKMIMEKGENIITFVNESHYVGYSRSTWWIDSGATIHACNCLKAFRSTRTTQRRESTIRVANGVEEKVEAVGDLPLELANGFILLLRDVFYVPSLQRNLISVSKLDFDGYDCRFGSGKCELWHNNACIGLAVLRDELYLLSLSENVNVVFLTKENKKRKRTPDVSSKLWHCRLGHISRGRIERLVKNEILPPLEFSDLEQCIECIKGKFVKSIKKGAKRSAGILEIIHTDICGPFPVKSVDGYDSFITFTDDYSRYGYIYPIKERLEALDKFKIFKAEVENQHDIKIKVVRSDRGGEYYGRHTPYGQVPGPFARFLLENGIVAQYSTPGEPQQNGVAERRNRTLMDMVRSMMSYSTLPLGLWMEALKTAIHILNRVPSKSVPKTPYELWTGRVPSLTHLRVWGSPTEAKVFNSNIGKLDPKTVSCHFISYPERSKGYRFYYPNSYTKFVETRHAVFLEDEMIRGSSVVREIDLEERRVSVPAPSTQEPFFSLPADVVPAMPVIEVPAPVVTPPVATLNESEEPVIQDSTEMVATPEEELQQPQINNVPVQETHQEPQVQDVPNVQAPRRSERVRRSAIRDDYKVYNIEESHMEDDPTSYEEAMRSARSSEWLESMKDEMKSMKLNDVWDLEEIPKGAKTVGCKWVYKTKYDSRGNIEKFKARLVAKGFTQREGIDYNETFSPVSCKDSFRIIMALVAHYDLELHQMDVKTAFLNGDLEEKVYMAQPKGFVMKGNENMGCRLKRSIYGLKQASRQWYLKFDGTIKKFGFQENVEDNCIYSKFKNGRFIFLILYVDDILLASSDVSLLQETKKFLSSNFDMKDLGEASYVLGIEIHRDRTKYALGLSQKTYIEKVLKKFNMYRCSTTPAPIMKGEKYGASQCPRNQYELNEMKTKPYASAVGSLQYAQVCTRPDLAFVTGLLGRFQSNPGLEHWKLIKKVLHYLQGTKGLMLSYRRSESLQIVGYSDSDFAKDNTKSTSGYVFTLAGGAISWKSSKXTITAGSTMYAEFIACYETTGQVNWLKKFIPGLKVVDSIEKPLKLYCDNEPAVMYAHNNQSSGAAKHIDIKYYIVKDKVRDQTISLEHIKTERMLADPLTKGLPPNVFKEHVAGMGLREAL

SEQ ID NO: 19366 - protein, 770 aa, Oryza sativa
  Clone ID: TF_OSC18458j.C1.p2.hg
MSYDIEQKKWSLANKKCLAVVKNTIEPTILGSIPECDAVSEYLERIKSQFTGSSKTYATQLIKQLVTERYHGGGVRDHILRMSNMASKLKPMDLGITDDFLVHLVMASLPKQFDNFIVNYNISPEKWNFEKLIANCVQEEERIKESNGGSINYVKDKKKNHKSPTSKGKQSQHLPQQQQFAVEKDQCLHCKKTGHYKKDCPDFLKMIMAKKGENIITFVNESHYVGYSRSTWWIDSGATIHACNCLKAFRSTRTTQRRENTIRVANGVEEKVEAVGDLPLELANGFILLLRDVFYVPSLQRNLISVSKLDFDGYDCRFGSGKCELWHNNACIGLAVLRDELYLLSLSENVNVVSSLTKENKKRKRTPDVSSKLWHCRLGHISRGRVERLVKNEILPPLEFSDLEQCIECIKGKFVKSIKKGAKRSAGILEIIHTDICGPFSVKSVDGYDSFITFTDDYSRYGYIYPIKERSEALDKFKIFKAEVENQHDIKIKVVRSDRGGEYYGRHTPYGQVPGPFARFLLENGIVAQYSTPGEPQQNGVAERRNRTLMDMVRSMMSYSTLPLGLWMEALKTAIHILNRVPSKSVPKTPYELWTGRVPSLTHLRVWGSPAEAKVFNPNIGKLDPKTVSCHFIGYPERSKRYRFYCPNSYTKFVETRHAVFLEDEMIRGSSVVREIDLEERRVSVPAPSTQEPFFSLPADVVPAMPVIEVPAPVVTPPVATMNESEEPVIQDSTEMVVTPEEELQQPQIDNVPVQETHQEPQVQDVPNVQ

SEQ ID NO: 19367 - protein, 1390 aa, Oryza sativa
  Clone ID: TF_OSC26474j.C1.p5.fg
MATPSTRSRGYSLMGCIKDIPTLKGDNYAEWKRKLDLAFILGEVDWVLTTPCPIEPAELVRGENESDADWQKRQRDNAPLVMSYDIEQKKWFLANKKCLAVVKNTIEPTILGSIPECDAVSEYLERIKSQFTDSSKTYATQLIKQLVTERYHGGGVRDHILRMSNMASKLKPMDLGITDDFLVHLVMASLPKQFDNFIVNYNISPEKWNFEKLIANCVQEEERIKESNGGSINYVKDKKKNHKSPTSKGKQSQHLPQQQQFAVEKDQCLHCKKTGHYKKDCPDFLKMIMAKKGENIITFVNESHYVGYSRSTWWIDSGATIHACNCLKAFRSTRTTQRRESTIRVANGVEKVEAVGDLPLELANGFILLLRDVFYVPSLQRNLISVSKLDFDGYDCRFGSGKCELWHNNACIGLAVLRDELYLLSLSENVNVVSSLTKENKKRKRTPDVSSKLWHYRLGHISRGRIERLVKNEILPPLEFSDLEQCIECIKGKFVKSIKKGAKRSAGILEIIHTDICGPFPVKSVDGYDSFITFTDDYSRYGYIYPIKERSEAMDKFKIFKAEVENQLDIKIKVVRSDRGGEYYGRHTPYGQVPGPFARFLLENGIVAQYSTPGEPQQNGVAERRNRTLMDMVRSMMSYSTLPLGLWMEALKTAIHILNRVPSKSVPKTPYELWTGRVPSLTHLRVWGSPAEAKVFNPNIGKLDPKTVSCHFIGYPERSKGYRFYCPNSYTKFVETRHAVFLEDEMIRGSSVVREIDLEERRVSVPAPSTQEPFFSLPADVVPAMPVIEVPMNESEEPVIQDSTEMVATPEEELQQPQIDNVPVQETHQEPQVQDVPNVQAPRRSERVRRSAIRDDYKVYNIEESHMEDDPTSYEEAMRSARSSEWLEAMKDEMKSMKLNDVWDLEEIPKGAKTVGCKWVYKTKYDSRGNIEKFKARLVAKGFTQREGIDYNETFSPVSCKDSFRIIMALVAHYDLELHQMDVKTAFLNGDLEEKVYMAQPKGFVMKGNENMGCRLKRSIYGLKQASRQWYLKFDGTIKKFGFKENVEDNCIYSKFKNGRFIFLILYVDDILLASSDVSLLQETKKFLSSNFDMKDLGEASYVLGIEIHRDRTKYALGLSQKTYIEKVLKKFNMYRCSATPAPIMKGEKYGASQCPRNQYELNEMKTKPYASAVGSLQYAQVCTRPDLAFVTGLLGRFQSNPGLEHWKLVKKVLRYLQGTKGLMLSYRRSESLQIVGYSDSDFAKDNTKSTSGYVFTLAGGAISWKSSKQTITAGSTMYAEFIACYEATGQVNWLKKFIPGLKVVDSIEKPLKLYCDNEPAVMYAHNNQSSGAAKHIDIKYYVVKDKVRDQTISLEHIKTERMLADALTKGLPPNVFKEHVAGMGLREAL

SEQ ID NO: 19368 - protein, 1197 aa, Oryza sativa
  Clone ID: TF_OSC34338j.C1.p3.fg
VDCVLTTPCPIEPAELVRGENESDADWQKRQRDNAPLVMSYDIEQKKWSLANKKCLAVVKNTIEPTILGSIPECDAVSEYLEKIKSQFTGSSKTYATQLIKQLVTERYHGGGVRDHILRMSNMASKLKPMDLGITDDFLEERIKGSNGGSINYVKDKKKNHKSPASKAKQSQHLPQQQQFAVEKDQCLHCKKTGHYKKDCPDFLKMIMARKGENIITFVNESYYVGYSRSTWWIDSGATIHACNCLKAFRSTRTTQRRESSIRVANGVEEKVEAVGDLPLELANGFMLLLRDVFYVPSLQRNLISVSKLDFDGYDCRFGSGKCELWHNNACIGLAVLRDEFYLLSLSENVNVVSSLTKENKKRKRTPDVSSKLWHRRLGHISRGRIERLVKNEILPPLEFSDLEQCIECIKGKFVKSIKKGAKRSARILEIIHTDICGPFPVKSVDGYDSFITFTDDYSRYCYIYPIKERSEALDKFKIFKAEVENQHDIKIKVVRSDRGGEYYGRHTPYGQVPGPFARFLLENGIVAQYSTPGEPQQNGVAKRRNRTLMDMVRSMMSYSTLPLGLWMEALKTTIHILNRIPSKSVPKTPYELWTGRVPSLAHLRVWGSSAEAKVFNPNIGKLDPKTVGCHFIGYPERSKGYRFYCPNSYTKFVEMRHAVFLEDEMIRGSSDSTEMVATPEEELQQPQIDNVPVQETQQEPQVQDVPNMQAPRRSERVRRSAIRDDYKIYNIEESHMEDDPTSYEEAMRSARSSEWLEAMKDEMKSMKLNNVWDLEEIPKRAKTDLMALVAHYDLELHQMDVKTAFLNGDLEEIVYMVQPKGFVMKGNENMGCRLKRSIYGLKQASRQWYLKFDGTIKKFGFQENVEDNCIYSKFKNGRFIFLILYVDDILLASSDVSLLQETKKFLSSNFDMKDLGEASYVLGIEIHRDRTKYALGLSQKTYIEKVLKKFNMYRCSATPAPIVKGEKYGASQCPRNQYELNEMKTKPYASAVGSLQYAQVCTRPDLAFVTGLLGRFQSNPGLEHWKLVKKVLRYLQGTKGLMLSYRRSESLQIVGYSDSDFAKDNTKSTSGYVFTLAGGAISWKSSKQTITAGSTMYAEFIACYEATGQVIDSIEKPLKLYCDNEPAVMYAHNNQSSGAAKHIDIKYYVVKDKVRDQTISLEHIKTERMLADPLTKGLPPNVFKEHVAGMGLREAL

SEQ ID NO: 19369 - protein, 1148 aa, Oryza sativa
  Clone ID: TF_OSC400203j.C1.p35.fg
MEKKLDLAFILGEVDWVLTTPCPIEPAELVRGENESDADWQKRQRDNAPLVMSYDIEQKKWSLANKKCLAVVKNTIEPTILGSIPECDVVSEYRERIKSQFTGSSKTYATQLIKQLVTERYHGGGVRDHILRMSNMASKLKPMDLGITDDFLVHLVMASLPKQFDNFIVNYNISPEKWNFEKLIANCVQEEERIKESNGGSINYVKDKKKNHKSPTSKGKQSQHLPQQQQFAVEKDQCLHCKKTGHYKKDCPDFLKMIMAKKGENIITFVNESHYVGYSRSTWWIDSGATIHACNCLKAFRSTRTTQGRESSIRVANGFEEKVEAVGDLPLELANGFTLLLRDVFYVPSLQRNLISVSKLDFDGYDCRFGSGKCELWHNNACIGLAVLRDELYLLSLSENVNVVSSLTKENKKRKRTSDVSSKLWHCRLGHISRGRIERLVKNEILSPLEFSDLEQCIECIKGKFVKSIKKGAKRSAGILEIIHTDICGPFPMKSMDGYDSFITFTDDYSRYGYIYPIKERSEALDKFKIFKAEVENQHDIKIKVVRSDRGGEYYGRHTPYGQVPGPFARFLLENGIVAQYSTPGEPQQNGVAERRNRTLMAMDRKSTLANSPPYTKFVETRHAVFLEDGMIRGSSVVREIDLEERRVSVPAPSTQEPFFSLPADVVPAMPVIEVPAPVVTPPVATMNESEEPVIQDSTEMVATPEEELQQPQIDNVPVQETHQEPQVQDVPNVQAPRRSERVRRSAIRDDYKVYNIEESHMEDDPTSYEEAMRSARSSEWLEAMKDEMKSMKLNDVWDLEEIPKGAKTVGCKWVYKTKYDSRGNIEKFKARLVAKGFTQREGIDYNETFSPVSCKDSFRIIMALVAHYDLELHQMDVKMAFLNGDLEEKETKKFLSSNFDMKDLGEASYVLGIEIHRDRTKYALGLSQKTYIEKVLKKFNMYRCSATPAPIMKGEKYGASQCPRNKYELNEMKTKPYASAVGSLQRSESLQIVGYSDSDFAKDNTKSTSGYVFTLAGGAISWKSSKQTITGGSTMYAEFIACYEATGQVNWLKKFIPGLKVVDSIEKPLKLYCDNEPAVMYAHNNQSSGAAKHIDIKYYVVKDKVRDQTISLEHIKTERMLADPLTKGLPPNVFKEHVAGMGLREAL

SEQ ID NO: 19370 - protein, 832 aa, Oryza sativa
  Clone ID: TF_OSC400458j.C1.p27.fg
MAGAAKASWMVAMSVGAVEALKDQGGLCRWNYALRSIHKAAKANAAGVSQGKKLPASAAAVAERRRAEKAEEGLRTVMYLSCWGPNCGYSLMGCIKDIPTLKGDNYAEWKRKLDLAFILGEVDWVLTTPCPIEPADLVRGENESDADWQKRQRDNAPLVMSYDIEQKKWSLANKKCLAVVKNTIEPTILGSIPECDAVSEYLERIKSQFTGSSKTYATQLIKQLVTERYHGGGVRDHILRMSNMASKLKPMDLGITDDFLVHLVMASLPKQFDNFIVNYNISPEKWNFEKLIANCVQEEERIKESNGGSINYVKDKKKNHKSPTSKGKQSQHLPQQQQFAVEKDQCLHCKKTGHYKKDCPDFLKMIMAKKGENIITFVNESHYVGYSRSTWWIDSGATIHACNCLKAFRSTRTTQRRESTIRVANGVEEKVEAVGDLPLELANGFILLLRDVFYVPSLQRNLISVSKLDFDGYDCRFGSGKCELWHNNACIGLAVLRDELYLLSLSENVNVVSSLTKENKKRKRTPDVSSKLWHCRLGHISRGRIERLVKNEILPPLEFSDLEQCIECIKGKFVKSIKKGAKRSAGILEIIHTDICGPFPVKSVDGYDSFITFTDDYSRYGYIYPIKERSEALDKFKIFKAEVENQHDIKIKVVRSDRGGEYYGRHTPYGQVPGPFARFLLENGIVAQYSTPGEPQQNGVAERRNRTLMDMVRSMMSYSTLPLGLWMEALKTTIHILNRVPSKSVPKTPYELWTGRVPSLTHLRVWGSPAEAKVFNPNIGKLDPKTVSCHFIGYPERSKGYRFYCPNSYTKFVETRHAVFLEDEMIRGSSVV

SEQ ID NO: 19371 - protein, 659 aa, Oryza sativa
  Clone ID: TF_OSC400762j.C1.p4.fg
MSDLGGKNGENGNEDGASSKGTPSPKGATIPFDYSKLTIPPHNFVSVPSGRAPQFDGTHYAAWKHKMKLHLISLHPSIWKVVCTGVDVPHDDMKLTLEQEQLIHRNAQASNANSLRLESGGVQQEEAHEVRQMVKNAAMIKNQEVALKAKQEEESSCEESEDEEMAFIVKRFKHFIRKSGYGKGRNDDDKGKRQSKRAWFNCGEYGHFIADCPKSNKAKAKGGKKKPERAHVAEAHMAEVWYSGDEEDLEVKPKPKPKDKVEGECGVATVAFKSSSSSKECLFNNLSDDDDDSYHYSCFMAQGRKVMTQKPSHTSLDVDSNDEESDNELDDVLKSFSKPAMQHLAKLMRALDSKEQSLERQEELLILEKKRNLALEESLAKECAKNEQLANELNLANGSLASLRDANETLQEKFASLDKSHKDLEVQFDTLWNNTSQPNVVSNSSNPSTSNGCARCYNIDLNSHATNVDAMQALKKENKRLGTLVKYGCMKTYHSKDALYKTITAHPNKDGHGLGFSGGSPVSKHVMVNVKECLMFVREGKAPQASEVTCPLTGQTPGSSGQNDRKFLPCKTGSSRKFRASDRPKGLTGSSGYNARKFRPEGLYYDLYVISKNSEGKVVAYFNGNYNDEYRTCVWVPKGLVTNIKGPKLRQVWVPKSQA

SEQ ID NO: 19372 - protein, 1405 aa, Oryza sativa
  Clone ID: TF_OSC401215j.C1.p30.fg
MSGASSSTNSSTGGYSLMGCIKDIPTLKGDNYAEWKRKLDLAFILGEVDWVLTTPCPIEPADLVRGENESDADWQKRQRDNAPLVMSYDIEQKKWSLANKKCLAVVKNTIEPTILGSIPECDAVSEYLERIKSQFTGSSKTYATQLIKQLVTERYHGGGVRDHILRMSNMASKLKPMDLGITDDFLVHLVMASLPKQFDNFIVNYNISPEKWNFEKLIANCVQEEERIKESNGGSINYVKDKKKNHKSPTSKGKQSQHLPQQQQFAVEKDQCLHCKKTGHYKKDCPDFLKMIMAKKGENIITFVNESHYVGYSRSTWWIDSGATIHACNCLKAFRSTRTTQRRESTIRVANGVEEKVEAVGDLPLELANGFILLLRDVFYVPSLQRNLISVSKLDFDGYDCRFGSGKCELWHNNACIGLAVLRDELYLLSLSENVNVVSSLTKENKKRKRTPDVSSKLWHCRLGHISRGRIERLVKNEILPPLEFSDLEQCIECIKGKFVKSIKKGAKRSAGILEIIHTDICGPFPVKSVDGYDSFITFTDDYSRYGYIYPIKERSEALDKFKIFKAEVENQHDIKIKVVRSDRGGEYYGRHTPYGQVPGPFARFLLENGIVAQYSTPGEPQQNGVAERRNRTLMDMVRSMMSYSTLPLGLWMEALKTAIHILNRVPSKSVPKTPYELWTGRVPSLTHLRVWGSPAEAKVFNPNIGKLDPKTVSCHFIGYPERSKGYRFYCPNSYTKFVETRHAVFLEDEMIRGSSVVREIDLEERRVSVPAPSTQEPFFSLPADVVPAMPVIEVPAPVVTPPVATMNESEEPVIQDSTEMVATPEEELQQPQIDNVPVQETHQEPQVQDVPNVQAPRRSERVRRSAIRDDYKVYNIEESHMEDDPTSYEEAMRSARSSEWLEAMKDEMESMKLNDVWDLEEIPKGAKTVGCKWVYKTKYDSRGNIEKFKARLVAKGFTQREGIDYNETFSPVSCKDSFRIIMALVAHYDLELHQMDVKTAFLNGDLEEKVYMAQPKGFVMKGNENMGCRLKRSIYGLKQASRQWYLKFDGTINKFGFQENVEDNCIYSKFKNGRFIFLILYVDDILLASSDVSLLQETKKFLSSNFDMKDLGEASYVLGIEIHRDRTKYALGLSQKTYIEKVLKKFNMYRCSATPAPIMKGEKYGASQCPRNQYELNEMKTKPYASAVGSLQYAQVCTRPDLAFVTGLLGRFQSNPGLEHWKLVKKVLRYLQGTKGLMLSYRRSESLQIVGYSDSDFAKDNTKSTSGYVFTLAGGAISWKSSKQTITAGSTMYAEFIACYEATGQVNWLKKFIPGLKVVDSIEKPLKLYCDNEPAVMYAHNNQSSGAAKHIDIKYYVVKDKVRDQTISLEHIKTERMLADPLTKGLPPNVFKEHVAGMGLREAL

SEQ ID NO: 19373 - protein, 390 aa, Oryza sativa
  Clone ID: TF_OSC401215j.C1.p34.fg
MATPSTRSRGYSLMGCIKDIPTLKGDNYAEWKRKLDLAFILGEVDWVLTTPCPIEPADLVRGENESDADWQKRQRDNAPLVMSYDIEQKKWSLANKKCLAVVKNTIEPTILGSIPECDAVSEYLERIKSQFTGSSKTYATQLIKQLVTERYNGGGVRDHILRMSNMASKLKPMDLGITDDFLVHLVMASLPKQFDNFIVNYNISPEKWNFEKLIANCVQEEERIKESNGGSINYVKDKKKNHKSPTSKGKQSQHLPQQQQFAVEKDQCLHCKKTGHYKKDCPDFLKMIMAKKGLRKEEKAPLELPMELKKKLKLVGDLPVELANGFILLLRDVFYVPSLQRNLISVSKLDFDGYDCRFGSGKCELWHNNACIGLAVLRDELYLVSSFLRM

SEQ ID NO: 19374 - protein, 1401 aa, Oryza sativa
  Clone ID: TF_OSC401218j.C1.p17.fg
MATPSTRSRGYSLMGCIKDIPTLKGDNYAEWKRKLDLAFILGEVDWVLTTPCPIEPADLVRGENESDADWQKRQRDNAPLVMSYDIEQKKWSLANKKCLAVVKNTIEPTILGSIPECDAVSEYLERIKSQFTGSSKTYATQLIKQLVTERYNGGGVRDHILRMSNMASKLKPMDLGITDDFLVHLVMASLPKQFDNFIVNYNISPEKWNFEKLIANCVQEEERIKESNGGSINYVKDKKKNHKSPTSKGKQSQHLPQQQQFAVEKDQCLHCKKTGHYKKDCPDFLKMIMAKKGENIITFVNESHYVGYSRSTWWIDSGATIHACNCLKAFRSTRTTQRRESTIRVANGVEEKVEAVGDLPLELANGFILLLRDVFYVPSLQRNLISVSKLDFDGYDCRFGSGKCELWHNNACIGLAVLRDELYLLSLSENVNVVSSLTKENKKRKRTPDVSSKLWHCRLGHISRGRIERLVKNEILPPLEFSDLEQCIECIKGKFVKSIKKGAKRSAGILEIIHTDICGPFPVKSVDGYDSFITFTDDYSRYGYIYPIKERSEALDKFKIFKAEVENQHDIKIKVVRSDRGGEYYGRHTPYGQVPGPFARFLLENGIVAQYSTPGEPQQNGVAERRNRTLMDMVRSMMSYSTLPLGLWMEALKTAIHILNRVPSKSVPKTPYELWTGRVPSLTHLRVWGSPAEAKVFNPNIGKLDPKTVSCHFIGYPERSKGYRFYCPNSYTKFVETRHAVFLEDEMIRGSSVVREIDLEERRVSVPAPSTQEPFFSLPADVVPAMPVIEVPAPVVTPPVATMNESEEPVIQDSTEMVATPEEELQQPQIDNVPVQETHQEPQVQDVPNVQAPRRSERVRRSAIRDDYKVYNIEESHMEDDPTSYEEAMRSARSSEWLEAMKDEMESMKLNDVWDLEEIPKGAKTVGCKWVYKTKYDSRGNIEKFKARLVAKGFTQREGIDYNETFSPVSCKDSFRIIMALVAHYDLELHQMDVKTAFLNGDLEEKVYMAQPKGFVMKGNENMGCRLKRSIYGLKQASRQWYLKFDGTINKFGFQENVEDNCIYSKFKNGRFIFLILYVDDILLASSDVSLLQETKKFLSSNFDMKDLGEASYVLGIEIHRDRTKYALGLSQKTYIEKVLKKFNMYRCSATPAPIMKGEKYGASQCPRNQYELNEMKTKPYASAVGSLQYAQVCTRPDLAFVTGLLGRFQSNPGLEHWKLVKKVLRYLQGTKGLMLSYRRSESLQIVGYSDSDFAKDNTKSTSGYVFTLAGGAISWKSSKQTITAGSTMYAEFIACYEATGQVNWLKKFIPGLKVVDSIEKPLKLYCDNEPAVMYAHNNQSSGAAKHIDIKYYVVKDKVRDQTISLEHIKTERMLADPLTKGLPPNVFKEHVAGMGLREAL

SEQ ID NO: 19375 - protein, 1401 aa, Oryza sativa
  Clone ID: TF_OSC401218j.C1.p21.fg
MATPSTRSRGYSLMGCIKDIPTLKGDNYAEWKRKLDLAFILGEVDWVLTTPCPIEPADLVRGENESDADWQKRQRDNAPLVMSYDIEQKKWSLANKKCLAVVKNTIEPTILGSIPECDAVSEYLERIKSQFTGSSKTYATQLIKQLVTERYHGGGVRDHILRMSNMASKLKPMDLGITDDFLVHLVMASLPKQFDNFIVNYNISPEKWNFEKLIANCVQEEERIKESNGGSINYVKDKKKNHKSPTSKGKQSQHLPQQQQFAVEKDQCLHCKKTGHYKKDCPDFLKMIMAKKGENIITFVNESHYVGYSRSTWWIDSGATIHACNCLKAFRSTRTTQRRESTIRVANGVEEKVEAVGDLPLELANGFILLLRDVFYVPSLQRNLISVSKLDFDGYDCRFGSGKCELWHNNACIGLAVLRDELYLLSLSENVNVVSSLTKENKKRKRTPDVSSKLWHCRLGHISRGRIERLVKNEILPPLEFSDLEQCIECIKGKFVKSIKKGAKRSAGILEIIHTDICGPFPVKSVDGYDSFITFTDDYSRYGYIYPIKERSEALDKFKIFKAEVENQHDIKIKVVRSDRGGEYYGRHTPYGQVPGPFARFLLENGIVAQYSTPGEPQQNGVAERRNRTLMDMARSMMSYSTLPLGLWMEALKTAIHILNRVPSKSVPKTPYELWTGRVPSLTHLRVWGSPAEAKVFNPNIGKLDPKTVSCHFIGYPERSKGYRFYCPNSYTKFVETRHAVFLEDEMIRGSSVVREIDLEERRVSVPAPSTQEPFFSLPADVVPAMPVIEVPAPVVTPPVATMNESEEPVIQDSTEMVATPEEELQQPQIDNVPVQETHQEPQVQDVPNVQAPRRSERVRRSAIRDDYKVYNIEESHMEDDPTSYEEAMRSARSSEWLEAMKDEMKSMKLNDVWDLEEIPKGAKTVGCKWVYKTKYDSRGNIEKFKARLVAKGFTQREGIDYNETFSPVSCKDSFRIIMALVAHYDLELHQMDVKTAFLNGDLEEKVYMAQPKGFVMKGNENMGCRLKRSIYGLKQASRQWYLKFDGTIKKFGFQENVEDNCIYSKFKNGRFIFLILYVDDILLASSDVSLLQETKKFLSSNFDMKDLGEASYVLGIEIHRDRTKYALGLSQKTYIEKVLKKFNMYRCSATPAPIMKGEKYGASQCPRNQYELNEMKTKPYASAVGSLQYAQVCTRPDLAFVTGLLGRFQSNPGLEHWKLVKKVLRYLQGTKGLMLSYRRSESLQIVGYSDSDFAKDNTKSTSGYVFTLAGGAISWKSSKQTITAGSTMYAEFIACYEATGQVNWLKKFIPGLKVVDSIEKPLKLYCDNEPAVMYAHNNQSSGAAKHIDIKYYVVKDKVRDQTISLEHIKTERMLADPLTKGLPPNVFKEHVAGMGLREAL

SEQ ID NO: 19376 - protein, 1405 aa, Oryza sativa
  Clone ID: TF_OSC401275j.C1.p16.fg
MAGTSSSSNTSTGGYSLMGCIKDIPTLKGDNYAEWKRKLDLAFILGEVDWVLTTPCPIEPADLVRGENESDADWQKRQRDNAPLVMSYDIEQKKWSLANKKCLAVVKNTIEPTILGSIPECDAVSEYLERIKSQFTGSSKTYATQLIKQLVTERYHGGGVRDHILRMSNMASKLKPMDLGITDDFLVHLVMASLPKQFDNFIVNYNISPEKWNFEKLIANCVQEEERIKESNGGSINYVKDKKKNHKSPTSKGKQSQHLPQQQQFAVEKDQCLHCKKTGHYKKDCPDFLKMIMAKKGENIITFVNESHYVGYSRSTWWIDSGATIHACNCLKAFRSTRTTQRRESTIRVANGVEEKVEAVGDLPLELANGFILLLRDVFYVPSLQRNLISVSKLDFDGYDCRFGSGKCELWHNNACIGLAVLRDELYLLSLSENVNVVSSLTKENKKRKRTPDVSSKLWHCRLGHISRGRIERLVKNEILPPLEFSDLEQCIECIKGKFVKSIKKGAKRSAGILEIIHTDICGPFPVKSVDGYDSFITFTDDYSRYGYIYPIKERSEALDKFKIFKAEVENQHDIKIKVVRSDRGGEYYGRHTPYGQVPGPFARFLLENGIVAQYSTPGEPQQNGVAERRNRTLMDMVRSMMSYSTLPLGLWMEALKTAIHILNRVPSKSVPKTPYELWTGRVPSLTHLRVWGSPAEAKVFNPNIGKLDPKTVSCHFIGYPERSKGYRFYCPNSYTKFVETRHAVFLEDEMIRGSSVVREIDLEERRVSVPAPSTQEPFFSLPADVVPAMPVIEVPAPVVTLPVATMNESEEPVIQDSTEMVATPEEELQQSQIDNVPVQETHQEPQVQDVPNVQAPRRSERVRRSAIRDDYKVYNIEESHMEDDPTSYEEAMRSARSSEWLESMKDEMESMKLNDVWDLEEIPKGAKTVGCKWVYKTKYDSRGNIEKFKARLVAKGFTQREGIDYNETFSPVSCKDSFRIIMALVAHYDLELHQMDVKTAFLNGDLEEKVYMAQPKGFVMKGNENMGCRLKRSIYGLKQASRQWYLKFDGTIKKFGFQENVEDNCIYSKFKNGRFIFLILYVDDILLASSDVSLLQETKKFLSSNFDMKDLGEASYVLGIEIHRDRTKYALGLSQKTYIEKVLKKFNMYRCSATPAPIMKGEKYGASQCPRNQFELNEMKTKPYASAVGSLQYAQVCTRPDLAFVTGLLGRFQSNPGLEHWKLVKKVLRYLQGTKGLMLSYRRSESLQIVGYSDSDFAKDNTKSTSGYVFTLAGGAISWKSSKQTITAGSTMYAEFIACYEATGQVNWLKKFIPGLKVVDSIEKPLKLYCDNEPAVMYAHNNQSSGAAKHIDIKYYVVKDKVRDQTISLEHIKTERMLADPLTKGLPPNVFKEHVAGMGLREAL

SEQ ID NO: 19377 - protein, 1370 aa, Oryza sativa
  Clone ID: TF_OSC401336j.C1.p1.fg
MAGGPRHTAPYKRGVEAGTARGGYSLMGCIKDIPTLKGDNYAEWKRKLDLAFILGEVDWVLTTPCPIEPAELVRGENESDADWQKRQRDNAPLVMSYDIEQKKWSLANKKCLAVVKNTIEPTILGSIPECDAVSEYLERIKSQFTGSSKTYATQLIKQLVTERYHGGGVRDHILRMSNMASKLKPMDLGITDDFLVHLVMASLPKQFDNFIVNYNISPEKWNFEKLIANCVQEEERIKESNGGSINYVKDKKKNHKSPTSKGKQSQHLPQQQQFAVEKDQCLHCKKTGHYKKDCPDFLKMIMAKKGENIITFVNESHYVGYSRSTWWIDSGATIHACNCLKAFRSTRTTQGRESSIRVANGVEEKVEAVGDLPLELANGFTLLLRDVFYVPSLQRNLISVSKLDFDGYDCRFGSGKCELWHNNACIGLAVLRDELYLLSLSENVNVVSSLTKENKKRKRTSNVSSKLWHCRLGHISRGRIERLVKNEILSPLEFSDLEQCIECIKGKFVKSIKKGAKRSAGILEIIHTDICGPFPVKSMDGYDSFITFTDDYSRYGYIYPIKERSEALDKFKIFKAEVENQHDIKIKVNGVAERRNRTLMDMVRSMMSYSTLPLGLWMEALKTAIHILNRVPSKSVPKTPYELWTGRVPSLTHLRVWGSPTEAKVFNPNIGKLDPKTVSCHFIGYPERSKGYRFYCPNSYTKFVETRHAVFLEDEMIRGSSVVREIDLEERRVSVPAPSTQEPFFSLPADVVPAMPVIEVPAPVVTPPVATMNESEEPVIQDSTEMVATPEEELQQPQIDNVPVQETHQEPQVQDVANVQAPRRSERVRRSAIRDDYKVYNIEESHMEDDPTSYEEAMRSARSSEWLEAMKDEMKSMKLNDVWDLEEIPKGAKTVGCKWVYKTKYDSRGNIEKFKARLVAKGFTQREGIDYNETFSPVSCKDSFRIIMALVAHYDLELHQMDVKTAFLNGDLEEKVYMAQPKGFFMKGNENMGCRLKRSIYGLKQASRQWYLKFDGTIKKFGFQENVEDNCIYSKFKNGRFIFLILYVDDILLASSDVSLLQETKKFLSTNFDMKDLGEASYVLGIEIHRDRTKYALGLSQKTYIEKVLKKFNMYRCSATPAPIMKGEKYGASQCPINQYELNEMKTKPYVSAVGSLQYAQVCTRPDLAFVTGLLGRFQSNPGLEHWKLVKKVLRYLQGTKGLMLTYRRSESLQIVGYSDSDFAKDNTKSTSGYVFTLAGGAISWKSSKQTITAGSTMYAEFIACYEATGQVNWLKKFIPGLKVVDSIEKPLKLYCDNEPAVMYAHNNQSSGAAKHIDIKYYVVKDKVRDQTISLEHIKTERMLADPLTKGLPPNVFKEHVAGMGLREAL

SEQ ID NO: 19378 - protein, 1127 aa, Oryza sativa
  Clone ID: TF_OSC401727j.C1.p3.fg
MSYDIEQKKWSLANKKCLAMVKNTIEPTILGSIPECDAVSEYLERIKRQFTGSSKTYATQLIKQLVTERYHGGGVRDHILRMSNMASKLKPMDLGITDDFLVHLVMASLPKQFDNFIVNYNISPEKWNFEKLIANCVQEEERIKESNGGSINYVKDNKKKNHKSPTSKAKQSQHLPQQQQFAVEKDQCLHCKKTGHYKKDCPDFLKMIMARKGENIVTFVNESHYVGYSRSTWWIDSGAIIHACNCLKAFRSTRTTQRRESSIRVANGVEKKVEAVGDLPLELANGFTLLLRDVFYVPSLQRNLISLSKLDFDGYDCRFGSGKCELCVDGYDSFITFTDDYSRYGYIYPIKERSEALDKFKIFKAEVENQHDIKIKVNGVAERRNRTLMDMVRSMMSYSTLPLGLWMEALKTAIHILNRVPSKSVPKTPYELWTGSVPSIAHLRVWGSPAEAKVFNPNIGKLDPKTVSCHFIGYPERSKGYRFYCPNSYTKFVETRHAVFLEDEMIRESSVVREIDLEERRVSVPAPSTQEPFFSLPADVVPAIPVIEEELQQPQIDNVLVQETQQEPQVQDVPNVQAPRRSERVKRSVIRDDYKVYNIEESHMEDDHTSYEEAMRSARSSEWLEVMKDEMKLMKLNNVWDLEEIPKGDKTVGCKWVYKTKYDSRGNIEKFKARLVAKGFTQREGIDYNETFSPVSCKDSFRIIMALVAHYDLELHQMDVKTTFLNGDLEEKVYMAQPKGFVMKGNGNMGCRLKRSIYELKQASRQWYLKFDGTIKKFGFQENVEDNCIYSKFKNGRFIFLILYVDDILLASSDVSLLQETKKFLSSNFDMKDLGEASYVLGIEIHRDRTKYALGLSQKTYIEKVLKKFNMYRCSATPAPIVKGEKYGASQCPRNQYELNEMKTKPYASAIGSLEYAQVCTRPNLAFVIGLLGRFQSNLGPEHWKLVKKVLHYFQGTKGLMLSYRRSESLQIMGYSDSDFTKDNTKSTSGYVFTLAGGAISWKSSKQTITAGSTMYAEFIACYEATGQVNWLKKFILSLKVVDSIEKPLKLYCDNEPAVMYAHSNQSSGAAKHIDIKYYVVKDKVRDQTISLEHIRTERMLADPLTKGLPPNVFKEHVAGMGLREAL

SEQ ID NO: 19379 - protein, 1407 aa, Oryza sativa
  Clone ID: TF_OSC401892j.C1.p4.fg
MARRREGRRRRRRRSARPRAREKRREARVFGGRPGEGGFDPPISAPGRPIETLADRTAGAGGYSLMGCIKDIPTLKGDNYAEWKRKLDLAFILGEVDWVLTTPCPIEPAELVRGENESDADWQKRQRDNAPLVMSYDIEQKKWSLANKKCLAVVKNTIEPTILGSIPECDTVSEYLERIKSQFTGSSKTYATQLIKQLVTERYHGGGVRDHILRMSNMASKLKPMDLGITDDFLVHLVMASLPKQFDNFIVNYNISPEKWNFEKLIANCVQEEERIKESNGGSINYVKDKKKNHKSPTSKGKQSQHLPQQQQFAVEKDQCLHCKKTGHYKKDCPDFLKMIMAKKGENIITFVNESHYVGYSRSTWWIDSGATIHACNCLKAFRSTRTTQRRESTIRVANGVEEKVEAVGDLPLELANGFILLLRDVFYVPSLQRNLISVSKLDFDGYDCRFGSGKCELWHNNACIGLAVLGRIERLVKNEILPPLEFSDLEQCIECIKGKFVKSIKKGAKRSAGILEIIHTDICGPFPVKSVDGYDSFITFTDDYSRYGYIYPIKERSEALDKFKIFKAEVENQHDIKIKVVRSDRGGEYYGRHTPYGQVPGPFARFLLENGIVAQYSTPGEPQQNGVAERRNRTLMDMVRSMMSYSTLPLGLWMEALKTAIHILNRVPSKSVPKTPYELWTGRVPSLTHLRVWGSPTEAKVFNPNIGKLDPKTVSCHFIGYPERSKGYRFYCPNSYTKFVETRHAVFLEDEMIRGSSVVREIDLEERRVSVPAPSTQEPFFSLPADVVPAMPVIEVPAPVVTPPVATMNESEEPVIQDSTEMVATPEEELQQPQIDNVPVQETHQEPQVQDVPNVQAPRRSERVRRSAIRDDYKVYNIEESHMEDDPTSYEEAMRSARSSEWLEAMKDEMKSMKLNDVWDLEEIPKGAKTVGCKWVYKTKYDSRGNIEKFKARLVAKGFTQREGIDYNETFSPVSCKDSFRIIMALVAHYDLELHQMDVKTAFLNGDLEEKVYMAQPKGFVMKGNENMGCRLKRSIYGLKQASRQWYLKFDGTIKKFGFQENVEDNCIYSKFKNGRFIFLILYVDDILLASSDVSLLQETKKFLSSNFDMKDLGEASYVLGIEIHRDRTKYALGLSQKTYIEKVLKKFNMYRCSATPAPIMKGEKYGASQCPRNQYELNEMKTKLYASAVGSLQYAQVCTRPDLAFVTGLLGRFQSNPGLEHWKLVKKVLRYLQGTKGLMLSYRRSESLQIVGYSDSDFAKDNTKSTSGYVFTLAGGAISWKSSKQTITAGSTMYAEFIACYEATGQVNWLKKFIPGLKVVDSFEKPLKLYCDNEPAVMYAHNNQSSGAAKHIDIKYYVMKDKVRDQTISLEHIKTERMLADPLTKGLPPNVFKEHVAGMGLREAL

SEQ ID NO: 19380 - protein, 206 aa, Oryza sativa
  Clone ID: TF_OSC401976j.C1.p3.fg
MSYDIEQKKWSLANKKCLAVVKNTIEPTILGSIPECDAVSEYLERIKSQFTGSSKTYATQLIKQLVTERYYGGGVRDHILRMSNMAFKLKPMDLGITDDFLVHLVMASLPKQFDNFIVNYNINNKKKNHKSPTSKAKQSQHLPQQQQFAVEKDQCLHCKKTGHYKKDCPDFLKMIMARKGLRKEEKAPLELPMELKKKLKLLEIFL

SEQ ID NO: 19381 - protein, 1112 aa, Oryza sativa
  Clone ID: TF_OSC405551j.C1.p1.fg
MSWHRAGVLLLGAQSCLPVPGVPAVGGIGSVLLSMARMGWKLCHIFRLYTVVEERIKESNGGSINYVKDKKKNHKSPTSKGKQSQHLPQQQQFAVEKDQCLHCKKTGHYKKDCPDFLKMIMAKKGENIITFVNESHYVGYSRSTWWIDSGATIHACNCLKAFRSTRTTQRRESTIRVANGVEEKVEAVGDLPLELANGFILLLRDVFYVPSLQRNLISVSKLDFDGYDCRFGSGKCELWHNNACIGLAVLRDELYLLSLSENVNVVFSLTKENKKRKRTPDVSSKLWHCRLGHISRGRIERLVKNEILPPLEFSDLEQCIECIKGKFVKSIKKGAKRSAGILEIIHTDICGPFPVKSVDGYDSFITFTDDYSRYGYIYPIKERLEALDKFKIFKAEVENQHDIKIKVVRSDRGGEYYGRHTPYGQVPGPFARFLLENGIVAQYSTPGEPQQNGVAERRNRTLMDMVRSMMSYSTLPLGLWMEALKTAIHILNRVPSKSVPKTPYELWTGRVPSLTHLRVWGSPTEAKVFNSNIGKLDPKTVSCHFISYPERSKGYRFYYPNSYTKFVETRHAVFLEDEMIRGSSVVREIDLEERRVSVPAPSTQEPFFSLPADVVPAMPVIEVPAPVVTPPVATLNESEEPVIQDSTEMVATPEEELQQPQINNVPVQETHQEPQVQDVPNVQAPRRSERVRRSAIRDDYKVYNIEESHMEDDPTSYEEAMRSARSSEWLESMKDEMKSMKLNDVWDLEEIPKGAKTVGCKWVYKTKYDSRGNIEKFKARLVAKGFTQREGIDYNETFSPVSCKDSFRIIMALVAHYDLELHQMDVKTAFLNGDLEEKVYMAQPKGFVMKGNENMGCRLKRSIYGLKQASRQWYLKFDGTIKKFGFQENVEDNCIYSKFKNGRFIFLILYVDDILLASSDVSLLQETKKFLSSNFDMKDLGEASYVLGIEIHRDRTKYALGLSQKTYIEKVLKKFNMYRCSTTPAPIMKGEKYGASQCPRNQYELNEMKTKPYASAVGSLQYAQVCTRPDLAFVTGLLGRFQSNPGLEHWKLIKKVLHYLQGTKGLMLSYRRSESLQIVGYSDSDFAKDNTKSTSGYVFTLAGGAISWKSSK

SEQ ID NO: 19382 - protein, 1401 aa, Oryza sativa
  Clone ID: TF_OSC406486j.C1.p2.fg
MATPSTRSRGYSLMGCIKDIPTLKGDNYAEWKRKLDLAFILGEVDWVLTTPCPIEPADLVRGENESDADWQKRQRDNAPLVMSYDIEQKKWSLANKKCLAVVKNTIEPTILGSIPECDAVSEYLERIKSQFTGSSKTYATQLIKQLVTERYHGGGVRDHILRMSNMASKLKPMDLGITDDFLVHLVMASLPKQFDNFIVNYNISPEKWNFEKLIANCVQEEERIKESNGGSINYVKDKKKNHKSPTSKGKQSQHLPQQQQFAVEKDQCLHCKKTGHYKKDCPDFLKMIMAKKGENIITFVNESHYVGYSRSTWWIDSGATIHACNCLKAFRSTRTTQRRESTIRVANGVEEKVEAVGDLPLELANGFILLLRDVFYVPSLQRNLISVSKLDFDGYDCRFGSGKCELWHNNACIGLAVLRDELYLLSLSENVNVVSSLTKENKKRKRTPDVSSKLWHCRLGHISRGRIERLVKNEILPPLEFSDLEQCIECIKGKFVKSIKKGAKRSAGILEIIHTDICGPFPVKSVDGYDSFITFTDDYSRYGYIYPIKERSEALDKFKIFKAEVENQHDIKIKVVRSDRGGEYYGRHTPYGQVPGPFARFLLENGIVAQYSTPGEPQQNGVAERRNRTLMDMVRSMMSYSTLPLGLWMEALKTAIHILNRVPSKSVPKTPYELWTGRVPSLTHLRVWGSPAEAKVFNPNIGKLDPKTVSCHFIGYPERSKGYRFYCPNSYTKFVETRHAVFLEDEMIRGSSVVREIDLEERRVSVPAPSTQEPFFSLPADVVPAMPVIEVPAPVVTPPVATMNESEEPVIQDSTEMVATPEEELQQPQIDNVPVQETHQEPQVQDVPNVQAPRRSERVRRSAIRDDYKVYNIEESHMEDDPTSYEEAMRSARSSEWLEAMKDEMESMKLNDVWDLEEIPKGAKTVGCKWVYKTKYDSRGNIEKFKARLVAKGFTQREGIDYNETFSPVSCKDSFRIIMALVAHYDLELHQMDVKTAFLNGDLEEKVYMAQPKGFVMKGNENMGCRLKRSIYGLKQASRQWYLKFDGTINKFGFQENVEDNCIYSKFKNGRFIFLILYVDDILLASSDVSLLQETKKFLSSNFDMKDLGEASYVLGIEIHRDRTKYALGLSQKTYIEKVLKKFNMYRCSATPAPIMKGEKYGASQCPRNQYELNEMKTKPYASAVGSLQYAQVCTRPDLAFVTGLLGRFQSNPGLEHWKLVKKVLRYLQGTKGLMLSYRRSESLQIVGYSDSDFAKDNTKSTSGYVFTLAGGAISWKSSKQTITAGSTMYAEFIACYEATGQVNWLKKFIPGLKVVDSIEKPLKLYCDNEPAVMYAHNNQSSGAAKHIDIKYYVVKDKVRDQTISLEHIKTERMLADPLTKGLPPNVFKEHVAGMGLREAL

SEQ ID NO: 19383 - protein, 1405 aa, Oryza sativa
  Clone ID: TF_OSC406486j.C1.p6.fg
MAGTSSSSNTSTGGYSLMGCIKDIPTLKGDNYAEWKRKLDLAFILGEVDWVLTTPCPIEPADLVRGENESDADWQKRQRDNAPLVMSYDIEQKKWSLANKKCLAVVKNTIEPTILGSIPECDAVSEYLERIKSQFTGSSKTYATQLIKQLVTERYNGGGVRDHILRMSNMASKLKPMDLGITDDFLVHLVMASLPKQFDNFIVNYNISPEKWNFEKLIANCVQEEERIKESNGGSINYVKDKKKNHKSPTSKGKQSQHLPQQQQFAVEKDQCLHCKKTGHYKKDCPDFLKMIMAKKGENIITFVNESHYVGYSRSTWWIDSGATIHACNCLKAFRSTRTTQRRESTIRVANGVEEKVEAVGDLPLELANGFILLLRDVFYVPSLQRNLISVSKLDFDGYDCRFGSGKCELWHNNACIGLAVLRDELYLLSLSENVNVVSSLTKENKKRKRTPDVSSKLWHCRLGHISRGRIERLVKNEILPPLEFSDLEQCIECIKGKFVKSIKKGAKRSAGILEIIHTDICGPFPVKSVDGYDSFITFTDDYSRYGYIYPIKERSEALDKFKIFKAEVENQHDIKIKVVRSDRGGEYYGRHTPYGQVPGPFARFLLENGIVAQYSTPGEPQQNGVAERRNRTLMDMARSMMSYSTLPLGLWMEALKTAIHILNRVPSKSVPKTPYELWTGRVPSLTHLRVWGSPAEAKVFNPNIGKLDPKTVSCHFIGYPERSKGYRFYCPNSYTKFVETRHAVFLEDEMIRGSSVVREIDLEERRVSVPAPSTQEPFFSLPADVVPAMPVIEVPAPVVTPPVATMNESEEPVIQDSTEMVATPEEELQQPQIDNVPVQETHQEPQVQDVPNVQAPRRSERVRRSAIRDDYKVYNIEESHMEDDPTSYEEAMRSARSSEWLEAMKDEMKSMKLNDVWDLEEIPKGAKTVGCKWVYKTKYDSRGNIEKFKARLVAKGFTQREGIDYNETFSPVSCKDSFRIIMALVAHYDLELHQMDVKTAFLNGDLEEKVYMAQPKGFVMKGNENMGCRLKRSIYGLKQASRQWYLKFDGTIKKFGFQENVEDNCIYSKFKNGRFIFLILYVDDILLASSDVSLLQETKKFLSSNFDMKDLGEASYVLGIEIHRDRTKYALGLSQKTYIEKVLKKFNMYRCSATPAPIMKGEKYGASQCPRNQYELNEMKTKPYASAVGSLQYAQVCTRPDLAFVTGLLGRFQSNPGLEHWKLVKKVLRYLQGTKGLMLSYRRSESLQIVGYSDSDFAKDNTKSTSGYVFTLAGGAISWKSSKQTITAGSTMYAEFIACYEATGQVNWLKKFIPGLKVVDSIEKPLKLYCDNEPAVMYTHNNQSSGAAKHIDIKYYVVKDKVRDQTISLEHIKTERMLADPLTKGLPPNVFKEHVAGMGLREAL

SEQ ID NO: 19384 - protein, 1401 aa, Oryza sativa
  Clone ID: TF_OSC406626j.C1.p7.fg
MATPSTRSRGYSLMGCIKDIPTLKGDNYAEWKRKLDLAFILGEVDWVLTTPCPIEPADLVRGESESDADWQKRHRDNAPLVMSYDIEQKKWSLANKKCLAVVKNTIEPTILGSIPECDAVSEYLERIKSQFTGSSKTYATQLIKQLVTERYNGGGVRDHILRMSNMASKLKPMDLGITDDFLVHLVMASLPKQFDNFIVNYNISPEKWNFEKLIANCVQEEERIKESNGGSINYVKDKKKNHKSPTSKGKQSQHLPQQQQFAVEKDQCLHCKKTGHYKKDCPDFLKMIMAKKGENIITFVNESHYVGYSRSTWWIDSGATIHACNCLKAFRSTRTTQRRESTIRVANGVEEKVEAVGDLPLELSNGFILLLRDVFYVPSLQRNLISVSKLDFDGYDCRFGNGKCELWHNNACIGLAVLRDELYLLSLSENVNVVSSLTKENKKRKRTPDVSSKLWHCRLGHISRGRIERLVKNEILPPLEFSDLEQCIECIKGKFVKSIKKGAKRSAGILEIIHTDICGPFPVKSVDGYDSFITFTDDYSRYGYIYPIKERSEALDKFKIFKAEVENQHDIKIKVVRSDRGGEYYGRHTPYGQVPGPFARFLLENGIVAQYSTPGEPQQNGVAERRNRTLMDMVRSMMSYSTLPLGLWMEALKTAIHILNRVPSKSVPKTPYELWTGRVPSLTHLRVWGSPAEAKVFNPNIGKLDPKTVSCHFIGYPERSKGYRFYCPNSYTKFVETRHAVFLEDEMIRGSSVVREIDLEERRVSVPAPSTQEPFFSLPADVVPAMPVIEVPAPVVTPPVATMNESEEPVIQDSTEMVATPEEELQQPQIDNVPVQETHQEPQVQDVPNVQAPRRSERVRRSAIRDDYKVYNIEESHMEDDPTSYEEAMRSARSSEWLEAMKDEMKSMKLNDVWDLEEIPKGAKTVGCKWVYKTKYDSRGNIEKFKARLVAKGFTQREGIDYNETFSPVSCKDSFRIIMALVAHYDLELHQMDVKTAFLNGDLEEKVYMAQPKGFVMKGNENMGCRLKRSIYGLKQDSRQWYLKFDGTIKKFGFQENVEDNCIYSKFKNGRFIFLILYVDDILLASSDVSLLQETKKFLSSNFDMKDLGEASYVLGIEIHRDRTKYALGLSQKTYIEKVLKKFNMYRCSATPAPIMKGEKYGASQCPRNQYELNEMKTKPYASAVGSLQYAQVCTRPDLAFVTGLLGRFQSNPGLEHWKLVKKVLRYLQGTKGLMLSYRRSESLQIVGYSDSDFAKDNTKSTSGYVFTLAGGAISWKSSKQTITAGSTMYAEFIACYEATGQVNWLKKFIPGLKVVDSIEKPLKLYCDNEPAVMYTHNNQSSGAAKHIDIKYYVVKDKVRDQTISLEHIKTERMLADPLTKGLPPNVFKEHVAGMGLREAL

SEQ ID NO: 19385 - protein, 1370 aa, Oryza sativa
  Clone ID: TF_OSC407404j.C1.p1.fg
MGCIKDIPTLKGDNYAEWKRKLDLAFILGEVDWVLTTPCPIEPADLVRGENESDADWQKRQRDNAPLVMSYDIEQKKWSLANKKCLAVVKNTIEPTILGSIPECDAVSEYLERIKSQFTGSSKTYATQLIKQLVTERYHGGGVRDHILRMSNMASKLKPMDLGITDDFLVHLVMASLPKQFDNFIVNYNISPEKWNFEKLIANCVQEEERIKESNGGSINYVKDKKKNHKSPTSKGKQSQHLPQQQQFAVEKDQCLHCKKTGHYKKDCPDFLKMIMAKKGENIITFVNESHYVGYSRSTWWIDSGATIHACNCLKAFRSTRTTQRRESTIRVANGVEEKVEAVGDLPLELANGFILLLRDVFYVPSLQRNLISVSKLDFDGHDCRFGSGKCELWHNNACIGLAVLRDELYLLSLSENVNVVSSLTKENKKRKRTPDVSSKLWHCRLGHISRGRIERLVKNEILPPLEFSDLEQCIECIKGKFVKSIKKGAKRSAGILEIIHTDICDDYSRYGYIYPIKERSEALDKFKIFKAEVENQHDIKIKVVRSDRGGEYYGRHTPYGQVPGPFARFLLENGIVAQYSTPGEPQQNGVAERRNRTLMDMVRSMMSYSTLPLGLWMEALKTAIHILNRVPSKSVPKTPYELWTGRVPSLTHLRVWGSPAEAKVFNPNIGKLDPKTVSCHFIGYPERSKGYRFYCPNSYTKFVKTRHAVFLEDEMIKGSSVVREIDLEERRVSVPAPSTQEPFFSLPADVVPAMPVIEVPAPVVTPPVATMNESEEPVIQDSTEMVATPEEELQQPQIDNVPVQETHQEPQVQDVPNVQAPRRSERVRRSAIRDDYKVYNIEESHMEDDPTSYEEAMRSARSSEWLEAMKDEMKSMKLNDVWDLEEIPKGAKTVGCKWVYKTKYDSRGNIEKFKARLVAKGFTQREGIDYNETFSPVSCKDSFRIIMALVAHYDLELHQMDVKTAFLNGDLEEKVYMAQPKGFVMKGNENMGCRLKRSIYGLKQASRQWYLKFDGTIKKFGFQENVEDNCIYSKFKNGRFIFLILYVDDILLASSDVSLLQETKKFLSSNFDMKDLGEASYVLGIEIHRDRTKYALGLSQKTYIEKVLKKFNMYRCSATPAPIMKGEKYGASQCPRNQYELNEMKTKPYASAVGSLQYAQVCTRPDLAFVTGLLGRFQSNPGLEHWKLVKKVLRYLQGTKGLMLSYRRSESLQIVGYSDSDFAKDNTKSTSGYVFTLTGGAISWKSSKQTITAGSTMYGEFIACYEATGQVNWLKKFIPGLKVVDSIEKPLKLYCDNEPAVMYAHNNQSSGAAKHIDIKYYVVKDKVRDQTISLEHIKTERMLADPLTKGLPPNVFKEHVAGMGLREAL

SEQ ID NO: 19386 - protein, 1335 aa, Oryza sativa
  Clone ID: TF_OSC410327j.C1.p10.fg
MSGASSSTNSSTGGYSLMGCIKDIPTLKGDNYAEWKRKLDLAFILGEVDWVLTTPCPIEPAELVRGENESDADWQKRQRDNAPLVMSYDIEQKKWSLANKKCLAVVKNTIEPTILGSIPECDAVSEYLERIKSQFTGSSKTYATQLIKQLVTERYHGGGVRDHILRMSNMASKLKPMDLGITDDFLVHLEERIKESNGGSINYVKDKKKNHKSPTSKGKQSQHLPQQQQFAVEKDQCLHCKKTGHYKKDCPDFLKMIMAKKGENIITFVNESHYVGYSRSTWWIDSGATIHACNCLKAFRSTRTTQGRESTIRVANGVEEKVEAVGDLPLELANGFTLLLRDVFYVPSLQRNLISVSKLDFDGYDCRFGSGKCELWHNNACIGLAVLRDELYLLSLSENVNVVSSLTKENKKRKRTPDVSSKLWHCRLGHISRGRIERLVKNEILPPLEFSDLEQCIECIKGKFVKSIKKDDYSRYGYIYPIKERSEALDKFKIFKAEVENQLDIKIKVVRSDRGGEYYGRHTPYGQVPRPFARFLLENGIVAQYSTPGEPQQNGVAERRNRTLMDIVRSMMSYSTLPLGLWMEALKTAIHILNRVPSKSVPKTPYELWTGRVPSLTHLRVWGSPAEAKVFNPNIGKLDPKTVSCHFIGYPERSKGYRFYCPNSYTKFVETRHAVFLEDEMIRGSSVVREIDLEERRVSVPAPSTQEPFFSLPADVVPAMPVIEVPAPVVTPPVATMNESEEPVIQDSTEMVVTPEEELQQPQIDNVPVQETHQEPQVQDVPNVQAPRRSERVRRSAIRDDYKVYNIEESHMEDDPTSYEEAMRSARSSEWLEAMKDEMKSMKLNNVWDLEEIPKGAKTVGCKWVYKTKYDSRGNIEKFKARLVAKGFTQREGIDYNETFSPVSCKDSFRIIMALVAHYDLELHQMDVKTAFLNGDLEEKVYMAQPKGFVMKGNENMGCRLKRSIYGLKQASRQWYLKFDGTIKKFGFQENVEDNCIYSKFKNGRFIFLILYVDDILLASSDVSLLQETKKFLSSNFDMKDLGEASYVLGIEIHRDRTKYALGLSQKTYIEKVLKKFNMYRCSATPAPIMKGEKYGASQCPRNQYELNEMKTKPYASAVGSLQYAQVCTRPDLAFVTGLLGRFQSNPGLEHWKLVKKVLRYLQGTKGLMLTYRRSESLQIVGYSDSDFAKDNTKSTSGYVFTLAGGAISWKSSKQTITAGSTMYAEFIACYEATGQVNWLKKFIPGLKVVDSIEKPLKLYCDNEPTVMYAHNNQSSGAAKHIDIKYYVVKDKVRDQTISLEHIKTERMLADPLTKGLPPNVFKEHVAGMGLREAL

SEQ ID NO: 19387 - protein, 1378 aa, Oryza sativa
  Clone ID: TF_OSC420229j.C1.p2.fg
MVAFPSLTPLCSLLGCRRRPFAPRHHQSSPPFSSFAPAAVFAGGYSLMGCIKDIPTLKGDNYAEWKRKLDLAFILGEVDWVLTTPCPIEPAELVRGENESDADWQKRQRDNAPLVMSYDIEQKKWSLANKKCLAVVKNTIEPTILGSIPECDAVSEYLERIKSQFTGSSKTYATQLIKQLVTERYHGGGVRDHILRMSNMASKLKPMDLGITDDFLVHLVMASLPKQFDNFIVNYNISPEKWNFEKLIANCVQEEERIKESNGGSINYVKDKKKNHKSPTSKGKQSQHLPQQQQFAVEKDQCLHCKKTGHYKKDCPDFLKMIMAKKGENIITFVNESHYVGYSRSTWWIDSGATIHACNCLKAFRSTRTTQRRESTIRVANGVEEKVEAVGDLPLELANGFILLLRDVFYVPSLQRNLISVSKLDFDGYDCRFGSGKCELWHNNACIGLAVLRDELYLLSLSENVNVVSSLTKENKKRKRTPDVSSKLWHCRLGHISRGRIERLVKNEILPPLEFSDLEQCIECIKGKFVKSIKKGAKRSAGILEIIHTDICGPFPVKSVDGYDSFITFTDDYSRYGYIYPIKERSEALDKFKIFKAEVENQHDIKINVNGVAERRNRTLMDMVRSMMSYSTLPLGLWMEALKTAIHILNRVPSKSVPKTPYELWTGRVPSLTHLRVWGSPAEAKVFNPNIGKLDPKTVSCHFIGYPERSKGYRFYCPNSYTKFVETRHAVFLEDEMIRGSSVVREIDLEERRVSVPAPSTQELFFSLPADVVPAMPVIEVQAPVVTPPVATMNESEEPVIQDSTEMVATPEEELQQPQIDNVPVQETHQEPQVQDVPNVQAPRRSERVRRSAIRDDYKVYNIEESHMEDDPTSYEEAMRSARSSEWLEAMKDEMKSMKLNDVWDLEEIPKGAKTVGCKWVYKTKYDSRGNIEKFKARLVAKGFTQREGIDYNETFSPVSCKDSFRIIMALVAHYDLELHQMDVKTAFLNGDLEEKVYMAQPKGFVMKGNENMGCRLRRSIYGLKQASRQWYLKFDGTIKKFGFQENVEDNCIYSKFKNGRFIFLILYVDDILLASSDVSLLQETKKFLSSNFDMKDLGEASYVLGIEIHRDRTKYALGLSQKTYIEKVLKKFNMYRCSATPAPIMKGEKYGASQCPRNQYELNEMKTKPYASAVGSLQYAQVCTRPNLAFVTGLLGRFQSNPGLEHWKLVKKVLRYLQGTKGLMLSYRRSESLQIVGYSDSDFAKDNTKSTSGYVFTLAGGAISWKSSKQTITAGSTMYAEFIACYEAMGQVNWLKKFIPGLKVVDSIEKPLKLYCDNEPAVMYAHNNQSSGAAKHIDIKYYVVKDKVRDQTISLEHIKTERMLADPLTKGLPPNVF

SEQ ID NO: 19388 - protein, 999 aa, Oryza sativa
  Clone ID: TF_OSC900016j.C1.p35.fg
MSYDIEYKKWSLTNKKCLAVVKNTIEPTILGSIPECDAVSEYLERIKSQFTGSSKTYATQLIKQLVTERYHGGGVRDHILRMSNMASKLKPMDLGITDDFLVHLVMASLPKHFDNFIVNYNISPEKWNFEKLIANCVQEEEKIKESNGGSINYVKDNKKKNYKSPSSKAKQPQHLPQQQQFAVEKDQCLHCKKTGHYKKDCPDFLKMIMAKKGKNIITFVNESHYVGYSRSTWWIDSGATIHACNCLKAFRSMRTTQRSESSIRVANGVEEKVDAVGDLSLELANGFTLLLRNVFYVPSFQRNLISVSKLDFDGYDCRFGSGECELWGRIERLVKNEILPPLEFSDLEQCIECIKGKFVKNIKKGAKRSAGFLEIIHTDICGPFPVKSVDGYDSFITFTDDYSRYSYIYPIKERSEALDKFKIFKAEVENQHDMGKSLDLFLLQAERRNRTLMDMVRSMMSYSTLSLGLWMEALKTAIHILNRVPSKSVPKTPYELWTGRVPSLAHLRVWGSPAEAKIFNPDLRKLDPKTDSTEIIATPEEELQQPQTDNVPVQETQQEPHIQNVPNVEAPRRSERVRRSAIRDDYQVYNIEESHMEDDPTSYKEAMRSARSSEWLEAMKDEMKSMKLNDVWDLEEIPKGAKTVGCKWVYKTKYDSRGNIEKFKARLVAKGFTQREGIDYNETFSPVSCKDSFRIIIALMAHYDLELHQMDVKTTFLNGDLEEKETKKFLSSNFDMKDIGEASYVLGIEIHRDRTKYALGLSQKAYIEKVLMKFNMYRCSATPAPIVKGEKYGASQCPRNQYELNEMKTKPYASAVGSLQYAQVCTRPDLAFVTELLGRFQSNPGPKHWKLVKKVLCFWKGTKGLMMSYRRLESLQIVGYSDSDFAKDNTKSTSGYVFTLAGGAISWKSSKQTITAGSTMYAEFIACYEATGQVNWLKKFISGLKVVDSIEKPLKLYCDNEPAVMYAHNNQSSGAAKHIDIKYYVVKDSPRSNNQSRAH

SEQ ID NO: 19389 - protein, 403 aa, Oryza sativa
  Clone ID: TF_OSC900040j.C1.p10.fg
MPVPVYAAAAMLPPSPCPSLAAAVLVYKGWLQGADRACRGAPPAMGCPAISSRNHLIPGRYHPIPRKYHAIHGRNRLIPDKYHMIPRENHAIRGRNRLIHDRFHMIPREYHAIRGRNRMIPDKYHLKRGYSLMGCIKDIPTLKEDNYAQWKRKLNLAFILGEVDWVLTTPCPIEPAALVRGENKSDADWKKRQRDNAPLVMSYDIEQKTWSLANKKCLAVVKNTIEPTILGSILECDAVSEYLERTKSQFTGSSKTYATQLIKQLVTERYHGGGVRDHILRMSNMASKLKPMDLGITYDFLVHLVMASFPKQFDNFIVNYNISPEKWNFEKLIANCVQEEERIKESNGGSINYVKDKKKNYKSPTSKAKQSQHLPQQQQFAVEKDQCLHCKKTGHYKKDCPDF

SEQ ID NO: 19390 - protein, 1310 aa, Oryza sativa
  Clone ID: TF_OSC900374j.C1.p17.fg
MGCIKDIPTLKGDNYAEWKRKLDLAFILGEVDWVLTTPCPIEPAELVRGENESDADWQKRQRDNAPLVMSYDIEQKKWSLANKKCLAVVKNTIEPTILGSIPECDAVSEYLERIKSQFTGSSKTYATQLIKQLVTERYHGGGVRDHILRMSNMASKLKPMDLGITDDFLVHLVMASLPKQFDNFIVNYNISPEKWNFEKLIANCVQEEERIKESNGGSINYVKDKKKNHKSPTSKGKQSQHLPQQQQFAVEKDQCLHCKKTGHYKKDCPDFLKMIMAKKGENIITFVNESHYVGYSRSTWWIDSGATIHACNCLKAFRSTRTTQRRESTIRVANGVEEKVEAVGDLPLELANGFILLLRDVFYVPSLQRNLISVSKLDFDGYDCRFGSGKCELWHNNACIGLAVLRDELYLLSLSENVNVVSSLTKENKKRKRTPDVSSKLWHCRLGHISRGRIERLVKNEILPPLEFSDLEQCIECIKGKFVKNIKKGAKRSAGILEIIHTDICGPFPVKSVDGYDSFITFTDDYSRYGYIYPIKERSEALDKDIKIKVVRSDRGGEYYGRHTPYGQVPGPFARFLLENGIVAQYSTPGEPQQNGVAERRNRTLMDMVRSMMSYSTLPLGLWMEALKTAIHILNRVPSKSVPKTPYELWTGRVPSLTHLRVWGSPAEAKVFNPNIGKLDPKTVSCHFIGYPERSKGYRFYCPNSYTKFVETRHAVFLEDEMIRGSSVVREIDLEERRVSVPAPSTQEPFFSLPADVVPAMPVIEVPAPVVTPPVATMNESKEPVIQDSTEMVATPEEELQQPQIDNVPVQETHQEPQVQDVPNVQAPRRSERVRRSAIRDDYKVYNIEESHMEDDPTSYEEAMRSARSSEWLEAMKDEMKSMKLNDVWDLEEIPKGAKTMDVKTAFLNGDLEEKVYMAQPKGFVMKGNENMGCRLKRSIYGLKQASRQWYLKFDGTIKKFGFQENVEDNCIYSKFKNGRFIFLILYVDDILLASSDVSLLQETKKFLSSNFDMKDLGEASYVLGIEIHRDRTKYALGLSQKTYIEKVLKKFNMYRCSATPAPIMKGEKYGASQCPRNQYELNEMKTKPYASAVGSLQYAQVCTRPDLAFVTGLLGRFQSNPGLEHWKLVKKVLRYLQGTKGLMLSYRRSESLQIVGYSDSDFAKDNTKSTSGYVFTLAGGAISWKSSKQTITAGSTMYAEFMACYEATGQVNWLKKFIPGLKVVDSIEKPLKLYCDNEPAVMYAHNNQSSGAAKHIDIKYYVVKDKVRDQTISLEHIKTERMLADPLTKGLPPNVFKEHVAGMGLREAL

SEQ ID NO: 19391 - protein, 500 aa, Oryza sativa
  unsure (1)..(500): unsure at all Xaa locations
  Clone ID: TF_OSC33621j.C1.p1.np
MGPXIERVVDVSISPPNDKELSFEEEEKCMHINAQATIVLFGVLSEDVFKTVMPFEDAHLIWTTLKERYDKSKCDDSKCDDVLFLEEALEECSTSSPNCTTFDDQDNHPTTTLSSTHDYIEGNELVCKVDDRPILPLDSNNTDNEFVIFYCVVDSCISPSPKYMCEDDMDKCSTSYSTCGTNLXKGEVNERQRTSEESTSPRCSSSISKDHACFMGEDGDFEFDHLSKKDITIVIKLMETIKKQQACLIKKNEDIMSLTEEHKKLKDFHSSLIMRYEKLENEFACATNSIACVASLEKQNQELKSQLDEITNKYVDLQEKHDELLCSHENLVDSHAMLEVSHEVIVPMVKSYEPHVQVDLTCTNPSCSQANISPSTICDLDCVGKREKQIDYGLVCIAQPSQDNHEGMVKKLVEESTVACTKIHQRDSKSINAYIKGRNQKMIKSSITCFKCKKVRHHVRDCPWKKGNKLNKKKDIPHIKCFKCTEVGHFASRYSCTLDE

SEQ ID NO: 19392 - protein, 601 aa, Oryza sativa
  Clone ID: TF_OSC401632j.C1.p1.fg
MAFEVGYEVAPEYHQIPHDPNEEKCRVRVTLTSDREDLPSIKFEAGGRKYSHACQEATLVAIGELRHRFDEELESSAFQYHPHKPHGQDYGTYNCPQSEGSPIVMHAVYMLSAMDAVGVEREKAAHDRENWNRGRICKLESKVYRLQKKLAGLKGEARPSAPKLRLTARKRTRPPPRLQLASKTRVVGDAVPDHAEPVIHVLSDEEEEEDPEEREPATPEEEDPSLRSDARRELLSSLTVAVVRCMVNTRTGSGNGHNEGDPTLAQVLAQQTQLINLLVQQAQNQQANNKNQPPPPPQNKLADFLRVRPPTFSSTTNPVEAAAPTQNHPVRKEQGSKPGVCFNCGDPRHYADKCPMPRRVKNAHVQNNSNAPAPKARVNHVAAAETQNAPDVVLESKDLDVILGMDWLTRHIGVIDCANRNVTLTSSNGQTVSFFVSSPKSHGLTLNQVALQEIPIVRDYPDVFPGDLPGMPPKRDIEFRIDLVPGTNPIHKRPYRMAANELAEVKRQVDDLLQKGYIRPNNSPWGALVIFVEKKDHTQRMCVDYPALNEVPIKNKYPLPRIDDLFDQLEGATAFSKIDLLPDITNFKSGGGYTLDWLYHM

SEQ ID NO: 19393 - protein, 790 aa, Oryza sativa
  Clone ID: TF_OSC900106j.C1.p17.fg
MDSPATPVGLSPPLLSLVPRNEPCYTKDKAVAHAGLWLARKRGFIASAARVSVDRAHGGGSRERTAEIDPSKTDGRDRSGPRRLTEEDDYDVGGDVTTGGGGSAARARMLAGERRHFGTNGEHQRVERDAANSPVTKGAAEDQRTATATTKKRRRSSGRRRRWRSGDLRRRRKGERGRRRDGDHDGGLPERRRRLERRRRTTGATAATAALGHTALWRYGRREAKAKVAAGREELGGPFKGARRRRRRPTAAGDEKERSGFEGKRPIRFELESNTFQTDLADISKGEKIIIPQPPYHQHMTTLKKGEVNERQRTSEESTSPRCSSSISKDHACFMGEDGDFEFDHLSKKDITIVIKLMETIKKQQACLIKKNEDIMSLTEEHKKLKDFHSSLIMRYEKLENEFACATNSIACVASLEKQNQELKSQLDEITNKYVDLQEKHDELLCSHENLVDSHAMLEVSHEVIVPMVKSYEPHVQVDLTCTNPSCSQANISPSTICDLDCVGKREKQIDYGLVCIAQPSQDNHEGMVKKLVEESTVACTKIHQRDSKSINAYIKGRNQKMIKSSITCFKCKKVRHHVRDCPWKKGNKLNKKKDIPHIKCFKCTEVGHFASRYSCTLDEQCKTSNFIVEPKALVRLLDLQSSSSITMPSSPESLGGYPGDSVKIPWSPEESRPEAPSSQEHAYLKVILPCKNHGRKMVHMLKRIGSWPYKKSTSTIRTQTVIKELNMFVMGKLKFFLGIGIKQIKEEISSSPSRCQIQIGFKISILSYGHLKNSQGRCQRGRKKRLIKG

SEQ ID NO: 19394 - protein, 1021 aa, Oryza sativa
  Clone ID: TF_OSC410574j.C1.p3.fg
MEHIKQWLSHQEEEGKNNFEEKKNEAPKLGQESISGNLTDGQLDQEKYEKPNGWYNVDAIGINSPNVVLKINDNIQEGKCCALLNSEGSSTARHGCAHERSEGAGPSEPHLRLRSAPGRRVIRFLGSASARLLSTSALFVVVSSSTMSAPGAAGAVSRVGAPGAGAAAGTAAAVSGDGAPGSRAAANFNINGGSSASQSSGGPFSGKDMWDALEAKFGVSDAGSELYVMEQFYDYKMVDDRSVVEQAHEIQMLAKELENNNCELPDKFVAGGIIAKLPPSWSDFATSLKHKRQEFSVSDLIGSLGVEEKARAKDNRGKKFEGGSSANMVQKKNPHASHNNKKVKPDVKSKATTNFKKKGKGKAKRDYFVCGKSGHRAKECPERKDRKSANMVGRGSSLLMGNGSLAAVHGVGSKCHTCVQSKQPRKPHKASEARNLAPLELVHSDLCEMNGVLTKGGKKYFMTLIDDCTRFLYVYLLKTKDEALHYFKTYKAEVENQLERKIKRLRSDRGGEYFSNEFASFCKEFGIIHERTPPYSPQSNGVAERKNRTLTEMVNAMLDTAGLSKEWWGEAVLTACHILNKIPTKHKEVTPFEESERKKLNLSYLRTWGCLAKSRDATFFENEFPMKHTPSTSSQETVMPHEHFAPIEHNDQMPEGNPEEHNIVDTHKSKQQRVAKSFGDDYIVYLVDDTPRTIEEAYSSPDADYWKEAVRSEMDSIMSNGTWEVIECPYGCKLVGCKWVFKKKLRPDGTIEKYKARLVVKGYTQKEDEDFFDTYSPVARLTTIRVLLALAASHGFLVHQMDVKTAFLNGELLNVIEEVKDFLSKSFEMKDLGEADVILNIKLLRGDEVGITLVQSHYVDKVLSRFGYSDCKPAPTPYDPSVLLRKNPRIARDQLRYSQIIGSLMYLASATRPDISFAVSKLSGFVSNSGDDHWQALERVMRYLKGTMSYGIHYTGYPKVLEGYSDSNWISDANEIKATSRYVFTLGGGAVSWKSCKQTILTRSTMEAELTALDTATVEAE

SEQ ID NO: 19395 - protein, 343 aa, Oryza sativa
  Clone ID: TF_OSC12276j.C1.p1.fg
MSDIAKKEFAELALDGSNYLTWALDVEIKLDSMGLGHTIVLPEVGTVESTKAEKAKALHFLRHHLHPDLKFEYMTEKDPLVFWQFLKDRFDQQGSIVLPKAQHDWITLRFQDYMSVAAYNSALHRIISQLRLCGLKIPDAEMIEKTLSTFHHNNIVLQQQYRNSKYPKYSDLILVLLVAERQNEVLLKNHSARPTGSMAVPEAHANVVGNSRGHKRGHGEKKGKRKGSIIFKGKSKGKPRGKGELKKVTGESSGEKQDNCYRCGGRGHWSRNCHVPKHLVELYQQSMNEKKSQHESHFTIEPEAQIEKHDDMLINVKDGGDVRMDDDWDNLLEKDDDIFGGLK

SEQ ID NO: 19396 - protein, 501 aa, Oryza sativa
  Clone ID: TF_OSC400423j.C1.p7.gm
MSDIAKKEFAELALDGSNYLTWALDVEIKLDSMGLDHTIVLPEVGTVESTKAEKAKALHFLRHHLYLDLKSEYMIEKDPLVLWQSLKDRFDQQGSIVLPQAQHDWITLRFQDYKSVAAYNSAHHRIISQLHLCGLKITDAEMIEKTLSTFHPNNIVLQQQYRNSKYPKYSDLISVLLVAERQNEVLLKNHSARPTRSMVVPEAQANVVGNSHGRKRGHGEKKGKGKGSIIFKGKSKGNPEDNCYRCGGRGHWSRNCHVPKHLVELYQQSMNEKKSQHESHFTIEPEAQIEKHDDMLINVKDGGDIRIARLKSPSTMPASNAPSLILFSIRDVAYVEAAMIIFFFLMQRSHWEFGLPYHILHIASSSVSRGGDLWVLGTRFRGDVRGDKDLSHLFHSKNQLKKLNLKLRKPHKWQLNLKDTILKMEDPVPYACTLALEDRNTPTRSLWEITTIPTPPRIIPVGCKWVFLRKRNGQVVRYKARLVAQGFTQRPVLTMMKLTLL

SEQ ID NO: 19397 - protein, 1091 aa, Oryza sativa
  unsure (1)..(1091): unsure at all Xaa locations
  Clone ID: TF_OSC874j.C1.p4.np
SMAVPEAHANVVGNSRGRKRGHGEKKGKGKGSIKFKGKSKGKPRGKGELKKVTGESSGEKQDNCYRCGGRGHWSRNCHVPKHLVELYQQSMNEKKSQHESHFTIEPEAQIEKHDDMLINVKDGGDVRMDDDWNNLLEKDDNIFGDLKETMYFHTLTKKTRNIMTIAGSNAHIVGTGSATLVLPMGTHIFVKDALLDPDSKRTLLSFKDIRANGFHIETEIEQDAEYLLIRKIDGYQKQVVERLPSLPSGLYYTYIKPTEEYVAMKTIFRNPESFRVWYDRLGHPGLGMMRRIISNSAGHNVETNDFPNPEDFICPACAKGKLIIRPSLLKIRDESPVFLVRIQGDICGPIQPLSGPVRYFVVLIDASTRWHVDLLSTRNHAFKLIAQIIKLKACFPDSRVQSIRMDNAGEFRSKAFDDYCLAMAIWDPTRSWGYTLVMRLSIIKYLERMTGDLHMARYADCIFDEDYFPTLGGERHPEECRDIIWNATGMQSLDPRTSEAELEVQRIINLQNIVNKLPDAFTDYKGVTRSHIPTVNAPERVEVTQKVTDSALTPHPRKMGRPPVEEAQPEVEKAPEEATQPEVEMVPEGHHPKDGEPSALRAYLGSGRSEHSNSVVMGNHDELEEINEEISTNCSDTGELHHRKTTIVDIHFASKIVVIMDPDPEPKSMIECQKRSDWDKWKAAIEAKMRSLYKRELMDVVTAYLYGSLDSEIYMRVPEGLKIPNPKGNRNMYSVRLQRSLYGLKQSGRMWFNRLSNYLLKRGYLNNDDCPCVFIKSEMKDLGKTKFCLGLQLEHLPEGVFMYQSTYTKRVLGKFNMDKCHPLKTPMVVXSLEADKDPFKPKKDDEEMLGPEVPYLSAIGALMYLAYCTRPDIAFALNLLARYSATPTRRHWVGVKTILRYLRGTQDLGLWFPKNQDPSMVGYVDAGYMSDPHNAISQTGFIFLCGNTAISWRSVKQTLVATSTNHSEIIALYEATRECVWLRRMIGHIQKSCGLNIDNTPTIIYEDNAACVAQIHMGYVKSNFTKHIVPKFFYPHELQKSGEINVLQTKSCENLADLFTKSLPASSFHRCVRGIGMRRLSELQGSGGAKG

SEQ ID NO: 19398 - protein, 1214 aa, Oryza sativa
  Clone ID: TF_OSC874j.C1.p5.fg
MEGIKLKFQGYRRDQLTTEESLRQKPTYRGSQLTAQASLQEKPAYGVSRLTTQARRSKAYDGRCRCLKHRHGNLDGSAAVATKYRRQTNLLHDPEVSFWMSFVLWTSPIWALDATKNMSDITKKEFAELALDGSNYLTWALDVEIKLDSIGLDHTIVLPELGTVESTKAEKAKALHFLRHHLHPDLKSEYMTEKNPLVLWQSLKDRFDQQGSIVLPQVQHDWITLHFQDYKSTAAYNSAPHRIISQLRFCGQKITDAEMIEKTLSTFHPNNIVLQQQYRNSKYPKYSDLISVLLVAERQNEVLLKNHSARPTGSMAVPEAHANVVGNSRGRKRGHGEKKGKGKGSIKFKGKSKGKPRGKGELKKVTGESSGEKQDNCYRCGGRGHWSRNCHVPKHLVELYQQSMNEKKSQHESHFTIEPEAQIEKHDDMLINVKDGGDVRMDDDWNNLLEKDDNIFGDLKPYGNPMAEEDICLVDNATTNTILRETMYFHTLTKKTRNIMTIAGSNAHIVGTGSATLVLPMGTHIFVKDALLDPDSKRTLLSFKDIRANGFHIETEIEQDAEYLLIRKIDGYQKQVVERLPSLPSGLYYTYIKPTEEYVAMKTIFRNPESFRVWYDRLGHPGLGMMRRIISNSAGHNVETNDFPNPEDFICPACAKGKLIIRPSLLKIRDESPVFLVRIQGGPCGPVVHKEPCFSKLIAQIIKLKACFPDSRVQSIRMDNAGEFRSKAFDDYCLAMAMGIKVEYSVPHVHTQNGLAESLIKRIKLIAQPLLQDWGERHPEECRDIIWNATGMQSLDPRTSEAELEVQRIINLQNIVNKLPDAFTDYKGVTRSHIPTVNAPERVEVTQKVTDSALTPHPRKMGRPPVEEAQPEVEKAPEEATQPEVEMVPEGHHPKDGEPSALRAYLGSGRSEHSNSVVMGNHDELEEINEEISTNCSDTGELHHRKTTIVDIHFASKIVVIMDPDPEPKSMIECQKRSDWDKWKAAIEAKMRSLYKREVFGPAVPTPPRIIPVGCKWVFLRKRNGQVVRYKARLVAQWSMQRPGIDYDETYSPVMSGITFRYLISMATNMNLDMQLMDVVTAYLYGSLDSEIYMRVPEGLKIPNPKGNRNMYSVRLQRSLYGLKQSGRMWFNRLSNYLLKRDIVQPQPEDIGLALKLSSGTFEVLKILGCGSRRTKIHPWWDMWMLAICLILIMPYPRLGLYFFVVILPFPGGL

SEQ ID NO: 19399 - protein, 240 aa, Oryza sativa
  unsure (1)..(240): unsure at all Xaa locations
  Clone ID: TF_OSC1572j.C1.p1.np
EFSSVPPNAPEDVRTDADKQETFMSFSDDELTNQLICEDYTDYERLFDTAIRHEDQRNTTATKRQAAQLTAHQGGNHKPDLTHRQKAGPTTMSVGQHRTFNHTNLHHGSSGSXNDHGSQTNRCTAPRSPMAPAQTGQTAQANKETGAKPKSCFNCGELGHFDDKCPKHRRAGPRFIQADVNHSYGEEAQAPPQDLLDTIADNSIPATELCDSGATHSFISKKFVGMHGLIREELNTPMRV

SEQ ID NO: 19400 - protein, 1269 aa, Oryza sativa
  Clone ID: TF_OSC401828j.C1.p34.fg
MSGNEGEKSPQDFADCVSQEQLRTLQENTQKDITEAVAKSVQDAFAKIGFLNHMERLDKRISTLTDRVAALETPSNEEVVSGDDDAYPEDTVYDSSGYIDAPATRQARLRRRLCTNRTGMGGTRHQQGNNNNRVPDDPYAKVKFKIPSFSGYYDAEKYLDWEMIVEQKFNAHLVPEQHRVRQASSEFKDFAIMWWAGLSDEGVLPTTWEELKVAMRDRFVPPSYHRDLRKKLMRLEQGDKSVQDYYEKELQGCDHQGKSKASTYTPRTMPSVGLPKAVSFRASSQPAGKRPAASGASATPKPSPPRPAESGKGSSQVPAKSASSVASTGRIQCHRCQGFGHVQKDCPSQPAYVATEDGYITTSDVEEEEGEEEVEDEDVEVFARDDTTNYRTIIVQWVLSTQIFFVINNRRARVIIDGGSWNNLVSSDLVKKLGLTTRTHPHPYHIQWLNDSGRANVTQVCRVSFSIGSYADSVDCDVVLMQACSLLLGRPWEHDNDATHHGRSNKYTFVHNGKKITLLPLTPAEIVEADKERAASLKLDESENQQVAKSVFPPKKDKLSPSSKVEGIKLKGGVMLATKCDIAEISDDDMCYFLICKQALVSLDDIASSIPPVVNNLLQEYEDVFPAEIPPGLPPMRGIEHQIDLIPGASLPNRAAKSLDEHMDHLRAIFNALRDARLFANLEKCIFCTERVSFLGYVVTPQGIEVDESKIEAIKSWPVPQTITQVRSFLGLAGFYRRFVKDFSTFSAPLNELTKKGVVFHWGKTQEKSFDTLKDKLTHAPLLQLPNFGKTFELECDASGVGIGGVLMQDGKPVAYFSEKLHGPVLNYSTYDKELYALEAHGGGLMGHFGAKKTEDVLAMHFFWPRMRKDVERFVARCTTCQKAKSRLNPHGLYMPLPVPSIPWADISMDFVLRLPRIKRGRDSIFVVVDRFSKVAHFIPCHKSDDAVHIADLFFHEIVRLHGMPSTIVSDRDAKFLSHFWRTLWNKLGTKLLFSTTCHPQIDGQTEVVNHTLGTMLRAILKKNLKMWEECLPHVEFAYNRATHSTTKMTEKYRIAGSKGRQEVKLEPGDLVWLHLRKDRFPELRKSKLMPRADGPFKIVEKINDNAYKLELPPEFGVSPTFNISDLKPYLGEEDELESRMTSIQEGEDDADITNSDTHNNPPTVIQGPITRARARQLNLEEQWGGTRRHLEKDLEPWRIIEDVQVKVEAQTKSTSGAIRSPGPVCTKTGAQVAYALRLGRSLYVWKAKKITFPMVLVPCPNSFRVNGN

SEQ ID NO: 19401 - protein, 455 aa, Oryza sativa
  Clone ID: TF_OSC409825j.C1.p1.fg
MSGNEGEKSPQDFADCVSQEQLRTLQQNTQKDITEAVAKSVQDAFTKIGFLNHMERLDKRISTLTDRVAALETPSNEEVVSGDDDAHPEDTVYYDAEKYLDWEMTVEQKFNAHLIPEQHRVRQASSEFKDFAIMWWTGLSDEGVLPTTWEELKVAMRDRFVPPSYYRDLRKKLMRLEQGDKSIQDYYGELQKGVRRCGIVEGVEDAICRFYSGLREEIQNIVDYKEFNSVNQLFRFAMLAEKELQGRDHQGKSKASTYTPRTTPSAGLPKAVSFRTSSQPAGKRPAASGASAAPKPSPPPRPAESGKGSSQVPAKSASSVALTGCIQCHRCQGFGHVQKDCPSQRAYVATEDGYITTSDVEEEEEEEEVEDEDGEVFGRDDTTDYRTIIVQRVLSTQIFFVINNRRALVIIDGGSCNNLWLNDSGRAKVTQVCRVSFSIGSYADSVDCNVVPMQA

SEQ ID NO: 19402 - protein, 611 aa, Oryza sativa
  Clone ID: TF_OSC411208j.C1.p1.fg
MEGTRRHLEKDLEPWRIIEDVQVKVEAQTNSTSGAIRSPGPVCTKTAAQVAYVLELGRNEGEKSPQDFADCVSQEQLRTLQENTQKGITEAVAKSVQDAFTKIGFLNHMERLDKRISTLTDRVAALETPSNEEVSGDDDAHPEDTVYDSSGYIDGPATRQARLRRRLGTNRTGMGGTRHQQGNNNRVPDDPYAKMTVEQKFNAHLVPEQHRVRQVSSEFKDFTIMWWAGLSDEGVLPTTWEELKVAMRDRFVPPSYHRDLRKKLMRLEQGDKSVQDYYGELQKGVRRCGIVEGVEDAICRFYSGLREEIQNIVDCKEFNSVNQLFQFAILAEKELQGREQQGKNKASMYTLCTTPSVGLPKAVSFRALSQPVSKRPAAFGASATPKPSPPRPAESGKSSSQVPAKSASSVASTGRIQCHRCQGFGHVQKDCPSQRAYVVTEDGYITTSDVEEEEEEEEVEDEDGEVFGRDDTMAYRTIIVQRVLSTQIFFIINNRRARVIIDGGSCNNLVSFDLVKKLGLTTRTHPHPYHIQWLNDSGRAKVDSRGSPGYRARIRPIMSRITIHWPSFYNVVTGKTLALPNLIALQHIPLSPAGVIAKRPAPIALPNSCAA

SEQ ID NO: 19403 - protein, 733 aa, Oryza sativa
  Clone ID: TF_OSC420832j.C1.p1.fg
MAKTMEHERRGARDRASTLSSQRPLGRRVQGEEYIPEEDDFATASSPPRGPKKPFRPINPRDRKADDRPMAHQGPMSPYYIMYPCKCPFHKGNHDADITISDTHNNPPTVIQGPITRARTMEGTRRHLEKDLDPWRTIGDVQVKVEAQTKSTSGAIRSPGPVYTKTGAQHYYLSLDCVPLIFVYLAFLAPLITSGQHRFLIPAITDYAFQVSFALLVTKDITEAVAKSVQDAFTKIGFLNHMERLDKRISTLTDRVAALETPSNEEVVSGDDDAHPEDTVYDSSGYIDAPATRQAQLRRRLRTNCIGMGGTRHQQGNNNNRVSDDPYAKVKFKIPSFSGYYDAEKYLDWEMTVEQKFNAHLVPEQHRVRQASSEFKDFAIMWWVGLTAEGVLPTTWEELKVAMRNRFVPPSYHRDLRKKLMRLEQGDKSVQDYYGELQKGLFRFAMLAEKELQGRDHQGKSKASTYTPRTTPSAALPKAVSFRVSSQPAGKRPAASGASAAPKPSPPPRPAESGKGSTQVPAKSASSVASTGRIQCHRCQGFGHVQKDCPSQRAYVATEDGYITTSDMEEEEGEEEVEDEDGEVFGRDDTTDYRTNIVQWVLSMQVAATHLVSSDLVEKLGLTTLTHPHPYHIQWLNDSGRAKQVAKSVFPPKKDKISPSSKVEGIKLKGGVMLATKCDIAEMSDDDMCYFLICKQALVSLDDIASSIPPVVTNLLQKYEDVFPAEIPPGFRL

SEQ ID NO: 19404 - protein, 1289 aa, Oryza sativa
  Clone ID: TF_OSC900041j.C1.p10.fg
MERLDKRISTLTDRVAALETPSNEEVVKLKIPSFSGYYDAEKYLDWEMTVEQKYNAHLVPEQHRVRQASSEFKDFAIMWWAGLSDEGVLPTTWEELKVAMRDRFVPPSYHRDLRKKLMRLEQGDKSVQDYYGELQKGVRRCGIVEGVEDAICRFYSGLREEIHNIVDCKEFNSVNQLFRFAMPAEKELQGRDHQGKSKASTYTPRTTPSAGLPKAVSFRASSQPAGKRPAASGASAAPKPFPPPRPAESGKGSTQVPAKSASYVASTGRIQCHRCQGFGHVQKDCPSQRAYVATEDGYITTSDMEEEEEEEEVEDEDGEIFGRDDTTDYRTIIVQRVLSTQIFFVINNRRARVIIDGGSCNNLWLNDSGRAKVTQVCRVSFSIGSYADSVDCDVVPMQACSLLLGRPWEHDNDATHHGRSNKYTFVHNGKKITLLPLTPAEIVEADKERAASLKLDESENQQVAKSVFPPKKDKLSPSSKVEGIKLKGGVMIATKCEIAEISDDDMCYFLICKQALVSLDDIASSMPPVVTNLLQEYEDVFPAEIPLGLPPMRGIEHQIDLIPGASLPNRAAYRTNPEETKEIQRQVQDLLDRWYVRQSLSPCVVPVILVPKKDGSWRMCVDYRAINNITIRYRHPIPRSDDMLDELCGSIIFTKIDLRSGYHQIRMKLGDEWKTAFKTKFGLYEWLVMPFGLTNAPSTFMRLMNEVLRPFIGRFVVVYFDDILIYSKSFDEHMDHLRAVFNALHDARLFANLENCIFCTERVSFLGYVVTPQGIEVDESKIEAIKSWPVPQTITQLRSFLGLAGFYRRFVKDFSIFAAPLNELTKKGVVFHWGKTQEQSFDTLKDKLTHAPLLQLPNFGKTFELECDASGVGIGGVLMQDGKPVAYFSEKLHGPVLNYSTYDKELYALEAHGGGLIGHFGAKKTKDVLAMHFFWPRMRKDVERTKRGRDSIFVVVDRFSKMAHFIPYHKSDDAVHIADLFFHEIVRLHGMPFTIVSDRDAKFLSHFWRTLWNKLGTKLLFSTTCQPQTDGQTEVVNCTLGTMLRAILKKNLKMWEECLPHVEFAYNRTIHSTTKVSPFQVVYGFNPCASIDILPLPTSERVHNDDKAHAEFILSMHESTKFNIEKMTEKYRIAGSKVEKINDNAYKLELPPEFGVSPTFNISDLKPHLGEEDELESRTTSIQEGEDDADITTSDTHNNPPTVIQGPITRARARQLNLEVSSFLCSSLYEFENRLLPNDYIVLWNNGGDKETLGEGLTAMEDHRGCSSQGGGPNQVDVWCNSEFRTNLH

SEQ ID NO: 19405 - protein, 1539 aa, Oryza sativa
  unsure (1)..(1539): unsure at all Xaa locations
  Clone ID: TF_OSC900370j.C1.p2.np
QEQLRTLQQNTQKDITEAVAKSVQDAFTKIGFLNHMERLDKRISTLTDRVAVLETPSNEEVVSGDDDAHPEDTVYDSSGMATTSSTHKPHRYGWHSPPMATTSSTHKPHRYGWHSPPTRXXNDRVPDDPYAKVKFKIPSFLGYDDAKKYLDWEMTVEQKFNVHLVPEQHRVRRASSEFKDFAIMWWAGSDEGVLPTTWEELKVAMRDRFVPPSYHRDLRKKLMRLEQGDKSVQDYYGELQKGVRRCGIVEGVEDAICRFYTSLREEIQNIVDYKEFNSVNQLFRFAMLAEKELQGRDHQGKSKASTYTLRTTVSFRASQPAGKRPAASGASAAPKPSPPRPAESSKGSSQVPAKSASSVTSTGRIQCHRCQGFGHVQKDCPSQRAYVATEDGYITTSDMEEEEEEEEVEDEDGEVFGRDDTTDYRTIIVQRVLSTQVQQHDRLQRHNLFXIFFVINNCRARVIIDGCSCNNLVSSDLVNKLGLTTCTHPHPYHIQWLNDSGRAKVTQVCRVSFSIGSYADSVDCDVVPMQACSLLLGRPWEHDNDATHHGRSNKYTFMHNGKKITLLPLTPAEIVEADKERAASLKVDESENQQVAKSVFPPKKDKLSPSSKVEGIKLKGGVMLATKCDIGDISNDDMCYFLICKQALVSLDDIASSIPPVVTNLLQEYEDVFPAEIPPGLPPMRGIEHQIDLIPGASLPNRAAYRTNPDETKEIQWQVQDLXDRGYVRQSLSPCPVPVILVPKKDGSWRMCVDCRAINNITIRYCHPIPRLDDMLDELCGYIIFTKIDLRSGYHQIRMKLGDEWKTAFKTKFGLYEWLVMPFGLTNAPSTFMSLMNEVLRPFIGRFVVVYFDDILIYSKSLDEHMDHLRAVFNALRDARLFANLEKCIFCMERVSFLGYVVTPQGIEVDESKIEAIRSWSVPQTITQVRSFLGLAGFYHRFVKDFSTFAAPLNELTKKGVVFHWGKTQEKSFDILKEKLTHAPLLQLPNFGKTFELECDATGVGIGGVLMQDGKPVAYFSEKLHGPILNYSTYDKELYALVRSLETWRHYFWPKEFVIHSDHESLQYLRSQNNLNRRHAKWVEFIESFPYVIKHKKGKDNVIADALSRRYTFLSQLECRIFGLESIKEQYALDPDFNEVMINCKEGRTWNKFVINGGFVYRANRLCIPVGSVRLLLIQEAHGGELMGHFGAKKTEDVLAMYFFWPRMRKDVDRFMARCTTCQKAKSHLNPHGLYMPLPVPSIPWADISMDFVLGLSRTKRGRDSIFVVVDHFSKMAHFIPCHKSDDAVHIADLFFHEIVRLHGMPSIVSDRDAKFLSHFWRTLWNKLGTKLLFSTTCHPQTDGQTEVVNRTLGTMLRAILKKNLKMWEECLPHMEFAYNRATHSTTKVSSFQVVYGFNPRAPIDMLPLPTSERVHNDAKARAEFILKMHESTKFNIEKMTEKYRIAGSKSRQEVKLEPGDLVWLHLRNDRFPELRKSKLMPRADGPFKIVEKINDNAYKLELPPEFGVSPTFNISDLKPYLGEEYELESRTTSIQEGE

SEQ ID NO: 19406 - protein, 176 aa, Oryza sativa
  Clone ID: TF_OSC401057j.C1.p6.gm
MAGATGWRAIKFLGSASSATAPVLCDYCCCIDAFTIMSTKIGDKEVNDINRGEGEGKDNWGKKIEGDSSANLVQKKNPHASHNNNKKVKPDVKPNATTNFKKKDKGKAKGDYFVCGKPGHWAKDCLEHKDKKSANMSISEGGGTSGYGQERFLLVVGKRIDADEHGNGGYQRTTIQ

SEQ ID NO: 19407 - protein, 1815 aa, Oryza sativa
  unsure (1)..(1815): unsure at all Xaa locations
  Clone ID: TF_OSC400839j.C1.p11.np
LVWHLIDHLHTGSLLVTLGGCRLLDGLWRSCPVTSPRRLWRRPGAGFAITGTPLTEIDHRNLQLNAQAMNVLFNSLSQEEFDRVSHLETAYEIWNKLASWKIHEGTSEYKDAKLHFLKIQYETFSMLPHESVNDMYGRLNVIVNDLKGLGANYTDLEVAQKMLRALPGKYETLVTMLINSDMSRMTPASLLGKINTNDMYKLKKKEMEEASPSKKCIALQAEVEDKGKGKERGRGSNSSRERGRGSNSSRRRNRRPNKTLSNLKCFECGEKGHFTSKCPSKDDGDKSSKKKSGGYKLMKKLKKEGKKIEAFIGEWDSNEESSASSGSEEEGGEDASSKKKKMAVVAIKEALSLFAPLCLMAKGSSKVTSLSDSESDDDCDDVSYDELVSMFEELHAYSEKEIVKFKALKKDHASLEVLYEELKTSHERLTISHEKLKEAHDNLLSTTQHGALIDVGISCDLLDDSATCHIAHVASSSISTSCDGLVDMPSSSSSSCISICDASLVVENNELKEQVAKLNKSLERCFKGRLMMVALLLDMWVPLYSVVNYRTGGSHWVLDSGCTQHMTGDRAMFTTFEVGGNEQEKVTFGDNSKGKVIGLVAKTSLGWLXHRRLAHVGMNQLSKLSKRDLVVGLKDVKFEKDKLCSACQAGKQVACSHPTKSIMSTSRPLELLHMDLFGPTTYKSIGVERKNRTLIEMARTMLDEYGVSDSFWAEAINTACHATNWLYLHRLLKKTSYELIVGRKPNVAYFRVFGCKCYIYRKGVRLTKFESRCDEGFLLGYASNSKAYRVYNKNKGIVEEIVDIQFDETNGSQEGHENLDDVGDEGLMRAMKNMSIGDVKPIEVEDKPSTSTQDKPSTSATPSQAQVEVEEEKAQDPPMPPRIHTALSKDHPIDQVLGDISKGVQTRSRVASICEHYSFVSCLEPKHVNEALCDPWMNAMHEELNNFARNKVWTLVERPRDHNVIGTKWVFRNKQDENGLVVRNKARLVAQGFTQVEGLDFGETFAPVARLEAIRILLAFASCFDIKLFQMDVKSAFLNGEIAELVFVEQPPGFEDPKNPNHVYKLSKALYGLKQAPRAXYERLRDFLLSKDFKIGKVDTTLFTKIIGDDFFVCQIYVDDIIFGSTNEVFCKEFGDMMSREFEMSMIGELSFFLGLQINQLKDGTFVSQTKYIKDLLKRFGLEDAKPIKTPMATNGHLDLDEGGKLVDLKLYRSMIGSLLYLIASRPDSMFSVCMCARFQAAPKECHLVAVKRILRYLKHSSTIGLWYPKGAKFKLVGYSDSDYTGCKVDRKSTSGSCQMLSRSLVSWSSKKQNSVALYRXGGICFGGIXILSFGQNEIYPQNKIEKEFEKSFKTKLRRSDRAACSGLTGCGRRSDRPSVRGLTAPDWPMMPPRTRHGRCAPTPMPPRTRHGRCAPTPDPVSEPEESSGEDYAQSDEEVEANIEGASEEASGDDDSGSGEDEDEGSDDMHVDPSIXFDVNMRNPSQYTILRHHDQFLRPRDTPDPRFHTAFQKLWVAGDYNEMKWMSDTLQCSISRRQFWRLLNIRLDFGYDLHEEHTHNPLSIDYLSQFYEDGVRYTHGKVAGLRTIPSVVNRIVRATILPRLGNNDDIRGVAWHIIDTIIQGRQFDIVSLMMQEIAISKGTFTQGIYYAPYIMRLIQDKLGAAQNLKKHKQYKPRLQLGAPHARMVPSSHLGASSSSAPPPPHGYDPNAFFHPQYTYFGIQPNEYFNPVLGAINTLSKSIQRLSTGHEAXHEDVRGLRTDVGDLNASMGRLHTRVGTLDSQVQMLESSQAFVYHRRRDAPHPSTSARPPSPPQ

SEQ ID NO: 19408 - protein, 493 aa, Oryza sativa
  Clone ID: TF_OSC21755j.C1.p8.gm
MVRERKVRESPLGARGSGGSVRKLNGGSYKPGRPPGAVILHRRPTSSPSFLPPSGRRYLRCAGRWLGGAVERRLSARSSDRVGSSVQKVNGDGDKPAVLHSWQSITIGQPHPRLLSCRLVVAIRDVSPGKEIQEGSTLWGDLSLILKWEDSWHQRGGAWEYGEENARGGQGRAGAIDYFLYIDARYFARVLSTSQHLLPLHSASSALAPSNFNLRSILEKEKLTGTNFMDWYRNLRIVLRQEHKEFVLTQPFPADLPNNAPVAKRREHERRCNEYLDISCLMLATMSPEFQRQYEALDAHTIITRLRNMFEDQARAKRFNTSKSLFACRLAEGNPVSPHVIKMIGYTESLDKLGFPLSRELATDLILQSLPPSFEPFIMNFNMNNLNRTLAELHGMLKTTEESIKKNSNHVMVMHKHKPNNKKSGQKRKLNSDEITSTSNSKTKVQKTGLAKDAECFFCKETGHWKRNCKKYLEQLKQKQQDGKSSTSGAEKK

SEQ ID NO: 19409 - protein, 589 aa, Oryza sativa
  Clone ID: TF_OSC28635j.C1.p1.fg
IDVGHLCAEIIGLLDKIMAAPASSNFNLRSILEKEKLTGINFMDWYRNLRTVLRQEHKEFVLTEPFPANLPNNAPAAQRREHEKRCNDYLDTSYLMLATMSPELQRKYDALDAHTIITRLRNMFEDQARAERFNTSKSLVACRLAEGNPMSPHVIKMIGYAESLDKLGFPLSRELVTDLILQSLPPSFEPFIMNFNMNNLNRTLAELHGMLKTAEESIKKNSNHVIVVHKRKPNNKKSCQKRKLNSDEITSTSNSKTKVQKTGPAKDAECFFCKETGHWKRNCKKYLEQFKQKQQDGKSSTSVYNINAKRQRPNDLNPTFIWHCRLGHINEKRMEKLHRDGLLHSFDFKSFETCESCLLGKMTKAPFTGQSERASELLGLVHTDVCGPMSSTAKGGFGYFITFTADFSRYGYVYLMRHKSEYFEKFKEFQNEVQNHLGKTIKYLRFDRGGKYLSLEFGNHLKECAIVPQLTPPGTPQWNGVSERRNRTLLDMVRSMMSQTDLPLSFWGYALETVAFTLNRVPSKSVDKTPYEIWTGKRPSLSFLKIWGCVVYVKRLQSDKLTPKSDKCFFVGYPKETKGYYFYNREEGK

SEQ ID NO: 19410 - protein, 1183 aa, Oryza sativa
  Clone ID: TF_OSC28818j.C1.p1.fg
MEIQYEHTSYRDPNRSLTGLGGPSDGSYIFVRGVTGGGIASPRRVVTIYDLILAWFLVYAIEMFDLCYRSLRLSQQWIDVGHLCAEIIGLLDKIMAAPASSNFNLRSILEKEKLTGINFMDWYRNLRTVLRQEHKEFVLTEPLQANLPNNAPAAQRREHEKRCNDYLDTSYLMLATMSPELQRKYDALDAHTIITRLRNMFEDQARAERFNTSKSLVACRLAEGNPMSPHVIKMIGYAESLDKLGFPLSRELVTDLILQSLPPSFEPFIMNFNMNNLNRTLAELHGMLKTAEESIKKNSNHVIVVHKRKPNNKKSCQKRKLNSDEITSTSNSKTKVQKTGPAKDAECFFCKETGHWKRNCKKYLEQFKQKQQDGKSSTSVYNINAKRQRPNDLNPTFIWHCRLGHINEKRMQKLHRDGLLHSFDFKSFETCESCLLGKMTKAPFTGQSERASELLGLVHTDVCGPMSSTAKGGFGYFITFTADFSRYGYVYLMRHKFEYFEKFKEFQNEVQNHLGKTIKYLRFDRGGKYLSLEFGDHLKECAIVPQLTPPGTPQWNGVSERRNRTLLDMVRSMMSQTDLPLSFWGYALETVAFTLNRVPSKSVDKTPYEIWTGKRPSLSFLKIWGCVVYVKRLQSDKLTPKSDKCFFVGYPKETKGYYFYNREEGKVFVARHGVFLEKEFISRQDSGSMVQLEEIQETPENASTSTQPQAEQDVVQQVEQVVVEPVVEAPASRRSDRIRRTPASLELLVDPPNGVKAIECKWVFKKKTDVDGNFNIYKARLVAKGFRQIQGVDYDETFSPVAMLKSIRIVLAIAAYFDYEIWQMDIKIAIHNGNLDEDVYMTQPKGFVDPQSAKKICKLQKSIYGLKQASRSWNIRLDKVVKALGFVKNEEEACVYKKISGSALVFLILYVDDILLIGNDILMLESVKTSLKNSFSMKDLGEATYILGIRIYRDRSKRLIGLSQSTYIERFIMYAMLCTRPDVSYSLSATSRYQSDPCESHWIAVKNILKYLRRTKDMFLVNGGQEELVVNGYTDASFQTDKDDFRSQSGFVFCLNGGAVSWKSSKQDTVSNYTTEAEYIASSEAAKEAVWIKKFISRLGVVTSASSPMDLYCDNSGAIAQAKEPRSHQKSKHILRRYHLIREIVGRGDVKICKIHTDLNVADPLTKPLPQPKHEAHTRAMGI

SEQ ID NO: 19411 - protein, 569 aa, Oryza sativa
  Clone ID: TF_OSC2957j.C1.p1.fg
MEIQYEHTSYRDPNRSLTGLGGPSDGSYIFVRGVTGGGIASPRRVVTIYDLILAWFLVYAIEMFDLCYRSLRLSQQWIDVGHLCAEIIGLLDKIMAAPASSNFNLRSILEKEKLTGINFMDWYRNLRTVLRQEHKEFVLTEPFPANLPNNAPAAQRREHEKRCNDYLDTSYLMLATMSPELQRKYDALDAHTIITRLRNMFEDQARAERFNTSKSLVACRLAEGNPMSPHVIKMIGYAESLDKLGFPLSRELVTDLILQSLPPSFEPFIMNFNMNNLNRTLAELHGMLKTAEESIKKNSNHVIVVHKRKPNNKKSCQKRKLNSDEITSTSNSKTKVQKTGPAKDAECFFCKETGHWKRNCKKYLEQFKQKQQDGKSSTSVYNINAKRQRPNDLNPTFIWHCRLGHINEKRMEKLHRDGLLHSFDFKSFETCESCLLGKMTKAPFTGQSERASELLGLVHTDVCGPMSSTAKGGFGYFITFTADFSRYGYVYLMRHKSEYFEKFKEFQNEVQNHLGKTIKYLRFDRGGKYLSLEFGNHLKECAIVPQLTPPGTPQWNGVSERRNRTLLDM

SEQ ID NO: 19412 - protein, 335 aa, Oryza sativa
  Clone ID: TF_OSC33768j.C1.p1.fg
MVFLVWLKMMDDTLTTGSIRSTEGEKRRLAEASLAYNCERIDVGHLYAEIIGLLDKIMAAPAPYNFILQSILEKEKLTGTNFMDWYCNLRIVLRQEHKEFMLTQPFPADLPNNAPVAQRREHERRCNEYLDISCLMLATMSPELQRQYEALDAHMIITGLRNMFEDQARAEWFNTSKSLFACRLVEELHGMLKTVEESIKKNSNHVMVMHKRKPNNKKSGQKRKLNSDEITSTSSSKTKVQKTGPAKDAECFFCKETGHWKRNCKKYLQQLKQKQQDGKSSTSGINVIEINLATSFTDSWVFDTGSVAHICKSLQGLKRSRSLVSHPEVPFPSLN

SEQ ID NO: 19413 - protein, 880 aa, Oryza sativa
  Clone ID: TF_OSC400763j.C1.p50.fg
MATVTSGDGIGQSSVGSRQRASAMGAGGGHRLWKCMAMPKVIEESITSYIIYQQKLTETNFMDWYRNLRIVLSQEHKEFVLREPFPANLPNNASAAQQREHEKRCNDYLDISCLMLATMSPELQRQYEALDAHTIITGLRNMFEDQARAERFNTSKSLFACRLAEDKCGQKSAAKTYSILEFVRDNGRVRIKSTGTLIHPKARTLAELHGMLKTAEESIKKNSNHVMVMHKRKPNNKKSGQKRKLNSDEITSTSNFKTKVQKTGPAKDAECFFCKETGHWKRNCKKYLEQLKQKQQDGKSSTSGINVIEINLATSSTDSWVFDTGSVAHICKSLQGLKRSRSLARDEVDIRVGNGPRVAAVTIWYVYLMRHKSESFEKFKEFQNEVQNHLGKTIKYLRSDRGGEYLSLEFGNHLKEYGIVPQLTPPGTPQWNGVSERRNRTLLDMVRSMMSQTDLPLSFWGYALETAAFTLNRVPSKSVDKTPYEIWTGKRPSLSFLKIWGCELWKHRLHEGPIGYGIHLRAIAAYFDYEIWQMDVKTAFLNGNLDEDVYMTQPKGFVDPQSAKKICKLQKSIYGLKQASRSWNIRFDKVVKALGFVKNEEESCVYKKISGSALVLKRFNMQDSKKGFLPMSHGINLGKNQCPQTTDERNKMSVIPYASAIGSIMYAMLCTRLDVSYALSATSRYQSDPGESHWIAVKNILKYLRRTKDMFLVYAGQEELVVNGYTDASFQTDKDDFRSQSGFVFCLNGGAVSWKSSKQDTVADSTTEAEYIAASEAAKEAVWIKKFVSQLGVMTSASSPMDLYCNNSGAIAQAKEPRSHQKSKHILRRYHLIREIVGRGDVKICKIHTDLNVADPLTKPLPQPKHEAHTRAMGIRYIHD

SEQ ID NO: 19414 - protein, 659 aa, Oryza sativa
  Clone ID: TF_OSC400770j.C1.p42.fg
MAPPVPSNFNLRSIFEKEKLTGTNFMDWYRNLRIVLRQEHKEFVLTQPFPADLPNNAPAAQRREHERRCNEYLDISCLMLATMSPELQRQYEALDAHTIITGLRNMFEDQARAERFAEGNPVSPHVIKMIGYTESLDKLGFPFSRELATDLILQSLPPSFELFIMNVNMNNLNRTLTELHGMLKTAEESIKKNSNHVMVMHKRKPNNKKSCQKRKLNSDEITSTSNSKTKVQKTGPAKDAECFFCKETGHWKRNCKKYLEQLKQKQQDGKSSILGINVIEISLATYSTDSWVFDTGYGYVYLMRHKSESFEKFKEFQNEVQNYLGKTIKYLRSDRGGEYLSLEFGNHLKECGIISQLTPPGTPQWNGVSERSNRTLLNMLWKHWLHEGPKGYGVHLRDKVEPTTYDEAMVGPDSEKWLEAMKSEIESMHVNQVWNLVNPPDGVKAIECKWVFKKKTDVDGNVHIYKTRLVVKGFRQIQDVSYALSATSRYQSDPGESHWIAVKNILKYLRRTNDTFLVYGGEEELVVNGAMSWKSSKQDTVADSTREAEYIVASEAAKEAVWIKKFVSQLGVMTSASGPMDLYCDNSGAIVQTKEPRSHQKSKHILQRYHLIREIVGRGDVKICKIHTDLNVADQLTKPLPQPKHEAHTRAMGIRYIHD

SEQ ID NO: 19415 - protein, 1316 aa, Oryza sativa
  unsure (1)..(1316): unsure at all Xaa locations
  Clone ID: TF_OSC400770j.C1.p70.np
IMAAPVPSNFNLRSILEKEKLNGTNFMDWYRNLRIVLRQEHKXFVLAQPFPADLPNNAPAAQRREHEKRCNDYFDISCLMLATISPELRRQYETLDAHTIITGLHNMFEDQARAERFNTSNSMFVCRLAEGNPVSPHVIKMIGYTESLEKLGFPLSRELATGLILQSLPPSFEPFILNFNMDNLNRTLAELHGMLKTADESIKKNSHVMVMKRKPNNKKSGQKRKLNSDEITSTSNSKVKVQKIGPAEDAECFFCKETGHWKRNCKKYLEQLADLAFQGLSTPINNYSRRLATLFPGFYLSSGGIWHLTRGCIGLVRSPAKGXVLRSAGPGESIGYVGVVQAFKAASLRSLGSLWFGWYICLPDISILSLIALCLETHRFSWNYLGXVRSSVLADIFYNHNVVLNSLYIVNLDGCSVYNINAKRQRPNDLNPTFIWHCHLSHIKEKRMEKLHKDEDGFLYSFDFESFETCESCLLDKTTKAPFTDQSERASELLALVHTDVCGPMSTTRGGFGYFITFTDYFSRYGYVYLMRHKSESFEKFKEFHNEVQNHLVKTIKYLRSDRGGEYLSLEFGNHLKECGIVPQLTPLGTPQWNGLSERRNRMLLDMVRSMMSQTDLPLSFWGYALETAAFTLNRIPSKSVDKTPYXIWTGKRPSLSFLKIWGCEAYVKRLQSDKLTPKSDKCLFVGYPKETKGYYFYNREEGKVFVARHGVFLEKEFISRKDSGSMVRLEEIQETPENASTSTQPQQGEQDVGQQVEQVVVQPAVEAPASRRSERKRRTPATYASTRQRDILLLDNDEPTTYEEAMVGPDSEKWLGAMKSEIESMHVNQVCKLVDPPDGVKAIECKWVFKKKTDVDRNVHIYKARLVVKGFRQIQGVDYDETFSPVTMLKSVRIVLAIDAYFDYEIWQMDVKTAFLNGNLYEDVYMTQPKGFVDPQSAKKICELQKSIYGLKQVSRSWNIRFDEVVKALGFVKNEEEPCVYKKISGSALVFLILYVDDILLIGNDIPMLESVKTSLKNSFSMKDLGEAAYILGIRIYRDTSKRLIGLSQSTYIDKVLKRFNMQDSKKGFLPMSHGINLGKNQCPQKMSVIPYASAIGSIIYAMLCTRPDVSYALSATSRYQSALGESHWIAIKNILKYLRRTKDMFLVYGGQEELVVNGYTDASFQTDKDDFRSXSGFVLCLNGGVVSWKSSKQDTVADSTTXAEYIASSEVAKEAVWIKKFVSQLGVMTSASSPMDLYCDNSGAIAQAKEPRSHQKSKHILRRYHLIREIVGRGFVKICKIHTDLNVADPLTKPLPQPKHEAHNRAMGIRYVHD

SEQ ID NO: 19416 - protein, 996 aa, Oryza sativa
  Clone ID: TF_OSC401355j.C1.p12.fg
MVTAGDHRRGGAAPERAEGRGKAKGRSSAHPGSTATTGTAAEAEEGGGAIRDGEGDGAPAVGERIGGADGVDDDAAKPKEVTPSGEEVRSDDGGEPELGGDGGEKVRRIDVGHLYAEIIGLLDKIMAAHAPSNFNLRSILEKEKLTGTNFMDWYRNLRIVLRQEHKEFLLIQPFPADLPNNAPAAQRRKHERRCNDYLDISCLMLATMSPELQSQYEALDAHTIITGLRNMFEDQARAERFNTSKFLFAYRLAQGNPVSPHVIKMIGYTESLDKLGFPLSRELATDLILQSLPPSFEPFIMNFNMNNLNRTLAELHGMLKTAEESIKKNSNYVMVMHKLKPNNKKSGQKRKLNSDEITSTSNCKTKVQKTGPAKDAECFFCKETGHWKRNCKKYLEQLKQKQQDGKSSTSALCKNVISASCLQAEGYGFRSVDNGCSVYYNDIFYFHAPMMNGLYIVNLDGCSVYNINAKRQRPNDLNPTFIWHCRLGHINEKRMEKLHRDGLLHSFDFESFETCESCLLGKMTKAPFTGQSERASELLALVHTDVCGPMSSTARSGFGYFITFTDDFSRYGYVYLMRHKSESFEKFKEFQNEVQNHLGKTIKYLRSDHGGEYLRLEFEFISRKDSGSMVRLEEIHETPENASTSTQPQQAEQDVVQQVEQVVVEPVVEAPASRRSERIRRTPARYALLTTGQRDILLLDNDEPTTYEEAMKSIHGLKQASRSWNIRFDEVVKVLGFFKNEQEPCVYKKISGSALVFLILYVDDILLIGNDIPILESVKTLLKNSFSMKDLGEAAYILGIRIYRDRSKRLIGLSQSTYIDKVLKRFNMQDSKKGFLPMSHDINLGKNQCPQTTDERNKMSVIPYASAIGSIMYAMLCTCPDVSYALSATNRYQSDPGESHWIAVKNILKYLRRTEDMFLVYGGQEELVVNGYTDASFQTDKDDFRSRSGFVFCLNGGVVSWKSSKQDTVADSTTEAEYIAASEAAKDAVWIKKFVS

SEQ ID NO: 19417 - protein, 1387 aa, Oryza sativa
  Clone ID: TF_OSC401416j.C1.p1.fg
MEIQYELTSDRDPNRSPMGLGGPSDGSYIFVRGVTGGGIASLLTKAERDCVHRIVRCPLEPHANEKNEPMRLTRFRLNSITPLRIDVGHLYAEIIGLLDKIMAAPAPSKFILRSILEKEKLTGTNFMDWYRNLRIVLRQEHKEFVHTQPFPADLPNNAPAAQRREHERRCNEYLDISCLMLPTMSPELQRKYEALDAHMIITGLRNMFEDQARAERFNTSKSLFACRLAEGNPVSPHVIKMIGYTESLHKLGFPLSRELATDLILQSLPPSFEPFIMNSNMNNLNRTLPELHGMLKTAEKSIKKNSNHVMVMHKRKPNNKKSGQKRKLNSDEITSTSNSKTKVQKTGPAKDAECFFCKETGHWKRNCKKYLEQLKQKQQDGKSSTSGINVIEINLATSSTDSWVFDTGSVAHICKSLQGLKRSRSLARGKVDIRVGNGARVAAVAVGTMPLSLPSGLVLELNNCYCIPALCKNVISASCWQAEGYDFRSVDNGCSVYYNDIFYCHAPMMNGLYIVNLDGCLVYNINAKRQRPNDLNPTFIWHCRLGHINEKRMEKLHRDGLLHSFDFESFETCESCLLSKMTKAPFTGQSERASELLGLVHTDVCGPMSSTARGGFGYFITFTDDFSRYGYVYLMRHKSESFEKFKEFQNEVQNHLDKTIKYVRSDRGGEYLSLEFGNHLKECGIVLQLTPPGTPRWNGVSERRNRTLLDMVRSMMSQTDLPLSFWDYALETAAFTLNRVPSKSVDKTPYEIWTGKRPSFSFLKIWGCEFYVKRLQSDKLTPKSDKCFFVGYPKEMKGYYFYNRDESKVFVARHSVFLEKEFISRKDSGTMVQLEEIQETTENASTSTQPQAKQDVVQQVEQVVVELVVEAPASRRSERIWCTTARYALLTTGQRDILLLDNDEPTTYEKAMVGPDSEKWLGAMKSEIEYMHVNQVWNLVDPPDGVKAIECKWVFKKKTDVDGNVHIYKARLVAKGFRQIQGVDYDETFSPVAMLKSIRIVLAIAAYFDYKIWQMDVKTAFLNGNLDEDVYMTQPKGFVDPQSAKKICKLQKSIYGLKQASRSWNIRFDEVVKALGFVKNKEEPCVYKKISGSALVFLILYVDDILLIGNDIPMLESVKTSLKNSFSMKDLGETAYILGIRIYRDTSKRLIGLSQSTYIDKNQCPQTTDERNKMSVIPYASAIGSIIATSRYQSDPGESRWIAVKNILEYLRRSKDMFLVYGGQEERVVNGYTDASFQTDKDDFRSQSGFVFCLNGGAVSWKSSKQDIVVDSTTEAEYIAASEAAKKAVWIKKFVSQLGVMTSASSPMDLYCDNSSAIAQAKEPRSHQKSKHILRRYHLIREIVDRGDVKICKIHTDLNVADPLTKPLPQPKHEAHTRAMGIRYVHD

SEQ ID NO: 19418 - protein, 328 aa, Oryza sativa
  Clone ID: TF_OSC401555j.C1.p4.gm
MSPELQRQYEALDAHTIITGLRNMFEDQARAERFNTSKSLFACRLAEGNPVSPHVIKIIGYTESLDKLGFPLSQELATDLILQSLPPSFEPFIMNFNMNNLNRTLAELHGMLKTAEESIKKNSNHVMVMHKRKPNNRKSGQKRKLNSDEITSTSNSKTKVQKTVPAKDAECFFCKETGHWKRNCKKYLEQLKQKQQDGKSSTSGAEKKYGYVYLMRHKSESFEKFKEFQNEIQNHLGKTIKYLRSDRGGEYLSLEFGNHLKECGIVPQLTPPGTPQWNGVSERRNRTLLDMETPENAPTSTQPQAEQDVVQQVEQAVVEPVVEAPASR

SEQ ID NO: 19419 - protein, 1095 aa, Oryza sativa
  Clone ID: TF_OSC401834j.C1.p18.fg
MPKVIEESITSYYQQIMAAPAPSNFNLRSILEKEKFTGTNFMDWYRNLRIVLRQEHKEFVLTESFPANLPNNAPAAQRREHEKRCNDYLDISRLILATMSPELQRQYEALDAHTIITGLRNMFEGQARAERFNISKSLFACRLVEGNPVSPHVIKMIGYTESLDKLGFPLSRELATDLILQSLPPSFEPFIMNFNMNNLNRALVELPGMLKTAEESIKKNSNHVMVMHKRKPNNKKSGQKRKLNSDEITSTSNSKTKVQKTGPAKDAECFFCKETGHWKRNCKKYVEQLKQKQQDGKNSTSEGYGFRSVDNGCPVYYNDIFYFHAPMMNGLYIVNLDGYSVYDINAKRQRPNDLNPTFIWHCCLGHINEKRMEKLHRDGLLHSFDFESFETCESCLLGKMTKAPFTGQSERASELLGLIHTDVCGPMSSTDRGGFGYFITFIDDFSRYGYVYLMRHKSESFEKFKEFQNEVQNHLGKTIKYLRSDRGGEYLSLEFGNHLKECGIVPQLTPPGMPQWNGVSERRNRTLLDMVRSMMSQTDLPLSFWGYALETAAFTLSRVPSKSVDKTPYEIWTGKRPSLSFLKIWGCEVYVKRLQSDKLTPKSDKCFFVGYPKETKGYYFYNQEEGKVFVARHGVFLEKEFISRKDSGSMLWKHRLHEGPIGYGVHLRDNDEPTTFEEAMVGPDSEKWFGAMKSEIESMHVNQVWNLVDPPDGVKAIECKWVFKKKTDVDGNVHIYKARLVAKGFIYKARLVAKGFRQIQGVDYDETFSPVAMLKSIRIVLAIAAYFDYEIWQMDVKTAFLNGNPDEDVYMTQPKGFVDPQSAKKICKLQKSIYGLKQASRSWNIRFDEVLKALGFVKNEEEPCVYKKISGSALVFLILYVDDILLIGNDIPMLESVKTSLKNSFSMKDLGEAAYILGIRIYRDRSKRLIGLSQSTYIDKVLKRFNMQDSKKGFLPMSHGINLGKNQCPQTTDERNKMSVIPYASAIGSIMYAMLCTRPDVSYALSATSQYQLDPGESHWIVVKNILKYLRRTKDMFLVYGGLEELVVNGYTDARFQTDKDDFRSQSGFMFCLNGGAVSWKSSKQDTVADSTTEA

SEQ ID NO: 19420 - protein, 679 aa, Oryza sativa
  Clone ID: TF_OSC417977j.C1.p3.fg
MAYGTTSSANRRSSLKASMENQEIAEIVAVVACEQGVFRSMRIASYEQAEAGDVGERGAGRAGPSSAGGSWSGETQQPLRLHRRRRGSVLSVSAASDGEQWLPPTSTVCLLHVDLGLMFAAQSQWISPTWIENPAHIRLSLEWVESRPTTAFHPHPGPGKRITSTLLRRLRRRRRRNALSSGCPSPSLVGSRLPPEARPDDRSGMAYAKDQARAERFNTSKSLFACRLGEGNPVSPHVIKMIGYTESLDKLGFPLSRELATDLILQSLPPSFELFIMNFNMNNLNRTLAELHGMLKTAEESIKKNSNHVMVMHKRKPNNKKSGQKRKLNFDEITSTSNSKTKVQKTGRAKDAECFFCKETGHWKRNCKKYLEQLKQKQQDGKSSTLGINVIEINLATSSTDSWVFDTRGGFGYFITFTDDFSRYGYVYLMRHKSESFEKFKEFQSEVQNHLGKTIKYIRSDRGGEYLSLEFGNHIKECGIVPQLTPPGTPQWNGVSERRNRTLLDMVRSMMSQTDLPLSFWGYALETAAFTLNRVPSKSVDKSPYEIWIGKCPSLSFLKIWGCEVYVKRLQSDKLTPKSDKCFFVGYPKETKGYYFYNREEGKVFVARHGVFLEKEFISRKDSGSMVRLEEIQETPENASTCTQPQQAEQDVVQEQVVVEPVVEAPASRRFERIRRTPA

SEQ ID NO: 19421 - protein, 1183 aa, Oryza sativa
  Clone ID: TF_OSC900184j.C1.p14.fg
MEIQYEHTSYRDPNRSLTGLGGPSDGSYIFVRGVTGGGIASPRRVVTIYDLILAWFLVYAIEMFDLCYRSLRLSQQWIDVGHLCAEIIGLLDKIMAAPASSNFNLRSILEKEKLTGINFMDWYRNLRTVLRQEHKEFVLTEPFPANLPNNAPAAQRREHEKRCNDYLDTSYLMLATMSPELQRKYDALDAHTIITRLRNMFEDQARAERFNTSKSLVACRLAEGNPMSPHVIKMIGYAESLDKLGFPLSRELVTDLILQSLPPSFEPFIMNFNMNNLNRTLAELHGMLKTAEESIKKNSNHVIVVHKRKPNNKKSCQKRKLNSDEITSTSNSKTKVQKTGPAKDAECFFCKETGHWKRNCKKYLEQFKQKQQDGKSSTSVYNINAKRQRPNDLNPTFIWHCRLGHINEKRMEKLHRDGLLHSFDFKSFETCESCLLGKMTKAPFTGQSERASELLGLVHTDVCGPMSSTAKGGFGYFITFTADFSRYGYVYLMRHKSEYFEKFKEFQNEVQNHLGKTIKYLRFDRGGKYLSLEFGNHLKECAIVPQLTPPGTPQWNGVSERRNRTLLDMVRSMMSQTDLPLSFWGYALETVAFTLNRVPSKSVDKTPYEIWTGKRPSLSFLKIWGCVVYVKRLQSDKLTPKSDKCFFVGYPKETKGYYFYNREEGKVFVARHGVFLEKEFISRQDSGSMVQLEEIQETPENASTSTQPQAEQDVVQQVEQVVVEPVVEAPASRRSDRIRRTPASLELLVDPPNGVKAIECKWVFKKKTDVDGNFNIYKARLVAKGFRQIQGVDYDETFSPVAMLKSIRIVLAIAAYFDYEIWQMDIKIAIHNGNLDEDVYMTQPKGFVDPQSAKKICKLQKSIYGLKQASRSWNIRLDKVVKALGFVKNEEEACVYKKISGSALVFLILYVDDILLIGNDILMLESVKTSLKNSFSMKDLGEATYILGIRIYRDRSKRLIGLSQSTYIERFIMYAMLCTRPDVSYSLSATSRYQSDPCESHWIAVKNILKYLRRTKDMFLVNGGQEELVVNGYTDASFQTDKDDFRSQSGFVFCLNGGAVSWKSSKQDTVSNYTTEAEYIASSEAAKEAVWIKKFISRLGVVTSASSPMDLYCDNSGAIAQAKEPRSHQKSKHILRRYHLIREIVGRGDVKICKIHTDLNVADPLTKPLPQPKHEAHTRAMGI

SEQ ID NO: 19422 - protein, 2048 aa, Oryza sativa
  Clone ID: TF_OSC900190j.C1.p9.fg
MPRYKPEYLFGTEGFVQELRTMSFLIGFGIALLYALIPHDRDEEKCRVKVTLNNNREDIPSVMFEAGGGSYIHACQEVARIAIGELRESYNDRLADTEYRYHPRQPQGSDRGSYLEPAGIENDATRRHLVEMLWAMDETRTKIVIAAHDREDWNRGKICKLEDKMVLTRSNGKGPNSNNNNNNNAENPTLAQVLAQQAQLMNLMMQQLQNQQNQGNNHAPPQNMLAEFLRVRPPVFSSTTNPVEAGDWLHTIEKKLDLLQCTDQEKVSFASHQLHGPASEWWDHFRLNRTTPEPISWLEFTTAFRKTHIPSGLVSLKNKEFRSLTQGSRTVTEYLHEFNRLEKFLEELNDELSYPLMTGDYHDFQKLVDKAIRQEDKYNRMEQNFAGNHGMEVEELRRPLMVSTPSNQALSSQRSPSIRIEIQGVPFLANLILLESKDLDVILGMDWLARYKGLIDCANRKVTLTSNEGQVVTVHALPSEPLRSSLNQMTLEEIPIVQEYPDVFPDDLPGATVFSKIDLRSGYHQLRIKEEDIPKTAFTTRYGLFECTVMSFRLTNAPAFFMNLMNKVFMEYLDKFVVVFIDDILIYSQTKEEHEKHLRLALEKLREHQLYAKFSKCEFWLSEVKFLGHVISAGGVAIDPSNVESVTNWKQPKIVSEIRSFLGLAGYYRRFIENFSKIAKPMTRLLQKHVKYKWSEECEQSFQELKNRLISALILILPDPKKGFQVYCDASKLGLGCVLMQDGKVVAYASRQLRPHEKNYPTHDLELAAVVHALKIWRHYLFGTRTEVYTDHKSLKYIFTQPDLNMRQRRWLEWIKDYDLGIHCHPGKANVVADALSRKGFCNAMEGRQLPLELCKEFERLNLGIVSKGFVAALEAKPTLIDQVREAQINDPDILEIKKNMRRGKAIGFLEDEQGTVWLGERICVLDNKDLKDAILKEAHDTLYSIHPGSIKMYQDLKERFWWASMKREIAEYVAVCDVCQRVKAEHQKPAGLLQPLKILEWKWEEIGMDFITRLPRTSSGHDSIWVIVDRLTKAAHFIPVRATYSGSRLAELYMARIVCLHGVPKKIVSDRGSQFTSKFWKKLQEEMGSTLNFSTAYHSQTDGQTERVNQILEDMLRACVLDFGGSWDKNLPYAEFSYNNSYQASLQMAPYEALIDVGHLYAEIIGLLDKIMAASAPSNFNLRSILEKEKLTGTSFMDWYRNLRIVLRQEHKEFVLTQPFLADLPNNSPAAQRMEHERRCKEYLDISCLMLATMSPELERQYEALDAHTIITGLRNMFEDQARAERFNTSKSMFACRLAEGNPVSPHVIKIIGYTESLDKLGFPLSQELATDLILQSLPPSFEPFIMNFNMNNLNRTLAELHGMLKTAEESIKKNSNHVMVMHKRKPNNKKSGQKRKLNSDEIMSTSNSKTKVQKTGPAKDAECFFCKETGHWKRNCKKYLEQLKQKQKDGKSSTSGINVIEINIATSSTDYWVFDTRGGFGYFITFTDDSSRYGYVYLMRHKSESFENFKEFQNEVQNHLGKTIKYLRSDRGGECLSLEFGNHLKEYGIVPQLTPPGTPQWNGVSERRNRTLLDMLWKHRLHEGPIGYGVHLRDNDEPTTYEEEMVGPDSEKWLGAMKSETESMHVNQIWNSVDPPDGVKAIECKWVFKKKIDVDGNVHIYKARLVAKGFRQIQAIAAYFDYEIWQMEVKTAFLNGNLNEDVYMTQPKGFVDPQSAKKICKLQKSIYGLKQASRSWNIRFDEVVQALGFFKNEEEPCVYKKISGSALVFLILYVDDILLIGNDIPILESVKTSLKNSFSMKDLGEAAYILGIRIYRDRSKRLIGLSQSTYIDKVLKMLNMQDSKKGFLPMPHGINLGKNQCPQTTDERNKMSVIPYASAIGSIIDSSTRVSTHIPRYKPEYLFGTEGFVQELRTMSFLIGFGIAPLYAQIPHDRDEEKCRVKVTLNSNPEDIPSGMFEAGGGSYIHACQEVARITIGELRESYNDRLADTEYRYHPRQPQGSDRGSYLEPAGIENDATTRHLVEMLWAMNETVATGKIAFSRTLVY

SEQ ID NO: 19423 - protein, 1320 aa, Oryza sativa
  unsure (1)..(1320): unsure at all Xaa locations
  Clone ID: TF_OSC900201j.C1.p17.np
IMAAPAPSSFNLRSILEKEKLTGTNFMDWYRNLRIRQEHKEFVLTQPFPTDLPNNAPAAQHREHEKRCNDYLDISCLMLATMTPELQRQYEALDAHTIITGLRNMFEEHARAERFNTSKSLFACRLTEGNPVSPYVIKMIGYTESLDKLGFPLSRELATDLILQLLPPSFEPFIMNFNMNNLNRTLAELHGMLKTAEESIKKNSNHVMVIHNKPNNKKSGQKIKLNSDEITSTSNSKTKVQKTGPTKDAECFFCKETGHWKRNCKKYLEQLKQKQQDGKSSISGINVIEINLATFSTDSXVFDTWSVAHICKSLQGLKRSRNLARGEVDIRVGNGARVAAVAVGSMLLSLPSGLVLELNNCYCIPALCKNVISASCLQAEGYGFRSVDNGCLVYYNDIFYSHAPIMNGLYIVNLDGCSVYNINAKRQRPNDLNPTFIWHCRLGHINEKHIEKLHRDGLLHWFDFESFTCESCLLSKMTKAPFTGQSERASELLGLVHTDVCGPMSSTARGGFGYFITFTDDFSRYGYVYLMRHKSESFEKFKEFQNEVQNHLGKTIKYIXSDRGGEYLSLEFGNHVKECGIVPQLTPPGTPQWNGVSERRNRTLLDMVRSMMSQTDLPLSFWGYALETAAFTLNRVPSKSVDKTPYEIWTDKRPSLSFLKIWGCEVYVKRLQSNKLTPKSDKCFFVGYPKETEGYYFYNWEEGKVFVAXHGVFLEKEFISRKVSGSMVXLEEIQETPENASTSTQPQQAEQDVVQQVEQVVVEPVVEAPASRRSERIRRTPTRYAATGQRDILLLDNDEPTTYEEAMVGPDSEKWLGAMKSEIESMHVNQVWNLVDQPDGVKAIECKWVFKKKTDVDGNVHIYKARLVAKCFRQIQGVDYDETFSPVAMLKSIRIVLAIAAYFFEIWQMDVKTAFLNGNLDEDVYMTQPKRFVDPQSAKRICKLQKSIYGLKQASRSWNIRFDEVVKVLGFVKNEEEPCVYKKISSALVFIILYVDDILXIGNDIPMHESVKTSLKNSFSMNDLGEAAYILGIRIYRDRSKRLIGLSQSTYIDKVLKRFNMQYSKKGFLPMLHGINLGKNQCPQTTDEGNKMSAIPYASAIGSIIYAMLCTRPDVSYALSATNXYQSDPGESHWIALKNILKYLRRTKDIFLVYGGQEELVVNGYTYATFQTDKDDFRSQSGFVFCLNGGAVSWKSSKQDTVADSTTEAEYIATSEAAKEAVWIMKFVSQLGVMTSVSSPMDLYCDNSGAIAQAKEPRSHQKSKYILRRYHLIREIVGRGDVKICKIHTDLNVADPLTKPLPQPKHEAHTRAMGIRYVHD

SEQ ID NO: 19424 - protein, 1322 aa, Oryza sativa
  unsure (1)..(1322): unsure at all Xaa locations
  Clone ID: TF_OSC900297j.C1.p10.np
IMAAPAPSNFNLWSILEKEKLTRTNFMDWYRNLRIVLRXEHKKFVLTQPFPADFPNNAPAAQRREHERRCNEYLDISCLMLATMSPELQRQYEALDAHTIITGLRNMFEDQARAERFNTSKSLFACRLAEGNPVSPHVIKIIGYTESLDKLGFPLSQELATDLILQSLPPSFEPFIMNFNMNNLNRTLAELHGMLKTAEESIKKNSNHVMVMKRKPNNRKSGQKRKLNSDEITSTSNSKKGSKDSAAKDAECFFCKETGHWKRNCKKYLEQLKQKQQDGKSSTSGINVIEINLATSSTDSWVFDTGSVAHICKSLXGLKRSRSLARGEVDIRVGNGARVAAVAVDTMPLSLPLGLVLELNNCYCIPALCKNVISASCLQAEGYGFRSMDNGCSVYYNDIFYFHAPMMNGLYIVNLDGCSVYNINAKWQRPNDLNPTFIWHCRLGHINEKRMEKLHRDGLLHSFDFESFETCESCXLGKITKAPFTGQSERASELLGPVHTDVCGPMSSTARGGFGYFITFTDDFSRYGYVYLMRHKSESFEKFKEFQNEIQNHLGKTIKYLRSDRGGEYLSLEFGNHLKECGIVPQLTPPGTPQWNGVSERRNRTLLDMVRLMMSQTDLPLSFWGYALETAAFTLNRVPSKSVDKTTYEIWTGKRPILSFLKIWGCEVYVKRLQSDKLTPKSDKCFFVGYPKETKGYYFYHREEGKVFVARHSVFLEKKFISRKDSVSMVXLEEIQETPENAPTSTQPQAEQDVVQQVEQAVVEPVVEAPASRRSEKIRRTPARYASTVQCDILLLDNDEPTTYEKAMVGPDSEKWLGTMKSEIESMHVNQVXKLVDPPDDVKAIECKWVFKKKTDVDGNVHIYKARLVTKSFKQIQGVDYDETFSPVAMLKSIWIVLAIAGYFDYEIWQMDVKTAFLNGNLYEDVYMTQPKGFVDPQSAKKICKLHKSIYGLKQASRSWNIRFDEVVKALGFVKNEEEPCVYKKVSGSALVFLILYVDDILLIGNDIPMLESVKTSLKNSFSMKDLGEVVYILGIRIYRDKSKRLIGLSQSTYIDKVLKRFNMQDSKKGFLPMSHGINLGKNQCPQTTDEXNKMSVIPYASAIGSIMYAMLCTRPNVSYALSATSRYQSDPGESHXITVKNILKYLRRTKDMFLVYGGXEELVVNGYTDASFQTDKDDFRSQSGFVFCLNRGAVSWKSSKQDTVADSTTEAEYIAASEAAKEVVWIKKFVSQLGVMTSASSPMDLYCDNSGAIAQAKPRSHQKSKHILRRYHLIREIVGRGDVKIHKIHTDLNVADPLTKPLPQPKHEAQTRAMGVIYIHD

SEQ ID NO: 19425 - protein, 748 aa, Oryza sativa
  Clone ID: TF_OSC23004j.C1.p7.fg
MSAPTPRVSRSPRHQSRSPPLRRGRRRPGDAWHLGPVRRVVKEVGGSANYSILTKTNYSDWSLLMRAMLQVRGLWEAVDTGDVNFQEDRMALEAVLKVVPADLLPVLSVKETAKDAWDAIKTMRVGVDRVRKSKAQELRKQFNAIEFKEGESVEEFSVRLSGLVNNLAVLGIQLEESKKLTGRLRNAEERRPKKKSGDEGDKLYITEEQWAARAKERQSGEGSSRKKAGNNRRHRDGRKKTEGTADGERGARYTRDQGRDKCKNCGRLGHWAKDCCQPKKQVAAHVAQGEEEDDELALLMAHAVELAPPPPSLPPSTEPLNLVEPKVFTHLHCDVDAGVWHLDTGATNHMTGVHDIFSELDTVVRGKVCFGDGSVVAIEGQGKIIFECRNSEHRALIGVYYIPKLNANLVSLRQLDENGCDICIFHGVCTIRDAARQLLARVRCTRIRLYLIKITVARPVCLSARTQEAAWLWHARFGHLHFDALRRLTQQDMVRGLPQIDQVEQLCDCCVISKQRRSPFPGQSLFREEDRLELIHGDLCGPISPATPGGKKHFLLLVDDASCYMWLTLLQNKGEAAAAIKHFQARSEAESGCHLKLLHPDNGGEFTSAEFASYCTESGVKRQLTPPYSPQQNGVVERRNQTILAMAQCLLRAKSVPACYWGEAVMTVVFLLNHAPTKCLVDKTPYEAWLGRKPAVGHLRTFGCLVYSRTFSHTSPSSRNAASPWSSSATLRELKPTRCSTRSRVAFK

SEQ ID NO: 19426 - protein, 874 aa, Oryza sativa
  Clone ID: TF_OSC101575j.C1.p1.fg
MSGQTGNGKDGDKGATFPYDYPSTSASYVSTYSGKAPYFNGTDYAAWKHKMKMHLKSINPLIWRIVEKGYVLQNPVEPTKEDDKNEHKNAQAANAILSALSGSDFNRVDGIESAKVIWDTLRSLHEVTDSVSEFKVEILKGQFERFVMLDGESPSDMYDRLSKIVNEIKVLGSKDMTNEVVVKKMVRAITPRNSTLVTIIRERPDYKTLTPHDLLGRILAHDMLEQESKEVIQYINQTSTTSIKKEDLALKAKEEEEESRKSKSKSKAEIDDEEMALFVKKFDKFMKQSGFFKESSSKYSSNKSSGRHSARVCYVCKEPEHFIDDCPHIKDCPHFKEDKKKLEKNEKHKHSKHDRYGQAHLGVIFGSDFESSSSDEEGVATFAVKPSSPPRLFNYSSDEDAPICLMAKEPKVPSPLKSFNVDLVSDEEEDVEDEVMDDELFKSIAKESIPHLSELLGRIENQYANLERQEELLIREKERSHELKSELAKEREKNEALVRLYKQTKESHTNLEVANAQLQERVDGLDKAYLSLEEKFETLKNSVSLPSEASCSKIVPSNEPCVRCKDIDIEACSTNSTSLSALQKQNEKLMGLLHNGLLKCHMGSKALKEYLGYQRDNFNHEGLGYVSPPKGKVDKSVMIKNPQGLSNFVKAKCILPNDYASHCSFDTSYVLRKNANGRAVAKRDDSSVVFKGVLEGKLYLVDFFSTKAKHETCLVAKSNMRWLWHRRLTHVGMRNLHKLLKHDHILGLTNVQFEKDRVCSACQAGKQIGAHHPVKNVMITTRPLELLHMDLFGPIAYLSIGGDKYGLVIVDDFSRFTWVFFLHDKSETQAIFKKFERRAQNEFDLKIKNIRSDNGKEFKNTCIESFLDEEGIKH

SEQ ID NO: 19427 - protein, 1310 aa, Oryza sativa
  Clone ID: TF_OSC400991j.C1.p12.fg
MSGQTGNGKDGDKGATFPYDYPSTSASYVSTYSGKAPYFNGTDYAAWKHKMKMHLKSINPLIWRIVEKGYVLQNPVEPTKEDDKNEHKNAQAANAILSALSGSDFNRVDGIESAKVIWDTLRSLHEVTDSVSEFKVEILKGQFERFVMLDGESPSDMYDRLSKIVNEIKVLGSKDMTNEVVVKKMVRAITPRNSTLVTIIRERPDYKTLTPHDLLGRILAHDMLEQESKEVIQYINQTSTTSIKKEDLALKAKEEEEESRKSKSKSKAEIDDEEMALFVKKFDKFMKQSGFFKESSSKYSSNKSSGRHSARVCYVCKEPEHFIDDCPHIKDCPHFKEDKKKLEKNEKHKHSKHDRYGQAHLGVIFGSDFESSSSDEEGVATFAVKPSSPPRLFNYSSDEDAPICLMAKEPKVPSPLKSFNVDLVSDEEEDVEDEVMDDELFKSIAKESIPHLSELLGRIENQYANLERQEELLIREKERSHELKSELAKEREKNEALVRLYKQTKESHTNLEVANAQLQERVDGLDKAYLSLEEKFETLKNSVSLPSEASCSKIVPSNEPCVRCKDIDIEACSTNSTSLSALQKQNEKLMGLLHNGLLKCHMGSKALKEYLGYQRDNFNHEGLGYVSPPKGKVDKSVMIKNPQGLSNFVKAKCILPNDYASHCSFDTSYVLRKNANGRAVAKRDDSSVVFKGVLEGKLYLVDFFSTKAKHETCLVAKSNMRWLWHRRLTHVGMRNLHKLLKHDHILGLTNVQFEKDRVCSACQAGKQIGAHHPVKNVMITTRPLELLHMDLFGPIAYLSIGGDKYGLVIVDDFSRFTWVFFLHDKSETQAIFKKFERRAQNEFDLKIKNIRSDNGKEFKNTKCYILNKKARSSKFAPKVDEGFLLGYRSNECAYRVFNKTSGIVEIARDVTFDEINGSQVEQVDSHVLGEGEDPNETIKRVEEALNDPDWGMAMQEELNNFTRNEVWTLVERPRQNVIGTKWIFRNKQDEARVVIRNKAKLVAQGFTQIDGLDFGETFAPVARLESIRILLAFATNLNFKLFQIDVKSVFLNGPINELVYVEQPLGFEDPKYPINVYKLHKALYGLKQAPRAWYECLHNFLVKNGFEIGKADSTLFTKRYDNDIFVCQIYVDDIIFGSTNKSFNEEFSRMMTKRFEMSMMGELKFFLGLQIKQLKEGTFICQTKYLKDMLKKFGMENAKPIHTPMPSNGHLDLNEQGKDVDQKVYRSIIGSLLYLCASRPDIMLSVCMCARFQAALKECHLVAMKRILRYVHTPNLGLWYPKGASFDLIGYADADYAGCKVDRKSTLGTC

SEQ ID NO: 19428 - protein, 1242 aa, Oryza sativa
  Clone ID: TF_OSC900312j.C1.p14.fg
MSGQTGNGKDGDKGATFPYDYPSTSASYVSTYSGKAPYFNGTDYAAWKHKMKMHLKSINPLIWRIVEKGYVLQNPVEPTKEDDKNEHKNAQAANAILSALSGSDFNRVDGIESAKVIWDTLRSLHEVTDSVSEFKVEILKGQFERFVMLDGESPSDMYDRLSKIVNEIKVLGSKDMTNEVVVKKMVRAITPRNSTLVTIIRERPDYKTLTPHDLLGRILAHDMLEQESKEVIQYINQTSTTSIKKEDLALKAKEEEEESRKSKSKSKAEIDDEEMALFVKKFDKFMKQSGFFKESSSKYSSNKSSGRHSARVCYVCKEPEHFIDDCPHIKDCPHFKEDKKKLEKNEKHKHSKHDRYGQAHLGVIFGSDFESSSSDEEGVATFAVKPSSPPRLFNYSSDEDAPICLMAKEPKVPSPLKSFNVDLVSDEEEDVEDEVMDDELFKSIAKESIPHLSELLGRIENQYANLERQEELLIREKERSHELKSELAKEREKNEALVRLYKQTKESHTNLEVANAQLQERVDGLDKAYLSLEEKFETLKNSVSLPSEASCSKIVPSNEPCVRCKDIDIEACSTNSTSLSALQKQNEKLMGLLHNGLLKCHMGSKALKEYLGYQRDNFNHEGLGYVSPPKGKVDKSVMIKNPQGLSNFVKAKCILPNDYASHCSFDTSYVLRKNANGRAVAKRDDSSVVFKGVLEGKLYLVDFFSTKAKHETCLVAKSNMRWLWHRRLTHVGMRNLHKLLKHDHILGLTNVQFEKDRSETQAIFKKFERRAQNEFDLKIKNIRSDNGKEFKNTKCYILNKKARSSKFAPKVDEGFLLGYRSNECAYRVFNKTSGIVEIARDVTFDEINGSQVEQVDSHVLGEGEDPNETIKRVEEALNDPDWGMAMQEELNNFTRNEVWTLVERPRQNVIGTKWIFRNKQDEARVVIRNKAKLVAQGFTQIDGLDFGETFAPVARLESIRILLAFATNLNFKLFQIDVKSVFLNGPINELVYVEQPLGFEDPKYPINVYKLHKALYGLKQAPRAWYECLHNFLVKNGFEIGKADSTLFTKRYDNDIFVCQIYVDDIIFGSTNKSFNEEFSRMMTKRFEMSMMGELKFFLGLQIKQLKEGTFICQTKYLKDMLKKFGMENAKPIHTPMPSNGHLDLNEQGKDVDQKVYRSIIGSLLYLCASRPDIMLSVCMCARFQAALKECHLVAMKRILRYVHTPNLGLWYPKGASFDLIGYADADYAGCKVDRKSTLGTC

SEQ ID NO: 19429 - protein, 1303 aa, Oryza sativa
  unsure (1)..(1303): unsure at all Xaa locations
  Clone ID: TF_OSC18902j.C1.p2.np
GVDRKATRARAXPVLLLSASPVLIACTHERSERAGHSEPHHCLRSAPGRRVIKFLGSARTTALVFCSSTFVIDRTSNGASRAGAQNNNTNGGSYASQSSVIDRTSNGASRAGAQNNNTNGGSYASQSSGGTFTGSFSVVGFAAALKPHAFDGSNYKRWKARTLLWLTAMQCFYVSRGKRSEPPVSPEEEVKFEASDCLFRGALISVLADNIVDVYMHMPSGKDMWDALEAKFGVSDAGSELYVMEQFYDYKMVDDRSVVEQAHEIQMLAKELENNNCELPDKFVVGGIIAKLPPWSDFATFLKHKRQEFSVSDLIGFLGVEEKARAKDNRGKKVEGGSSAIMVQKNPHASHNNKKVMPDVKPKATTNFKKKGKGKAKGDCFVCGKSRHWAKYCPERKDIKSANMVISEGGGTSGYGKLLPIVLSVFHSPDWXVDTGANIHVCADIFLFSSYQVGRGSSLHGVGTVDLKFTSGKTVQLKNVQHVPSIKKNLVSGSLLCREGFRLVFESNKCVVSKYGTFIGKSYDSGGLFRFSLDDMCNNNNVVNHISENDESNVWHSRLCHVNFGCMTRLADMSLISKFTLVKGFKCHTCVXSKQHHKPHKASEARDLAPLELVHSDLCEMNGVWTKGGKKYFITLIDDCTRFCYVYLLKTNDEALHYFKTYKVEVENQLERKIKRLRSDRGGEYFFNEFTSFCEEFGIIHESTPPYSPQSNGVAERKNRTLTKMVNAMLDTAGLSKEWWGEAVLTARHVLNKIPMKHKEVTPFEEWERKKLNLSYLRTWSCLAKVNVPIAKNNLGPNTVDCVFLGYAIHSMGYRFLIVNSRVPDMRVGTIIESRDATFFENEFPMKNTPSTSSQKTVIPHEHFAPIEHNDQTLEGNPEEDNIVDTRKSKRQRVAKSFGDDYIVYLVDDTPRTIEEAYSSPDADYWKEAVRSKMDSIMSNGTWEVVERSYGCNPVGCKWVFKKKFRLDGTIEKYKARLVAKSYTQKEGDDFFDTYSPVARLTTIRVLLALAASHGLLVHQMDVKTAVLNGELEEEIYMDQPDGYVLEGXEGMVCKLLIFLYGLKQAPKQXHEKFDTTLTSAGFVVNEGDKCVYYRYGGGEGVILCLYVDDILIFGTSLNVIEEVDFLSKTFEMKDLGETNVILNIKLLRGDEGGITLVQSHNVDKVLSRFGYSDCKPAITPYDPSVLLRKNRRIARDXLRYSQIIGLLMYLACATRPDISFAVSKLSRFVSNPGDDHWQALERVMRYLKGTISYGINYNGYPKVLEWYSGSNWISDDDEIKATSGYVFTLGGGAISWKSCKQT

SEQ ID NO: 19430 - protein, 439 aa, Oryza sativa
  Clone ID: TF_OSC18902j.C1.p8.gm
MAHRELVHRTTTPTEAVMPHNPAEGLSQAMQCFYVSRGKRSEPPVSPEEEVKFEASDCLFRGALISVLADNIVDVYMHMPSGKDMWDALEAKFGVSDAGSELYVMEQFYDYKMVDDRSVVEQAHEIQMLAKELENNNCELPDKFVVGGIIAKLPPWSDFATFLKHKRQEFSVSDLIGFLGVEEKARAKDNRGKKVEGGSSAIMVQKNPHASHNNKKVMPDVKPKATTNFKKKGKGKAKGDCFVCGKSRHWAKYCPERKDIKSANMVISEGGGTSGYGRERFLLVHGVGTVDLKFTSGKTVQLKNVQHVPSIKKNLVSGSLLMGYRFLIVNSRVPDMRVGTIIESRDATFFENEFPMKNTPSTSSQKTVIPHEHFAPIEHNDQTLEGNPEEDNIVDTRKSKRQRVAKSFGDDYIVYLVDDTPRTIEEAYSSPDADYWKEA

SEQ ID NO: 19431 - protein, 478 aa, Oryza sativa
  Clone ID: TF_OSC900359j.C1.p9.gm
MAHRELVHRTTTPTEAVMPHNPAEGLSQAMQCFYVSRGKRSEPPVSPEEEVKFEASDCLFRGALISVLADNIVDVYMHMPSGKDMWDALEAKFGVSDAGSELYVMEQFYDYKMVDDRSVVEQAHEIQMLAKELENNNCELPDKFVVGGIIAKLPPWSDFATFLKHKRQEFSVSDLIGFLGVEEKARAKDNRGKKVEGGSSAIMVQKNPHASHNNKKVMPDVKPKATTNFKKKGKGKAKGDCFVCGKSRHWAKYCPERKDIKSANMVISEGGGTSGYGRERFLLVHGVGTVDLKFTSGKTVQLKNVQHVPSIKKNLVSGSLLMGYRFLIVNSRVPDMRVGTIIESRDATFFENEFPMKNTPSTSSQKTVIPHEHFAPIEHNDQTLEGNPEEDNIVDTRKSKRQRVAKSFGDDYIVYLVDDTPRTIEEAYSSPDADYWKEAVRTSHGLLVHQMDVKTAVLNGELEEEIYMDQPDGYVLEG

SEQ ID NO: 19432 - protein, 1461 aa, Oryza sativa
  Clone ID: TF_OSC418782j.C1.p3.fg
MDISRANEGYTSCGPVVEMSWHRAGVLLLGAQSCLPVPEVPAVGGVGSVLLSMARMGWKLCHVFRPYTVVMAGSINRRGLDLTGFVLELRGMCVVLGYPHGVDYQGKQLLEQEGDDVEPHAAWEVTVVVLTGSPERTSLAVTAGGDSFSAACQNAALLAIGTLHQRYPDELQHSPYRYHPRRGGARDYATFRDASSEDDATIMHLARMVQAYNATRINFHHMVRRGLVENNMKILELRQENLQLKKDLDAVEAQLCQLKIAQGEMVTTRRSAAFLHHIQNPPQHNAPPLPPPPQHSKLAEFLRIRPPIFSSSNNPVDALDWLHAVGKKLDTVQCNDEEKVIFAAHQLQGPASLWWDHFQATQPEGQPITWARFTAAFRRTHVPAGVMALKKREFRELKQGNRSVMEYLHEFNNLARVRYTIPYPGGSSSQQQQQQQPRSAPRPQFVVRVPQPQQQQSQQGTRAPRPPAPVVQPGQGRRDAQGQQRLCFNCFESGHFADKCPKPRRQQGQAPPRPNNGGKDVIRGRVNHVTAEDVLTTPDVIVGVVDCARRTVTLYRGLEQPVVFFAPPTSVGSSELHQIGLSEIPIVREFGDVFPEELPGMSPKREIEFRIDLAPGTTPLYKRPYRMAANELAEVERQLEELKEKGYIWPSTSPWGAPVIFVEKKDKTKRMCVDYRALNEVTIKNRYPLPRIDDLFDQLKGATVFSKIDLRSGYHQLRIREEDIPKTAFTTRYGLYEFTVMSFGLTNDPAFFMNLMNKVFMEYLDKFVVVFIDDILVYSQSEEDHQQHLRLVLGKLREHQLYAKLSKCEFWLSEVKFLGHVISAKGVAVDPDTVTAVTDWKQPKTVTQVRSFLGLAGPQCEKAFQTLKEKLVSSPVLILPDTRKDFLVYCDASRQGLGCVLMQEGHVVAYASRQLRPHEGNYPTHDLELAAVVHALKIWRHYLIGNRCEIYTDHKSLKYIFTQSDLNLRQRRWLELINDYDVGIHYHPGKANVVADALSRKSRCNTLGVRDIPPELNQQMEALNLSIVGHGFLATLEAKPTLLDQIREAQKNDLDMHGILKNMKQGKAAGFTEDEHGTLWNGNRVCVPDDRELKKLILQEAHESPYSIHPGSTKTYLDLKEKYWWVSMKREIAEFVALCDVCQRVKAEHQRPAGLLQPLQVPEWKWDEIGMDFITGLPKTQGGYDSIWVVVDRLTKVARFIPVKTTYGGNKLAELYFARIVSLHGVPKKIVSDRGSQFTSHFWKKLQEELGTRLNFSTAYHPQTDGQTERLNQILEDMLCACVLDFGKTWDKSLPYAEFSYNNSYQASIQMAPYEALYGRKCRTPLLWDQVGESQVFGTDILREAEAKVKTIRDNLKVAQSRQKSYADNRRRNLEFAVDDFVYLRVTPLRGVHRFQTKGKLAPRFVGPFCIIARRGEVAYQLELPASLGNVHDVSMCRNSRNVFECHPSRPIQSKLKFAKT

SEQ ID NO: 19433 - protein, 698 aa, Oryza sativa
  Clone ID: TF_OSC10766j.C1.p1.fg
MAPAQSGPPAVSAQSEQPKKGAVGKPGPCFNCGKHGHFAGKCPKLNRTGPRFIQARANHVSAEEAQAAPEVVLGTFPVNSYPATVLFDSGASHSFISKRFAGTHGLSVVELKIPMQVHTPGNDMRTAHYCPSVTIEIKRSPFLSNLILLESKDLDVILGMDWLTRNKGVIDCASRTITLTNDKGEKITFRSPASQKSVASLNQAAIEGQTETVEKSSRKLEDIPIVQEYPEVFPEDLTTMPPKREIEFRIDLAPGTAPIYKRPYRMAANELAEVKKQVDEQLQKGYIRPSTSPWGAPVIFVEKKDKTKRMCVDYRALNEVTIKNKYPLPRIDDLFDQLKGAKVFSKIDLRSGYHQLRIREEDIPKTAFTTRYGLFECTVMSFGLTNAPAFFMNLMNKVFMEFLDKFVVVFIDDILIYSKSEEEHEQHLRLVLEKLKEHQLYAKFSKCDFWLSEVKFLGHVISAQGVVVDPSNVESVTKWTPPKTVSQIRSFLGLAGYYRRFIENFSKIARPMTQLLKKDEKFKWSAECNQSFEELKKKLVSAPVLILPDQTKDFQVYCDASRQGLGCVLMQEGRVVAYASRQLRPHEANYPTHDLELAAVVHALKIWRHYLIGNRCEVYTDHKSLKYIFTQPDLNLRQRRWLELIKDYDMGIHYHPGKANVVADALSRKSYCNAVCTEGMCDKLQQDLEHLNLGIVEH

SEQ ID NO: 19434 - protein, 1457 aa, Oryza sativa
  Clone ID: TF_OSC12547j.C1.p1.fg
MMKTRNDPRDSNDASGSEEQTDGAHVSGASGSRSSPPPENPTVTQMMTMMMQQMQQHYHQMLQQAQQNQQFGPPPSHVSKLLDFLRIQPPTFSSTTNPMEANDWLRAIEKKLNLLQCNDREKVAFATHQLQGPASAWWDNYVATRLDATEVTWAEFCQSFRKAQIPEGIMAQQKREFRALQQGTRTVTEYLHEFNRLARYAPEDVRTDAEKQEKFLFGLDDELTNQLISGVYEDFEKLVDKAIRQEEQRNKMDRKRKAAQISFPQGNNQKPRFMTGQLGGPSTLIVCQHRPYHPSNFNNDYNGGSHNNSKQHNHNSTPPPLMAPAQSDPPAVSVQSEQPKKGAVGKPGPCFNCGKHGHFAGKCPKLNRTRPRFIQARANHVSAEEAQAAPEVVLGTFPVNSYPATVLFDSGASHSFISKRFAGMHGLSVVELKIPMQVHTPGNDMRTAHYCPSVTIEIKRSPFLSNLILLESKDLDVILGMDWLTRNKGVIDCASRTITLTNDKGEKITFRSPVSQKSVASLNQAAIEGQTETVEKSPRKLEDIPIVQEYPEVFPEDLTTMPPKREIEFRIDLAPGTAPIYKRPYRMAANELAEVKKQVDEQLQKGYIRPSTSPWGAPVIFVEKKDKTKRMCVDYRALNEVTIKNKYPLPRIDDLFDQLKGAKVFSKIDLRSGYHQLRIREEDIPKTAFTTRYGLFECTVMSFGLTNAPAFFMNLMNKVFMEFLDKFVVVFIDDILIYSKSEKQHEQHLRLVLEKLKEHQLYAKFSKCDFWLSEVKFLGHVISAQGVAVDPSNVESVTKWTPPKTVSQIRSFLGLAGYYRRFIENFSKIARPMTQLLKKDEKFKWSAECNQSFEELKKKLVSAPVLILPDQTKDFQVYCDASRQGLGCVLMQEGRVVAYASRQLRPHETNYPTHDLELAAVVHALKIWRHYLIGNRCEVYTDHKSLKYIFTQPDLNLRQRRWLELIKDYDMGIHYHPGKANVVADALSRKSYCNAVCTEGMCDKLQQDLEHLNLGIVEHGFVAALEARPTLVDQVRAAQVNDPEIAELKKNMRVGKARDFHEDEHGTIWLGERLCVPDDKELKDLILTEAHQTQYSIHPGSTKMYQDLKEKFWWVSMRREIAEFVALCDVCQRVKAEHQRPAGLLQPLQIPEWKWEEIGMDFITGLPRTSSGHDSIWVVVDRLTKVAHFIPVHTTYTGKRLAELYLARIMCLHGVPKKIVSDRGSQFTSKFWQKLQEELGTRLNFSTAYHPQTDGQTERVNQILEDMLRACALDFGGAWDKSLPYAEFSYNNSYQASLQMAPFEALYGRKCRTPLFWDQTGERQLFGTEVLTEAEEKVRTIRERLRIAQSRQKSYADNRRRELTFEAGDYVYLRVTPLRGVHRFQTKGKLAPRFVGPYKILERRGEVAYQLELPSNMIGIHDVFHVSQLKKCLRVPEEQADSEHIDIQEDLTYVEKP

SEQ ID NO: 19435 - protein, 1013 aa, Oryza sativa
  Clone ID: TF_OSC12547j.C1.p1.gm
MMKTRNDPRDSNDASGSEEQTDGAHVSGASGSRSSPPPENPTVTQMMTMMMQQMQQHYHQMLQQAQQNQQFGPPPSHVSKLLDFLRIQPPTFSSTTNPMEANDWLRAIEKKLNLLQCNDREKVAFATHQLQGPASAWWDNYVATRLDATEVTWAEFCQSFRKAQIPEGIMAQQKREFRALQQGTRTVTEYLHEFNRLARYAPEDVRTDAEKQEKFLFGLDDELTNQLISGVYEDFEKLVDKAIRQEEQRNKMDRKRKAAQISFPQGNNQKPRFMTGQLGGPSTLIVCQHRPYHPSNFNNDYNGGSHNNKQPKKGAVGKPGPCFNCGKHGHFAGKCPKLNRTRPRFIQARANHVSAEEAQAAPEVVLGTFPVNSYPATVLFDSGASHSFISKRFAGMHGLSVVELKIPMQVHTPGNDMRTAHYCPSVTIEIKRSPFLSNLILLESKDLDVILGMDWLTRNKGVIDCASRTITLTNDKGEKITFRSPVSQKSVASLNQAAIEGQTETVEKSPRKLEDIPIVQEYPEVFPEDLTTMPPKREIEFRIDLAPGTAPIYKRPYRMAANELAEVKKQVDEQLQKGYIRPSTSPWGAPVIFVEKKDKTKRMCVDYRALNEVTIKNKYPLPRIDDLFDQLKGAKVFSKIDLRSGYHQLRIREEDIPKTAFTTRYGLFECTVMSFGLTNAPAFFMNLMNKVFMEFLDKFVVVFIDDILIYSKSEKQHEQHLRLVLEKLKEHQLYAKFSKCDFWLSEVKFLGHVISAQGVAVDPSNVESVTKWTPPKTVSQIRSFLGLAGYYRRFIENFSKIARPMTQLLKKDEKFKWSAECNQSFEELKKKLVSAPVLILPDQTKDFQLRPHETNYPTHDLELAAVVHALKIWRHYLIGNRCEVYTDHKSLKYIFTQPDLNLRQRRWLELIKDYDMGIHYHPGKANVVADALSRKSYCNAVCTEGMCDKLQQDLEHLNLGIVEHGFVAALEARPTLVDQVRAAQVNDPEIAELKKNMRVGKARDFHEDEHGTI

SEQ ID NO: 19436 - protein, 1450 aa, Oryza sativa
  Clone ID: TF_OSC1521j.C1.p1.fg
MVKTRDDPRDSNDASGSEEQTDGAHVSGASGSRSSPPPENPTVTQMMTMMMQQMQQHYHQMLQQAQQNQQFGPPPSHVSKLLDFLRIQPPTFSSTTNPMEANDWLRAIEKKLILLQCNDREKVAFATHQLQGPASAWWDHYVVTRPDATEVTWAEFCQSFRKAQIPEGIMAQQKREFRALQQGTRTVTEYLHEFNRLARYAPEDVRTDAEKQEKFLFGLDDELTNQLISGVYEDFEKLVDKAIRQEEQRNKIDRKRKTAQISFPQGNNQKPRFMTGQLGGPSTLIVCQHRPYRPSNFNNDYNGGSHNNSKQHNHNSTPPPLMAPAQSDPPAVSVQLEQPKKGAVGKPGPCFNCGKHGHFAGKCPKLNRTGPRFIQARANHVSAEEAQAAPEVVLGTFPVNSYPATVLFDSGASHSFISKRFAGTHGLSVVELKIPMQVHTPGNDMRTAHYCPSVTIEIKRSPFLSNLILLESKDLDVILGMDWLTRNKGVIDCASRTITLTNDKGEKITFRSPASQKSVASLNQAAIEGQTETVEKSPRKLEDIPIVQEYPEVFPEDLTTMPPKREIEFRIDLAPGTAPIYKRPYRMAANELAEVKKQVDEQLQKGYIRPSTSPWGAPVIFVEKKDKTKRMCVDYHALNEVTIKNKYPLPRIDDLFDQLKGAKVFSKIDLRSGYHQLRIREEDIPKTAFTTRYGLFECTVMSFGLTNAPAFFMNLMNKVFMEFLDKFVVVFIDDILIYSKSEEEHEQHLRLVLEILKEHQLYAKFSKCDFWLSEVKFLGHIISAQGVAVDPSNVESVTKWTPPKTVSQIRSFLGLAGYYRRFIENFSKIARPMTQLLKKDEKFKWSAECNQSFEELKKKLVSAPVLILPDQTKDFQVYCDASRQGLGCVLMQEGRVVAYASRQLRPHEANYPTHDLELAAVVHALKIWRHYLIGNRCEVYTDHKSLKYIFTQPDLNLRQRRWLELIKDYDMGIHYHPGKANVVADALSRKSYCNAVCTEGMCDKLQQDLEHLNLGIVEHGYVAALEARPTLVDQVRAAQVNDPEIAELKKNMRVGKARDFHEDEHGTIWLGERLCVPDDKELKDLILTEAHQTQYSIHPGSTKMYQDLKEKFWWVSMRREIAEFVALCDVCQRVKAEHQRPAGLLQPLQIPEWKWEEIGMDFITGLPRTSSGHDSIWVVVDRLTKVAHFIPVHTTYTGKRLAELYLSRIMCLHGVPKKIVSDRGSQFTSKFWQKLQEELGTRLNFSTAYHPQTDGERQLFGTEVLTEAEEKVRTVRKRLRIAQSRQKSYADNRRRELTFEAGDYVYLRVTPLRGVHRFQTKGKLAPRFVGPYKILERRGEVAYQLELPSNMIGIHDVFHVSQLKKCLRVPEEQADSEHINIQEDLTYVEKPVRILDTSERRTRNKVTRFCRVQWSHHSEEEATWEREDELKAAHPHLFTSSSESRGRDSV

SEQ ID NO: 19437 - protein, 1468 aa, Oryza sativa
  Clone ID: TF_OSC16872j.C1.p1.fg
MMMQQMQQHYHQMLQQAQQNQQFGPPPSHVSKLLDFLRIQPPTFSSTTNPMEANDWLRAIEKKLNLLQCNDREKVAFATHQLQGPASAWWDNYVATRLDATEVTWAEFCQSFRKAQIPEGIMAQQKREFRALQQGTRTVTEYLHEFNRLARYAPEDVRTDAEKQEKFLFGLDDELTNQLISGVYEDFEKLVDKAIRQEEQRNKMDRKRKAAQISFPQGNNQKPRFMTGQLGGPSTLIVCQHRPYHPSNFNNDYNGGSHNNSKQHNHNSTPPPLMAPAQSDPPAVSVQSEQPKKGAVGKPGPCFNCGKHGHFAGKCPKLNRTRPRFIQARANHVSAEEAQAAPEVVLGTFPVNSYPATVLFDSGASHSFISKRFAGMHGLSVVELKIPMQVHTPGNDMRTAHYCPSVTIEIKRSPFLSNLILLESKDLDVILGMDWLTRNKGVIDCASRTITLTNDKGEKITFRSPVSQKSVASLNQAAIEGQTETVEKSPRKLEDIPIVQEYPEVFPEDLTTMPPKREIEFRIDLAPGTAPIYKRPYRMAANELAEVKKQVDEQLQKGYIRPSTSPWGAPVIFVEKKDKTKRMCVDYRALNEVTIKNKYPLPRIDDLFDQLKGAKVFSKIDLRSGYHQLRIREEDIPKTAFTTRYGLFECTVMSFGLTNAPAFFMNLMNKVFMEFLDKFVVVFIDDILIYSKSEKQHEQHLRLVLEKLKEHQLYAKFSKCDFWLSEVKFLGHVISAQGVAVDPSNVESVTKWTPPKTVSQIRSFLGLAGYYRRFIENFSKIARPMTQLLKKDEKFKWSAECNQSFEELKKKLVSAPVLILPDQTKDFQVYCDASRQGLGCVLMQEGRVVAYASRQLRPHETNYPTHDLELAAVVHALKIWRHYLIGNRCEVYTDHKSLKYIFTQPDLNLRQRRWLELIKDYDMGIHYHPGKANVVADALSRKSYCNAVCTEGMCDKLQQDLEHLNLGIVEHGFVAALEARPTLVDQVRAAQVNDPEIAELKKNMRVGKARDFHEDEHGTIWLGERLCVPDDKELKDLILTEAHQTQYSIHPGSTKMYQDLKEKFWWVSMRREIAEFVALCDVCQRVKAEHQRPAGLLQPLQIPEWKWEEIGMDFITGLPRTSSGHDSIWVVVDRLTKVAHFIPVHTTYTGKRLAELYLARIMCLHGVPKKIVSDRGSQFTSKFWQKLQEELGTRLNFSTAYHPQTDGQTERVNQILEDMLRACALDFGGAWDKSLPYAEFSYNNSYQASLQMAPFEALYGRKCRTPLFWDQTGERQLFGTEVLTEAEEKVRTIRERLRIAQSRQKSYADNRRRELTFEAGDYVYLRVTPLRGVHRFQTKGKLAPRFVGPYKILERRGEVAYQLELPSNMIGIHDVFHVSQLKKCLRVPEEQADSEHIDIQEDLTYVEKPVRILDTSERRTRNKVTRFCRVQWSHHSEEEATWEREDELKAAHPHLFTSSSESRGRDSV

SEQ ID NO: 19438 - protein, 1003 aa, Oryza sativa
  Clone ID: TF_OSC16872j.C1.p1.gm
MMKTRNDPRDSNDASGSEEQTDGAHQAQQNQQFGPPPSHVSKLLDFLRIQPPTFSSTTNPMEANDWLRAIEKKLNLLQCNDREKVAFATHQLQGPASAWWDNYVATRLDATEVTWAEFCQSFRKAQIPEGIMAQQKREFRALQQGTRTVTEYLHEFNRLARYAPEDVRTDAEKQEKFLFGLDDELTNQLISGVYEDFEKLVDKAIRQEEQRNKMDRKRKAAQISFPQGNNQKPRFMTGQLGGPSTLIVCQHRPYHPSNFNNDYNGGSHNNSKQHNHNSTPPPLMAPAQSDPPAVSVQSEQPKKGAVGKPGPCFNCGKHGHFAGKCPKLNRTRPRFIQARANHVSAEEAQAAPEVVLGTFPVNSYPATVLFDSGASHSFISKRFAGMHGLSVVELKIPMQVHTPGNDMRTAHYCPSVTIEIKRSPFLSNLILLESKDLDVILGMDWLTRNKGVIDCASRTITLTNDKGEKITFRSPVSQKSVASLNQAAIEGQTETVEKSPRKLEDIPIVQEYPEVFPEDLTTMPPKREIEFRIDLAPGTAPIYKRPYRMAANELAEVKKQVDEQLQKGYIRPSTSPWGAPVIFVEKKDKTKRMCVDYRALNEVTIKNKYPLPRIDDLFDQLKGAKVFSKIDLRSGYHQLRIREEDIPKTAFTTRYGLFECTVMSFGLTNAPAFFMNLMNKVFMEFLDKFVVVFIDDILIYSKSEKQHEQHLRLVLEKLKEHQLYAKFSKCDFWLSEVKFLGHVISAQGVAVDPSNVESVTKWTPPKTVSQIRSFLGLAGYYRRFIENFSKIARPMTQLLKKDEKFKWSAECNQSFEELKKKLVSAPVLILPDQTKDFQLRPHETNYPTHDLELAAVVHALKIWRHYLIGNRCEVYTDHKSLKYIFTQPDLNLRQRRWLELIKDYDMGIHYHPGKANVVADALSRKSYCNAVCTEGMCDKLQQDLEHLNLGIVEHGFVAALEARPTLVDQVRAAQVNDPEIAELKKNMRVGKARDFHEDEHGTI

SEQ ID NO: 19439 - protein, 365 aa, Oryza sativa
  Clone ID: TF_OSC25996j.C1.p4.gm
MVKTRNDPRDSNDASGSEEQTDGAHVSGASGSRSSPPPENPTVTQMMTMMMQQMQQHYHQMLQQAQQNQQFGPPPSHVSKLLDFLCIQPPTFSNTTNPMEANDWLRAIEKKLNLLQCNDQEKVAFATHQLQGPASAWWDNYVATRLDATEVTWAEFCQSFRKAQIPEGIMAQQKREFRALQQGTMSVTEYLHEFNRLARYAPEDVRTDAEKQEKFLFGLDDELTNQLISGVYEDFEKLVDKAIRQEEQRNKMDRKRKAAQISFPQGNNQKPRFMTGQLGGPSTLIVCQHRPYHPSNFDNDYNGGRHNNKQPKKGAVGKPGPCFNCGKHGHFAGKCPKLNRTGPRFIQARANHVSAEEAQAAPEVV

SEQ ID NO: 19440 - protein, 1448 aa, Oryza sativa
  Clone ID: TF_OSC27228j.C1.p1.fg
MVKTRNDPRDSNDASGSEEQTDEAHTSGAPGSSSSPPPENPTVTQMMTMMMQQMQQHYHQMLQQAHQNQQFGPPPSHVSKLLDFLRIQPPTFSSTTNPMEANDWLRAIEKKLNLLQCNDQEKVAFATHQLQGPASAWWDNYVVTRPDATKVTWAEFCQNFRKVQIPEGIMAQQKREFRALQQGTRTVTEYLHEFNRLARYAPEDVRTDAEKQEKFFFGLDDELTNQLISGVYEDFEKLVDKAIRQEEQRNKMDRKRKAAQISFPQGNNQKPRFMTGQLGGPPTLIVCQHRPYHPSNFNNDYNGGSHNNSKQHNHNSTPPPLMAPAQSDPPAVSAQSEQPKKGAVGKPGPCFNCGKHGHFAGKCPKLNRTRPRFIQARANHVSAEEAQAAPEVVLGTFPVNSYPATVLFDSGASHSFISKRFAGTHGLSVVELKIPMQVHTPGNDMRAAHYCPSVTIEIKRSPFLSNLILLESKDLDVVLGMDWLTRNKGVIDCASRTITLTNDKGEKITFHSPASQKSVASLNQAAIEGQTETVEKSPRKLEDIPIVQEYPEVFPEDLTTMPPKREIEFRIDLAPGTAPIYKRPYRMAANELAEVKKQVDEQLQKGYIRPSTSPWGAPVIFVEKKDKTKRMCVDYRALNEVTIKNKYPLPRIDDLFDQLKGAKVFSKIDLRSGYHQLRIREEDIPKTAFTTRYGLFECTVMSFGLTNAPAFFMNLMNKVFMEFLDKFVVVFIDDILIYSKSEEEHEQHLRLVLEKLKEHQLYAKFSKCDFWLSEVKFLGHVISAQGMAVDPSNVESVTKWTPPKTVSQIRSFLGLAGYYRRFIENFSKIARPMTQLLKKDEKFKWSAECNQSFEELKKRLVSAPVLVLPDQTKDFQVYCDASRQGLGCVLMQEGRVVAYASRQLRPHETNYPTHDLELAAVVHALKIWRHYLIFNRCEVYTDHKSLKYIFTQPDLNLRQRRWLELIKDYDMGIHYHPGKANVVADALSRKSYCNAVCIEDMCDKLQQDLEHLNLGIVEHGFVAALEARPTLVDQVRAAQVNDPEIAELKKNMRVGKARDFHEDEHGTIWLGERLCVPDDKELKDLILTEAHQTHYSIHPGSTKMYQDLKEKFWWVSMRKEIAEFVALCDVCQLAELYLSRIMCLHGVPKKIVSDRGSQFTSKFWQKLQEELGTRLNFSTAYHPQTDGQTERVNQILEDMLRACALDFGGAWDKSLPYAEFSYNNSYQSSLQMAPFEALYGRKCRTPLFWDQTGERQLFGTEVLTEAEEKVRTVRERLRIAQSRQKSYADNRRRELTFEAGDYVYLRVTPLRGVHRFQTKGKLAPRFVGPYRILERRGEVAYQLELPSNMVGIHDVFHVSQLKKCLRVPEEQASSEHIDIQEDLTYVEKPVRILETSERRTRNKVIRFCKVQWSHHSEEEATWEREDELKAAHPHLFASSSESRGRDSV

SEQ ID NO: 19441 - protein, 1512 aa, Oryza sativa
  unsure (1)..(1512): unsure at all Xaa locations
  Clone ID: TF_OSC27228j.C1.p3.np
VKTRNDPRDSNDASGSEEQTDEAHTSGAPGSSSSPPPENPTVTQMMTMMMQQMQQHYHQMLQQAQNQQFGPPPSQSKLLDFLRIQPPTFSSTTNPMEANDWLRAIEKKLNLLQCNDQEKVAFATHQLQGPASAWWDNYVVTRPDATKVTWAEFCQNFRKVQIPEGIMAQQKREFRALQQGTRTVTEYLHEFNRLARYAPEDVRTDAEKQEKFFFGLDDELTNQLISGVYEDFEKLVDKAIRQEEQRNKMDRKRKAAQISFPQGNNQKPRFMTGQLGGPPTLIVCQHRPYHPSNFNNDYNGGSHNNSKQHNHNSTPPPLMAPAQSDPPAVSAQSEQPKRAVGKPGPCFNCGKHGHFAGKCPKLNRTRPRFIQARANHVSAEEAQAAPEVVLGTFPVNSYPATVLFDSGASHSFISKRFAGTHGLSVVELKIPMQVHTPGNDMRAAHYCPSVTIEIKRSPFLSNLILLESKDLDVVLGMDWLTRNKGVIDCASRTITLTNDKGEKITFHSPASQKSVASLNQAAIEGQTETVEKSPRKLEDIPIVQEYPEVFPEDLTTMPPKREIEFRIDLAPGTAPIYKRPYRMAANELAEVKKQVDEQLQKGYIRPSTSPWGAPVIFVEKKDKTKRMCVDYRALNEVTIKNKYPLPRIDDLFDQLKGAKVFSKIDLRSGYHQLRIREEDIPKTAFTTRYGLFECTVMSFGLTNAPAFFMNLMNKVFMEFLDKFVVVFIDDILIYSKSEEEHEQHLRLVLEKLKEHQLYAKFSKCDFWLSEVKFLGHVISAQGMAVDPSNVESVTKWTPPKTVSQIRSFLGLAGYYRRFIENFSKIARPMTQLLKKDEKFKWSAECNQSFEELKKRLVSAPVLVLPDQTKDFQVYCDASRQGLGCVLMQEGRVVAYASRQLRPHETNYPTHDLELAAVVHALKIWRHYLIFNRCEVYTDHKSLKYIFTQPDLNLRQRRWLELIKDYDMGIHYHPGKANVVADALSRKSYCNAVCIEDMCDKLQQDLEHLNLGIVEHGFVAALEARPTLVDQVRAAQVNDPEIAELKKNMRVGKARDFHEDEHGTIWLGERLCVPDDKELKDLILTEAHQTHYSIHPGSTKMYQDLKEKFWWVSMRKEIAEFVALCDVCQXVKAEHQRPAGLLQPLQIPEWKWEEIGMDFITGLPRTSLGHDSIWVVVDRLTKVAHFIPVHTTYTGKRLAELYLSRIMCLHGVPKKIVSDRGSQFTSKFWQKLQEELGTRLNFSTAYHPQTDGQTERVNQILEDMLRACALDFGGAWDKSLPYAEFSYNNSYQSSLQMAPFEALYGRKCRTPLFWDQTGERQLFGTEVLTEAEEKVRTVRERLRIAQSRQKSYADNRRRELTFEAGDYVYLRVTPLRGVHRFQTKGKLAPRFVGPYRILERRGEVAYQLELPSNMVGIHDVFHVSQLKKCLRVPEEQASSEHIDIQEDLTYVEKPVRILETSERRTRNKVIRFCKVQWSHHSEEEATWEREDELKAAHPHLFASSSESRGRDSV

SEQ ID NO: 19442 - protein, 918 aa, Oryza sativa
  Clone ID: TF_OSC31102j.C1.p13.gm
MVKTRDDPRDSNDASGSEEQTDGAHVSGASGSRSSPPPENPTVTQMMTMMMQQMQQHYHQMLQQAQQNQQFGPPPSHVSKLLDFLRIQPPTFSSTTNPMEANDWLRAIEKKLILLQCNDREKVAFATHQLQGPASAWWDHYVVTRPDATEVTWAEFCQSFRKAQIPEGIMAQQKREFRALQQGTRTVTEYLHEFNRLARYAPEDVRTDAEKQEKFLFGLDDELTNQLISGVYEDFEKLVDKAIRQEEQRNKIDRKRKTAQISFPQGNNQKPRFMTGQLGGPSTLIVCQHRPYRPSNFNNDYNGGSHNNSKQHNHNSTPPPLMAPAQSDPPAVSVQLEQPKKGAVGKPGPCFNCGKHGHFAGKCPKLNRTGPRFIQARANHVSAEEAQAAPEVVLGTFPVNSYPATVLFDSGASHSFISKRFAGTHGLSVVELKIPMQVHTPGNDMRTAHYCPSVTIEIKRSPFLSNLILLESKDLDVILGMDWLTRNKGVIDCASRTITLTNDKGEKITFRSPASQKSVASLNQAAIEGQTETVEKSPRKLEDIPIVQEYPEVFPEDLTTMPPKREIEFRIDLAPGTAPIYKRPYRMAANELAEVKKQVDEQLQKGYIRPSTSPWGAPVIFVEKKDKTKRMCVDYHALNEVTIKNKYPLPRIDDLFDQLKGAKEHQLYAKFSKCDFWLSEVKFLGHIISAQGVAVDPSNVESVTKWTPPKTVSQIRSFLGLAGYYRRFIENFSKIARPMTQLLKKDEKFKWSAECNQSFEELKKKLVSAPVLILPDQTKDFQLRPHEANYPTHDLELAAVVHALKIWRHYLIGNRCEVYTDHKSLKYIFTQPDLNLRQRRWLELIKDYDMGIHYHPGKANVVADALSRKSYCNAVCTEGMCDKLQQDLEHLNLGIVEHGYVAALEARPTLVDQVRAAQ

SEQ ID NO: 19443 - protein, 1014 aa, Oryza sativa
  Clone ID: TF_OSC32579j.C1.p3.fg
MVKTRNGSQSNKVSGSEEQINGPRASGASDSSSSPPLENPTIAQVLDNQTQMITMMMQQMQQQYHQVLQQSKLLEFLRVKPPTFSSTTNPIEANDWLRAIEKKLNLLQCNDQEKVAFATHQLQLQGPASVWWDNYMVTRPAGTEVTWIEFCQSFNKAQVPEGIVAQKKREFRSLQQGTRTVIEYLHEFNRLTRYAPEDVRTDAERQEKFLSGLDDELTNQLISQHYEDFQKLVDKAIRQEEQCNKMNRKRKAVQFRTSQGISQKPRLTMGHQGGPSTMIIQQHRPYHPGSFDKNYHSGSHNNSEQHSLNPTPSSLMNVAQSALPAQPEQPKKFGEKPDLCFNCNEPGHMVGKCPKPRRAGLKFVQAHVNHASAEEAQSAPEVILGTFPVNSTPAVILFDSGATHSFISKRFAGAHGLSLVKLKIPMRVHTPGGGMTTTHYCPSVTVEIQGLIFPANLILLESKDLDVILGMDWLTRHRVIDCTSHTIKLTNAKGEVVTFQSPVLQKPGISLNQAAGEEQEVAVEKTTKKLEDIPIVREYPEVFPDNLTTMPPKRDIEFRIDLAPGTAPIHKRPYRMGANELAEVKKQVDEQLQKGYIRPSTLPWGAPYALNEVTIKNKYPLSRIDDLFDQLKGATVFPKMDLRSGYHQLRIREEDIPKTAFITCYGLFECTVMSFGLTNEPAFFMNLMNKVFMEFLDKFVVVFIDDILIYSKSEEEHEQHLRLVLEKLKEHQLYAKFSKCDFWLKEVQFLGHIVNAQGVAVDPANVESVTKWTPPRTVTQVRSFFGLAGYYRQFIEKFSKIAKPMTQLLKKKEKFIWSAECNRSFEELKRRLVSAPVLILPDQTKDFQLRPHEGNYPTHDLELAAVVHALKIWRHYFIGNRCERRWLELIKDYDMGIHYHAGKANVVADALSRKSYCNVAWVEKLCCEVKRDLEHLNLSIVEHGFVAALEAQPTLVEQVRIAHASDPEIAELKKNMRVGKARGFDEDEQGTIWMGERLCVPGWEKDCVYLKTRS

SEQ ID NO: 19444 - protein, 1498 aa, Oryza sativa
  Clone ID: TF_OSC400202j.C1.p2.fg
MVKTRNDPRDSSDARGSEEQTDGAHVGGASDSSSSPPLGNPTVTQMMTMTMQQMQQHHHQVLQQVQQNQWFAPPPSHLSKLLDFLRIQPPTFSSTTNPMEANDWLRVVEKKLNLLQCNDREKVAFATHQLQGPASAWWDNYVVTRLDATEVTWAEFCQSFRKAQIPEGIMAQQKREFRALQQGTMSVTEYLHEFNCLARYAPEDVRTDAEKQEKFLFGLDDELTNQLISGVYDDFEKLVDKAIRQEEQRNKMDRKRKAAQISFPQGNNQKPRFMTGQLGGPSTLIVCQHRPYHPSNFDNDYNGGCHNNSKQHNHNSTPPPLMAPAQSDSPAVSAQSEQPKKGAVGKLGPCFNCGKHGHFAGKCPKLNRAGPRFIQARVNHASAEEALAAPEVVLGTFPVNSYPATVLFDSGASHSFISKRFAGAHGLSVVELKIPMQVHTPGNDMRTSHYCPSVTIEITRSPFLSNLILLESKDLDVILGIDWLTRHKGVIDCASRTITLTNDKAEKITFRSPVSQKSVASLNQAAIEGQTETVEKSPRKLEDIPIVQEYPEVFPEDLTTMPPKREIEFRIDLAPGTAPIYKRPYRMAANELAEVKKQVDEQLQKGYIRPSTSPWGAPVIFVEKKDKTKRMCVDYRALNEVTIKNKYPLPRIDDLFDQLKGAKVFSKIDLRSGYHQLRIREEDIPKTAFITRYGLFECTVMSFGLTNAPAFFMNLMNKVFMEFLDKFVVVFIDDILIYSKSEEEHEQHLRLVLEKLKEHQLYAKFSKCDFWLSEVKFLGHVISDQGVAVDPSNVESVTKWTPPKTVSQIRSFLGLAGYYRRFIENFSKIARPMTQLLKKDEKFKWSAECNQSFEELKKKLVSAPVLILPDQTKDFQVYCDASRQGLGCVLMQEGRVVAYASRQLRPHESNYPTHDLELAAVVHALKIWRHYLIGNRCEVYTDHKSLKYIFTQPDLNLRQRRWLELIKDYDMGIHYHPGKANVVADALSRKSYCNAVCTEGMCDKLQQDLEHLNLGIVEHGYVAALEARPTLVDQVRAAQVNDPEIAELKKNMRVGKARDFHEDEHGTIWLGERLCVPDDKELKDLILTEAHQTQYSIHPGSTKMYQDLKEKFWWRVKAEHQRPAGLLQPLQIPEWKWEEIGMDFITGLPRTSSGHDSIWVVVDRLTKVAHFIPVHTTYTGKRLAELYLSRIMCLHGVPKKIVSDRGSQFTSKFWQKLQEELGTRLNFSTAYHPQTDGQTERVNQILEDMLRACALDFGGAWDKSLPYAEFSYNNSYQSSLQMAPFEALYGRKCRTPLFWDQTGGRQLFGTEVLTEAEEKVRTVRERLRIAQSRQKSYADNRRRELTFEAGDYVYLRVTPLRGVHRFQTKSKLAPRFVGPYRILERRGEVAYQLELPSNMVGIHDVFHVSQLKKCLRVPEEQASSEHIDIQEDLTYVEKPIRILETSERRTRNKVIRFCKVQWSHHSEEEATWEREDELKAAHPHLFASSSESRGRDSV

SEQ ID NO: 19445 - protein, 1516 aa, Oryza sativa
  Clone ID: TF_OSC401215j.C1.p19.fg
MVKTRNDPRDSSDARGSEEQTDGAHVSGASGSRSSPPPENPTVTQMMTMMMQQMQQHYHQMLQQAQQNQQFGPPPSHVSKLLDFLRIQPPTFSSTTNPMEANDWLRAIEKKLNLLQCNDQEKVAFATHQLQGPASAWWDNYVATRLDATEVTWAEFCQSFRKAQIPEGIMAQQKREFRALQQGTMSVTEYLHEFNRLARYAPEDVRTDAEKQEKFLFGLDDELTNQLISGVYEDFEKLVDKAIRQEEQRNKMDRKRKAAQISFPQGNNQKPRFMTGQLGGPSTLIVCQHRPYHPSNFDNDYNGGSHNNSKQRNHNSTPPPLMAPAQSDPPTVSVQSEQPKKGAVGKPGPCFNCGKHGHFAGKCPKLNRTGPRFIQARANHVSAEEAQAAPEVVLGTFPVNSYPATVLFDSGASHSFISKRFAGTHGLSVVELKIPMQVHTPGNDMRTAHYCPSVTIEIKRSPFLSNLILLESKDLDVILGMDWLTRNKGVIDCASRTITLTNDKGGKITFRSPASQKSVASLNQAAIEGQTETVEKSPRKLEDIPIVQEYPEVFPEDLTTMPPKREIEFRIDLAPGTAPIYKRPYRMAANELAEVKKQVDEQLQKGYIRPSTSPWGAPVIFVEKKDKTKRMCVDYRALNEVTIKNKYPLPRIDDLFDQLKGAKVFSKIDLRSGYHQLRIREEDIPKTAFTTRYGLFECTVMSFGLTNAPAFFMNLMNKVFMEFLDKFVVVFIDDILIYSKSEEEHEQHLRLVLEILKEHQLYAKFSKCDFWLSEVKFLGHIISAQGVAVDPSNVESVTKWTPPKTVSQIRSFLGLAGYYRRFIENFSKIARPMTQLLKKDEKFKWSAECNQSFEELKKKLVSAPVLILPDQTKDFQVYCDASRQGLGCVLMQEGRVVAYASRQLRPHETNYPTHDLELAAVVHALKIWRHYLIGNRCEVYTDHKSLKYIFTQPDLNLRQRRWLELIKDYDMGIHYHPGKANVVADALSRKSYCNAVYTEVMCDKLQQDLEHLNLGIVEHGYVAALEARPTLVDQVRAAQVNDPEIAELKKNMRVGKARDFHEDENGTIWLGERLCVPDDKELKDLILTEAHQTQYSIHPGSTKMYQDLKEKFWWASMRREIAEFVALCDVCQRVKAEHQRPAGLLQPLQIPEWKWEEIGMDFITGLPRTSSGHDSIWVVVDRLTKVAHFIPVHTTYTGKRLAELYLSRIMCLHGVPKKIVSDRGSQFTSKFWQKLQEELGTRLNFSTAYHPQTDGQTERVNQILEDMLRACALDFGGAWDKSLPYAEFSYNNSYQSSLQMAPFEALYGRKCRTPLFWDQTGERQLFGTEVLTEAEEKVRTVRERLRIAQSRQKSYADNRRRELTFEAGDYVYLRVTPLRGVHRFQTKGKLAPRFVGPYRILERRGEVAYQLELPSNMVGIHDVFHVSQLKKCLRVPEEQASSEHIDIQEDLTYVEKPICILETSERRTRNKVIKFCKVQWSHHSEEEATWEREDELKAAHPHLFASSSESRGRDSV

SEQ ID NO: 19446 - protein, 1501 aa, Oryza sativa
  Clone ID: TF_OSC401219j.C1.p10.fg
MVKTRNDPRDSNDASGSEEQTDGAHVSGASGSRSSPPPENPTVTQMMTMMMQQMQQHYHQMLQQAQQNQQFGPPPSHVSKLLDFLRIQPPTFSSTTNPMEANDWLRAIEKKLNLLQCNDQEKVAFATHQLQDATEVTWAEFCQSFRKAQIPEGIMAQQKREFRALQQGTMSVTEYLHEFNRLARYAPEDVRTDAEKQEKFLFGLDDELTNQLISGVYEDFEKLVDKAIRQEEQRNKMDRKRKAAQISFPQGNNQKPRFMTGQLGGPSTLIVCQHRPYHPSNFDNDYNGGSHNNSKQHNHNSTPPPLMAPAQSDPPAVSVQSEQPKKGAVGKPGPCFNCGKHGHFAGKCPKLNRTGPRFIQARANHVSAEEAQAAPEVVLGTFPVNSYPATVLFDSGASHSFISKRFAGTHGLSIVELKIPMQVHTPGNDMRTAHYCPSVTIEIKRSPFLSNLILLESKDLDVILGMDWLTRNKGVIDCASRTITLTNDKGEKITFRSPASQKPVASLNQAAIEGQTETVEKSPRKLEDIPIVQEYPEVFPEDLTTMPPKREIEFRIDLAPGTTPIYKRPYRMAANELAEVKKQVDEQLQKGYIRPSTSPWGAPVIFVEKKDKTKRMCVDYRALNEVTIKNKYPLPRIDDLFDQLKGAKVFSKIDLRSGYHQLRIREEDIPKTAFTTRYGLFECTVMSFGLTNAPAFFMNLMNKVFMEFLDKFVVVFIDDILIYSKSEEEHKQHLRLVLEKLKEHQLYAKFSKCDFWLSEVKFLGHVISAQGVAVDPSNVESVTKWTPPKIVSQIRSFLGLAGYYRRFIENFSKIARPMTQLLKKDEKFKWSAECNQSFEELKKRLVSAPVIILPDQTKDFQVYCDASRQGLGCVLMQEGRVVAYASRQLRPHETNYPTHDLELAAVVHALKIWRHYLIGNRCEVYTDHKSLKYIFTQPDLNLRQRRWLELIKDYDMGIHYHPGKANVVADALSRKSYCNAVCTEGMCDKLQQDLEHLNLGIVEHGYVAALEARPTLVDQVRAAQVNDPEIAELKKNMRVGKARDFHEDEHGTIWLGERLCVPDDKELKDLILTEAHQTQYSIHPGSTKMYQDLKEKFWWASMRREIAEFVALCDVCQRVKAEHQRPAGLLQPLQIPEWKWEEIGMDFITGLPRTSSGHDSIWVVVDRLTKVAHFIPVHTTYTGKRLAELYLSRIMCLHGVPKKIVSDRGSQFTSKFWQKLQEELGTRLNFSTAYHPQTDGQTERVNQILEDMLRACALDFGGAWDKSLPYAEFSYNNSYQASLQMAPFEALYGRKCRTPLFWDQTGERQLFGTEVLTEAEEKVRTVRERLRIAQSRQKSYADNRRRELTFEAGDYVYLRVTPLRGVHRFQTKGKLAPRFVGPYRILERRGEVAYQLELPSNMVGIHDVFHVSQLKKCLRVPEEQASSEHIDIQEDLTYVEKPIRILETSERKTRSKVIRFCKVQWSHHSEEEATWEREDELKAAHPHLFASSSESRGRDSV

SEQ ID NO: 19447 - protein, 1626 aa, Oryza sativa
  Clone ID: TF_OSC401577j.C1.p3.gm
MVKTRNDPRDSNDASGSEEQTDGAHVSGASGSRSSPPPENPTVTQMMTMMMQQMQQHYHQMLQQAQQNQQFGPPPSHVSKLLDFLRIQPPTFSSTTNPMEANDWLRAIEKKLNLLQCNDQEKVAFATHQLQGPASAWWDNYVATRLDATEVTWAEFCQSFRKAQIPEGIMAQQKREFRALQQGTMSVTEYLHEFNRLARYAPEDVRTDAEKQEKFLFGLDDELTNQLISGVYEDFEKLVDKAIRQDEQRNKMDRKRKAAQISFPQGNNQKPRFMTGQLGGPSTLIVCQHRPYHPSNFDNDYNGGSHNNKQPKKGAVGKPGPCFNCGKHGHFAGKCPKLNRTGPRFIQARANHVSAEEAQAAPEVVLGTFPVNSYPATVLFDSGASHSFISKRFAGTHGLSVVELKIPMQVHTLGNDMRTAHYCPSVTIEIKRSPFLSNLILLESKDLDVILGMDWLTRNKGVIDCASRTITLTNDKGEKITFRSPASQKSVASLNQAAIEGQTETVEKSPRKLEDIPIVQEYPEVFPEDLTTMPPKREIEFRIDLAPGTAPIYKRPYRMAANELAEVKKQVDEQLQKGYIRPSTSPWGAPVIFVEKKDKTKRMCVDYRALNEVTIKNKYPLPRIDDLFDQLKGAKVFSKIDLRSGYHQLRIREEDIPKTAFTTRYGLFECTVMSFGLINAPAFFMNLMNKVFMEFLDKFVVVFIDDILVYSKSEEEHEQHLRLVLEKLKEHQLYAKFSKCDFWLSEVKFLGHVISAQGVAVDPSNVESVTKWTPPKTVSQIRSFLGLAGYYRRFIENFSKIARPMTQLLKKDEKFKWSAECNQSFEELKKKLVSAPVLILPDQTKDFQVYCDASRQGLGLVHALKIWRHYLIGNRCEVYTDHKSLKYIFTQPDLNLRQRRWLELIKDYDMGIHYHPGKANVVADALSRKSYCNALCTEDMCGKLQQDLEHLNLGIVEHGYVAALEARPTLVDQVRAAQVNDPEIAELKKNMRVGKARDFHEDENGTIWLGERLCVPDDKELKDLILTEAHQTQYSIHPGSTKMYQDLKEKFWWVSMRREIAEFVALCDVCQRVKAEHQRPAGLLQPLQIPEWKWEEIGMDFITGLPRTSSEHIDIQEDLTYVEKPICILETSERRTRNKPTLDAISPGQELAAGDKLVSSNGRFALGFFQTDSNKSSSNSTPNIYLGIWFNTVPKFTPVWVANGENPVADLASCKLLVSSDGNLAIVATTHAKNSSMVWSSKANIPTNTTHAVLLDDGNLVLRSTSTTNASSTILWQSFDHPTDTVLQGGKIGWNNATGVNRRLVSRKNTVDQAPGMYSFELLGHNGPTSMVSTFNSSNPYWSSGDWNGRYFSNIPETVGQTWLSLNFTSNEQEKYIEYAIADPTVLSRTILDVSGQLKALVWFEGSRDWQTIFTAPKSQCDVYAFCGPFTVCNDITFPSCTCMKGFSVQSPEDWELDDRTGGCVRNTPLLCNSNKTAAGTADKFYPMTSVQLPDKAQSIGAATSADECAAACLSSCSCTAYSYGEGGCSVWHDKLLNVRQQGNGVLYLRLSAKEVLESRRNNRWGVILGASIGASTAALGEKSREFPTFSTYDSCSKIFSSSGNSSKLELPKTEEDGGTEARECK

SEQ ID NO: 19448 - protein, 1264 aa, Oryza sativa
  Clone ID: TF_OSC407633j.C1.p19.fg
MIVLQHRPYNPGNFNNDYNSGSHNSSEEHHHNSTPPPLMAPAQSDLPAVSTQSEQPQGSAGKPGPCFNCGKHGHFAGKCPKLKRAGPRFAGTHGLTVVELKIPMQVHTPRSDMKIAHYCPSVTIEIKRSPFLSNLILLESKDLDVILGMDWLTRHKGVIDCASRTITLTNNKGEKITFRSPMPHKSVATLNQAAIEEQTEIAKKSPKKLEDIPIVQEYPEVFPEDLTTMPPKREIEFRIDLAPRTAPIYKRPYRMAANELAELRIREEDIPKTAFTTRYGLFECTVISFGLTNASAFFMNLMTKVFMEFLDKFVVVFIDDILIYSKSEEEHEQHLRLVLEKLKEHQLYAKFMDPSNVESVTKWTPPKTVSHIRSFLRLAGYYRRFIENFSKIVRPMTQLLKKDEKFKWSTECNQSFEELKKSCPRGMTYARGSSPSSSVHTTYTGKRLAELYLSRIMCLHGVPKKIVSDRGSQFTSKFWQKLQEELGTRLNFIIAYHPQTDGQTERVNQILEDMLRACALDFGGAWDKSLPYAKFSYNNNYQDSLQMAPFETLYGRKCRTPLFWDQTGERQLFGTEVLTEAEEKDYPTKTEIVRCNSSGDLYPFPADDFSSAASARAFIATESTTDLWHHRLGHIGHEALTRLSQASVIPPPRGAAPVVMLANLTQFSTTIRNIQCDNGREFDNLTARTFFLTNGVHMRMSCPHTYPRTDFTAPSLTPISRPHSGRSGPAARVAPAGPTAEVARSTEPPTPPVGSAPVSSAPAGPASTAPSAELPAHESASPGPPSTGSAARRPPASPSSTSSMLWRPPGPPPGFPALPSRPPPLLAPPSGAPTRARSSRVPDAVIPNQLGVSPGVNTHGMTTRGKDDIHLPVTRYNLNATTLSPVPRTYRAALEEEFAALMPSCMVLYKRPSTALSHLDLKTTPGLIWCVASTSRWYSRFASYLLTLGFIEAKFDTSLFIYHHGSHLVYLLLYVDDIVLTASSAGLLRWAIQALQSEFSMKDLGSLHHFLGITVTGDSSGLLLSQHQYSIEVLERAGMSDCKPCSTPVDTNAKLSSSDGSPVVDPTDCHSLAGALHYLTFTRPDISYAVQQVCLHMHDPGIPIVPLSSGYSDWAGCPDTRKSTWSFKRQNTVSRSSDEAEYRVVANTVAETCWLCQLLHELTPPSRATLVYCDNVSAIYLSTNPVQHQRTKHVEIDLHFVHDRVAAGSVRVLHVPTTSQYADIFTKGLPTSIFVEFRSSLNVRCTNVATAGGVSCIYVFHVYL

SEQ ID NO: 19449 - protein, 1276 aa, Oryza sativa
  Clone ID: TF_OSC415897j.C1.p1.fg
MVKTRNDPRDSNDASGSEEQTDGAHTSGASGSRSSPPPENPTVAQMMTMMMQQMQQHYHQMLQQAQQNQQSDFLRIQPPTFSSTTNPMEANDWLRAIEKKLNLLQCNDQEKVAFATHQLQGPASAWWDNYVVTRPDATEVTWAKFCQSFRKAQIPEGIMAQKKREFRALHQGTRTVTEYLHEFNRPARYAPEDVRTDAEKQEKFLFGPDDELTNQLISGVYEDFEKLVDKAIRGPSTLIVCQHRPYHPSNFNNDYNGGSHNNSKQHNHNSTPPPLMAPAQSDPPAGSAQSEQPKKGAVGKPGPCFNCGKHGHFAGKCPKLNRAGPRFIQARANHVSVEEAQAAPEVVLGTFPVNSYPATVLFDSEIKRSPFLSNLILLESKDLDVILGMEWLTRHKGVIDCASRTITLTNDKGEKITFRSPASQKSVASLNQAAIEGQTETVEKSPRKLEDIPIVQEYPEVFPEDLTTMPPNREIEFRIDLAPGTAPIYKRPYRMAANELAEVKKQVDEQLQKGYIRPSTSPWGAPVIFVEKKDKTKRMSVDYCALNEVTIKNKYPLPRIDDLFDLLKGAKVFSKIDLRSGYHQLRIREEDIPKTAFTTRCGLFECTVMSFGLTNAPAFFMNLMNKVFMEFLDKFVMVFIDDILIYSKSEEEHEQHLRLVLEKLKEHQLYAKFSKCDFWLSEDKFLGHVITAQGVAVDPSNVESVTKWTPPKTVSQIRSFLGLAGYYRRFIENFSKIARPMTQLLKKDEKFKQKTSKSTVMHLAKGWDRHYLIGNRCEVYTDHKSLKYIFTQPDLNLRQRSWLELIKDYDMGIHYHPGKANVVADALSRKSYCNALCTEGMCGKLQQDLEHLNLGIVQHGYVAALEARPTLVDQVRAAQVNDPEIAELKKNMRVGKARDFHEDEHGTIWLGERLCVPDDKELKDLILTEAHQTQYSIHPGSTKMYQDLKEKFWWASMRREIAGFVALCDVCQRVKAEHQRPIGLLQPLQIPEWKWEEIGMDFITGLPRTLSGHDSIWVVVDRLTKVAHFIPMHTTYTGKRLAKLYLSRIMCLHGVPKKIVSDRGTLYGRKCRTPLFWDQTGERQLFGTEVLTKAEEKVRTVRERLRIAQSRQKSYADNRQRELTFEVGDYVYLRVTPLRGVHRFQTKGKLAPRFVGPYRILERRGEVAYQLELPSNMVGIHDVFHVSQLKKCLRVPEEQADSEHIDIQEDLTYVEKPVRILETSERRTRNKVIRFCKVQWSHHSQEEATWEREDELKAAHPHLFASSSESRGRDSV

SEQ ID NO: 19450 - protein, 1567 aa, Oryza sativa
  unsure (1)..(1567): unsure at all Xaa locations
  Clone ID: TF_OSC416775j.C1.p2.np
APMSPPPPKPAPRPLGPRRPRRARAPPFPRPPPSLASSLLCAPSSSARAPSSSAAAAAFGMVKTRNDLRDPNDASGSEEQTDEAHTSGAPGSRSSPPPENPTITQMMTMMIQQMQQHYHQMLQQAQQNQQFGSPPSQSKLLDFLRIQPPTFSSTTNPMEANDWLRAIEKKLNLLQCNDQEKVPFATHQLQGPASAWWDNYVVTRPDAMEVTWSEFCQGFRKAQIPEGIMAQQKREFRALQQGTRTVTEYLHEFNRLTCYAPEDVRIDAEKQEKFLFGLDDELTNQLISGVYEDFEKLVDKAIRQEEQRNKMDRKRKAAQISFPQGNNQKPRFMTGQLGGPSTLIVCQHRPYHPSNFDNDYNGGSHNNSKQHNHNSTPSPLIPPAGSAXSEQPKKGAVGKPGPCFNCGKHGHFAGKCPKLNRAGPRFIQARANHVSAEEAQAAPEVVLGTFPVNSYPATVFFDSGASRSFISKRFAGAHRLSVVELKIPMQVHTPGNDMRTTHYCPLVTIEIKRSQFLSNLILLESKDLDVILGMDWLTRHKGVIDCASRTITLTNDKGEKITFRSPVPQKSVASLNQATIEEQTEVAEKSPRKLEDIRIVQEYPEVFPEDLTTMPPKREIEFQIDLVKVTTPIYKRPYRIAANELAEVKKQVDEQLXKGYIRPSTSPWGAPVIFVEKKDKTKRMCVDYRALNEVTINKYPLPRIDDLFDQLKGAKVFSKIDLRSGYHQLRIREEDIPKTAFTTRYGLFECTVMSFGLTNAPAFFMNLMNKVFMEFLDKFVVVFIDDILIYSKSEEEHEQHLRLVLEKLKEHQLYAKFSKCDFWLSEVKFLGHVITAQGVTVDQSNVESVTKWTPPKIVSQIRSFLGLAGYYRRFIENFSKIARPMTQLLKKDEKFKWSAECNQSFEELKKRLVSAPVLILPDQTKDFQVYCDASRQGLGCVLMQEGRVVAYASRQLRPHESNYPTHDLELAAVVHALEIWXHYLFGNRCEVYTDHKSLKYIFTQPDLNLRQRRWLELIKDYDMGIHYHPGKANVVADALSRKSYCNAVCTEGICDKLQQDLEHLNLGIVEHGYVAALEARPTLVDQVRVAPVNDPEIAELKKNMRVKARDFHEDEHGTIWLGERLCVPDDKELKDLILIEAHQTQYSIHPSSTKMYQDLKEKFWWASMRREIAGFVALCDVCQRVKAEHQRPAGLLQPLQIPEWKWEEIGMDFITGLPRTSSGHDSIWVVVDRLTKVAHFIPVHTTYTGKRLAELYLSRIMCLHGVPKKIVSDRGSQFTSKFWQKLQEELGTRLNFSTAYHPQTDGQTERINQILEDMLRACALDFGGAWDKSLPYAKFSYNNSYQASLQMAPFEALYGRKCRTPLFWDQTGERQLFGTEVLTEAEEKVRTVRERLRIAQSRQKSYADNRRRELAFEAGDYVYLRVTPLRGVHRFQTKGKLAPRFVGPYRILERKGEVAYQLELPSNMVGIHDVFHVSQLKKCLRVPEEQASSEHIDIQEDLTYVEKPVRILETSERRTRNKVIRFCKVQWSQHSQEETTWEREDELKAAHPHLFASSSESRGRDSV

SEQ ID NO: 19451 - protein, 1516 aa, Oryza sativa
  Clone ID: TF_OSC900179j.C1.p8.fg
MMKTRNDPRDSNDASGSEEQTDGAHVSGASGSRSSPPPENPTVTQMMTMMMQQMQQHYHQMLQQAQQNQQFGPPPSHVSKLLDFLRIQPPTFSSTTNPMEANDWLRAIEKKLNLLQCNDREKVAFATHQLQGPASAWWDNYVATRLDATEVTWAEFCQSFRKAQIPEGIMAQQKREFRALQQGTRTVTEYLHEFNRLARYAPEDVRTDAEKQEKFLFGLDDELTNQLISGVYEDFEKLVDKAIRQEEQRNKMDRKRKAAQISFPQGNNQKPRFMTGQLGGPSTLIVCQHRPYHPSNFNNDYNGGSHNNSKQHNHNSTPPPLMAPAQSDPPAVSVQSEQPKKGAVGKPGPCFNCGKHGHFAGKCPKLNRTRPRFIQARANHVSAEEAQAAPEVVLGTFPVNSYPATVLFDSGASHSFISKRFAGMHGLSVVELKIPMQVHTPGNDMRTAHYCPSVTIEIKRSPFLSNLILLESKDLDVILGMDWLTRNKGVIDCASRTITLTNDKGEKITFRSPVSQKSVASLNQAAIEGQTETVEKSPRKLEDIPIVQEYPEVFPEDLTTMPPKREIEFRIDLAPGTAPIYKRPYRMAANELAEVKKQVDEQLQKGYIRPSTSPWGAPVIFVEKKDKTKRMCVDYRALNEVTIKNKYPLPRIDDLFDQLKGAKVFSKIDLRSGYHQLRIREEDIPKTAFTTRYGLFECTVMSFGLTNAPAFFMNLMNKVFMEFLDKFVVVFIDDILIYSKSEKQHEQHLRLVLEKLKEHQLYAKFSKCDFWLSEVKFLGHVISAQGVAVDPSNVESVTKWTPPKTVSQIRSFLGLAGYYRRFIENFSKIARPMTQLLKKDEKFKWSAECNQSFEELKKKLVSAPVLILPDQTKDFQVYCDASRQGLGCVLMQEGRVVAYASRQLRPHETNYPTHDLELAAVVHALKIWRHYLIGNRCEVYTDHKSLKYIFTQPDLNLRQRRWLELIKDYDMGIHYHPGKANVVADALSRKSYCNAVCTEGMCDKLQQDLEHLNLGIVEHGFVAALEARPTLVDQVRAAQVNDPEIAELKKNMRVGKARDFHEDEHGTIWLGERLCVPDDKELKDLILTEAHQTQYSIHPGSTKMYQDLKEKFWWVSMRREIAEFVALCDVCQRVKAEHQRPAGLLQPLQIPEWKWEEIGMDFITGLPRTSSGHDSIWVVVDRLTKVAHFIPVHTTYTGKRLAELYLARIMCLHGVPKKIVSDRGSQFTSKFWQKLQEELGTRLNFSTAYHPQTDGQTERVNQILEDMLRACALDFGGAWDKSLPYAEFSYNNSYQASLQMAPFEALYGRKCRTPLFWDQTGERQLFGTEVLTEAEEKVRTIRERLRIAQSRQKSYADNRRRELTFEAGDYVYLRVTPLRGVHRFQTKGKLAPRFVGPYKILERRGEVAYQLELPSNMIGIHDVFHVSQLKKCLRVPEEQADSEHIDIQEDLTYVEKPVRILDTSERRTRNKVTRFCRVQWSHHSEEEATWEREDELKAAHPHLFTSSSESRGRDSV

SEQ ID NO: 19452 - protein, 1215 aa, Oryza sativa
  unsure (1)..(1215): unsure at all Xaa locations
  Clone ID: TF_OSC900192j.C1.p1.np
VVSRPCPRVRLTRGAHGAGRCEPGAPGPPWTVRLPRGSHYNDYNCGSHNSSEQHNQSSTPPSLMAPAPSDPPAMPAQSEQPKKESGGKPGPCFNCGKHGHFAGKCPKPXRAGPKFVQARINHASAEEARAAPEVVLGTFPVNSHPTVVLFDSGATHSFISKKFAGTHGLSVVXLKIPMRVHTHGNDMKTTHNCPSVTSEIKRSQLLAAKGVIDCASRTITLTNDKGEKITFRPLVPQKSVASQDQAATEEQTEIVKKSPKKLEDILVVQEYPEVFPEDLTTMPPKREIEFRIDLAPGTAPIYMRPYRMAANELAKVKKQVDEQLQKGYIRLSTSPWGAPVIFVEKKDKTKIMCVDYRAFNEVTIKNRQKYPLPRIDDLFDQLKGAKVFCKIDLRSGYPXLRIWEEDIPKTAFTTRYMLFECTVMSFGLTNAPAFFMNLMNKVFMEFLDKFAVVFIDDILICSKSEEEHEQHLHLVLEKLKVHQLYAKFSKCDFXLSEVKFLDHVITAQGVAVDSSNVESVTKWTPPKTVSQIRSFLGLAGYYRWFIENFSKIARPMTLLLKKDEKFKWSAECNQSFEEHKKKLVSAPILILPDQTKDFXVYCDASRQGLGCVLMQEGRVVAYSSRQLRPHESNYPTHDLELAAVVHALKIXRHYVIGNCCEVYTDHKSLKYIFTQPDLNLRQRRWLELVKDNDMGIHYHLGKANVVADALSRKSYCNALCTDKLQQLEAWPTLVDQVRAAQVNDAEIAELKKNMRVGKAXDFHEDEHGTIWMGEMLCVPEDKELKDLILTEAHXTQYSIHPGSTKMYQDLKEKFRWASMKREIAEVVALCDVCQRVKVEHQRLAGLLQPLQIPKWKXEDIGMDFITGMPRTSSGHDSIXVVVDRLTKVAHFIPAHTTYTGKRLEELYLSRIICTHGVPKNIVSDRGSQFTSKFWQKLQEELGTRLNFNTAYHPQMDDQTERVNQILEDMLXACALDFGGAWDKSLPYAEFSYNNSYXAILXMAPFEALYGCKCRIPLSWDQIGERQLFGTEVLSEAEKKVRIVRERLRIAQTQQKSYAENRRRELTFEVGDYVYLCVTPLKRVHRFQTKGKLAPCFVGPDRILEHRCEVAYQLELPSNMVGIHDVFHVSQLKKCLRVPEEQASSEHIDIQEDQTYVEKPVRILETNERRTXNNVIRFCKVQWSHHSEEEATWEKEDELKPHLFASSSESRGRDSV

SEQ ID NO: 19453 - protein, 671 aa, Oryza sativa
  unsure (1)..(671): unsure at all Xaa locations
  Clone ID: TF_OSC17325j.C1.p1.np
MPRYKPEYLFGVEGFVQELRTMSFVIGFGTAPFYAQIPHDRHEEKCRVKVTLNSNSEDIPSVMFEAGGRNYIHACQEVARIAIGELRDRYSDQLADTEYRYHPRQPQGSDRGNYLETEGIENDATTRHLVEMLWAMDESRAETVLAAQDREDRNRGKICKLEDKVDRLEKELAALKGEAPPQKARIRLTAMKRALFVPRYQLAPKVRVVENEVAPTLADPPVIIISDDEEEESKHTHSKIEWVVTQDDEDEPNEPSIDLRCSEELEXLFCPVSLLVPCPCQMVNTRSNGNGPNNNPNNNNKVERPTLAQVLAQQTQLMNMMMQQLQNQQNQGNNHAPPQNKLAEFLRVRPPVFSSTTNPVEAGDWLHAIEKKLDLLQCTDQEKVSFASHQLHGPASEWWDHFRLNRTTAEPITWLEFTAAFRKTHIPSGVVSLKKKEFRSLTQGSRSVTEYLHEFNRLARYAPEDVRNDEERQEKFLEGLNDELSYPLMTGDYSDFQKLMDKAIRQEDKYNRMEQKKRRIAHFKAQQGSNQKPRLTLGPQSMPQGGSSSVVRPQRQFFNNNAGNNIRNQAPRPVAAPTQQQPAKREPGSKPVVCFNCGDPGHYAKCPKPRRKVVPAQSNSTAPASKARVNHVAAAEAQDAPDVILGTFSVNSVPATVLFDSGATHSFGLQE

SEQ ID NO: 19454 - protein, 1044 aa, Oryza sativa
  unsure (1)..(1044): unsure at all Xaa locations
  Clone ID: TF_OSC22791j.C1.p1.np
MASPHRAARAPARFGFEEGRVEPEADHESANEQSHHSNRSHRTASRNAEVEQSHRSNRSHRIVSRNAEVEXSHRSHRSVGHNSGEERIPSPPHVENNMQHLMAVQTQILQGLATAIAGIQHNAHGNGHPHMGNNRSKLTDFLRSRPPEFSQTVKPVEAGDWLKDVERKLNLVQCIPIEKTVYASHQLRGPAADWWENYCNAHPEPTNIPWNEFAAAFRVAHVPKSTIDMKKEEFIRLKQGNSSVNEYLSQFNKLARYAPEEVDTDKKKIRKFLKGVTVGMRLQLLAHDFPTFQHMINKALPLEDARKEATEEYKKRKSTHQGNSSRGAPHPRFGQPKQYHQSVTQANRQPGYAPRPQMNRPAPPPQQRAPSGNIAPNSVTSFKSPPGLSTVQCFRWDKMGHSARQCPQNPTNTNSGHANGSTARTPTLAAAQSRPSSXASGQGSHASNNFGRGRVNHIQAETAQDAPDVVMGMFSVNSIPAIILFDSGASYSFISQAFVKRNGWKTXNLRVPMIVHSTGRDIRATKICPEVNLRIEEVDFLAKLIVLDSQSLDIILGMDWLAKHKGQIDCAERSITLQGPGGKQVHFTPNTLTASRSILTNLQATPLESVPIVCEYPDVFPEELSSMPPDREIEFSIELAPGTAPIAKRPYRMAANELAEVKRQIEELESKGYVRPSSSPWGAPVLLVKKKDGFERMVIDYRALNEVTIKNKYPLPRIDDLFDQLEGVKVFSKIDLRSGYHXLKIRSEDIRKTAFSTRYGLYEFTVMSFGLTNAPAFFMNLMNKIFMEYLDKFVVVFIDDILICSKNEEEHAEQLRLIIEKLRGHQLFAKFSKCEFWLDRVAFLGHVISSNGIEVDPSKVEAVLAWNPPKNVSEIRSFLGLAGYYRRFIEGFSKLARPMTELLKKEKMFEWSAACEDSFQEIKKRLTTALVLTLPDIRKDFEIFCDASRQGLGCVLMQERKVVAYASRQLRPHEVNYPTRDLELAAVVHAFKIWRHYLIGNKCEAYTDHKRLKYIFTQTELNMRQRRWLELIKDYDLGIHYHPG

SEQ ID NO: 19455 - protein, 1529 aa, Oryza sativa
  unsure (1)..(1529): unsure at all Xaa locations
  Clone ID: TF_OSC5140j.C1.p1.np
PLGTSKSRWRPKPSRRLDDPYAKVKFKIPSFLGYDDAKKYLDWEMTVEQKFNVHLVPEQHRVRRASSEFKDFAIMWWAGLSEGVLPTTWEELKVAMRDRFVPPSYHRDLRKKLMRLEQGDKSVQDYYGELQKGVRRCGIVEGVEDAICRFYTSLREEIQNIVDYKEFNSVNQLFRFAMLAEKELQGRDHQGKSKASTSTPSAGLPKAVSFRASQPAGKRPAASGASAAPKPSPPPRPAESSKGSSQVPAKSASSVTSTGRICHRCQGFGHVQKDCPSQRAYVATEDGYITTSDMEEEEEEEVEDDGEVFGRDDTTDYRTIIVQRVLSTQVQQHDRLQRHNLFXIFFVINNCRARVIIDGCSCNNLVSSDLVNKLGLTTCTHPHPYHIQWLNDSGRAKVTQVCRVSFSIGSYADSVDCDVVPMQACSLLLGRPWEHDNDATHHGRSNKYTFMHNGKKITLLPLTPAEIVEADKERAASLKVDSENQQVAKSVFPPKKDKLSPSSKVEGIKLKGGVMLATKCDIGDISNDDMCYFLICKQALVSLDDIASSIPPVVTNLLQEYEDVFPAEIPPGLPPMRGIEHQIDLIPGASLPNRAAYRTNPDETKEIQWQVQDLXDRGYVRQSLSPCPVPVILVPKKDGSWRMCVDCRAINNITIRYCHPIPRLDDMLDELCGYIIFTKIDLRSGYHQIRMKLGDEWKTAFKTKFGLYEWLVMPFGLTNAPSTFMSLMNEVLRPFIGRFVVVYFDDILIYSKSLDEHMDHLRAVFNALRDARLFANLEKCIFCMERVSFLGYVVTPQGIEVDESKIEAIRSWSVPQTITQVRSFLGLAGFYHRFVKDFSTFAAPLNELTKKGVVFHWGKTQEKSFDILKEKLTHAPLLQLPNFGKTFELECDATGVGIGGVLMQDGKPVAYFSEKLHGPILNYSTYDKELYALVRSLETWRHYFWPKEFVIHSDHESLQYLRSQNNLNRRHAKWVEFIESFPYVIKHKKGKDNVIADALSRRYTFLSQLECRIFGLESIKEQYALDPDFNEVMINCKEGRTWNKFVINGGFVYRANRLCIPVGSVRLLLIQEAHGGELMGHFGAKKTEDVLATYFFWPRMRKDVDRFMARCTTCQKAKSHLNPHGLYMPLPVPSIPWADISMDFVLGLSRTKRGRDSIFVVVDHFSKMAHFIPCHKSDDAVHIADLFFHEIVRLHGMPSIVSDRDAKFLSHFWRTLWNKLGTKLLFSTTCHPQTDGQTEVVNRTLGTMLRAILKKNLKMWEECLPHMEFAYNRATHSTTKVSSFQVVYGFNPRAPIDMLPLPTSERVHNDAKARAEFILKMHESTKFNIEKMTEKYRIAGSKSRQEVKLEPGDLVWLHLRNDRFPELRKSKLMPRADGPFKIVEKINDNAYKLELPPEFGVSPTFNISDLKPYLGEEYELESRTTSIQEGEDDADITTSDTHNNPPMVIQGPITRARARQLNLEVSSFLCSSLYEFENRLQPDYIVLRNNGGDKEREGLRVMEDHRGRPSQGGGPNQSTSGAIRSPGPV

SEQ ID NO: 19456 - protein, 357 aa, Oryza sativa
  Clone ID: TF_OSC10016j.C1.p1.np
RKRYGEGTVKNEGERERPARAAGKWPPDREEFSYNYIPGQYRHMGTKRRDFEKPVKFQNQRSDGAILNLAAHDPIDWPNIISIWKGLIVQKYIQNQHNIGSKVEDMITYLETFLGESAKILWEQWVEKNPNNYEELKRAGSNPHNFANVISNIIIAEDPELGYTTLQNERLKEIEKLTLTSWKGIKEFSQHYLYNATTAKQGYNRGIVERYFNKLPDPLGSMIFEEYKKETEGAEINISQAITFVFKQLRKICTGIQAQRSMKHSDYNFCNKIVQIPLSYGEDKPRSKRIYKHQNRNHNNIRTKKRYFLRRSDNRAPFLHKRNVRRYNPKKTYDKTCRCFICNSPDHLSRTCPNKDQ

SEQ ID NO: 19457 - protein, 1029 aa, Oryza sativa
  Clone ID: TF_OSC100588j.C1.p35.fg
MASKTLREFAAPSADNVAIGPQVNIGDVDFDLKSNLITMAQASPFCGKPNEDANAHLQQFLEICSTYTIEGVRPDTDKYSTAFLSKFFPMGKTNALRGRISSFQQTRDESIPEAWERLQEHVAACPHHGMVDWLILQNFYNGLTPMSRDHLDAAAGGAFFSKTVQGAVELIEKMVSNMGWSEERLQTRQRGMLTVTETELLAAKLDLVMKRLDDHEKGPQGTVKAMDSHVTCEVCGGTGHSRNDCPETREETMYMGNNNGYRPQEGNNNDNLSNQPSLKDLIFAQAKTTDALSKNLAANDKILENINVKLDGFASAFQNQSSFNKMIETQLAQLASLVPANETGRIPGQPDSSIENVKAITTRGGKSTRDPPYPNPAGTNGMSKEAPSNDSAYKEIQPNKTVPLEYYNTRLLPFPQRSRKPSVDEQFARFVEVIQKIHINVPLLDAMQVPTYARYLKDILNNKRPLPTTEVVKLTEQCSNVILHMLLEKKKDPGCATITCLIGAQQFDQALCDLGASVSVMPKDVFDKLNFTMLEPTPMRLQLVDSSVRYPAGIAEDVPDKIRDSFIPVDFVVLDMDTGKKTPLILGRPFLSTAGANIDVGMGSICFHINGKEEKFEFQPRTEQCSMVRIKYGPNPQNIQEVKVEPPKTDSLVKFMQNFLEKETTIPRNRYWRTPVKSPVSAKKLEQPAQKKPPSAPKPKKVWKEKPKMPAPSPPETEIEDGISFRFFHEEFTFTWKGLSTFLGFHDSCKIDLQKGISGFEKNRFWEDISGAPICKKPRTNDILNPTLRLMHKWIAMTLFPRAKGLGVVSDQIAFILAARPRIDEAYLVLAHILKHGADGSLIYFFPGCTNEIPLPNAGYHLYNCHELTIPLQTIEESRAGGTFREMHNMTRNEREISLSSTPVQMYEAGWTPTGDAPGWTQAPRRSIGVSTWASASEDRWHAPHDIQRGDNQPPRSSDVSSSPSEWRSSSSRWDLGEITRRMDTLDVQTGEIQYNLTEHMAQTQEWQQSADAQFANINNMMQQQHDNL

SEQ ID NO: 19458 - protein, 1014 aa, Oryza sativa
  Clone ID: TF_OSC29942j.C1.p1.fg
MTTMADASSSSNTSTGGYSLMGCIKDIPTLQGDNYAEWKRKLDLAFIMGEVDWVLTTPCPVEPVELIKGENESDADWQKSQRDNAPLVMSYDIEQKKWSLANKKCLAVVKNTIEPTILGSIPECDAVSEYLERIKSQFTGFSKTYATQLIKQLVTERYHGGGVRDHILRMSNMASKLKPMDLGITDDFLVHLVMASLPKQFDNFIINYNISLEKWNFEKLIANYVQEEERIKESNGGSINYVKDNKKKNHKSPTSKAKQSQHLPQQQQFAVEKDQCLHCKKIGHYKKDCPDFLKMIMARKDENIITFVNESHYVGYSRSTWWIDSGATIHACNCLKAFRSTRTMQRSESSIRVANGVEEKVEAVGDLPLELANGFTLLLRNVFYVPSLQRNLISVSKLDFDGYDCRFGSGKCELWGRIERLVKNEILRPLEFSDLEQCIECIKGKFVKSIKKGAKRSAGILEIIHTDICGPFLVKSVDGYDSFVTFTDDYSRYGYIYPIKERSEALDKFKIFKVEVENQHVIKIKVNGVAERRNRTLMDMVHSMMSYSTLPLGLWMEALKTAIHILNRVPSKSVPKTPYELWTGRVPSLAHLRVWGSPVEAKVFNPNIGKLDPKTVSCHFIGYPGISKGYRFYCPNSYTKFVEMRHAIFLEDEMIRGSSVVREIDLEERRVSIPAPSTQEPFFSLPADVVPTMPVIAEELQQPQTDNVLVQETQQEPQVQDVPNVEAPRRSERVRRSAIRDDYNVYNIEESHVEDDPTSYEEAMRSARSSKWLEAMKDEMKSMKLNDVWDLEEIPKGAKTIDVKTAFINGDLEEKVCMAQPKGFVMKGNENMGCRLKRSIYGLKFQSNPGPEHWKLVKKVLRYLQGTKGLMLSYRRSESLQIVGYSDFDFEKIIQRSTMYAEFIACYEANEATGQVNWLKKFIPGLKVVDSIKKPLKLYCDNKPAVMYAHNNQSSGAAKHIDIKYYVVKDKVWDQTISLEHIRTERMLADPLTKGLPPNMFKEHVAGMGLREAL

SEQ ID NO: 19459 - protein, 1252 aa, Oryza sativa
  Clone ID: TF_OSC400543j.C1.p10.fg
MASRRRASTSNEETQTPDLNTLARVMTTQTQLLQAIANNQGNRGGSSFGEFMRTKPPTFATAEEPMDAEDWLRIIEKKLTLVRVREADKVIFAANQLEGPAGDWWDTYKEAREEDAGEPSWEEFTIAFRDNFVPTAVMRMKKNEFRRLRQGNTSIQEYLNRFTQLARYATGDLADEEEKIDKFIEGLNDELRGPMIGQDHDSFQSLINKVVRLENDRKVVEHNRKRRLAMNRPPQAAPQRPKGTTSSVWKPAVVTTNCPSAPSNFHRPVTTQNRAPAPNQAATGSVRPGSCFNYGEYGHFANKCPHPNKTPIRTGANATAIHGTATPAAGRGLFRTPQTNRTSTGFGPGQTLDVILGMDWLTKNRGVINCRRREVTLTTPWGSDMRATMDQDPRLTEHAGGIFTMLPLKGMPVVQRFPDVFPQDLPGMPPDRDIEFIIDLILGTAPISKRPYRMPVNELEELKKQIRELQEKGFVRPSLSPWGAPVLFVKKKDGSMRMCVDYRSLNEVTIKNKYPLPRIDDLFDQLKGAKVFSKIDLRSGYHQLKIRTGDIPKTAFSTRYGLYEFTVMSFGLTNAPAYFMNLMNKVFMDYLDKFVVVFIDDILIYSKDEEEHAEHLRLVLEKLRKHKLYAKFSKCEFWLKEVTFLGHVISAGGVAVDPAKVEAATEWKAPKSVTEIRSFLGLAGYYRRFIEGFSKIARPMTQLLKKEKKFVLSEQCQESFEQLKEKLTSAPILVLPDNRKDFVIYCDASRQGLGGVLMQDGKVVAYASRQLRPHEENYPTHDLELAAVVHALKIWRHYLIGNHCDIYTDHKSLKYIFTQSDLNLRQRMEGMAPELKEDIAQLNLHIVPRGQINTLDIQPLLRTQIEEAQKDNEEIQEVKERLATGFAKEFSTDEKDVLWYKKMIYVPEQGGLRGLILKEAHESAYSLHPGSMKMYQDLKEGYWWPNMKRDVAEYVALCDVCQKVKAEHQRPAGLLQPLRIPEWKWDEIGMDFIVGLPKTATGYDSIWVIVDRLTKTARFIPVKTNYSGAKLAELYMTRIVCLHGVPKRIISDRGTQFTSHFWEKTGERAVFGPDIIKEAEEKVRLIRDHLKVAQSRQKSYADTRRRNLEFKEEDYVYLKVSTMRGTKRFKVKGKLAPRYVGPFQIMARRGEVAYQLQLPENIADVHLVFHVSQLKKCLRVPKEQAPLEEIHNSNDLTYPEHPVRILDEAEKRTRTKVWHMYKVQWSNHTEDEATWESEEFLKTEYPHLFENR

SEQ ID NO: 19460 - protein, 1360 aa, Oryza sativa
  Clone ID: TF_OSC400785j.C1.p28.np
MDLSRSLFRRIASRDDKSLSCIDKQKGKNKDIDELEDIAEVDKQLERYQRDTLRAIRPQQIYCMGFFENKNGLYRISREVELSVLTKPVELKIVAKEFENGLKYSGYKYIHQGMYTIGIKGMTRKKLGAKVLITLLDKRWDTIDKAALGFLEGDMNENMLITYIAPDLMMPIKEFIDKMSFGFQTKGYEEFKGTNLLVSIEFIGRLTNRSASKYKINVNDVIENMHSKGITFMSPLKISSEERAGEEWKISDLIESKTLSQPENYISYQNSKGNTSIRFINYKPRTTDDLETEASDRNIIDNRRHSVSEFMKKLDQESEIKYYENKLKEINEEYNKSIKCEWPKIRDKELYFYRELARVKKVKKNEDMAVEIFKNQETKIEQIKRKEQDKHGKEEQNLGKILSEEEQWAENERLFLESYEEEINLINEMENIENEIDNAEQYNDFIDTLDEVGLHNLDNAMEAMEVDLGTGKRKIYGEGTVKNEGERERPARAAGKWPPDREEFSYNYIPGQYRHMGTKRRDFEKPVKFQNQRSDGAILNLAAHDPIDWPNIISIWKGLIVQKYIQNQHNIGSKVEDMITYLETFLGESAKVLWEQWVEKNPNNYEELKRAGSNPHNFANVISNIIIAEDPELGYTTLQNERLKEIEKLTLTSWKGIKEFSQHYLYNATTAKQGYNRGIVERYFNKLPDPLGSMIFEEYKKETEGAEINISQAITFVFKQLRKICTGIQAQRSMKHSDYNFCNKIVQIPLSYGEDKPRSKRIYKHQNRNNNNIRTKKRYFLRRSDNRAPFLHKRNVRRYNPKKIYDKTCRCFICNSPDHLSRTCPNKDQKRYSSKYEEQERVLIIDSVNENILVCDDEIKDDESIYSIIETDEVETINEEYESSDEELDLIDELAGLKVEMMDQLNCEHDWIRGKGDYNIKCAFCIYYPSQENRVTCSICLKQACAECIKVNKQKWRKEIELESDEKTLSSRVRVLENRLNKLEVELENLKNNCDIKALPENKDIQNTEFKEQLITLKDSNTAKIIQLRKAITNFGNKYIVRLPFKEILGIRIPVKIKLTPKVSYKILALVDTGCTKNIIHDKYFIRCPEIVHTIDDNKAEVSTDMSGIKKIHNQLAYNIEVYINATKYIIDEITIRDLSMINDDMIIGLRFLQQSVQTTVIHEQGITFIPYQNNVPYISDVRKRGGTSPKLDNLEVPNLESEERINEYELTYPEDDDGQNSVRRSSGQQEELRTMAGRVGGSEEGARNHRRSGRRFVKINPAYSAGRYGKLIPRLLRPIDARTPHAPGVDTDLVVVAFHAPGVDTDLVVVAFADARSVRAEPPASERRGVVQTVKREENNVDVARSRAYTYGRSEGACC

SEQ ID NO: 19461 - protein, 1214 aa, Oryza sativa
  unsure (1)..(1214): unsure at all Xaa locations
  Clone ID: TF_OSC401724j.C1.p7.np
MDIFRSLFRRIASRDDCSDKQKGKYDDIDELKDVAQVDKQLERYQRDTLRAIRPQQVYCMGFFENKNGLYRISREVELSVLTKPVELKIVAKEFENSLKYSGYKYIHQGMYIIGIKGMTRKKLGAKVLITLLDKRWDTINKASLGYLEGDMNENMLITYIAPDLMMPVNEFIDKMSFFQTKGYEEFKGTNLLISIEFIGRLTNRSATKYKINVNDVIEKMHSKGIKFMSPLTIDTEERAGEKWPISEFIKNKTLSQPENFISYQDSKGNVSIRFTNYKTRASDDLDAESTDRNIIDNRRHSISELMEKLDHESEIKYYEDKLRDIADEYNNSMKSEWPKIRDKELYFYRELSRIKKQKKEKSLAIETPRTQEIKIEQIKSKEPEEIQKFDKVLSEEEQWEVNEKLLLESYEEENNLIEEIENIEEEDNAEQYNDFIDSLDEVGLHNLDNAMEAMKVDLGTGKRKRYGEGSVQNEGERKRPARAAGRWPPEKEEYSYHYIPGQYRHMGTKRRDFEKSIKFQNQKSDGAILNLAAHDPIDWPNIISFWKGLIVQKYIQNQHNIGNNVGDMITYLETFLGESAKVLWEQWVEKNPNNYEELKRAGSNPHNFANIVSNIIIAEDPELGYTTLQNERLKEIEKLTLTSXKGIKEFSQHYLYNATTDKQGYNKGIVERYFNKLPDPLGSMIFEEYKKETEGAEINISQAITFVFKQLRKICTGIQAQRSMKHSDYNFCNKIIQIPLSYGEDRPRNKRNHRYQSRNNNNIKTKKRYFLRRSDNRAPFLHKXNVRRYNPKKTYDKTCRCFICNSPDHLSRTCPNKDQKRYSSKYEEQERVLIIDSVNENILVCDDEIKDDESIYSIIETDEIENTNEEYESTNEELDLIDELAGLKIETMDXLNCEHDWIRGKGDYNIKCAFCIYYPSQDNRVTCSICLKQACVECIKANKQKWRKEIELESDERILSSRVRVLENRINKLEVELENLKINYDIKALPENKDIQNTEFKEQVITLKDSNTAKIIQLKDAITNFGNKYIVKLPFKEILGIRIPVKVKLSPKVLYKILALVDTGCIKNIIHDKYFIKCSEIVHTIDDNKAEVSTDMSGIKKIHNQLARNIEVYINGTKYIIDEITIRNLSMISDDMIIGLRFLQXSVQTTVIHEQGITFIPYQNNVPYISEVRKRGGARIKPDNLEALNLESEERINEYELNYNQLNSKKSSTR

SEQ ID NO: 19462 - protein, 548 aa, Oryza sativa
  Clone ID: TF_OSC413662j.C1.p1.np
FPRPKNGYLLSIEKLTLTSWKGIKEFSQHYLYNATTAKQGYNRGIVERYFNKLPDPLGSMIFEEYKKETEGAEINISQAITFVFKQLRKICTGIQAQRSMKHSDYNFCNKIVQIPLSYGEDKPRSKRIYKHQNRNNNNIRTKKRYFLRRSDNRAPFLHKRNVRRYNPKKTYDKICRCFICNSPDHLSRTCPNKDQKRYSSKYEEQERVLIIDSVNENILVCDDEIKDDESIYSIIETDEVETINEEYESSDEELDLIDELAGLKVEMMDQLNCEHDWIRGKGDYNIKCAFCIYYPSQENRVTCSICLKQACAECIKANKQKWRKEIELESDEKSSRVRVLENRLNKLEVELENLKNNCDIKALPENKDIQNTEFKEQLITLKDSNTAKIIQLREAITNFGNKYIVRLPFKEILGIRIPVKIKLTPKVSYKILALVDTGCTKNIIHDKYFIRCPEIVHTIDDNKAEVSTDMSGIKKIHNQLAYNMEVYINATKYIIDEITIRDLSMINDDMIIGLRFLQQSVQTTVIHEQGITFIPYQNNVPYISEVRK

SEQ ID NO: 19463 - protein, 728 aa, Oryza sativa
  unsure (1)..(728): unsure at all Xaa locations
  Clone ID: TF_OSC900074j.C1.p1.np
RGGERERGEDKVGRRRERRELKIFELLKGKXEASKTCRRLFKRHVYIQNQKSDGAILNLAAHDPIDWPNIISIWKGLIVQKYIQNQHNIGNKVEDMITYLETFLGESAKVLWEQWVEKNPNNYEELKRAGSNPHNFANIVSNIIIAEDPELGYTTLQNERLKEIEKLTLTSWKGIKEFSQHYLYNATTAKQGYNKGIVERYFNKLPDPLGSMIFEEYKKETEGAEINISQAITFVFKQLRKICTGIQAQRSMKHSDYNFCNKIIQIPLSYGEDRPRNKRNHRYQSRNSNNIKTKKRYFLRRSDNRAPFLHKRNVRRYNPKKTYDKTCRCFICNSPDHLSRTCPNKDQKRYSSKYEEQERVLIIDSVNENILVCDDEIKDDESIYSIIETDEIENTNEEYESTDEELDLIDELAGLKIEMMDQLNCEHDWIRGKGDYNIKCAFCIYYPSQDNRVTCSICLKQACAECIKANKQKWRKEIELESDERILSSRVRVLENRINKLEVENLKINYDIKALPENKDIQNTEFKEQVITLKDSNTAKIIQLKDAITNFGNKYIVKLPFKEILGIRIPVKVKLSPKVSYKILALVDTGCTKNIIHDKYFIKCPEIVHTIDDNKAEVSTDMSGIKKIHNQLAHNVEVYINGTKYIIDEITIRNLSMISDDMIIGLRFLQQSVQTTVIHEQGITFIPYQNNVPYISEVRKRGGARIKPDNLEALNLESEERINEYELI

SEQ ID NO: 19464 - protein, 1375 aa, Oryza sativa
  Clone ID: TF_OSC900151j.C1.p8.fg
MDLSRSLFRRIASRDDKSLSCIDKQKGKNEDIDELEDIAEVDKQLERYQRDTLRAIRPQQIYCMGFFENKNGLYRISREVELSVLTKPVELKIVAKEFENGLKYSGYKYIHQGMYIIGIKGMTRKKLGAKVLITLLDKRWDTIDKAALGFLEGDMNENMLITYIAPDLMMPVKEFIDKMSFGFQTKGYEEFKGTNLLVSIEFIGRLTNRSASKYKINVNDVIENMHSKGITFMSPLKISSEERAGEEWKISDLIESKTLSQPENFISYQNSKGNTSIRFINYKPRTTDDLETEASDRNIIDNRRHSVSEFMEKLDQESEIKYYENKLKEINEEYNNSMKCEWPKIRDKELYFYRELARVKKVKKNEDMAVEIFKTQETKIEQIKRKEQDKYDKEEQNLGKILSEEEQWAENERLFLESYEEEINLINEMENIENEIDNTEQYNDFINTLDEVGLHNLDNAMEAMEVDLGTGKRKRYGEGTVKNEGERERPARAAGKWPPDREEFSYNYIPGQYRHMGTKRRDFEKPVKFQNQRSDGAILNLAAHDPIDWPNIISIWKGLIVQKYIQNQHNIGSKVEDMITYLETFLGESAKILWEQWVEKNPNNYEELKRAGSNPHNFANVISNIIIAEDPELGYTTLQNERLKEIEKLTLTSWKGIKEFSQHYLYNATTAKQGYNRGIVERYFNKLPDPLGSMIFEEYKKETEGAEINISQAITFVFKQLRKICTGIQAQRSMKHSDYNFCNKIVQIPLSYGEDKPRSKRIYKHQNRNHNNIRTKKRYFLRRSDNRAPFLHKRNVRRYNPKKTYDKTCRCFICNSPDHLSRTCPNKDQKRYSSKYEEQERVLIIDSVNENILVCDDEIKDDESIYSIIETDEVETINEEYESSDEELDLIDELAGLKVEMMDQLNCEHDWIRGKGDYNIKCAFCIYYPSQENRVTCSICLKQACAECIKANKQKWRKEIELESDEKTLSSRVRVLENRLNKLEVELENLKNNCDIKALPENKDIQNTEFKEQLITLKDSNTAKIIQLREAITNFGNKYIVRLPFKEILGIRIPVKVKLTPKVSYKILALVDTGCTKNIIHDKYFTRCPEIVHTIDDNKAEVSTDMSGIKKIHNQLAYNMEVYINATKYIIDEITIRDLSMINDDMIIGLRFLQQSVQTTVIHEQGITFIPYQNNVPYISEVYINATKYIIDEITIRDLSMINDDMIIGLRFLQESVQTTVIHEQGITFIPYQNNVPYISEVRKRGGVSPKLDNLEVPNLESEERINEYELSENIDNYYISNSNIECIGLQAFAPNWYRDIKSKRDIEKIIQRLEDIQIIGEIPMKYWEKNAIECKINIINPEYIIKTSPIEATPKDIEEFKMHKEERRYGSRNF

SEQ ID NO: 19465 - protein, 1197 aa, Oryza sativa
  Clone ID: TF_OSC900372j.C1.p14.np
MDLSRSLFRRIASRDDKSLSGIVKQKGKNEDIDELEDIAEVDKQLERYQRDTLRAIRPQQIYCMGFFENKNGLYRISREVELSVLTKPVELKIVAKEFENGLKYSGYKYIHQGMYIIGIKGMTRKKLGAKVLITLLDKRWDTIDKAALGFLEGDMNENMLITYIAPDLMMPIKEFIDKMSFGFQTKGYEEFKGTNLLVSIEFIGRLTNRSASKYKINVNDVIENMHSKGITFMSPLKISSEERAGEEWKISDLIESKTLSQPENFISYQNSKGNTSIRFINYKPRTTDDLETEASDRNIIDNRRHSVSEFMEKLDQESEIKYYENKLKEINEEYNNSMKCEWPKIRDKELYFYRELARVKKVKKNEDMAVEIFKNQEQDKHDKEEQNLGKILSEEEQWAENERLFLESYEEEINLINEMENIENEIDNTEQYNFINTLDEVGLHNLDNAMEAMEVDLGTGKRKRYGEGTVKNEGERERPARAAGKWPPDREEFSYNYIPGQYRHMGTKRRDFEKPVKFQNQRSDGAILNLAAHDPIDWPNIISIWKGLIVQKYIQNQHNIGSKVEDMITYLETFLGESAKILWEQWVEKNPNNYEELKRAGSNPHNFANVISNIIIAEDPELGYTTLQNERLKEIEKLTLTSWKGIKEFSQHYLYNATTAKQGYNKGIVERYFNKLPDPLGSMIFEEYKKETEGAEINISQAITFVFKQLRKICTGIQAQRSMKHSDYNFCNKIVQIPLSYGEDKPRSKRIYKHQNRNHNNIRTKKRYFLRRSDNRAPFLHKRNVRRYNPKKTYDKTCRCFICNSPDHLSRTCPNKDQKRYSSKYEEQERVLIIDSVNENILVCDDEIKDDESIYSIIETDEVETINEEYESSDEELDLIDELAGLKVEMMDQLNCEHDWIRGKGDYNIKCAFCIYYPSQENRVTCSICLKQACAECIKANKQKWRKEIELESDEKTLSSRVRVLENRLNKLEVELENLKNNCDIKALPENKDIQNTEFKEQLIILKDSNTAKIIQLRDAITNFGNKYIVRLPFKEILGIRIPVKIKLTPKVSYKILALVDTGCTKNIIHDKYFTRCPEIVHTIDDNKAEVSTDMSGIKKIHNQLAYNMEVYINATKYIIDEITIRDLSMINDDMIIGLRFLQQSVQTTVIHEQGITFIPYQNTVPYISEVRKRGGTSPSPKPDKLDNLEVPNLEYI

SEQ ID NO: 19466 - protein, 1943 aa, Oryza sativa
  Clone ID: TF_OSC100320j.C1.p1.fg
MGREALTYHPADHHSGARRPPSKPQFGSWRDVVKKGRGPAAAEEAAWTEVRRKGSTEHSLRAGDPTSNKHDRAFKPRKEFSNHDRAFNSEKEIPRWLLGRCFKCLGLGHRKLDCKGETRCFHCWYPGHLAWACPERKEVSGGNPGRQSQGRAATEKGAVIAMAGANLGGYQICAATPPQFVEKYRIGEPDSRPERGRVVLSWTSGMERHERYLQELSLMASVLKGRPPVSPAELAEAIELHTGVQQRYFRVEVTRPEDFLISFRNQREKEAVLRCSKALFCNEVPVSFKPWNICCWAEASAFQFFTKISLDGLPPHAWEEEAMHKLVNSLDGQLAELIPAADARCLGLFAWFKNPSDLSHHLDVEIPERPAAGRWREGTSATPPSPPREKPALTYPVIIHVEEVIDPTPLHTPPTSFDDNSDDEDVTRRNTFSCWAGRYDGAGPWPTEVGGGHVYAAAVVGVVDMAAADRVLDRADIVVQDMEAGEVLASQPHSPTLVLQAPGVWFSPQAVQAVEQPGADVGIATPLAAPVVATAKALIVLDDDCSWALVAGGVSPLSPPLQLSLDELTGGELSALGTEKDGDRAELSDEDTMAEVSLVEHGCERPALKATGDALSSAQESRSDRGFESAAKAGEFRVYVRKQAQKKPSHEQPGTEGIGLMGLAGQDLGQADLRRAVAGLGQEMSVGQVVCGEDEPPQAHQEEVAHSDDERPVQETEIESSREALSGEMMLPPPASPSTALARARPTSEGSPANTPLPPEADQILQGFLASVATEPPPSLLGRRPPESVPKSKPCWRNVIPEWFTPWRSPRLQQQGNGARRHSTSKAQKVTMKKMGIIEEEEEADQDTFQQNTTVIDQPLSTQHMKVLAELLDVDVALEEADVPPPDLASLVAAGSKLEVVDLLVIHELCGPDFDDFVALPASHTRGGVIVAWKGSVFRGSQVHLGQWSVTAKLEWIAGNHSCFLTSVYGPQDDNEKILFLEELAEIRGICGEVWLVAGDFNLIAAAADKNNSRVNRRLMNAFRNKINELELKELYLFGRRYTWSSEQQIPTLVKLDRVLVSTEWEDAFPDAHLQALSSSSSDHCALLLSCGETPQGRRRFRFETFWTKLEDFDQVVADSWQQAVESTDPYVILYVKMARLAMSLCSWGQKRISRFRLQLQIANELIFRFDVAQENRLLSPLERRFRAILKGRCLALASLERIRVRQRARISQLREGDANSKYFHMKVNARRRKLFIPVLEYEGQTTTSQEDKIALAKDYFQGILGVSEPNSAELQFNQIFPLAPNLQELEVPFSEEEVWKVIKEMPNEKAPGPDGFTGLFYQRCWQVIKGEVLAALTKFHSGNHQNLDNLNTAVITLLPKKDAPTLIKDYRPISLIHSFSKLATKILASRLAPRMGDLVAENQTAFIRGRSIHENFIFVRGLALQFHRRKKPMILLKLDITKAFDTISWCFLLNLLRNRGFGSRWRSWIAALLLTSETRILLNGHESDSFKPARGLRQGDPLSPLLFVLVMDALQGLLAKATSWGLLAKLDTRRSIPNTSIYADDTIVFLQPIEREATVVNAILQLFGKATGLKTNLSKSALTPIRCDDDVLVGVQQLLGCRVENFPITYLGLPLSLRRPTKAEVQPILDRLSKKVAGWKPKLLSPDGRLRLIKSVLTALPVHFMSVLVLPKWAIKEFNKKCRAFLWKGQEEVNGGHCLVAWDIVCSPKECGGLGVKNLELFGQAMRMKWLARRLEQRGRPWTLINSVPTNDITGLFQSVASFQVGDGKDTDFWRANWLPRGCISVSSPLLFTHLGRTKLTVAEALSQNRWVRDIRGSFSALALSEYFRLWDEIQEVQLQEDAQDSTSWKLTPNRVFCTASVYEMFFAAREFADWWIKVRLCFQTGYRGAFDSLCILICWFVWRERNLRIFEQKARTAAELFSDIKDEVAVWRETNILREVG

SEQ ID NO: 19467 - protein, 323 aa, Oryza sativa
  Clone ID: TF_OSC103j.C1.p1.fg
MKDTESIDEFAGKISGLANKLSDLGVTMDDDEQVKKLLDSVPDKFLHVIAAIEQFSDLDSMPFDEAIGRLKAYEERIRKRDDKNGEHLLFTSGDTSGGRSRVKKPDRSKTMCYYCQELGHFAYECPEKKKKKEIALLAAASSFAQGSSVWQQRIRAKRRDSNNWYQSQFMPKILRFNKMAIVEHSASRSMREGIVSLPYPVLTSTNYSTWAIKMEANMEAQGIWDAIEPAADEAVDIKKDKQARACLFGAVPEDVLQQIAKKKTAKEVWESLKTRFLGVERVKKARVQTLKSDFKALHMKDTESIDEFAGKISGLANKLSDLG

SEQ ID NO: 19468 - protein, 947 aa, Oryza sativa
  Clone ID: TF_OSC29911j.C1.p3.fg
MVGPLPATQPEGQPITWAHFTAAFRRTHVPAGVMALKKREFRELKQGNRSVMEYLHEFNNLARYAPEDVREDEEKQEKFLAGMDPELSVPLVDKSIRLEAKHKELESHKRRLANFRNQQGANQRIRYTNPYPGGSSSQPQQQPRSALRPQFVVRVPQPQQQQNQQGAHAPRPPAPAVQPGQGRRDAQGQQCLCFNCFKPGHFADKCPKPRRQQGQAPPRPNNGGKDVTRGRVNHVTAEDVLRTPDIIVGTFLIHSIPATILFDSGASHSFISVPFMGRNQLGVERLRNPLLITTPGGVMTAKYYSPAVPIEIQGIAFPSDLILLDTKNLDVILGMNWLAQFQGVVDCARRTVTVYRGPDQPVVFFAPPTSAGSSVLHQLGLPEIPIVSEFGDVFPEELPGMPPKREIEFQIDLAPGTAPLYKRPYRMAANELAEPSTSPWGAPVIFVEKKEKTKRMCVDYRALNEVTIKKKYPLPRIDDLFDQLKGATVFSKIDLRSGYHQLRIREEDIPKTAFTTQYGLYEFTVMLFGLTNAPAFFMNLMNKVFMEYLDKFVVVFIDDILVYSQSEEDHQQHLRLVLGKLREHQLYAKLSKCEFWLPEVKFLGHVISAKGVVVDPETLLKKEEKFVWSPQCEKAFQTLKEKLVSLLVLILPDTRKDFLVYCDASRQGLGCVLMQKGHVVAYASRQLRPYEGNYPTHDLELAAVVHALKIRRQYLIGNRCEIYTDHKSLKYIFTQSDLNLRQRRWLELIKDYDVGIHYHPGKANVVADTLSRKSHCNTLGIRGIPPELNQQMEALNLSIVGRGFLATLEAKPTLLDRIREAQKNDPDIHGILKNMKQRKAAGFTEDEHGTLWNGNRVCVPDDKELKRLILQEAHESPYSIHPGSTKMYLDLKEKYWWVSMKRVSKQSTNDRPDFSNLSKYQNGNGMKLGWISSPDFQKPKADMILYG

SEQ ID NO: 19469 - protein, 367 aa, Oryza sativa
  Clone ID: TF_OSC403247j.C1.p39.fg
MALFVSAGEDVASVHVGVGQPDVQHAGPISPSAGLTIVDSSTPGTAATAGGGVATTSSSRRGFAQGSSVWQQRIRAKRRDSNNWYQSQFMPKILRFNKMAIVEHSASRSMREGIVSLPYPVLTSTNYSTWAIKMEANMEAQGIWDAIEPAADEAVDIKKDKQARACLFGAVPEDVLQQIAKKKTAKEVWESLKTRFLGVERVKKARVQTLKSDFKALHMKDTESIDEFAGKISGLANKLSDLGVTMDDDEQVKKLLDSVPDKFLHVIAAIEQFSDLDSMPFDEAIGRLKAYEERIRKRDDKNGEHLLFTSGDTSGGRSRVKKPDRSKTMCYYCQELGHFAYECPEKKKKKEIALLAAASSDEEPTLL

SEQ ID NO: 19470 - protein, 403 aa, Oryza sativa
  Clone ID: TF_OSC23015j.C1.p1.fg
MFNREKGKNVSGYASSNSSFQFNPPLASRELTRAHPWSIPSMLLSSQLPLVGSQDQNQYVFDRAFATQVNELPMPEEDVPFCHDCREQGHYALNCPWVYVKEAPSFGLAGQTSLNQPPRTKSSLQPSVQSEEPNGDNPLNPRKCFPPSLSHHVGSRTKQAKGKKSKNQKRKAPMRTEEEVRKMTITSTEWPPAGITIPRRQRGNTFRGARQLTQHLLSHGGRVSDSEGSDQVSSDYEDESPRHLGEEEMESKACPRCGEIGHVASMCFTLCPHCEEDHPPGECPTRKVHVFSAQARSEIFNSVSDATRSEKCKHRLPVDNLSEVDSEDMNHEKFWNGSITALPQPSLSQPKGAPWSKSGEGKIPSATGGQAKQFRVVKFCWKFVKTRRKKSDKKRRPPNLSSC

SEQ ID NO: 19471 - protein, 232 aa, Oryza sativa
  Clone ID: TF_OSC25610j.C1.p1.np
HKALGSPKPRLANFHIHREANQRIRYPNPFPEGSSSQQQQQQQPRSAPRLHFVVRVPQPQHKQSQQGTRAPRPLTPAAQSGQGRRDVQGPQRLCFTCFEPGHFADKCPKQRRQQGQAPPRSNNGGKDVIRGRVNHVTAEDVLTTPDVIVGTFLIHSIPATILFDSGASHSFISVPFVGRNQLGVERLRNPLLITTPGGVMTAKYYSPAVPIEIQGIPFPSDLVRLITKNIAQ

SEQ ID NO: 19472 - protein, 1750 aa, Oryza sativa
  Clone ID: TF_OSC31864j.C1.p2.fg
MSWHRAGVLLLGAQSCLPVLGVPAVGGIGSVLLSMARMGWKLCHVFRLYTVVMAGSVSRRGLDMTGFVLELRGMCVVLGYPHGVDYQGRPLPEQEGDDAEPHAAWEVTAVILTGSPERTSLAVTAGGDSFPAACQSAALLAIGTLHQGYPDELQHSPYRYHPRRGGARDFATFRDASSEDDATIMHLARMVEAYDAARIDFHQMVRRGMVENNMKILELRQENLQLKKDLDAVEAQLHQLKITQGEVCRPKCRRVCRSQKITARKSTSRPELVRQSLAWTCFVETPRAEPAPVVPQEGEASGVGSMEDALLLTFRPGPSQRKSAATGEGNQSEGSNHNHQGSPPPLHLPLPPPPPDTNAILTQILAQQANMMTAFLHHLQNPPQQNAPPPPPQHSKLAEFLRIRPPTFSSSNNPVDALDWLHAVGKKLDTVQCSDEEKVIFAAHQLQGPASLWWDHFQATQPEGQPITWARFTAAFRRTHVPAGVVALKKREFRELKQGNRSVMEYLHEFNNLARYAPRFSGDYPDFQRLVDKSIRLEDKHKELESHKRRLANFRNQQGANQRVRYTNPYPGGSSSQQEQQQQQPRSAPRPQFVVRVPQPQQQQSQQGTRAPRPPMPTVQPGQSRRDAQGPQRLCFNCFERGHFADKCPKLRRQQGQAPPRSNNGGKDVIRGRVNHVTAEDVLTTPDVIVGTFLIHSIPATILFDSGASHSFISVPFVGRNQLGVERLRNPLLITTPGGVMTAKYYSPAVPIEIQGIPFPSDLILLDTKSLDVILGMNWLAQFQGVVDCARRTVTLYPGPEQPVVFFAPPTSVSSSELHQIGLSEIPIVREFGDVFPEELPGMPPKREIEFRIDLAPGTTPLYKRPYRMAANELAEVKKQLEELKEKGYIRPSTSPWGAPVIFVEKKDKTKRMCVDYRALNEVTIKNKYPLPRIDDLFDQLKGATVFSKIDLRSGYHQLRIREEDIPKTAFTTRYGLYEFTVMSFGLTNAPAFFMNLMNKVFMEYLDKFVVVFIDDILVYSQSEEDHQHHLRLVLGKLREHQLYAKLSKCEFWLSEVKFLGHVISAKGVAVDPKTVTAVTDWKQPKTVTQIRSFLGLAGYYRRFIENFSKIARPMTQLLKKEEKFVWSPQCEKAFQTLKEKLVSSPVLILPDTRKDFMVYCDASRQGLGCVLMQDGHVVAYASRQLRPHEGNYPTHDLELAAVVHALKIWRHYLIGNRCEIYTDHKSLKYIFTQSDLNLRQRRWLELIKDYDVGIHYHPGKANVVADALSRKSHCNTLNVRGFPPELNQQMEALNLSVVSRGFLAALEAKPTLLDQIREAQKNDPDMRGLLKNMKQGKAAGFTEDEHGTLWNGNRVCVPDVREHKQLILQEAHESPYSIHPGSTKMYLDLKEKYWWVSMKREIAEFVALCDVCQRVKAEHQRPAGLLQPLQVPEWKWDEIGMDFITGLPKTQGGYDSIWVVVDRLTKVARFIPVKTTYGGNKLAELYFARIVSLHGVPKKIVSDRGSQFTSHFWKKLQEELGTRLNFSTAYHPQTDGQTERLNQILEDMLRACVLDFGKTWDKSLPYAEFSYNNSYQASIQMAPYEALYGRKCRTPLLWDQVGESQVFGTDILREAEAKTKGKLAPRFVGPFRIIARREEVAYQLELPASLGNGHDVFHVSQLKKCLRVPSEQADSEQIEVREDLTYVERPVKILDTMERRTRNRVIRFCKVQWSNHAEEEATWEREDELKAAHPDLFASSSESRGRDSV

SEQ ID NO: 19473 - protein, 1112 aa, Oryza sativa
  Clone ID: TF_OSC400086j.C1.p12.fg
MSSRCDRLLPLHRHALLRESSFDFSASSSAAQRVEWIDVGHLYAEIIGLLDKIMAAPAPSSFNLRSILEKEKLTGTNFMDWYHNLRIVLRKEHKEFVLTELFPANLPNNAPAAQRREHEKRCNDYLDISCLMLATMSPELQRQYEALDAHTIITGLCNMFEDQARAERFNTSKSLFACRLAEGNLVSPHVIKMIGYTESLDNLGFPLSRELATDLILQSLPPSFEPFIINFNMNNLNRTLAELHGMLKTAEESIKKNPNHVMVMHKRKPNNKKSGQKRKLNSDEFTSTSNSKTKVQKTGPAKDAECFFCKEIGHWKRNCKKYLEQLKQKQHDGKSSTSGINVIEIILATSSTDSWVFDTGSVAHICKSLQGLKKSRSLARGEVDIRVGNGARVAAIAVGTMPLSLPSGLVLELKNCYCIPALCKNVISASCSQAEGYGFRSVDNGCSVYYNDIFYFHAPMMNGLYIVNLDGCSVYNIIAKRQHPNDLNPTFIWHCRLGHINEKRMEKLHRDGLLHSFDFESFETCKSCLLGKMTKAPFTGQSERASEPLGLVHIDVCGPMSSTARGGFRYFITFTDDFSRYGYVYLMRHKSESFGKFKEFQNEVQNHLGKTIKYLRSDRGGEYLSLEFGNHLKECGIVPQVTPLGTPQWNGVSERRNRTLLDMVRSMMSQTDLPLSFWGYALETAAFTLNRVPSKSVDKTPYEIWTGKRPILSFLKIWGCELWKHRFYECPKGYGVHLRVWNLVDPPDGVKAIECKWVFKKKTDVDGNVHIYKARLMAKGFIQIQGVDYDETFSPVAMLNSIRIVLAIAAYFDYEIWQMDVKTAFLNGNLDEDVYMTQPKGFVDPQSTKKICKLQKSIYGLKQASRSWNIRFDEVVKALGFVKHEEEPCVYKKISGSALVFLILYVDDILLIGNDIPMLESVKTSLKNSFSMKDLGEAAYILGIRIYRDRSKRLIGLSQSTYIDKVLKRFNMQDSKKSFLPMSHGINLGKNQCPQTTDERNKMNVSYALSVTSRYQSDPGESHWIAVKNILKYLRRTKDMFLVYGGQEELVVNGYTDASFQTDKDDFRSQSGFVFCLNGGAVSWKSSKQDTVVDSTTEAEYIAASKAAKEAV

SEQ ID NO: 19474 - protein, 710 aa, Oryza sativa
  Clone ID: TF_OSC400850j.C1.p22.fg
MASSSSSIAATNPLVGIQVSEKLTKQNYALWSAQVLTALRGARLEGFISGKTTPPPAEIEKKEGDKKEGEKTIKIANPAVDEWFATDQQVLGFLFSSLSREILSQVAGATTAAQAWQAISDMFASKSRAGLINMRLALTSTQKGTMSVTEYVAKMRAIADELAAAGKPIDQDDLIAYIINGLDANFDPVVEALVARVEPITVQEMYSHLLNFENKIRLRQAFLTASTNAANRNNVTRGGRGGMPRGRGGRGGGGRGGNGGRGNNGGGRGDNRPTCQVCNKRGHVASDCWHRFDETYVPDEKIGGAATHAYGIDTNWYVDTGATDHITSQLDKLTTKEKYQGTDQIHTASGEEVFEKFHEFQNMVERQFNRKIVTMQTDWGGRVYVSRDVTFDEHEFPFSHLHSNAGARLRAEISLLPEHLLSHAYDQGGEKHSTDHMHEYILPVSTNSQDLSPVFTEIGTGGIIPGTSDGLHPENDDQAGKTASDQPSTSAVLPLQPQQSLEQQPDGTTSSHHPASPAHASPPRQPAVDVSAGTHHDASGSSASDEPVATTAPPEVTLRPKTRLQSGIRKEKIYTDGTVKYSCFTSSGEPQNLNEALGDKNWKETMDAEYMALMKNKTWHLVPTKKGINIINCKWVYKIKRKTDGSLDRYKARLVAKSFKQRYGIDYEDTFRPVVKAATIRTILSIAVSRGWSLRQLDVQNAFLHGVLEE

SEQ ID NO: 19475 - protein, 1716 aa, Oryza sativa
  Clone ID: TF_OSC24701j.C1.p1.fg
MAQKYSWQSPRSDDAEKGSAEPPSSTEPLAGPTSPGSRLFLARQEQQQRGVGVPVAKAQHPCGSCSRTANVVSFPKSKFILLSSKDREPPLLHQVVSELKLLGGSGEHPQHSPRTRGIIQHFERQVREHAEGLDEDVRVANDRLGQLEAAQIDTNSKLSSLERSLVAVNTSLAGILNTLERMGQDGHDGSARRNHNGHDANSSIAAREELEYVADTEHDEEVLGRPQRQQRRQRHGLGAPPRREVRDNDDSLGKIKFTIPCFDGKYDPDAYLTWELAIDQKFACHDFPENKCVRAATSEFTDFASIWWSEFVRSNPNNTPQTWDAMKRVMRARFVPSYHARDLLHKLQQLRQGNKSVEEYYQALQTGMLRCGLVENDDAGMARFMGGLNREIQDILTYKEYNSINHLFHLACKAEREVQGRRASFRTNISAGRASSWTSSNAAAPSTRAAAPSSSSNKLRPSTTNSTPCPSEPTRGVAATPSKTSSSVASSGRTRDIQCLRCKGYGHVRKDCPSTRVMIVRADGGYSSASDLDGETYALLATNNAREGDAPHQDEEHIGAEAAEHYESLVVQRVLSAQMERAEQNQRHTLFQTKCVIKERSCRVIIDGGSCNNLASAEMVEKLALSTQPHPQPYYIQWLNSSGKVKVTRLVRVHFAIGSYHDSINCDVVPMQACSMLLGRPWQFDKDSLHFGKSNQYSFVHNGKKLVLHPMSPEVILKDELARASKQKNQEHTRSEHLIAANELEKHKKKPTNSVQNNKNEIKLKGSCFIATKSDLDEVDTDTVVCYALVCKETLFPIEDTPISLPPPVTNLLQEYADIFPKEVPPGLPPIRGIEHQIDLIPGASLPNRAPYRTNPEETKEIQRQVQELLDKGYVRESLSPCSVPVLLVPKKDGSWRMCVDCRAINNITIRYRHPIPRLDDMLDELSGSLVFSKIDLRSGYHQIRMKLGDEWKTAFKTKFGLYEWLVMPFGLTNAPSTFMRLMNEVLRAFIGRFVVVYFDDILIYSRSIEDHHGHLRAVFDALRDARLFGNLEKCTFCTDRVSFLSYVVTPQGIEVDQAKVEAIHNWPVPTTITQVRSFLGLAGFYRRFVKDFSTIAAPLHELTKRNVTFTWAAAQRNAFDTLKDKLTHAPLLQLPDFNKTFEHECDASGIGLGGVLLQEGKPVAYFSEKLSGPSLNYSTYDKELFALVRTLETWQHYLWPKEFVIHSDHESLKHIRSQAKLNRRHAKWVEFIESFPYVIKHKKGKENVIADALSRRYAMLSQLDFKIFGLETIKEQYAHDDDFKNVLLNCKEGRTWNKFVLTNGFVFRANKLCIPASSVRMLLLQEAHGGGLMGHFGVKKTEDILADHFFWPKMRRDVERFVARCTTCQKAKSRLNPHGLYMPLPVPSVPWEDISMDFVLGLPRTKKGRDSIFVVVDRFSKMAHFIPCHKSDDATHVADLFFREIVRLHGVPNTIVSDRDTKFLSHFWRTLWAKLGTKFLFSTTCHPQTDGQTEVVNRTLSTMLRAVLKKNIKMWEECLPHVEFAYNRSQHSTTKKCPFEIVYGLLPRAPIDLLPHPTSERVNFDAKYRAELMLKLHETTKENIERMNIKYKLAGSKGKKHVAFEPGDLVWLHLRKDRFPNLRKSKLLPRADGPFKVLQKINDNAYKLELPADFGVSPTFNIADLKPYLGEEDELESRTTQMQEGEDDEDILSNDTSTPIAQQGPMTRARAHELN

SEQ ID NO: 19476 - protein, 1116 aa, Oryza sativa
  Clone ID: TF_OSC27996j.C1.p2.fg
MPHGRWWDSINPIPASKSKKQDEQFARFVIQKIHIKVPLLDAMQVPTYARYLKDILNNKRPLPTTEVVKLTEQCSNLILHKLPEKKKDPGCPTITCSIGAQQFDQTWCDLGASVSVMPKDVFDKLNFTVLEPTPMRLQLADSSVRYPAGIAENVPVKIRDFFIPVDFVVLDMDMGKEMPLILGRPFLSTAGANIDVGTGSIRFHINGKEEKFEFQPRTEQCSMNFLEKETTMPRNRYWKTPVKSPVPAKKSDQPAQKKPPSAPKSKKGWENDHNDEDIPSNDTTTPIAQQGPMTRARARELNYQVQGCSWHGKNSNNVESVYRLLRRSTPVVVVVGPPMSYPSPNRSLSSSHRKIGNPRCCIKWYESSSCSDRAVVGSGGSGEHPQHSPRTRGIIQHFERQVREHAEGLDEDVRVANDRLGQLEAAQIDTNSKLSSLEMSLVAVNTSLAGILNTLERMGQDGHDGSARRNHMAMMLIAASQQGKNWSTLLTLSIMRRYLVVHKDNSTGSAMAWALHHGGSEFVRSNPNNTPQTWDAMKRVMRARFVPSYHARDLLHKLQQLRQGNKSVEEYYQALQTGMLRCGLVENDDAGMARFMGGLNREIQDILAYKEYNSINRLFHLACKAEREVQGRRASFRTNISAGCASSWTSPNAAAPSTRAAAPSSSSNKLRPSTTNSTPCPSEPTRGVAATPSKSSSSVASSGRTRDIQCLRCKGYGHVRKDCPSTRVMIVRADGGYSSASDLDEETYALLATNNAGEGDAPHQDEEHIRAEAAEHYESLVVQRVLSAQMERAEQNQRHTLFQTKCVIKERSCRVIIDGGSCNNLASAEMVEKLSLSTQPHPQPYYIQWLNSSGKEHTRSEHLIAANELEKHKKKPTNSVQNNKNEIKLKGSCFIATKSDLDEVDTDTVVCYALVCKETLFPIEDTPISLPPPVTNLLQEYADIFPKEVPPGLPPIRGIEHQIDLIPGASLPNRAPYRTNPEETKENQRQVDEDIPSNDTTTPIAQQGPMTRAQARELNYQVQGCSWHGKNSNNVESVYRLLRRNTPVVVVVGPPTSYPSPNRSLSSSHRKIGNPRCCITSARVTRQGSCSTRLGRTPHGPHLGRGPKRSYKPKGP

SEQ ID NO: 19477 - protein, 1452 aa, Oryza sativa
  Clone ID: TF_OSC31043j.C1.p2.fg
MTGGSGEHPQHSPRTRGIIQHFERQVREHAEGLDEDVRVANDRLGQLEAAQIDTNSKLSSLERSLVAVNTSLAGILNTLERMGQDGHDGSARRNHNGHDANSSIAAREELEYAADTEHDEEVLGRPQRQQRRQRHGMGAPPRQEVRDNDDSLGKIKFTIPCFDEKYDPDAYLTWELAIDQKFACHDFPENKRVRAATSEFTDFASIWWSEFVRSNPNNTPQTWDAMKRVMRARFVPSYHARDLLHKLQQLRQGNKSVEEYYQALQTGMLRCGLVENDDAGMARFMGGLNREIQDILAYKEYNSINRLFHLACKAEREVQGRRASFRTNISAGRASSWTSSNVAAPSTRAAAPSSSNNKLRPSTTNSTPCPSEPTRGVAATPSKSSSSVASSGRTRDIQCLRCKGYGHVRKDCPSTRVMIVRADGGYSSASDLDEETYALLATNNAGKGDAPHQDEEHIGAEAAEHYESLVVQRVLSAQMERAEQNQRHTLFQTKCVIKERSCRVIIDRGSCNNLASAEMVEKLALSTQPHPQPYYIQWLNSSGKEHTRSEHLIAANELEKHKKKPTNSVQNNKNEIKLKGSCFIATKSDLDEVDTDTVVCYALEYADIFPKEVPPGLPPIRGIEHQIDLIPGASLPNRAPYRTNPEETKEIQRQVQELLDKGYVRESLSPCSIPVLLVPKKDGSWRMCVDCRAINNITIRYRHPIPRLDDMLDELSGSLVFSKIDLRSGYHQIRMKLGDEWKTAFKTKFGLYEWLVMPFGLTNAPSTFIRLMNEVLRAFIGRFVVVYFDDILIYSRSIEDHHGHLRAVFDALRDERLFGNLEKCTFCTDRVSFLGYVVTPQGIEVDQAKVEAIHSWPVPTTITQVRSFLGLAGFYRRFVKDFSTIAAPLHELTKRNVTFTWAAAQRNAFDTLKDKLTHAPLLQLPDFNKTFELECDASGIGLGGVLLQEGKPIEYFSEKLSGPSLNYSTYDKELFALVRTLETWQHYLWPKEFVIHSDHESLKHIRSQAKLNRRHAKWVEFIESFPYVIKHKKGKENVIADALSRRYAMLSQLDFKIFGLETIKEQYAHDDDFKDVLLNCKEGRTWNKFVLTNGFVFRANKLCIPASSVRMLLLQEAHGGGLMGHFGVKKTEDILADHFFWPKMRRDVERAVLKKNIKMWEECLPHVEFAYNRSQHSTTKKCPFEIVYGLLPRAPIDLLPLPTSERVNFDAKYHAELMLKLHETTKENIERMNIKYKLAGSKGKKHVAFEPGDLVWLHLRKDRFPNLRKSKLLPRADGPFKVLQKINDNTYKLELPADFGVSPTFNIADLKPYLGEEDELESRTTQMQEGEDDEDIPSNDTTTPIAQQGPMTRARARELNYQVQGCSWHGKNSNNVESVYRLLRRSTPVAVVVGPPTSYPSPNQSLSSSHRTIRNPRCCISLSSRHNRSSLYVFYFLLSPFSRTCISNSIIV

SEQ ID NO: 19478 - protein, 1708 aa, Oryza sativa
  Clone ID: TF_OSC400192j.C1.p21.fg
MTGGSGEHPQHSPRTRGIIQHFERQVREHAEGLDEDVRVANDRLGQLEAAQIDTNSKLSSLERSLVAVNTSLAGILNTLERMGQDGHDGSARRNHNGHDANSSIAAREELEYAADTEHDEEVLGRPQRQQRRQRHGMGAPPRQEVRDNDDSLGKIKFTIPCFDEKYDPDAYLTWELAIDQKFACHDFPENKRVRAATSEFTDFASIWWSEFVRSNPNNTPQTWDAMKRVMRARFVPSYHARDLLHKLQQLRQGNKSVEEYYQALQTGMLRCGLVENDDAGMARFMGGLNREIQDILAYKEYNSINRLFHLACKAEREVQGRRASFRTNISAGRASSWTSSNVAAPSTRAAAPSSSNNKLRPSTTNSTPCPSEPTRGVAATPSKSSSSVASSGRTRDIQCLRCKGYGHVRKDCPSTRVMIVRADGGYSSASDLDEETYALLATNNAGKGDAPHQDEEHIGAEAAEHYESLVVQRVLSAQMERAEQNQRHTLFQTKCVIKERSCRVIIDRGSCNNLASAEMVEKLALSTQPHPQPYYIQWLNSSGKVKVTRLVRVHFAIGSYHDSINCDVVPMQACSIFLGRPWQFDKDSLHFGKSNQYSFVHNGKKLVLHPMSPEVILKDELARASKQKNQEHTRSEHLIAANELEKHKKKPTNSVQNNKNEIKLKGSCFIATKSDLDEVDTDTVVCYALVCKETLFPIEDTPISLPPPVTNLLQEYADIFPKEVPPGLPPIRGIEHQIDLIPGASLPNRAPYRTNPEETKEIQRQVQELLDKGYVRESLSPCSIPVLLVPKKDGSWRMCVDCRAINNITIRYRHPIPRLDDMLDELSGSLVFSKIDLRSGYHQIRMKLGDEWKTAFKTKFGLYEWLVMPFGLTNAPSTFIRLMNEVLRAFIGRFVVVYFDDILIYSRSIEDHHGHLRAVFDALRDERLFGNLEKCTFCTDRVSFLGYVVTPQGIEVDQAKVEAIHSWPVPTTITQVRSFLGLAGFYRRFVKDFSTIAAPLHELTKRNVTFTWAAAQRNAFDTLKDKLTHAPLLQLPDFNKTFELECDASGIGLGGVLLQEGKPIEYFSEKLSGPSLNYSTYDKELFALVRTLETWQHYLWPKEFVIHSDHESLKHIRSQAKLNRRHAKWVEFIESFPYVIKHKKGKENVIADALSRRYAMLSQLDFKIFGLETIKEQYAHDDDFKDVLLNCKEGRTWNKFVLTNGFVFRANKLCIPASSVRMLLLQEAHGGGLMGHFGVKKTEDILADHFFWPKMRRDVERFVARCTTCQKAKLRLNPHGLYMPLPVPSVPWEDISMDFVLGLPRTKKGRDSIFVVVDRFSKMAHFIPCHKSDDATHVADLFFREIVRLHGVPNTIVSDRDTKFLSHFWRTLWAKLGTKLLFSTTCHPQTDGQTEVVNRTLSTMLRAVLKKNIKMWEECLPHVEFAYNRSQHSTTKKCPFEIVYGLLPRAPIDLLPLPTSERVNFDAKYHAELMLKLHETTKENIERMNIKYKLAGSKGKKHVAFEPGDLVWLHLRKDRFPNLRKSKLLPRADGPFKVLQKINDNTYKLELPADFGVSPTFNIADLKPYLGEEDELESRTTQMQEGEDDEDIPSNDTTTPIAQQGPMTRARARELNYQVQGCSWHGKNSNNVESVYRLLRRSTPVAVVVGPPTSYPSPNQSLSSSHRTIRNPRCCISLSSRHNRSSLYVFYFLLSPFSRTCISNSIIV

SEQ ID NO: 19479 - protein, 353 aa, Oryza sativa
  Clone ID: TF_OSC400283j.C1.p30.fg
MDADKWDEMKAQAAATIRLSLLDSVMYQVMDEKTPKEIWDKLASLYMSKSLTSKLYLKQQSYGLQMQEESDLRKHVDIFNQLVVDLRKLDVKLDDEDKAIILLCSLPPSYEHLRRSKKNEATEASQAESLLVKAKHDYEAGVSKSKEKGARCYKCHEFGHIRRICPLLKKRKGGIASLAARGDDSDSSSHEILTVSNEKSGEAWMLDSASSYHVTSKREWFSSYKSGDFGVVYLGDDTSYRVVGVGDVKFKMYDGNEVLLSDVRHMPGLRKSLISLGSLHETGWLYQVDSDRKTMNIMKDGKTVMTCEMTSSCLYKLQGSVVAGGVMEDGYVGVAVHDPEGGEPGVGSSGGSA

SEQ ID NO: 19480 - protein, 1699 aa, Oryza sativa
  Clone ID: TF_OSC400488j.C1.p2.fg
MSWHRAGVLLLGAQSCLPVPGVPAVGGIGSVLLSMARMGWRLCHVFCPYTVVMAGSINRGGLDLTGFVLELRGMCVVLGYPHGVDYQGKQLSEQEGDDAEPHAAWEVTAVILTGSPERTSLAVTAGGDSFSAACQNAALLTIGTLHQRYPDELQHSPYRYHPRRGGARDYATFRDASSEDDATIMHLARMVEAYDAARIDFHQMVRRGLVENNMKILELRQENLQLKKDLDAVEAQLRQLKIAQGEVCRPKRRRVCRSQKITAHKSTSRPELVRQSLAWTCFVETPRAEPAPVVPQEDGASGVGSTDAHLPSWPIAAVDKQLVGLRMVTTRKNAATGDGSHPEGSNHNHQGNPPSPPPPPPPPPPDTNAILTQILAQQANMMAAFLHHIQNPPQHNAPPPPPQHSKLAEFLRIRPPTFSSSNNPVDALDWLHAVGKKLDTVQCSDEEKVIFAAHQLQGPASLWWDHFKATQPEGQPITWARFTAAFRRTHVPAGVMALKKREFRELKQSNRSVMEYLHEFNNLARYAPEDVREDEEKQEKFLAGMDPELSVRLVSGDYPDFQRLVDKSIRLEAKHKELESHKRRLASFRNQQGANQRVRYTNPYPGGSSSQQQQQQQQPRSAPRPQFVVRVPQPQQQQSQQGTRAPRPPTPAVQPGQGRRDVQGPQCLCFNCFEPGHFADKCPKPRRQQGQAPPRSNNGGKDVIRGRVNHVTAEDVLTTPDVIVGTFLIHSIPATILFDSGASHSFISMPFVGRNQLGVERLRNPLLITTPGGVMTAKYYSPAVPIEIQGIPFPSDLILLDTKNLDVILGMNWLAQFQGVVDCARRTVTLYRGPEQPVVFFAPPTSVRSSELHQIGLSEIPIVREFGDVFPEELPGMPPKREIEFRIDLAPGTTPLYKRPYRMAANELAEVKKQLEELKEKGYIRPSTSPWGAPVIFVEKKDKTKRMCVDYRALNEVTIKNKYPLPRIDDLFDQLKGATVFSKIDLRSGYHQLRIREEDIPKTAFTTRYGLYEFTEDHQHHLRLVLGKLREHQLYAKLSKCEFWLSEVKILGHVISAKGVAVDPETVTAVTDWKQPKTVTQIRSFLGLAGYYWRFIENFSKIARPMTQLLKKEEKFDGHVVAYASRQLRPHEGNYPTHDLELAAVVHALKIWRHYLIGNRCEIYTDHKSLKYIFTQSDLNLRQRRWLELIKDYDVGIHYHPGKANVVADALSRKSHCNTLNVRGIPPELSQQMEALNLSIVGRGFLAALEAKPTLLDQIREAQKNDPDMHGLLKNMKQDKAAGFTEDEHGTLWNGKRVCVPDNRELKQLILQRVKAEHQRPAGLLQPLQVPEWKWDEIGMDFITGLPKTQGGYDSIWVVVDRLTKVARFIPVKTTYGGNKLAELYFARIVSLHGVPKKIVSDRGSQFTSHFWKKLQEELGTRLNFSTTYHLQTDGQTESLNQILKDMLRACVLDFGKTWDKSLPYAEFSYNNSYQASIQMAPYEALYGRKCRTPLLWDQVGESQVFGTDILREAEAKVRIIRDNLKVAQSRQKSYADNQRRNQEFAVDDFVYLRVMPLRGVHRFQTKGKLAPRFVGPFRIIARRGEVAYQLELAASLGNVHDVFHVSQLKKCLRVPSEQADSEQIEVREDLTYVERPVKILDTMERRTRNRIIRFCKVQWSNHAEEEATWEREDELKAAHPNLFASSSESRGRDSVYGG

SEQ ID NO: 19481 - protein, 1170 aa, Oryza sativa
  Clone ID: TF_OSC400798j.C1.p4.fg
MTRARARELNYQDILAYKEYNSINRLFHLACKAEREVQGRRASFRTNISAGCASSWTSSNAAAPSTRAAAPSSSSNKLRPSTTNSTPRPSEPTRGVAATPSKSSSSVASSGRTRDIQCLRCKGYGHVRKDCPSTRVMIVRADGGYSSASDLDEETYALLATNNAGEGDAPHQDEEHIRAEAAEHYESLVVQRVLSAQMERAEQNQRHTLFQTKCVIKERSCRVIIDGGSCNNLASAEMVEKLALSTQPHPQPYYIQWLNSSGKEHTRSEHLIAANELEKHKKKPTNSVQNNKNEIKLKGSCFIATKSDLDEVDTDTVVCYALVCKETLFPIEDTPISLPPPVTNLLQEYADIFPKEVPPGLPPIRGIEHQIDLIPGASLPNRAPYRTNPEETKEIQRQMQELLDKGYVRESLSPCSVPVLLVPKKYGSWRMCVDCRAINNITIRYRHPIPRLDDMLDELSGSLVFSKIDLRSGYHQIRMKLGDEWKTAFKTKFGLYEWLVMPFGLTNAPSTFMRLMNEVLRAFIGRFVVVYFDDILIYSRSIEDHHGHLRAVFDALRDARLFGNLEKCTFCTDRVSFLGYVVTPQGIEVDQAKVEAIHSWPVPTTITQVRSFLGLAGFYRCFVKDFSTIAAPLHELTKRNVTFTWAATQRNAFDTLKDKLTHAPLLQLPDFNKTLELECDASGIGLGGVLLQEGKPVAYFSEKLSGPSLNYSTYDKELFALVRTLETWQHYLWPKEFVIHSDHESLKHIRSQAKLNRRHAKWVEFIESFPYVIKHKKGKENVIADALSRRYAMLSQLDFKIFGLETIKEQYAHDDDFKDVLLNCKEGRTWNKFVLTNGFVFRANKLCIPASSVRMLLLQEAHGGGLMGHFGVKKTEDILADHFFWPKMRRDVERAVLKKNIKMWEECLPHVEFAYNRSQHSTTKKCPFEIVYGLLPRAPIDLLPLPTSERVNFDAKYRAELMLKLHETTKENIERMNIKYKLAGSKGKKHVAFEPGDLVWLHLRKDRFPNLRKSKLLPRADGPFKVLQKINDNAYKLELPADFGVSPTFNIADLKPYLGEEDELESRTTQMQEGEDDEDIPSNDTTTPIAQQGPMTRARARELNYQVQGCSWHGKNSNNVESVYRLLRRSTPVVVVVGPPTSYPSPNRSLSSSHRKIGNPRCCITARITK

SEQ ID NO: 19482 - protein, 1279 aa, Oryza sativa
  Clone ID: TF_OSC401314j.C1.p4.fg
MTGGSGEHPQHSPRTRGIIQHFERQVREHAEGLDEDVRVANDRLGQLEAAQIDTNSKLSSLERSLVAVNTSLAGILNTLERMGQDGHDGSARHNHNGHDTNSSIAAREELEYAADTEHDEELLGRPQRQQRRQRHGMGAPPRREVRDNDDSLGKIKFTIPCFDGKYDPDAYLTWELAIDQKFACHDFPENKRVRAATSEFTDFASIWWSEFVRSNPNNTPQTWDAMKRVMRARFVPSYHARDLLHKLQQLRQGNKSVEEYYQALQTGMLRCGLVENDDAGRASSWTPSNTAAPSTRAAAPSSSSNKLRPSTTNSTPCPSEPTRGVAATPSKSSSSVASLGRTRDIQCLRCKGYGHVRKDCPSTRVMIVRADGGYSSASDLDEETYALLATNNTGEGDAPHQDEEHIGAEAAEHYESLVVQRVLSAQMERAEQNQRHTLFQTKCVIKERSCRVIIYGGSCNNLASAEMVEKLALSTQPHPQPYYIQWLNSSGKEYADIFSKEVPPGLPPIRGIEHQIDLIPGASLPNRAPYRTNPEETKEIQRQVQELLDKGYVRESLSPCAVPVLLVPKKDGSWRMCVDCRAINNITIRYRHPIPRLDDMLDELSGSLVFSKIDLRSGYHQIRMKLGDEWKTAFKTKFSLYEWLVMPFGLTNAPSTFMRLMNEVLRAFIGRFVVVYFDGILIYSRSIEDHHGHLRAVFDALRDARLFGNLEKCTFCTDRVSFLGYVVTPQGIEVDQAKVEAIHSWPVPTTITQVRSFLGLAGFYRRFVKDFSTIAAPLHELTKRNVTFTWAAAQRNAFDTLKDKLTHAPLLQLPDFNKTFELECDASGIGLGGVLLQEDKPVAYFSEKLSGPSLNYSTYDKELFALVRTLETWQHYLWPKEFVIHSDHESLKHIRSQAKLNRRHAKWVEFIESFPYVIKHKKGKENVIANALSRRYTMLSQLDFKIFGLETIKEQYAHDDDFKDVLLNCKEGRTWNKFVLTNGFVFRANKLCIPASSVRMLLLQEAHGGGLMGHFGVKKTEDILANHFFWPKMRRDVERAVLKKNIKMWEECLPHVEFSYNRSQHSTTKKCPFEIVYGLLPRAPIDLLPLPTSERVNFDAKHRAELMLKLHETTKENIERMNIKYKLAGSKGKKHVAFEPGNLVWLHLRKDRFPNLRKSKLLPRADGPFKVLQKINDNAYKLELPADFGVSPTFNIADLKPYLGEEDELESRTTQMQEGEDDEDIPSNDTTTPIAQQGPMTKARARELNYQVQGCSWHGKNSNNVESVYRLLRRSTPVR

SEQ ID NO: 19483 - protein, 781 aa, Oryza sativa
  Clone ID: TF_OSC401783j.C1.p2.gm
MALEMPGNTTNTMTTRERLDLAIKTPNKQAPKGAEGLTANALPLPDLSADALPLPAPVAAGLGEAGHGWERHGGRQWRGVEGNDGCGRIRWWGGYSVVAGELRIHRVGSGDSNNNDGRGRVWWQCDEDIPSNDTTTPIAQQGPMTRARARELNYQVQGCSWHGKNSNNVESVYRLLRRSTPVPKRKTTKIGGSGEHPQHSPRTRGIIQHFERQVREHAEGLDEDVRVANDRLGQLEAAQIDTNSKLSSLERSLVAQGKNWSTLLTLSMMRRYLVVHKDNCAGSAMAWALHHGGSSTIVLKQQAASLYNKLYTMPETRDIQCLRCKGYGHVRKDCPSTRVMIVRADGGYSSASDLDEETYALLATNNAGEGDAPHQDEEHIGAEAAEHYESLVVQRVLSAQMERAEQNQRHTLFQTKCVIKERSCRVIIDGGSCNNLASAEMVEKLALSTQPHPQPYYIQWLNSSGKEYADIFPKEVPPGLPPIRGIEHQIDLIPGASLPNRAPYRTNPEETKEIQRQVQELLDKGYEAHGGGLMGHFGVKKTEDILADHFFWQRVNFDAKYRAELMLKLHETTKENIEHMNIKYKLAGSKGKKHVAFEPGDLVWLHLRKDRFPNLRKSKLLPRADGPFKVLQKINDNAYKLELPADFGVQGCSWHGKNSNNVESVYRLLRRSTPVSDNLRDRITAASTANTRQLIIVFSASDVWDAHHHQCQYSFSQEHELMPPASTPRQCCSRLPTADLISGHIVHADLLTPSITIGHAVLPRRAGSMRMTWTDQKVRDG

SEQ ID NO: 19484 - protein, 386 aa, Oryza sativa
  unsure (1)..(386): unsure at all Xaa locations
  Clone ID: TF_OSC422885j.C1.p2.np
HSNSTPEPNLLGYGATRPAAIKQSDWRRRAVTSREGGLIGQTTPVRPAAXERSDRCAHGGQTALHXLHQQGXLLCPLKFMTWPHVFYGVNFPYWCEKSYIMSESYDIWQKVANPYKIPAXINTVVLKTDFKNNCKARNILLNGIPCSDFDRVSHLQTAHEIWKPLSDFHQGTSNINEVRKDLFKDYVKFEMQPEETLDDYLARFNKVLSNLRSVDSSYDTYYTQSEISRHFLNGLDMSIWEMKVTSIXESVNMSALTLDSLYTKLKTHEVNILSRKIDPXISALISSEDLVXVTNKLSQGFEKVKNRKRGGSVQCFQCGKLNHIKFNCPNRQEDKSWRRKXTSMTSSRCASSFEQRLIQVLIEAFDSVVSVVVVVCHIVGKTGVVK

SEQ ID NO: 19485 - protein, 1393 aa, Oryza sativa
  Clone ID: TF_OSC900141j.C1.p1.fg
MTGGSGEHPQHSPRTRGIIQHFERQVREHAEGLDEDVRVANDRLGQLEAAQIDTNSKLSSLERSLVAVNTSLAGILNTLERMGQDGHDGSARRNHNGHDANSSIAAREELEYAADTEHDEEVLGRPQRQQRRQRHGMGAPPRREVRDNDDSLGKIKFTIPCFDGKYDPDAYLTWELAIDQKFACHDFPENKRVRAATSEFTDFASIWWSEFVRSNPNNTPQTWDAMKRVMRARFVPSYHARDLLHKLQQLRQGNKSVEEYYQALQIGMLRCGLVENDDAGMARFMGELNREIQDILAYKEYNSINRLFHLACKAEREVQGRRASFRTNISAAAPSSSSNKLRPSTTNSTPCPSEPTRGVAATPSKSSSSVASLGRTRDIQCLRCKGYGHVRKDCPSTRVMIVRADGGYSSASDLDEETYALLATNNAGEGDAPHQDEEHIKAEAAEHYESLVVQRVLSAQMERAEQNQRHTLFQTKCVIKERSCRVIIDGGSCNNLASAEMVEKLALSTQPHPQPYYIQWLNSSGKEHTRSEHLIAANELEKHKKKPTNSVQNNKNEIKLKGSCFIATKSDLDEVDTDTVVCYALVCKETLFPIEDTPISLPPPVTNLLQEYADIFPKEVPPGLPPIRGIEHQIDLIPGASLPNRAPYRTNPEETKEIQRQVQELLDKGYVRESLSPCSVPVLLVPKKDGSWRMCVDCRAINNITIRYRHPIPRLDDMLDELSGSLVFSKIDLCSGYHQIRMKLGDEWKTAFKTKFGLYEWLVMPFGLTNAPSTFMRLMNEVLRAFIGRFVVVYFDDILIYSRSIEDHHGHLRAVFDALRDARLFGNLEKCTFCTDRVSFLGYVVTPQGIEVDQAKVEAIHSWPVPTTITQVRSFLGLAGFYRLFVKDFSTIAAPLHELTKRNVTFTWAAAQRNAFDTLKDKLTHAPLLQLPDFNKTFELECDASGIGLGGVLLQEGKPVAYFSEKLSGPSLNYSTYDKQLFALVRTLETWQHYLWPKEFVIHSDHESLKHIRSQAKLNRRHAKWVEFIESFPYVIKHKKGKENVIVDALSRRYAMLSQLDFKIFGLETIKEQYAHDDDFKDEAHGGGLMGHFGVKKTEDILADHLFWPKMRRDVERFVARCTTCQKAKSRLNPHGLYMPLPVPSVPWEDISMDFVLGLPRTKKGRDSIFVVVDRFSKMAHFIPCHKSDDATHVADLFFREIVRLHGVPNTIVSDRDTKFLSHFWRTLWAKLGTKLLFSTTCHPQTDGQTEVVNRTVSTMLRAVLKKNIKMWEECLPHVEFAYNRSQHSTTKKCPFEIVYGLLPRAPIDLLPLPTLERVNFDAKYRAELMLKLHETTKENIERMNIKYKLAGSKGKKHVAFEPGDLVWLHLRKDRFPNLRKSKLPPRADGPFQ

SEQ ID NO: 19486 - protein, 1477 aa, Oryza sativa
  unsure (1)..(1477): unsure at all Xaa locations
  Clone ID: TF_OSC900215j.C1.p10.np
MAAGPPAPVSSLPRPPSLDRALFKPSPHLLRPFLPLAALPPRRNRARAVALSLRRHRQAPVRRRRRPGPPPTSAPPPSDSPHPRRPRPPLRFARRPPERRRPHRPEPRRRLPPLRPPFSSSPSTXGEPWTAASFPTSLPLSRPPLRRAYGRCRRPXRRVASRRLRRLGRPRARRVAAAWGPAVSRPRPXVRLTRAVSPGAPGPPWTHLGHIRTGLRASVAKHYRFHMSSGANEGYTSCGLVVEMSWHRAGVLLLGAXSCLPVPEVSAVGGVGSMYTSDQSIIYSNSRALGYGQAEQCTQMAGSINRRGLDLTGFVLELRGMCVVLGYPHGVDYQGKRLPEQEGDDAEPHAAWEITAVILTGSPERTSLVVTVGGDSFSAACQNAALLAIGTLHQCYPNELQHSPYRYHPCRGGARDYATFRDASSEDDATIMHLARMVEAYDAAHIDFHQMVRRGLVENNMKILELRQENLQLKKDLDAVDAQLRQLKIAQGEVCRPKRRRVCRSLKITARKSTSRPELVRQSLAWTCFVETPRAEPAPVVPQEDGASGVGSTEDVLLLTFHGETRRSAATGEGSHPEGSNHNNHGSPPPPPPPPPPPPPDTNSILTQILAXQANMMAAFLHHIQNPPQHNAPPPPPQHSKLAEFLRIRPPTFSSSNNPVDALDWLHAVGKKLDTVQCSDEEXVIFAAHQLQGPASLWWDHFQAMQPEGQPITWARFTAAFRRTHVPAGVMALKKREFRELKQGNRSVMEYLHEFNNLARYALEDVREDEEKQEKFLAGMDPELSVRLVSGDYLDFQRLVDKSIRLEAKHKELESHKRRLANFRNQQGANQKVRYTATNPYPGRSSSQQQQQQQPRSAPRPQFVVRVPQPQQQQSQQGTRAPRPPTPAVQPGQGRRDVQGQQCLCFNCFEPGHFADKCPKPRCQQGQAPPRSNHGGKDVIRGRVNHVMAEDVLTTPDVIVGTFLIHSIPATILFDSGASHLFIFVPFVGRNQLGVERLRNPLLITTPGGVMTAKYYSPAVPIEIQGIPFSSDLILLDTKNLDVILGMNWLAQFQGVVDCARRTVTLYRGPEQPVVFFAPPTSVGSSELHQIRLSEIPIIREFGDVFPEELPGMPPKREIEFRIDLALGTTPLYKRPYRMAANELAEVKKQLEELKEKGYIRPSTSPWGAPVIFVEKKDKTKRMCVDYRALNEVTIKNKYPLPRIDDLFDQLKGATVFSKIDLRSGYHQLRIREEDIPKTAFTSRYGLYEFTVMSFGLTNAPAFFMNLMNKVFMEYLDMFVVVFIDDILVYSQSEEDHQHHLRLVLGKLREHQLYAKLSKCEFWLSEVKFLGHVISAKGVAVDPETVTAVTDWKQPKTVTQIRSFLGLAGYYRRFIENFSKIARPMTQLLKKEEKFVWSPQCEKAFQTLKERLVSSPVLILPDTRKDFMLYCDASRQGLGIFISHGHWNGWIIVELDSHRGNIPRDSLPLSPHFSLPL

SEQ ID NO: 19487 - protein, 1467 aa, Oryza sativa
  Clone ID: TF_OSC9454j.C1.p21.fg
MTGGSGEHPQHSPRTRGIIQHFERQVREHAEGLDEDVRVANDRLGQLEAAQIDTNSKLSSLERSLVAVNTSLAGILNTLERMGQDGHDGSARRNHNGHDANSSIAAREELEYAADTEHDEEVLGRPQRQQRRQRHGMGAPPRREVRDNDDSLGKIKFTIPCFDGKYDPDAYLTWELAIDQKFACHDFPENKRVRAATRMLRCGLVENDDAGMARFMGGLNREIQDILAYKEYNSINRLFHLACKAEREVQGRRASFRTNISAGRASSWTSSNAAAPSTRAAAPSSSSNKLRPSTTNSTPCPSEPTRGVAATPSKSSSSVASSGRTRDIQCLRCKGYGHVRKDCPSTRVMIVRADGGYSSASDLDEETYALLATNNAGEGDAPHQDEEHIGAEAAEHYESLMVQRVLSAQMERAEQNQRHTLFQTKCVIKERSCRVIIDGGSCNNLASAEMVEKLALSTQPHPQPYYIQWLNSSGKERTRSEHLIAANELEKHKKKPTNSVQNNKNEIKLKGSCFIATKSDLDEVDTDTVVCYALVCKETLFPIEDTPISLPPPVTNLLQEYADIFPKEVLPGLPPIRGIEHQIDLIPGASLPNRAPYRTNPEETKEIQRQVQELLDKGFVVVYFDDILIYSRSIEDHHGHLRVVFDALRDARLFGNLEKCTFCTDRVSFLGYVVTPQGIEVVQAKVEAIHSWPVPTTITQVRSFLGLAGFYRRFVKDFSTIAAPLHELTKRNVTFTWAAAQRNAFDTLKDKLTHAPLLQLPDFNKTFELECDASGIGLGGVLLQEGKPVAYFSEKLSGPSLNYSTYDKELFALVRTLETWQHYLWPKEFVIHSDHESLKHIRSQAKLNRRHAKWVEFIESFPYVIKHKKGKENVIADALSRRYAMLSQLDFKIFGLETIKEQYAHDDDFKDVLLNCKEGRTWNKFVLTNGFVFRANKLCIPASSVRMLLLQEAHGGGLMGHFGVKKTEDILADHFFWPKMRRDVERFVARCTTCQKAKSRLNPHGLYMPLPLPSVPWEDISMDFVLGLPRTKKGRDSIFVVIDRFSKMAHFIPCHKSDDATHVADLFFREIVHLHGVPNTIVSDRDTKFLSHFWRTLWAKLGTKLLFSTTCHPQTDGQTEVVNRTLSTMLRAVLKKNIKMWEECLPHVEFAYNRSQHSTTKKCPFEIVYGLLPRAPIDLLPLPTSERVNFDAKYRAELMLKLHKTTKENIERMNIKYKLAGSKGKKHVAFEPGDLVWLHLRKDRFPNLRKSKLLPRADGPFKVLQKINDNAYKLELPADFGVSPTFNIADLKPYLGEEDELESRMTQMQEGEDDEDIPSNDTTTPIAQQGPMTRARARSRLFLARQEQQQRGVGVPVAKAQHPCGSCSRTANVVSFPKSKFILLSSKDREPPLLHQNPYGNVGEAHTRGSNTSNWKEGKTESVSQLLPTTVYTSNGRGVPLLCSLLKREREQFPPHSFLPHATNLKA

SEQ ID NO: 19488 - protein, 827 aa, Oryza sativa
  Clone ID: TF_OSC400773j.C1.p43.fg
MAAHAVDLMRPEKFAGENFKRWQSKVRHYLVSQNLWYVIPQVRPLTQQQHADFETSNDVALGVMLSLLSDQLYDVYGAYTSAAELWEALDRKYSVSDAGRWIYVVEQYHDFKMIDNQSVVKQAHDLLTIMGEMSQFGAIVNPKFVVGGIIAKLPPFWRDFATALKHKREDMMVDDLIAHLDVEEKARAKDTPTMAQEGTSNANLVQKSNAKNKGKQAVQNHKAKNTTNFKKKITCYVCGLEGHKANKCRDRKGKKNVQQGQKIANMVVSEAGSSGYDSTPVALSAYQSFDWWVDTGANIHAATGSSILMGNGSGAAVLGVGKVDLKLTSGKIISLKNVQHAEAENQLERKIKRLRSDRGGEYVSDEFSQFCADHGIIHEITPPYSPQSNGVAERKNRTLTDLVNAMLDSAGMSKAWWGEAVLTACHILNRVPTKNSEITPYEGWKGRKPSLSYLRTWGCLAKVNVPITKKRKLGPKTIDCVFLGYAHNSVAYRFLVVRSDVPDVPINMVTESRDATFFEDIFPMKANETWEITDRPFGCKPVGCKWIFKKKLRPDGTIEKYKVRLVAKGYTQKEGEDFFDTYSPVARLTTIRVLLSLAALYGFVVHQMDVKTAFLNGELDEEIYMEQPDGFVALGQEGKVVKLLKSLYGLKQAPKQWHEKFDRTLTSAGFIVNEADKCVYYRFGGGEGVILCLYVDDILIFGTNINVVSELKSFLSQKFDMKDLGEADVISNIKLIKGEDGIMLSQAHYVEKVLTRFGLMDCKIAPTPYDPSLKLRKNKGLGKDQLRYSQIIGSLMYLACATRPDISYAVSKLSRFTSNPEMIIGKH

SEQ ID NO: 19489 - protein, 1261 aa, Oryza sativa
  Clone ID: TF_OSC406055j.C1.p2.fg
MSTEIGDKKMNDINGGNTTSKSSGGTFSGYTFILPILLDVSLLILFAMAALRYFVNVDAYFILSILKLYTSSTVTRSTHIVNVMFIILIFWIKICRIMTKFPTIQKLVRSFSVVGFAASLKPHAFDGSNYKRWKARALLWLTVMHCFFVSRGKPSEPPLSLEEEAKFEATDCLFRGAMISVLADNIVDVYMHIPSGKDMWDALEAKFGVSDAGSKLYVMEQFYDYKMVDDRSVVEQAHEIQMLKELENNNGELPDKFVAGGIIAKLPPSWSDFATSLKHKRQEFSVTDLIGSLGIEEKVRAKDNRCKKIEGGSSANLMQKKNPHASNNNNKKVKPDVKPKATTNFKKKGKGKVKGDFFLCGKPEHWAKDCPEHKDKKFANMVISEGRGTLGYGKFLPTVLSVCHSPDWWVDTGANIHVCADISLFSSYQVGRGSSFLMGNGSLAAVHGVGTVDLKFTSGKIVQLKNVQHVPSIKKNLVSGSLLCRDGFRLVFESNKCVVSKYGTFIGKGYDSGGLFRFSLDDMCNKVVNHVNDDDDESNVWHLRLCHVNFGCMTRLANMSLIPKFTLVKGSKCHTCVQSKQPRKPHKASEARNLAPLELVHFDLCEMNGVLTKGGKKYFMTLIDDCTRFCYVYLLKTKDEALHYFKIYKDEVENQLERKIKRLRIPTKHKEVTPFEEWERKKLNLSHLRTWGCLTKVNVLIAKKRKLEPKTVDCVFLGYAIHSVGYRFLIVNSGVPDMRVGTITESRDATFFENEFPMKNAPSTSSQEPILSPEHFVPIEHIDQTLEENPEEDNIVATRKSKRQRTAKSFGYDYIVYLVDDTPRTIEEAYSSPDADYWKEAVCSEMDSIMSNGTWEVVEHPYGCKPVGCKWVFKKKLRPDGTIEKYKARLVAKGYTQKEGEDFFDTYSSVACLTTIRVLLALAASHGLLVHQMDVKTAFLNGELEEEIYMDQPDGLNVIEEVKDFLSKSFEMKDLGVADVILNIKLLRGVEGGITLVQSHYVDKVLSRFGYSDCKAAPTPYDPSVLLRKNRRIARDQLRYSQIIGSLMYLASATRPDISFAVSKLSRLVSNPGDDHWHALERVMRYLKGAMSYGIHYARYPKVLEGYSDSNWISDADDIKATSGYVFTLGGGAVSWKSCKQTILTRSTIEAELTALDTATVEAEWLRELLMDLPVVEKPVPAILMNCDNQTVIIKVNSSKDNMKSSRHVKRRLKSVRKQKNSGVIALDYVQTAKNLADQFTKGLPRNVIDCASREMGLRPT

SEQ ID NO: 19490 - protein, 337 aa, Oryza sativa
  Clone ID: TF_OSC420396j.C1.p6.fg
MLLSSQLPLIRSQNQNQYVFDQAFAPQVNELPMPEEDVPFCHDCREQGHYALNCPWVYAKEATSFGSAGQTSLNQPPCTKSSLQPSVQSGEPNGDNPLNPRKCFPPSLSYHVGSRTKQAKGKKSKTQKRKAPMRTEEEVRKMTITSTEWPPAGITIPRRQRGNTFRGARQLTQHLLSHGGRVSDSEGSDQVSSDDEDEPPRHLGEEEMESKACTRCGEIGHVASMCLTLCPHCEEDHPPGECPTSPTILCTDSLSKELSSMEEVVSLPDLLQAEQRAINLRRAIPSRRPLSASTSNQKEASPVNDSNMQSYHIITEPIKDDAVTRTMPAISLQNQNE

SEQ ID NO: 19491 - protein, 466 aa, Oryza sativa
  Clone ID: TF_OSC900190j.C1.p18.fg
MEMDEVGGRWTFSRTNEGYTSCGPVVEMSWHRVGALLLGAQSCLPVPKVPAVGGIGSVLLSMARMGWKLCHVFHPYTVVMFNREKGKNVSGYASSNSSFQLNLPLASRELTRAHPWSIPSMLLSSQLPLVGSQDQNQYVFDRAFATQVNELPMPEEDVPFCHDCREQGHYALNCPWVYVKEAPSLGLAGQTSLNQPPHTKSSLQPSVQSRELNGENPLNPGKCFPPSLSYHVGSHTKQAKGKKSKNQKRKAPMRTEEEVRKMTITSTEWPPAGITIPRRQRGNTFRGARQLTQHLLSHGGRVSDSEGSDQVSSDDEDESPRHLGEEEMESKACTRCGEIGHVASMCLTLCTHCEEDHPPGECPTRKVTCFLCEAPTILCTDSLSKELSSIEEVVSLPDLLPAEQRAINLRRAIPSRRPLSASTSNQKEASPVNDSNMQSYHIITEPIKDDAVTRTMPAISLQNQNK

SEQ ID NO: 19492 - protein, 1186 aa, Oryza sativa
  Clone ID: TF_OSC413662j.C1.p7.gm
MGRPRKPAKPAAAASSSASAAAAFSIGNCKVEIHGSSLRCQSTEQEEEELTISGPRGAKIVVSVDGAKSSSVGDGFDFILLSPSDVNERNKALLQVVKLYSFCINHFQCTSKASESGYEEDAELAAAEERRRATAQTAAAAARAARLAAAELAAARAEAEAEVAEDAARAAEVEVETLRSSINGSIASDITADRELEELARGRARERAERWAAVHPHGGGGGPRDRAPADGNPDGRGRAGGSPEPARGPRRQRGSPSPDRCHGHHGVQTVVRDFGPGGGWPTLTKTNYIEWAAVMRVRLQVRHMWEAVWYSDVDYDEDRRALDALIAAVPPEMQFSLSQKRTAKEAWDAIAAARIGSDRACKSTLQALRKEWENLALKPGEDVDDFALRLNTLLQKMVQYGDNTYNEERAVEKLFRCVLEKYRQIARSIESLLDLSMMSIEEALGRLKVVDGDEPQPLSGPTTIGGKLHLTREQWEASQGDRRKGESSPSTGGLKPRKARGGVQLRWARRRAEGGARRGAQGGAAGNHKPARDDTCRNCGKLGYWAKDCRQPRRGQAHVAQVEEEEPALLLAHASIELPPAAPAAVAFLHLDEPKVLVSLCNGSSNDKADGWYLDTGATHHMTGRREFFTEIKGVVSVTFTAKSGEHRLLTGVYYIPALRNSIISVGQLDENGSRVLVEDGLMRIWDRRRRLLAKWHERFGHLHFEALKRLSAKEMVRGMPCLDHVEQLCDVCLVTKQRRLPFPQQTNFRAKERLELVHGDFKGEAADAIRRAQAAAEAECGRKLRVLRTDNGGEFTAAEFASYCADEGIQRHYTAPYNPQQNGVVERLNQMALDGRTPYEAWHGRKPAVSHLRVFGCLAFAKELGHIGKLDDRSTPGVFIGYAEGSKAYRILDPETQRVRTTRDVVFDEGRGQLFFTERVYPSPRASTDSNTNTLSGHDFDYDELFVDTTPAARVERSPVEFATSLSHDGERIDAYHDGEQLRYRTMEDLLGDQPVPGLVPRDMEAQLHLACDDGEPRSFVEVEKHAAWRATMQSKMDAVQENRTWELADLPRGHRAITLKWVFKLKRDEAGAIVKHKTRLVARGFMQQEGIDYDDAFSPVARMESVRLLALAAQEGWGVHHMDVKSAFLNNLKEEVYVHQPPGFVLPGKEGKVLRLHKALYGLRQAPRAWNAKLDSTLKGMGFE

SEQ ID NO: 19493 - protein, 2978 aa, Oryza sativa
  Clone ID: TF_OSC415120j.C1.p11.fg
MDYQQSDGIYDMPDEPLFTLNLRLSHSNDLDRVHKSFTSKIDKARTYLTGRFRRIVKVKGSKRKEFVLTPEGPDVFTIAFTDGTNRVTAIIEERNMWLRGFQTADGHIFEFNDEHGNEGKDANLDDKTDEMNNQFNGNDKTRDEEVKDEEEAIKDQKLKVIKDPKMKAIKDRGMNKHCKQKEKSKAACGSKKKQVNRKDQLNPKKYIRGSVLLRHDSNYGSLLGPNRLPLFQVVYSTMRDMLQNLAHFDPNNYSDKHKRSMAALIIHTAETLKNKYISSLVLNSFNPHIGARLQALDDMGAAHINGWSTASELILKSIHLPSKVWDFQQQEFSKCNEFYKNQCWTTDPNVAMKSIVFLKGDAYTDTTASTVMAPPSGKPGAISLLKPPVIFNGLNFREYALHMQIHMCSQWLWGYLIGDRPCPPCPTLPAEPAISADADENTKRGLLDDLAAAMEAYQTDLSLYETWLEQEAYAKAILVGSMEQYEPRNDAMFLAVVNEAQSLRQLDATVDEFFRKMSAVWRQMDLQGADVCRTCTCCQRQRVQTETTRLYEFLSRLRPEFEPVRAQLLARRPRPSLLETLPELRAEETRCREAGIGIAQQSTSVLVAQGLPSQVHVSAQPVVVPSPLPVAAGAPSTPSGIVCGYCSKTGHTASMCYKKKRDQSHRTSQGSRQGSSQSSSQQITSTEQELVRLLRRLMTTASTSTHGSAAQASSLPPPPPSSSGILSSWFLDSGASFHMTPDSTHLSSMSPPDTPLTVQTANGTSLPVVDRGTLSTSSFRVPTVSHVPKLTMQLMSAGQITDHGCRIILEADSCCVQDRRTGLLVGTGPRRHDSQRLWELDWLHLPSDASTSQSVGSTASALATSATTTFAQWHRCLGHLSGARLSTLIGSWGLRSCFWRHRSTFQFLSIYQQFATMVRTQYDSSIRVFRADSVAPAPASRYDLRDRHAIRPAPKYGFTAAAIVEPTTYREAIAHQEWQQAMAEEIAALERTKTWDVVPAPTHVTPITCKWVYKIKTRSDGSLERYKARLVARGFQQEHGRDYGETFAPVAHMTTIRTLLAVASIRQWSISQLDVKNAFLNGELHEEVYMQPPPGYSVPDGMVLRLCRSLYGLKQAPRAWFERFSSVVTDIGFKASDHDPALFVHTSSCGRTLLLLYVDDMIITGDDSRFINLVKKRLSDQFLMSDLGPLRYFLGIEFSSTSSGFYLSQEKYIQDLLARSGLTDKRVVDTPMELGIHLRPNDASDHSDRRSLSAYCVFLGSSLIAWKTKKQTAVSRSSAEAELRAMAALTAEITWLRWLLEDFGVFVSPPTPLLSDSTGAISIARDPVKHELTKHIGVDASYMRSQVQNEVVALHLNASVGVVVMGGINHILMHNWEVPCAAEISLKASSYSAKIPIVEGEVKVFTDHHNQLYTSHLKLSSKEGQKEVKVRLYVDGFLALTAKSCQVENEEVLRDEKGETCTDNDKVTRCLGRVFAVMDRESAWGLDDVRGGQRSCGILRLELMHVVDGDSIWHTMELLCAYGMRSRIWKESKFERSNKVVIHFKSSSIYVSPGFGGLTGGAPAEYIKFEMKSGEALDDYLSRFNKILSNLRSVDSSYDANYPQSKISRHFLNGLDMSIWDMKVTSIQESVNMSTLTLDSLYTKLKTHEMNILSRKVDSKSSALVSSSSSLVVDVSSSMPSFLAAFNATSDDQLEQIEEEDLALVANRIARAMNNARNRKRGGPNRCFECDSIDHLRSHCPKLGRGKREDKDGEKTNNNKPNNYNKSKGSNQGRKMENLRKAFQQVCAAFEPLSDVDGESGDDDNGKNVSDVCFMARGESDTELKSLIPNDDDCENCEVLMNDISKIRDVNAAHDLKNRSSLACSFALHTRTLDELFLTKKLLQKYQIAFHASLMFNMISAKKLKQPHDVLDCSTCNLNKMKLKDALGRVEYMEDVVKNNEVLSFPKCRKSKGVMVDCENCANLEKEVSYLKNSLLRFSDGKKNLNMILDQLKVLVLEVALVARKENVWIVDSGCSRHMTGDKNWFSSLKKASKTESIVFADASTSAVVAIGLVKVNEKFELKNVALVKDLKYNLLSVSQIVDENSEVHFKKTGSKVFDSCGDSVLNISRYGRAFKADFENSVSPVTTCLVAKFDKDVMFWHCRLGHVGFDHLTRLSGLDLVRGLPKLKKDLDLVQGEDGRIFEDESDYDDDDEVGSAGQTRHQAGQTAGTPPVRPAHEERSDRPGLSGSGTVDVDRDGPPENSTSTSTGTKRGSTSEVAAPLYIQRRHPPEQIIGNIGERTTRSKVTTHDVCANSAFVASFEPKDVSHALTDESWINAMHEELENFERNKVWTLVEPPSGHNIIGTKWVFKNKQNEDGLIVRNKARLVAQGFTQVEGLDFDETFAPVARIEAIRLLLAFAASKGFKLYQMDVKSAFLNGFILEEVSVKQPPGFENPDFPNHVFKLSIALYGLKQALRAWYDRLKNFLLAKGFTMGKVDKTLFVLKHGDNQLFVQIYVDDIIFVCSTHALVVDFAETMRREFEMSMMGELSYFLGLQIKQTPQGTFVHQTKYTKDLLRRFKMENLQPISTPIGSTAVLDPDEDGEAVDQKEYRSMIGSLLYLTASRPHIQFAVCLCAGFQASPRASHRQAVKRIMRYLNHTLEFGIWSSTSSSICLSGYSDADFGGCRIDRKSTSGTCHFLGTSLIAWSSRKQSSVAQSTAESEYVAAASCCSQILWLLSTLKDYDLTFEKVHLFCDNTSAINIAKNPVQHSRTKHIDIRFHFLRDHVEKGDVELQFLDTKLQIADIFTKPLDSNRFAFLRGELGIIHPFGMVTRCLGRVFAVMDRESAWGLDDVRGGQRSCGILRLELMHVVDGDSIWHTMELLCAYGMRSRIWKESKFERSNKVVIHFKSSSICVSPGFGGLTGGAPAVRPVASRQSDRRTHGGQTGGDRSRRQAFSAVRPINLHRSDRRSSGGQTGATTSVRPRSIDFEGNFYFR

SEQ ID NO: 19494 - protein, 366 aa, Oryza sativa
  Clone ID: TF_OSC406457j.C1.p9.fg
MSWDWYRDRGFVGSGSRRFPYDTLLSGAVIRRYQIGFSVPLKQMAPQPTCQTCVRNYLGSEEDPALSENPNQLAEQVTNQVAKTGNAVPGPNKEVATRNQHSSMDIYQILANQTQMLQEIAQNLASIQQQLLLPQPKVNPDKSKNEAAEIQGTQSVEGTDTHKEKNKEFLNVMITGMKTPLRANNCPNLQNSINESVSQENSMVKEGSCHKRKTLPSEVDMQDVPQCQTLQSCQNLSKTPTLKSKKIRHVPGFICFICHEIGHYMRHCPQKPYMDALLQANMSISRMPFYPQGSPNSPNVNAVRPTFPDDKRAKASCDMCQDIQEKKEMQEYKRRKVMSLEIQAKEDLCRKNKLASTILSESISFN

SEQ ID NO: 19495 - protein, 404 aa, Oryza sativa
  Clone ID: TF_OSC408556j.C1.p1.hg
MMKEILQVVVEPITWLEFTVAFKKIHVPSGVVALKKREFRALTLRSCSITEFLHEFNCLARYAPEDVCMDEKLVDKAIRQEDKYNRMEEKKHKIAHNQPIKEQGNMPVVCFNYDEPGHFADKCPKPRRVETAPIQNKSIAPAPKARVNHVAAAEAQGAPDVISMRDYPNVFPVDLRGIPPKRDIEFRIDLVMRTSPTITRWQRRNKGSSGGGNDEDILYYYPLAKTRDTNRSGFLNEHALEPRNRSTTSSLVITRVETRMTSPRRLIPVCELKNTNKDKILDVKLFSQVPLTRKEFGRGTKTIGKFIFLAFHPYKECPNMSTKDPAAVREEEERRWSGLLHRGTWSSVTAGSTPPTPAVAATKEALADAAVGERWIRALSARVWGKKRNKIWTGGWSGLEFGIS

SEQ ID NO: 19496 - protein, 1811 aa, Oryza sativa
  Clone ID: TF_OSC100811j.C1.p5.fg
MEEKYSAKPFVFDGHNFVIWKARMEAYLQSQGHNVWNKVKSPYTMPDDADITPANVAQVDFNYRARNAIIGGISSGEFNRVQHHQSAHDMWTALCNFHEGNNDIQLVRQNQFHKEYQRFEMHPGESIDSYFKRFEEIVSKLRSVGKEFSDNDNARHLLNCLDYGVWEMKVTSITESAPLSDLTMDKLYSKLKTHEMDVFHRKGLKHSMALVADPSGSTSSNDLAFVCGGFSLAALHSVTEEQLEKIPEDDLALFTRKFSRAYKNVRDRKGGKTNEPFVCFECGEPNHIRVNCPKLKKKSDKTTKKLEGQGRKGKKDLIKKAIHKVLAALEEVQLSDIDSDDDDQEKGDKDFSGMYCLANNEDFINLCLMALEDKDDSSEHHEVCLDDIPSLDGSLCDDSCSDNDSVDDELSKERMTHLMIEISDKYRSSKYKIEKLKYENDGMALEIARLRSMIPEEDTCSTCASYLSEINLLKDKLKSCALGAGNPSSASAACSTCYEMKVDMSLLEMELKELKENFVHDRISSCENCPILTSDNDELRQQVDMLRTKNDLLESYATKEPVHSSCANCVILETELKDTKIVIDYVKSVDSCSSCISLKVDLESAKRENSYLQQSLERFAQGKKKLNMILDQSKVSINNQGIGYDFAESLRIGTHEILGVTDGMIELAQKPITFKSAGFIGNTSSSTPKTSEPKMVPMTSKSKSVELPRPKNPKQVEHKQNQKQTKPVEKTKYECTYCGKAGHLVGFCFRKARKKRQERLRTRRAARVPERFECACHCHSSGVSRFPRRDVHPRCDLAGLGQNRHGHLAYNYAHNTKDACTPRMDFGVGRSNSWLVDSGCSRHMTGEAKWFTSLTRASGDETITFGDASSGRVMAKGTIKVNDKFMLKDVALVSKLKYILLSVLQLCDENLEVRFKKDRSRVLDASESPVFDISRVGRVFFANFDSSAPGPSRCLIASENRDLFFWHRRLGHIGFDHLSRISGMDLIRGLPKLKAPKDLVCAPCRHGKMTSSSHKPVTMVMTDGPGQLLHMDTVGPAQVQSVGGKWYVLVVVDDFSRYSWVYFLETKEETCGFFQSLARSLALQFPGALRAIRSDNGSEFKNSAFESFCDSSGVEHQFSSPYVPQQNGVVERKNRTLVEMARTMLDEFTTPRKFWTEAISTACFISNRVFLRTILHKTPYELRFGRRPKVSHLRVFGCKCFVLKSGNLDKFESRSLDGIFLGYATHSRAYRVYVLSTNKIVETCEVTFHEASPGARPEISGVPDESIFVDKDSDDDDDDSIPPPLDSTPPVQETAFVASFEPKNVCHALSDENWVNAMHEELENFERNKVWSLVEPPLGFNVIGTKWVFKNKLGEDGSIVRNKARLVAQGFTQVEGLDFEETFAPVARLEAIRILLAFAASKGFKLFQMDVKNAFLNGVIEEEVYVKQPPGFENPKFPNHVFKLDKALYGLKQAPRAWYERLKTFLLQNGFEMGAVDKTLFTLHSGIDFLLVQIYVDDIIFGGSSHALVAQFSDVMSREFEMIMMGELTFFLGLQIKQTKEGIFVHQTKYSKELLKKFDMADCKPIATPMATTSSLGPDEDGEEVDQREYRSMIGSLLYLTASRPDIHFSVCLCARFQASPRTSHRQAVKRIFRYIKSTLKYGIWYSCSSALSVRAFSDANFAGCKIDRKSTSGTCHFLGTSLVSWSSRKQSSIAQSTAEAEYVAAASTCSQVLWMISTLKDYGLSFSGVPLLCDNISAINIAKNPVQHSRTKHIEIRYHFLRDNVEKGTIVLEFVESEKQLADIFTKPLDRSRFEFLRSELGVIHPYGLI

SEQ ID NO: 19497 - protein, 1006 aa, Oryza sativa
  Clone ID: TF_OSC28501j.C1.p1.fg
MVKTRNGSRDSNNASGSGEQINGPRASGASDSSSSPPPENPTIAQVLDNQTQMMTMMMQQMQQQYHQVLQQSKLLEFLRVKPPTFSGTTNPIEANDWLHAIEKKLNLLQCNDQEKVAFATHQLQGPASVWWDNYMVTRPAGTEVTWAEFCKSFNKAQVPEGIVAQKKREFRSLQQGTRTVIEYLHEFNRLARYAPEDVRTDAERQEKFLSGLDDELTNQLISRDYEDFEKLVDKAIRQEEQCNKMNRKRKAAQLRTPQGKSQKPCFTMGHQGEPSTMIIRQHRPYHPGSFNKNYKSGSHSNSEQHSLNPTPSPLMIPAQSVQSALPAQPEQPKKFGEKPKLCFNCNEPGHMVGTCPKPRRARLKFVQAHVNHASAEEAQSAPEVILGTFPVNSTPAVILFDSGATHSFISKRFAGAHGLSLVKLKIPMRVHTPGGGMTTSHYCPSVTVEIQGLIFPANLILLESKDLDVILGMDWLTRHRGVIDCASRTIKLTNAKGEVVTVEKTTKKLEDIPIARDYPEVFPEDLTTMPPKWDIEFKIDLVPGTAPIHKRPYRMGANELAEVKKQVDEQLQKGYIRPSTSPWGAPVIFVEKKDKTKRMCIDYRALNEVTIKNKYPLSRIDDLFDQLKGAIMFSKIDLRSGYHQLRIREEDIPKTTFITRYGLFECTVMSFGLTNAPAFFMNLMNKSEEEHEQHLRLVLEKLKEHQLYAKFSKCDFWLKKVQFLGHVVSAQGVAMDPGNVESVTKWTLPRTVTQVRSFLGLAGYYRRFIENFSKIAKPMTQLLKKEEKFIWSAECNRVLKNSNDGNYLTHDLELAAVVHALKIWRHYLIGNRCERRWLELIKDYNMGIHYHPGKANVVADALSRKSYCNVAWVEKLCCEVQRDLEHLNLGIVEHGFVAALEAQPTQVEQVRIAQASDPEIAELKKNMRVGKARGFVEDEQGTIWMGERLCVPENKELKDLILTKAHQTQYSIHPGSTKMYQDLKEKFWWVSMRREIAEFVALCDVC

SEQ ID NO: 19498 - protein, 1721 aa, Oryza sativa
  Clone ID: TF_OSC900160j.C1.p4.fg
MEGMRWHRVVTVVCIPNELHPSSSRSTVSNVFPALESLKFRDMGAWEEWSEFKDEHFPQLKYLSIVRCAKLTVLPNFTSGPKQRIRSCEKLLQPLCQNIRRNLMKYIPPPSELSYACMAEGSTPSFFFLRDILRCMHSKKGKDPMLLNHRYHVKELPNGKIPINPKCVNIVFGIPRTGVTIKPNNPKHEFIKILKHLFRVSSGTQISVQQLQVHLKEIIAPTTSNQPSMQYANVCLDVNNIAKYNWAEDMLSTIRNAVLQLLYLDYIDASGCNVPWGEPRVAFWTDQAAKPLKNADMGSGLYAVYGSCKDSIYSLSIFSVTRTAAVEVETLRSSINGSIAGDITADKELEELARGRARERAERWAAAHLHGGGGGGGPRDRAPADGNPDGRGRAGGIPEPARGPRRQRGSLSPDRRHGHHGVQTVVRDFGPGGGWPTLTKTNYIEWDAVMRVRLQVRHMWEAVWYGDVDYDDDRRALDALIAAVPPEMQFSLFQKRIAKEAWDAIAAARIGSDRARKSTLQALRKEWDNLAFKPGEDKMVQYGDDTYDEERAVEKLFRCVRENYRQIARSIESLLDLSTMSIEEALGRLKVVDSDEPQPLSGPITIGGKLHLTQEQWEASQGDKRKGESSSPTGGRAQGGATGNHKPARDDACRNCGKLGHWAKDRRQPRRGQAHVARVEEEPALLLAHASIELPPAAPAAAAFLHLDEPKVLVSLCNGSSNNKADGWYLNTGATHHMTGRREFFTEFDSSVRGSVKFGDASGVEIKGVGSVTFTAKSGEHRLLTGVYYIPALRNSIISVGQLNENGSHVLVEDGLMRIWNRRRRLLAKVTRGTNRLYILSAQVAQPVCLAARRDDEAWQWHERFGHLHFEALKRLSAKEMVRDMPSLDHVEQLCDVSVVTKQRRLPFPQQTSFRAKERLKLVHGDLCGPVTPATPGGRRYFLLLVDDLSCYMWAECGRKLRVLRTDNGGEFTAAEFASYYADEGIQRHYTTPYSPQRNGVVECRNQTVVGKAQALLKQRGMPAIFWGKAVVTAVYILNRSSTKALDGRTPYEAWHGRKPAVSHLRVFGCLAFAKELGHIGKLDDRSTPGVFIGYAKGSKAYRILDPETACAHSARRSVRRRARVGMGQGGGRWFDSDVRRLHHQPATPRAPAPTATPPSTSTPTPARVERSSVEFATLLSHDGERIDAYHDGEQLRYRTMKDLLGDQPVPGLVPRDLEAQLHLACDDGEPRSFTEAEKHAAWRAAMQSEIDAVQENRTWELADLPRGHRAITLKWVFKLKRDEAKAIVKHKARLVERGFVQQEGIDYDDAFAPVAQMESVRLLALAAQEGWGVHHMDAKSVFLNDDLKEEVYVHQPPGFVIPGKKGKVLRLHKALYGLRQAPRAWNAKLDSTLKGMGFEQMEEMPCWWDVEVAAFKEEMKATFQMSDLGPLSSYLGIEVHQDDSRITLRQTAYAKRIVELARLTDCNPALTPMEERLKLNRNSMTEEVDATQYQRLVGSLRYLTHTRPDLAFSVGYVSRFMQRPTTEHQQAVKRIIRYVAGTLDHGLYYPRCPGKAHFVGYSDSDHAGDIDTSKSTSGILFFLGECLVSWQSVKQQVVALSSCEAEYMAASAASTQALWLARLLSDLLGRDTGAVELRVDSKSALALAKNPVFHERSKHIRVRYHFIRSYLEEGSIKASYINTKDQLADLLTKPLGRIKFLKRCSRIGMAQLPHKTTHKT

SEQ ID NO: 19499 - protein, 972 aa, Oryza sativa
  unsure (1)..(972): unsure at all Xaa locations
  Clone ID: TF_OSC15292j.C1.p1.np
LSNNYXCYNCRYSRACVPTDADITTSDTHNNPPTVIQGPITRARTMTMEGTRRHLEKDLEPWRIIWDVQVKVEAQTKSTSGAIRSPGPVCTKTGAQHYYLSLDCVPLIYIYLAFLAPHITSAQHRFLIPAIADYAFXVSFALLTQKDITEAVAKSVQDAFTKIGFLNHMERLDKRISTLSDQVAALETPSNEEVVSGDDDAHPEDTVYDSSGYIDALATRQAWLRHRLRTNRTGMGGTRHQQGNNNNHVPDDPYAKVKFKIPSFSGYYDAEKYLDWEMTVEQKFNAHLVPEQHRVRQASSEFKDFAIMWWAGLSDEGVLPTAWEELKVAMRDRFVPPSYHRDLRKKLMRLEQGDKSVQDYYGELQKGLFRFVMLAEKELQGCDHQGKSKASTYTPRTTPSAGLPKAISFRASFQPAGKRPAAFGASAAPKPSPPPRPAESGKGSSQVPAKSASYVASTGRIQCHRCXGFGHVQKDCPSQRAYVATEDGYITTSDVEEEEEEEEVEDEDGEFGRDDTTDYRTIIVQRVLSTQIFFVINNRRARVIIDGGSCNNFIFFVINNRRARVIIDGGSCNNFVVVKRFRKSKDSVDCDVVPMQACSLLLSVDCDVVPMQACSLLLGRPWNMIMMLHTMQVAKTVFPPKKDNLSPSSKAKGIKSKGGVMLATKCDIAENSDDDMCYFLICKQALVSLDDIASSIHLVVTNLLQEYEDVFPAEIPPGLPNRAAYRTNLEETKEIQRQVQDLLDHGYVRQRLSPCAVPVILVPKKDGSWRMCVNCRAINNITIXYRHPIPRLDDMLDELCGSIIFTKIDLRSGYHQIRMKLGDEWKTAFKTKFGLYEWLVMPFGLINAPSTFMRLMNEVLRPFIGRFVVVYFDDILIYSKSLNEHMDHLRAVFNALRDARLFATLEKCIFCTERVSFLGYVVTPQGIEVDESKIEAIRSWPVPETITQVRSFLALCDPSRSAATHGCRSNTS

SEQ ID NO: 19500 - protein, 2351 aa, Oryza sativa
  Clone ID: TF_OSC18058j.C1.p2.fg
MSWHRAGVLLLGAQSCLPVPGVPAVGGVGSVLLFMARMGWELCHVFRPYTVVMFNREKGKNVSGYASSNSSFQLNPPLASRELTRAHPWSIPSMLLSSQLPLVRSQDQNQCVFDRAFATQVNEPPMPKEHVPFCHDCREQGHYALNCPWVYAKEAPSFGLTGQTSLNQPPRTKSSLQPSVQSREPNGENPLNPGKCFPPSLSYHVGSRTKQAKGKKSKNQKRKASMRTEEEVRKMAISSTEWPPAGITIPRRQRGNTFRGARQLTQHLLSHGGRVSDSEGSDQVSSDDEDESPRHLGEEEMESKACTRCGEIGHIASRCLTLCPRCEEDHPPGECPTRKVSLKGSRLKYHIVTRSIHNSRSEKYLVDKGRKVIKMFNREKGKNVSGYASSNSSFQLNPPLASRELTRAHPWSIPSMLLSSQLPLVRSQDQNQCVFDRAFATQMDRQWMYADRRSKEFIDGVHYFLRVAEANRQRGFICCPCNKCKNQKEYSAYRTIHFHLFESGFMPSYNCWTSHGEQGVEMEEDEVEDDNIPDFAQYVGFEGNQTGEEEIAADGNDVADDLGQMLQDAKEVCESEKEAHKLDKMLEDHRTSLYPGCEQGHKKLDTTLEFLQWKAKNGVSDKAFGDLLKLVKNILPEGNKLPETTYEAKKIVCLLGLEVQKIHACPNDCILYRGEEYENLEACHVCKALRYKIRRDDPGKVDGNKGNARMMRWHTEERQQDGMLRHPADGSQWRNIDRKFKEFGKDARNIRFGLSTDGMNPFGEMSSGHSTWPVTMCIYNLPPWLCMKRKYIMMSIIIQGPKQPGNDIDVYLRPLVEDLKLLWKKEESTYLKHCRKVVYMGHRRFLAANHPVRKKGKHFEHKADHRTKPKHRSGKTVFGKGPGSQPIESEDGHAAMWKKNSIFWELPYWEFLDVRHAIDVMHLTKNLCVNLLGFLGVYGKSKDTLEARNDLKHMEQRGDLHPEPKEKGSHYLSAASYTLSKAEKESMFGCLESIKVPSGYSTNIKRIISTKEKKFTNLKSHDYHVLMTQLLPVVIRGILPDNVRATITKLCAFMNAISQKVIDPDRLEALQNEVVQCLVSFELIFPPSFFNIVTHLLCHLVKEISILGPVYLHNMFPFERYMGVLKKYVRNHARPEASIAKGYGTEEAIEFCIEFIEDLRPIGVPESRHEGRLRGKGTLGRKAIMTVDNNLFRKAHFTILQHSSLVAPYNEEHLALVRARNIAQDMKSTNQNSAVRVDAMGHDGTTATYYGAIEDIWEFDYGPLKVPLFRCQWVRLTGGGVMIDDSGMATVDLNKVGYSDEPFVLANDVTQVFFVKDMSSKGKKGRGPDEPKRQVVLPGKRKIVGVEDNTDEDYDQLDGQPPFTVTIDPSILLSIEDTPYSYSDHKEGTIVRRKWLTAMSNRYYTYLNEEGNVERDAEGNQQGHVERDVEGNQEEEASGSQPSVGQKRARGQRGAAKKLEGRHIITEVEEDGRPSAPAEAAKNYVRHSGWVVRDNVPISTVYWRRTRARGDHESFVLDSEKEMLWTTMLETFTLPAGTEDKVKRWTLKKMAEQFQSFKGDLYQKYILKGQTPNFDTFPKLRDHWDEFVVYKTGEQGQVMMERNKENAAKKKYHHHLGSGGYSVAMPKWEEMEASLLERGIEPATANWPKRSKFWYYAHGGTLNPADGSLVFGDQIREAARRLTDVVEASSQGTFQPDRDRDELTLALQTPEHLGRTRGKGVIPWKIGFKEDIQTYRSRMRSKRDTEAKIADLESWVSSYELNMQEEVARKVDERMAAHRSHDPQPTIPPAMLSPSGNHSSYASTGQVGSQSMDAMQTQDESTCPVDDITQRTPCELYIPFKNLSIKVASGMAIPTDPSGTYHCRPIPAGYSKVEVELVEGAYEDLELDYPGGDGGTSSSLGDKRRLMDHLLRLRHLLLRILHRLLLMLRQHRLHFRLQHRLLLRLLHRLLLGLLHLLLRKLLFRHLQSQGPPPAPPPAHTRATKKAKVDAAKNKDPGYDCTQEELDVYVASEVKRQFKPRSPEKKIPIDPSVRNFFRGMSAPVKEAIKLSDYERTLKKASSGKSKPVPQLGEQPNHDIEPLVTGEDMTIEEFITDTGLTTDQLLGVEPIEKAEVKYMYKLGKPLVKPELVQSLPTQMYKFHQLYMEMSATGREMIGARIRDPDFLQGDDILWINFKGIYELYQLDALDVSIMSCWILFHWVLLLFDLSACTVNVYDSMDKKESTFDKVFELIDRAWYQFRHLVRGNWRERLKRKFKFPCAKQKQGTNLCGYYVCEYCHCLVDQIITTRELDFIRMRDNLTTHKEFIAAVQEQLMGFINEEILDPKGEFYYDGNTIHRSLASELVTTTTSKS

SEQ ID NO: 19501 - protein, 971 aa, Oryza sativa
  unsure (1)..(971): unsure at all Xaa locations
  Clone ID: TF_OSC401958j.C1.p2.np
LSNNYXCYNCRYSRACVPTDADITTSDTHNNPPTVIQGPITRARTMTMEGTRRHLEKDLEPWRIIWDVQVKVEAQTKSTSGAIRSPGPVCTKTGAQHYYLSLDCVPLIYIYLAFLAPHITSAQHRFLIPAIADYAFXVSFALLTQKDITEAVAKSVQDAFTKIGFLNHMERLDKRISTLSDQVAALETPSNEEVVSGDDDAHPEDTVYDSSGYIDALATRQAWLRHRLRTNRTGMGGTRHQQGNNNNHVPDDPYAKVKFKIPSFSGYYDAEKYLDWEMTVEQKFNAHLVPEQHRVRQASSEFKDFAIMWWAGLSDEGVLPTAWEELKVAMRDRFVPPSYHRDLRKKLMRLEQGDKSVQDYYGELQKGLFRFVMLAEKELQGCDHQGKSKASTYTPRTTPSAGLPKAISFRASSQPAGKRPAASGASAAPKPSPPPRPAESGKGSSQVPAKSASYVASTGRIQCHRCXGFGHVQKDCPSQRAYVATEDGYITTSDVEEEEEEEEVEDEDGEFGRDDTTDYRTIIVQRVLSTQIFFVINNRRARVIIDGGSCNNFIFFVINNRRARVIIDGGSCNNFVVVKRFRKSKDSVDCDVVPMQACSLLLSVDCDVVPMQACSLLLGRPWNMIMMLHTMQVAKTVFPPKKDNLSPSSKAKGIKSKGGVMLATKCDIAENSDDDMCYFLICKQALVSLDDIASSIHLVVTNLLQEYEDVFPAEIPPGLPNRAAYRTNLEETKEIQRQVQDLLDHGYVRQRLSPCAVPVILVPKKDGSWRMCVNCRAINNITIXYRHPIPRLDDMLDELCGSIIFTKIDLRSGYHQIRMKLGDEWKTAFKTKFGLYEWLVMPFGLINAPSTFMRLMNEVLRPFIGRFVVVYFDDILIYSKSLNEHMDHLRAVFNALRDARLFATLEKCIFCTERVSFLGYVVTPQGIEVDESKIEAIRSWPVPETITQVRSFLAQAKPLRQTPPHRGDSIF

SEQ ID NO: 19502 - protein, 563 aa, Oryza sativa
  Clone ID: TF_OSC101997j.C1.p12.gm
MEQLCCPGRRVASASSRGEEGRPPAVAHQGGSSQAGSEQSTKAGGGEMRGQMNKGGKLQQYRPVQKEKNQTEEKIATSAVTPQTATQQPTPPPNSRTGMQTNPQRIFCHRCKGFGHMARDCSNVVFCINCAKPTHRTEDCIYDKQPRPMAKLVGYGAPGLGCILIQNTKPDPPKEHNNPLAMISTVFGGELTEAQLEQGFTQQFKWNWVWKAKAMPNGSFQMRFRNKIKFDELANFDYFNVKGTDVQVNVKEWTQKSEAVGKLHIVWVKITGIPEEMKGYQALYEIGSNLGPVLEVDMATFRASNVIRAKVGMMELVRERKQVLVPELMLGEHKIKCAQILRDMELAMQLQKGDWDKENRVSFDMGLNQEDKDKVDPGDSEDYMDSQESKGSFAKRLGINLTEEALGSQDEEMRRSKRLKDKEDKRMKAFEGQAELLRYITAFYKDLFGHSKLNNIKLDMGAEALTVLIQRAEDNKLIEGWWQDILRDKYLKNKNLAGISVKAGDSHFWQGLMEVKNIFYKFCSKKVGDGENTCFWEDNWIGEVGSKSKKIGTGSQTHKAGGK

SEQ ID NO: 19503 - protein, 129 aa, Oryza sativa
  Clone ID: TF_OSC3190j.C1.p1.np
SVVVEKLFSAVPDKFLHIVGTIEQWGDVSKMSVAEAIGRLRAFEESLKGRRREPEVEYLLLTRAQWENLYIKEKKGEDGSDSNSSERKVDRKKVKCYNYGIHGHYANECRKPKKEEALLATADDEPTLL

SEQ ID NO: 19504 - protein, 349 aa, Oryza sativa
  Clone ID: TF_OSC32359j.C1.p1.fg
MPRFDSNGSPQIHSPPTVGSPSPSSVGREPEKFRVERVWRRRSGLDWGSEVVNLGGEAQSKAISVDLQGWFVGEWRIKGIQAEGGVGVHRGEKGRPPAVAHQGGSSQAGSEQSTKAGGGEMRGQMNKGGKLQQYRPVQKEKNQSEEKIATSAVTPQTATQQPTPPPNSRIGMQTNPQRIFCHRCKGFGHMARDCSNVVFCINCAKPTHRTEDCIYDKQPRPMAKLVGYGAPGLGCILIQNTKPDPPKEHNNPLAMISTVFGGELTEAQLEQGFTQQFKWNWVWKAKAMPNGSFQMRFRNKIKFDELANFDYFNVKGTDVQVNVKEWTQKSEAVGSCILSGSKSLEFLSK

SEQ ID NO: 19505 - protein, 817 aa, Oryza sativa
  unsure (1)..(817): unsure at all Xaa locations
  Clone ID: TF_OSC417104j.C1.p2.np
KMRAKDTASKKVEXGSSAYLVXKKNPCASHNNKKVKPKATTNFKKKDKEKAKGNCFVCGKPVHWVKNCPDHKDKKSANMVISDGGGTSGYGDFLPTVLFVHSPDWWVHTGANIHVCANIFLFSSYQVGRGSSLLRGNGLLVAAHGVGTVNLKFTSGKTVQHVTSIKKNLVSGSLLCRDDFRLMFEFNKCVVSKGKGYDSGGLLHFYLDDMCNDVNHVSNDDESNEWHSRLCHMNFGCTRLANMSLILKFTLVKSSKCHTCVQAKQPRKPHKASEVRNLTPLELVYSDLCKMNSVLTKGKKYFMTLIEDCTRFCYVYFMKTKNKALQYFKIYKVEVENLLERKIKWSRSKRGEEYFPNEFISSCEESGFIHERTHTYSPXSNGVAKRKNHTLNVFVNAMLDTVELSTEWWGEAILTVCHVLNRIPTKNKQVTPFEKRKKKKLNLSYLRIWRCLAKISVSIVKKCKLGPKTIDCVFLGYAIHNVRYKLLRVNFGVSDMRVGTITQYREVTFFENEFPMKDTHSTSSQEPIYPSFVLIEHNDRTPEENPEEDNIVATRKSNRQRTTKSFGDDYIVYLVDDTPRTIEEAYSSPDANYWKEAVCDEMDSIMSNGTWEVVECLYGCNHVGCKLVFKKKLRPNGIIKNYKARLVAKGYTQKEGEDFFYTYSPVARLTTIRILLALGASHGLLVHRMDVKITFHSGVLEEKIYMDQPDGYVLKGQEGLMCKLLKSFHGYREAPKQWHEKFNKTLIFVGFVLNEANKCVYYXYGWGETVILCLYDDDILISRTSLNVVEEVKDFLSKCFQMKDLRMASVILNIKLQ

SEQ ID NO: 19506 - protein, 405 aa, Oryza sativa
  Clone ID: TF_OSC101188j.C1.p2.fg
MSFPDEEEDEAFLLAVAATEEAALASSDSSKRRRLSMTSSTSSSPTSATPPPAAVPEGPYLAALKGSHSSAWKQQQETLSQARKRPGGSQTLATPGSGSGSGGAQVARGGACFKCGDSCHWARECPQSVPATGGGGGGGAFGGSGGGGGGYGDAGGAVEEKACPCGAGSCLVLTSNTPRNPGRKFYRCPMRDNGGCNYFEWCDNPSPGPANVSGNTVFQSDTSVAHMLCPCGAGACLILTTKTGKNVGRQFYRCPANQGISYLFLNVRSGHISREVALVAISSGVMNNSLGQLLHCKLQHNIILMLLQVAKFPARGAPPPASNAGKRTIGQRTAQINLQILILTKVGEHLLLQALPMRVSSVVRAGTGPVIAPPQIVVLVPSPAMSSPLLLWAHGTATDTDSRYL

SEQ ID NO: 19507 - protein, 1049 aa, Oryza sativa
  Clone ID: TF_OSC400742j.C1.p1.fg
MAAPAPSSFNLRSILEKEKLTGTNIMDWYRNLRIVLRQEHKEFVLTQPFPADLPNNAPAAQRREHEKRCNDYLDISCLMLATMSPELQRQYEALDAHTIITGLRNMFEDQARAKRFNTSKSLFACRLAEGNPVSPHVIKMIGYNETLEKLGFPLSQELATDLILQSLPPSFEPFILNFNMNNMNRTLTKLPGMLKTAEESIKKNSNHVMVMHKRKPNNKKSGPAKDAECFFCKEAGHWKRNCKKYLEQLKQKQQDGKSSTSEGYGFRSVDNDCSVYYNDIFYFHAPMMSGLYIVNLNGYSVYNINAKRQRPNDLNPTFIWHCRLGHINEKRMEKIHRDGLLHSFDFESFETCESCLLGKMTKAPFTGQSERASELLALVHTDVCGPMSSTARGGFGYFFTFTDDFSRYGYVYLMRHKSESFEKFKEFHNEVQNHLGKTIKYLRSDRGGEYLSLEFGNHLKECGIVPQLTPPGTPQWNGVSEWRNRTLLDMVRSMMSQTNLLLSFWGYALETTAFTLNSVPSKSVDKTPYEIWTGKRPSLSFLKIWGCEVYVKRLQSDKLTPKSDKCFFVGYPKETKGYYFYNQEEGKVFVARHGVFLEKEFISRKDIGSMLWKHRFREDPKKKTDVDGNVHIYKARLVAKGFRQIQGVDYDETFSPVAMLKFIWIVLAIAAYFDYEIWQMYVKTAFLNGNLDEDVYMTQPKGFDDPQSAKKICKLHQSIYGLKQASRSWNIRFDEVVKALGFVRNEEEPCVYKKISGSALVFLILYVDDILLIGNDISMLESVKTSLKNSFSMKDLGEAAYILGIRIYRDRSKRLIGLSQSTYIDKVLKRFNMQDSKKGFLPMSHGINLGKNQCPQTTDERNKMSVIPYASAIGSIMYAMLCTRPDVSYALSATSRYQSDPGESHWIAVKNILKYLRRTKDMFLAYGGQEELVVNGYTDASFQIDKDDFRSQSGFVFCLNGGAVSWKSSKQDIVVDSTTEAEYIAASEAVWIKKFVSQLGVMTSASSSMDLYCDNSGAIAQAKEPRSHQKSKHILRQYHLIREKWVEEM

SEQ ID NO: 19508 - protein, 1371 aa, Oryza sativa
  unsure (1)..(1371): unsure at all Xaa locations
  Clone ID: TF_OSC26817j.C1.p2.np
MIISGGYCLMGCIKDIPTLKGDNYAEWKRKLDIAFILGEVDWVLTTPCPIEPAALVRVENESDADWQRRQRDNAPLIMSYYIEQKKWSLVNKKCLAVVKNTIEPTLLGSIPECDTISKYLERIKSQFTGSSKTYATQLIKQLVTERYHGGGVRDHILRMSNMASKLKPMDLGISDDFLVHLVMASLPKHFDNFVVNYNISPEKWNFEKLIANCVQEEERIKESNGDSINYVKDNKKKNYKSPSSKAKQPQHLPXQQQFTVEKDQCLHCKKTGHYKNDCPDFLKIIMAKKGENIITFVNESHYVGYSRSTWWIDSGATIHVSNCLKGFRSTRTTXRSESSIRVANGVEAKVEAVGDLRLELANGFTLLLRDDFYVPSLQRNLISVSKLDFGGXDCHFGNGKCKLWYNNACIGLAVLQDELYLLSLPENVNVVSSLTKENKKRKRTPDVSSKLWHCRLGHISRGRIERLVKNEILPPLELSDLEQCIECIKRKFVKSIKKCAKRSVGIFEIIHTDICGPFPVKSVDGYDSFITFTDDYSRYGYIYSIKERSEALDKFKIFKAEVENQHDIKIKVVRSDRGEYYGRHTPYGQFHGPFARFLLENGIVAQYSTPGEPQQNGSERCNRTLMDMVRSMMSYSTLPLGLWMEALKTSIHILNIVPSKLVPKTPYELWTGRVPSLAHLHVWGSPAEAKIFNPNLGKLDPKTVSCHFIGYPERSKGYRFYCPNSYTKFVEMRHAVFLEDEMIRRSSVVREIDLEERQVSVPAPSTQEPFFSLPADVVPAMHDVAVLAPIVTPPVATLNESEEPVLQDSTKIIAIQEEEVQQPQTENVPNVEAPRRSERVRRSAICDDYEVYNIDSHMEDDPTSYEEAMRSVRSSEXLEAMKDEMKSMKLNDVWDLEEIPKGAKTVGCKWVYKTKYESRGNIEKFKTRLVAKVFTQREEIDYNETFSPVSCKDSFRIIMALVAHYDLELHQMDIKTVFLNGDLKEKVYMAQPKGFVVKGNENMGCRLKRSIYGLKQASRQWYLKFDGTIKKFGFRENIEDNCIYTKFKNGRFIFLVLYVNDILLASSDVSVLQETKKFLSSNFDMKDLGEASYVLGIEIHRDKTKYVLGLSQKTYIEKVLKKFNMYRCSATPAPIVKGEKYGTWRCPKNQYELNEMKTKPYASAVGSLQYAXVCTRPDLAFITGLLGRFQSNPGPEHWKLVKKVLRYLQGTKGLMLSYRRSEPLRIVGYSGSDFAKDNTKSTSGYVFTLAGGAISWKSSKQTITAGSTMYAEFIACYEATGQVNXRKKFIPGLKVVDSIEKPLKLCCDNEPTVMYAHNNQSSGAAKHIDIKYYFVKDKVRDXTISLEHIRTERMLVDPLTKGLPPNVFKEH

SEQ ID NO: 19509 - protein, 1975 aa, Oryza sativa
  Clone ID: TF_OSC409754j.C1.p2.fg
MDRQWMYADRRSKEFIDGVHYFLRVAKANRHKGFICCPCNKCKNQKEYSASRTIHFHLFESGFMPSYNCWTSHGEQGVEMKKDKVEDDNIPDFAQYAGFEGNQTGEEERDADGNDVADDLGQMLQDTKEYCESEKGAHKLDKMLEDHRTSLYPGCEQGHKKLDPTLEFLQWKAKNSVSDKAFGDLLKLVKNILPEGNKLPKTTNKGNARMMRWHAEERQQDEMLRHPADDSQWRNINRKFKDFGKDARNIRFGLSTDGMNPFGEMSNGYSTWPVTMCIYNLPPWLCMKRKYIIMPIIIQGPKQPGNNIDVYLRPLVEDLKLLWKKEGVPELPYWEFLDVRHAIDVMHLTKNLCVNLLGFLGVYGKSKDTLEARNDLKHMEQRGDLHSEPKEKGSHYLSPASYTLSKAEKENMFECLESINVPSGYSTNIKRIISTKEKKFTNLKSHDCHVLMTQLLPVVIRGILPDNVRATIIKLCAFMNAISQNVIDPDILEALQNDVVQCLVSFELIFPPSFFNIMTHLLCHFVKEIGILGPVYLHNMFPFERYMGVLKKYVRNRAHPEASIAKGYGTEEVIEFCVEFIEDLRPIGGYEINGYTFYTRAQDIKCTNQNSVVRIDAMGHDGTTGTYYGAIEDIWELDYGPLKVPPFRCQWVRLTGGGVTIDDSGMTMVDLNKVGYSDEPFVLSNDVTQVFYVKDMSSKGKKGRGEASRPPLLILARPDQGRSDRPHSGGMTGVPWQSTSQYYKWYQSLVSLDWASPPRVKMLNEVNHVGKAPMFNGTNYSTWKIKMSTHLKAMSFHIWSIVDVGFAITGTHLTGIDHRNLQLNAQAMNALFNCLSQEECDRVSNLETAYENWNKLAEIHEGTSEYNDAKLHFLKIQYETFSMLPHESVNAMYGRLNASWGKINTNDMYKLKKKEMEETSPSKKCIAPQAEVEDKGKGKCFECGEKRHFASKCPSKDDDGDKSSMKKSGGYKLMKKLKKEGKKIEVFIGDWVTNEESSASSGSEEEGGDDASSKKKKMAVVAIKEAPSPFAPLCLMAKGSSKVTSLSDSESDDDCDYASYDELVSMFEELHAYSEKEIVKFKALKKDHASLEVLYEELKTSHERLTISHEKLKEAHDNLLSTYQHGALIDVGISCVLLDDSATCHIAHVASSSISTSCDDLVDMPSSSSSPCVSICDASLVENNELKEQVAKLNKSLERCFKGKNTLDKILSEQRCILNKEGLGFIPKKGKKPSHRATRFVKSNGRLMMVALLLDMWVLLYSVVNYRTGGSHWVLDSGCTQHMTGDRAMFTTFDVGGNEQEKGVRLTKFESRCDEGFLLGYVSNSKAYRVYNKNKGIVEETADVQFDETNGSQEGHENLDDVGDEGLMRAMKNMSIRDVKPIEVEDKPSTSTQDEPSTFATPSQAQVEVEEEKAQDPPMPQRIHTALSKDHPIDQVLGDISKDVQTRSRVASICEHYSFVSCLEPKHVDEALCDLDWMNAMHEELNNFARNKVWTLVERPRDHNVIGTKWVFRNKQDEKGLVVRSKARLVAQDFTQVEGLDFGETFAPVARLEAIRILLAFASCFDIKLFQMDVKSAFLNGEIAELVFVEQPPGFEDPKNPNHVYKLSKALYGLKPAPRAWYERLRDFLLPKDFKIGKVDTTLSTKIIDDDFVVCQIYVDDIIFGSTNEVFCKEFGDMMSREFEMSMVGELSFFLGLQIKQLKDGTFVSQTKYIKDLLKRFGLEDAKPIKTPMATNGHLDLDEGGKPVDLKLYHSMIGSLLYLTASRPDIMFSVCMCARFQAAPKKCHLVAVKRILRYLKHSSTIGLWYPKGAKFKIVSYSDLDYAVCKVDRKSTSGSCQMLGRSLVSWSSKKQNSVALSTAEAEYVSAGSCCAQLLWMKQTLLDYGISFTKTPLLCDNDSAIKIANNPVQHSRTKHIDIRYHFLKDHVVAKSDIVISHIRTENQLADIFTKPLDETRFCKLRNELNVIDFSNVA

SEQ ID NO: 19510 - protein, 1497 aa, Oryza sativa
  Clone ID: TF_OSC101289j.C1.p1.fg
MDISRANEGYTSCGPVVEMSWHRADVLLLGAQSCLPVPEVPAVGGVGSVLLCMARMGWKLCHVFHPYTVVMAGSINRRGLDLTGFVLELRGMCVVLGYPHGVDYQGKQLPEQEGDDAEPHAAWEVTAVILTGSPERTSLAVTAGGDSFSAACQNAALLAIGTLHQCYPDELQHSPYRYHPRRGGARDYATFRDASSEDDATIMHLARMVEAYDAARIDFHHMVRRGLVENNMKILELRQENLQLKKDLDTVEAQLCQLKIAQGEMVTTRRSAATGEGSHPEGSNHNKHGSPPPPPSPPPPPPPDTNSILTQILAQQANMMAAFLHHIQNPPQHNAPPPPPPPQHSKLAEFLRIRPPTFSSSNNPVDALDWLHAVGKKLDTVQCNDEEKVIFAAHQLQGPASLWWDHFQATQPKGQPITWARFTAAFRRTHVPAGVMALKKREFRELKQGNRSVMEYLHEFNNLARYTPEDVREDEEKQEKFLAGMDPELSVRLVSGDYPDFQRLVDKSIRLEAKHKELESHKRRLANFRNQQGANQRPSQGRKDAQGQQRLCFNCFEPGHFVDKCPKPRRQQGQAPPRPNNGGKDVIRGRVNHVTAEDVLTTPDVIVGTFLIHSIPATILFDSGASHSFISVPFMGRNQLGVERLRNPLLITTPGGVMTAKYYSPAVPIEIQGIPFPLDLILLDTNNLDVILGMNWLAQFQGVVDCARRTVTLYRGPEQPVVFFAPSTSVGSSELHQIGLSEIPIVREFGDVFPEELPGMLPKREIEFRIDLAPGTTPLYKRPYRMAANELAEKDKTKRMCVDYRALNEVTIKNKYPLPRIDDLFDQLKAATIFSKINLRSGYHQLRIREEDIPKTAFTTRYGLYEFTVMSFGLTNAPTLDKFVVVFIDDILVYSQSEEDHQQHLRLVLGKLREHQLYAKFSKCEFWLSEVKFLGHVISAKGVAVDPETVTAVTDWKQPKTVTQVRSFLGLAGYYRRFIENFSKIARPMTQLLKKEEKFVWSPQCEKAFQTLKEKLANVVADALSRKSRCNTLGVCGIPPELNQQMEALNLSIVGRGFLATLEAKPTLLDQIREAQKNDPDMHGLLKNMKQGKAAGFTEDEHGILWNGNRVCVPDDRELKQLILQEAHESPYSIHPGCTKMYLDLKEKYWWGGYDSIWVVVDRLTKVARFIPVKTTYGGNKLAELYFARIVSLHGIPKKIVSDRGSQFTSHFWKKLQEELGTRLNFSTAYHPQTDGQTERLNQILEDMLRACVLDFRKTWDKSLPYAEFSYNNSYQASIQMAPYEALYGRKCRTPLLWDQVGESQVFGTDILREAEAKVRTIRDNLKVAQSRQKSYADNRRRNLEFTVDDFVYLRVTPLRGVHRFQTKGKLAPRFMGPFRIIARRGEVAYQLELPASLGNVHDVFHVSQLKKCLRVPSEQADSEQIEVREDLTYVERPVKILDTMERRTRNRVIRFCKVQWSNHAEEEATWEREDELKAAHPDLFASSSESRGRDSV

SEQ ID NO: 19511 - protein, 709 aa, Oryza sativa
  Clone ID: TF_OSC400523j.C1.p2.fg
MSWHRAGVLLLGAQSCLPVPGVPAMAGSVTRRGLDMTGFVLELRGICVVLGYPHGVDYQARPLPEQEGDDAEPHAGWEVTAVILSGYPERTSLAVTAGGDSFPAACQNDALLAIVTLHQRYPDELQHSPYRYHPRRGGARDYATFRDASSEDDATIVHLARMVEAYDAARIDFHQMVHRGMVENNMKILELRQENLQLKKDLDVVEAQLHQLKIAQGEVCRPKRRRVCRSQKITARKSTSRPELVRQSLAWTCFVETPRAEPAPVVPQKGEASGVGSTEDALLLTFRPGPSQRRNAATGDGNQPEGSNHNHQGNPPPPPPPPPPPPPDTNAILTQILAQQANMMTAFLHHLQNPPQHNAPPPPPQHSKLAEFLRIRPPTFSSSNNPVDALDWLHAVGKKLDTVQCSDEEKVIFAAHQLQGPASLWWDHFQATQPEGQPITWARFTAAFRRTHVPAGVMALKKREFRELKQGNRFVMEYLHEFNNLARYAPEDVREDEEKQEKFLAGMDPELSVRLVSGDYPDFQRLVDKSIRLEAKHKELESHKRRLANFRNQQGANQRVRYTNPYPGGSSSQQQQQQQQPRSAPRPQFVVRVPQPQQQQNQQGTRAPRPPTPTVQPGQGRRDAQGQQRLCFNCFEPGHFVDKCPKPRRQQGQAPPRSNNGGKDVIRGRVNHVTAKDVLTTPDVIVGSSEMCFRKNYPVCRPSERLSSG

SEQ ID NO: 19512 - protein, 1357 aa, Oryza sativa
  Clone ID: TF_OSC400610j.C1.p9.fg
MSWHRAGVLLLGAQSCLPVPGVPAMAGSINRRGLDLTGFILELRGMCVVLGYPHGVDYQGKQLPEQEGDDAEPHAAWEVTAVILTGSPERTSLAVTAGGDSFSATCQNAALLAIGTPHQRYPDELQHSPYRYHPRRGGARDYATFRDASSEDDATIMHLARMVEAYDAPRIDFHQMSWVISFNSQLSLFAGSVWDFHMVTTRRSATTGDGNQPEGSNHNNHGSPPPPPPPPPPPPPDTNSILIQILAQQANMMAAFLHHIQNPPQHNAPPPPPPPQHSKLAEFLRIRPPIFSSSNNPVDALDWLHAVGKKLDTVQCNDEEKVIFAAHQLQGPASLWWDHFQAMQPEGQPITWARFTAAFRRTHVPAGIMALKKREFRELKQDNRSVMEYLHEFNNLARHAPEDVRMDPELSVRLVSGDYPDFQRLVDKSIRLEAKHKELESHKSRLANFRNQQGANQRVRYTNPYPGGSFSQQQQQQPRSAPRPQFVVRIPQPQQQQSQQGTRAPRPPTPAVQPGQGRRDIQVQQRLCFNCFEPGHFVDKCPKPRRQQGQAPPRPNNGGKDVIRGRVNHVTAEDVLTTPDVIVGTFLIHSTPATILFDSGASHSFISVPFVGRNQLGVERLRNPLLITTPGGVMTTKYYSPAVPIEIQGIPFPSDLILLDTKNLDVILGMDCEFGDVFPEELPGMPPKREIEFRIDLAPGTTPLYKRPYRMAANELAEVKKQLEELKEKGYIRPSTSPWGAPVIFVEKKDKTKRMCVDYRALNEVTIKNKYPLPRIDDLFDQLKGATVFSKIDLRSGYHQLRIREEDIPKTSFTTRYGLYEFTVMSFGLTNAPAFFMNLMNKVFMEYLDKFVVVFIDDILVYSQSEEDHQQHLRLVLGKLQEHQLYAKLSKCEFWLSEVKFLGHKQPKTVTQVRSFLGLAGYYRRFIENFSKIARPMTQLLKKEEKFVWSPQCEKAFQTLKEKLVSSPVLILPDTHKDFLVYCDASRQGLGCVLMQEGHVVAYASRQLRPHEGNYPTHDLELAAVVHALKIWRHYLIGNRCEIYTDHKSLKYIFTRSDLNLRQRRWLELIKDYDVGIHYHPEDEHGTLWNGNRVCIPDDRELKQLILQEAHESPYSIHPGSTKMYLDLKEKYWWVSMKREIAEFVALCDVCQRVKAEHQRPARLLQPLQVARFIPVKTTYGGNKLAELYFARIKKLQEELDTRLNFSTAYHPQTDGQTERLNQILEDMLCACVLDFGKTWDKSLPNAEFSYNNSYQASIQMAPYEALYGRKCRTPLLWDQVGENQVFGTDILREAEAKKCLRVPSEQADSEQIEVREDLTYVERPVKILDAMERRTRKRVISFCKVQWSNHAEEEAT

SEQ ID NO: 19513 - protein, 1788 aa, Oryza sativa
  Clone ID: TF_OSC400722j.C1.p34.fg
MSWHRAGVLLLGAQSCLPVPGVPAVGGIGSVLLSMARMGWKLCHVFRLYTVVMAGSVTRRGLDMTGFVLELRGMCVVLGYPHGVDYQARPLPEQEGEDAEPHAGWEVTAVILSGSPERTSLAVTAGGDSFPAACQNAALLAIGTLHQRYPDELQHSPYRYHPHRGGARDYATFRDASSEDDATIVHLARMVEAYDAARIDFHQMVRRGMVENNLKILELRQENLQLKKDLDAVEAQLHQLKIAQGEDCRPKRRRVCRSQKITARKSTSRPELVRQSLAWTCFVETPHAEPAPVVPQEGEASGVGSTEDALLLTFRPGPSQRRNVNTGDGNQPEGSNHNHQGNPPPPPPPPPPPPPDTNAILTQILAQQANMMTAFLHHLQNPPQQNAPPPPPQHSKLAEFLRIRPPTFSSSNNPVDALDWLHAVGKKLDTVQCSEEEKVIFAAHQLQGPASLWWDHFQATQPEGQPITWARFTAAFRRTHVPAGVVALKKREFRELKQGNRSVMEYLHEFNNLARYAPEDVREDEEKQEKFLAGMDPELSVRLVSGDYPDFQRLVDKSIRLEAKHKELESHKRRLANFHNQQGANQRVRYTNLYPGGSSSQQQQQQQQPRSAPRPQFVVRVPQPQQQQNQQGTRAPRPPTPTVQPGQGRRDAQGQQRLCFNCFEPGHFVDKCPKPRRQQGQAPPRSNNGGKDVIRGRVNHVTAEDVLTTPDVIVGTFLIHSIPATILFDSGASHSFISVPFVGRNQLGVERLRNPLLITTPGGVMTAKYYSPAVPIEIQGIPFPSDLILLDTKNLDVILGMNWLAQFQGVVDCAGRTVTLYRGPEQPVVFFAPPTSVRSSEVHQIGLSEIPIVREFGDVFPEELPGMPPKREIEFRIDLAPGTTPLYKRPYRMAANELAEVKKQLEELKEKGYIRLSTFPWGAPVIFVEKKDKTKRMCVDYRALNEVTIKNKYPLPRIDDLFDQLKGATVFSKIDLRSGYHQLRICEEDIPKTAFTTRYGLYEFTVMSFGLTNAPAFFMNLMNKVFMEYLDKFVVVFIDDILIYSQSEEDHQHHLRLVLGKLREHQLYAKLSKCEFWLPEVKFLGHVISAKGVAVDPETVTAVTDWKQPKTVTQVRSFLGLAGYYRRFIENFSKIARPMTQLLKKEEKFVWSPQCEKAFQTLKEKLVSSPVLILPDTRKDFMVYCDASRQGFGCVLMQDGHVVAYASRQLRPHEGNYPTHDLELAAVVHALKIWRHYLIGNRCEIYTDHKSLKYIFTQSDLNLRQRRWLELIKDYDVGIHYHPGKANVVADALSRKSHCNTLNVRDIPPELNQQMEALNLSIVGRGFLAALEAKPTLLDQIREAQKNDPDMHGLLKNMKQGKAAGFTEDEHGTLWNGKRVCVPDNRELKQLILQEAHESPYSIHPGSTKMYLDLKEKYCVSRQSTSDRPDFSNLSKYQNGNGMKLGWISSPDFQKPKVAQFIPVKTTYGGNKLAELYFARIVSLHGVPKKIVSDRGSQFTSHFWKKLQEELGTRLNFSTAYHPQTDGQTERLNQILEDMLRACVLDFGKTWDKSLPYAEFSYNNSYQASIQMAPYEALYGRKCRTPLLWDQVGESQVFGTDILREAEAKVRIFRDNLKVAQSRQKSYADNRRRDLEFAVGDFVYLRVTPLRGVHRFQTKGKLAPRYVGPFRILARRGEVTYQLELPASLGNVHDVFHVSQLKKCLRVPSEQADSEQIEVREDLTYVERPVKILDTMERWTRNRVIRFCKVQWSNHAEEEATWEREDELKAAHPDLFASSSESRGRDSV

SEQ ID NO: 19514 - protein, 662 aa, Oryza sativa
  Clone ID: TF_OSC900139j.C1.p9.fg
MSAPGAAAAAGATVAIPEDGAPGAGAAANVNVNGGSSASQSSGGTFSGSFSVVGFAAALKPHAFDGSNYKRCKARALLWLTAMQCFYVSRGIRSEPPLSPEEEVKFEASDCLFRGALISVLADNIVDVYMHMPSGKDMWDALEAKFGVSDTGSELYVMEQFYDYKMVDDHSVVEQAHEIQMLAKELENNNCELPDKFVAGGIIAKLPPSSSDFATSLKHKRQEFSVSDLIGSLGVEEKARAKDNRGKKVERGSSANMVQKKNPHASHNNKKVKPDVKSKATINFKKKGKGKAKGDCFVCGKSGYWAKDCPECKDRKSANMVGRGSSLLMGNGSLAAVHGVGTVDLKFTSGKTVQLKNMQHVPSIKKNLVSGSLLCREGFRLAFESNKCVVSKYGTFVGKGYDRGGLFRSSLDDMCNNHNVVNHISKNDESNVWHSQLCHDASLFTPIKLGGRRKSRTLTEMVNAMLDTAGLSMEWWGEAILTACHILNKIPMKHKEVTPFEEWKRKKLNLPYLRTWGCLAKVSVPIAKMRKLRPNTVDCVFLGYVIHSVGYRFLIVNSGVPNMRVGTIIESRDATFFENEFPMKHTPSTSSQETVIPHEHFAPIEHNDQTPEENPEEDNIVDTRKSKRQRVAKSFGDDYVVYLVDDTPRIIEEAYSSPNADY

SEQ ID NO: 19515 - protein, 267 aa, Oryza sativa
  unsure (1)..(267): unsure at all Xaa locations
  Clone ID: TF_OSC100123j.C1.p2.np
LVSMRDNLIRSRSQQFHGSTQCNPMGIPRQLHEDQLQPQVMANQTQTVEELLQQIRRRYEIYQMQQMQRQCXEPRQGHQPQMQVQVLAQNLNQSQSQEFPVSAPKTPVKMLSRSPKITSAKPPSNQREVSATCYDCGEXGHYVRNCPWKVFARSLEKDEKQCPGSNQAPSQPTDKKDEFTPEDAARIPKRQRRKNTFRGARQLTRHLIKYGPPRPEDDESGERFSADDDDDDDDDDNDATLDSFRERELKFKACTRCGVVGHTDSLC

SEQ ID NO: 19516 - protein, 420 aa, Oryza sativa
  unsure (1)..(420): unsure at all Xaa locations
  Clone ID: TF_OSC15733j.C1.p1.np
ILANRAIMMLPSPIQNPQNCSTHPPQHYLAEFRNRPTSFFSSNNPDALDWLHAVGKKLDTVQCSDEEKVIFAAHQLQGPASLWWDHFQATQPEGQPITWARFTAFGRTHVPAGVVALKKREFXELKQGNRSVMEYLHENNLARYAPEDVREDEEKQEKYLARMDPELSVRLVSGDYPDFQRLVDKSIRLEAKHKELESHKRRLANCRNQQGANQRVRYTNPYPGGSSSQQQQXQQQPRSAPRPQFVVRVPQPQQQQSQQGTRAPRPPTPTVQPGQGRRDASGPQHLCFNCFEPGHFADKCPKPRRQQGQAPPRSNNGGKDVIRGWVNHVTAEDVLTTPDVIGGTFLIHFIPATILFDSGASHSFIFVPFVGRNQFGIEKLRNPLLITTPGGVMTTKYYNPAGPIEIKGIPFSFPLSLFRA

SEQ ID NO: 19517 - protein, 797 aa, Oryza sativa
  unsure (1)..(797): unsure at all Xaa locations
  Clone ID: TF_OSC900144j.C1.p4.np
MSWHRAGVLLLGAQSCLPVPGVPAVGGIGSVLLSMARMGWKLCHVFRLYTVVMAGSVSRRGLDMTGFVLELRGMCVVLGYPHGVDYQARPLPEQEGDDAEPHAGWERTSLAVTAGGDSFPARTSLAVTAGGDSFPAACQSAALLAIGTLHQRYPDELQHSPYRYHPRRGGARDYATFRDASSEDDATLVHLGRMVEAYDAARIDFHQMVRRGMVENNMKILELRQENLQLKKDLDAVEAQLHQLKIAQGEVCHPKRRRVCRSQKITARKSTSRPELVRQSLAWTCFVETPRAEPAPVVPQEGEASGVGSTEDALLLTFRAGPSQRRSANTGDGNQPEGSNHHHQGSPPPPPPPPPPPPPHTNAILTQILAQQANMMTAFLHHIQNPPQHNAPPPPPQHSKLAEFLRIRPPTFSSSNNPMDALDWLHAVGKKLDTVQCSDEEKVIFAAHQLQGPASLWWDHFQATQPEGQPITWARFTAAFRRTHVPAGVVALKKREFXELKQGNRSVMEYLHEFNNLARYAPEDVREDEEKQEKYLARMDPELSVRLVSGDYPDFQRLVDKSIRLEAKHKELESHKRRLANCRNQQGANQRVRYTNPYPGGSSSQQQQXQQQPRSAPRPQFVVRVPQPQQQQSQQGTRAPRPPTPTVQPGQGRRDASGPQHLCFNCFEPGHFADKCPKPRRQQGQAPPRSNNGGKDVIRGWVNHVTAEDVLTTPDVIVGTFLIHSIPATILFDSGASHSFISVPFVGRNQLGIERLRNPLLITTPGGVMTAKYYSPAVPIEIQGIPFPSDKXRLHGL

SEQ ID NO: 19518 - protein, 1402 aa, Oryza sativa
  unsure (1)..(1402): unsure at all Xaa locations
  Clone ID: TF_OSC100588j.C1.p8.np
MEAYLQSQGHNVWNKVKSPYTMPDDADITPANVAQVDFNYRARNAIIGGISSGEFNRVQHHQSAHDMWTALCNFHEGNNDIQLVRQNQFHKEYQRFEMHPGESIDSYFKRFEEIVSKLRSVGKEFSDNDNARHLLNCLDYGVWEMKVTSITESAPLSDLTMDKLYSKLKTHEMDVFHRKGLKHSMALVADPSGSTSSNDLAFVCGGFSLAALHSVTEEQLEKIPEDDLALFTRKFSRAYKNVRDRKGGKTNEPFVCFECGEPNHIRVNCPKLKKKSDKTTKKLEGQGRKGKKDLIKKAIHKVLAALEEVQLSDIDSDDDDQEKGDKDFSGMYCLANNEDFINLCLMALEDKDDSSEHHEDFGVGRSNSWLVDSGCSRHMTGEAKWFTSLTRASGDETITFGDASSGRVMAKGTIKVNDKFMLKDVALVSKLKYILLSVLQLCDENLEVRFKKDRSRVLDASESPVFDISRVGRVFFANFDSSAPGPSRCLIASENRDLFFWHRRLGHIGFDHLSRISGMDLIRGLPKLKAPKDLVCAPCRHGKMTSSSHKPVTMVMTDGPGQLLHMDTVGPAQVQSVGGKWYVLVVVDDFSRYSWVYFLETKEETCGFFQSLARSLALQFPGALRAIRSDNGSEFKNSAFESFCDSSGVEHQFSSPYVPQQNGVVERKNRTLVEMARTMLDEFTTPRKFWTEAISTACFISNRVFLRTILHKTPYELRFGRRPKVSHLRVFGCKCFVLKSGNLDKFESRSLDGIFLGYATHSRAYRVYVLSTNKIVETCEVTFHEASPGARPEISGVPDESIFVDKDSDDDDDDSIPPPLDSTPPVQETGSPSTTSPSGDAPTTSSSAAEEINGGTSGPTAPRHIXNRHPGERVTRNRSYDLVNSAFVASFEPKNVCHALSDENWVNAMHEELENFERNKVWSLVEPPLGFNVIGTKWVFKNKLGEDGSIVRNKARLVAQGFTQVEGLDFEETFAPVARLEAIRILLAFAASKGFKLFQMDVKNAFLNGVIEEEVYVKQPPGFENPKFPNHVFKLDKALYGLKQAPRAWYERLKTFLLQNGFEMGAVDKTLFTLHSGIDFLLVQIYVDDIIFGGSSHALVAQFSDVMSREFEMIMMGELTFFLGLQIKQTKEGIFVHQTKYSKELLKKFDMADCKPIATPMATTSSLGPDEDGEEVDQREYRSMIGSLLYLTASRPDIHFSVCLCARFQASPRTSHRQAVKRIFRYIKSTLKYGIWYSCSSALSVRAFSDANFAGCKIDRKSTSGTCHFLGTSLVSWSSRKQSSIAQSTAEAEYVAAASTCSQVLWMISTLKDYGLSFSGVPLLCDNISAINIAKNPVQHSRTKHIEIRYHFLRDNVEKGTIVLEFVESEKQLADIFTKPLDRSRFEFLRSELGVIHPYGLI

SEQ ID NO: 19519 - protein, 1773 aa, Oryza sativa
  Clone ID: TF_OSC101237j.C1.p3.fg
MEEKYSAKPFVFDGHNFVIWKARMEAYLQSQGHNVWNKVKSPYTVPDDADITPANVAQVDFNYRARNAIIGGISSGEFNCVQHHKSAHDMWTALCNFHKGNNDIQLVRQNQFHKEYQRFEMHPGESIDSYFKRFGEIVSKLRSVGKEFSNNDNARHLLNCLDYGVWEMKVTSITESAPLSDLTMGKLYSKLKTHEMDIFHRKGLKHSMALVADPSGSTSSNDSAFVCGGFSLAALHSVTEEQLEKIPEEDLALFARKFSRAYKNVRDRKRGKTNEPFVCFECGEPNHIRVNCPKLKKKSDKTTKKPEGQGRKGNKDLMKKAIHKVLAALEEVQLSDIDSDDDDQEKGDKDFSGMCCLANNEDFINLCLMALEDKDDSSEHPEVCLDDIPSLDGSLCDDFCSDNDSVDDELSKERMAHLMIEISDKYRSSKYKIEKLKSENDGMALEIARLRSMIPEEDTCSTCASYLSEINLLKDKLKSCALGAGNPSSASVACSTCYEMKVDMGLLEMELKELKEKKFHDRIGRCENCPILTSDNDELRQQVAMLRTKNDLLESFATKEPIHSSCANCAILETELKDAKTVIDSIKSIDSCSSCISLKVDLESAKRENFYLQQSLERIGTHEILGVTDGMIELAQKPITFKSAGFIGNTSSSSPKTSEPKMVPMTSKSKPVELPRPKNPKQVEHKQNQKQTKPVEKTKYECTYCGKAGHLDFGVGRSNSWLVDSGCSRHMTGEAKWFTSLTRASGDETITFGDASSGRMMAKGTIKVNDKFMLKDVALVSKLKYNLLSVSQLCDENLEVRFKKDRSRVLDASESPVFNISQVGRVFFANFDSSAPGPSRCFIASENRDLFFWHRRLGHIGFDHLSRNSGMDLIRGLPKLKAPKDLVCAPCRHGKMTSSSHKPVTMVMTDGPGQLLHMDTVGPAQVQSVGGKWYVLVVVDDFSRYSWVYFLESKEETFGFFQSLARSLALEFPSALRAIRSDNGSEFKNSAFESFCDSSGVEHQFSSPYVPQQNGVVERKNRTLVEMARTMLDEFTTPRKFWTEAISAACFISNRVFLRTILHKTPYELRFGRRPKVSHLRVFSCKCFVLKPGNLDKFESRSVDGIFLGYATHSRAYRVYVLSTNKIVETCEVTFDEASPGARPEISGVPDESILVDEDSDDDDDDSISPPLDSTPPVQETGSPSTTSPSGDAPTTSSSAAEEIDGGTSGPTAPRHIQNRHPPDSMIGGLGERVTKNRSYELVNSAFVASFEPKNVCHALSDENWVNAMHEELENFERNKVWSLVEPSLGFNVIGTKWVFKNKLSEDGSIVRNKARLVAQGFTQVEGLDFEETFAPVARLEAIRILLAFAASKGFKLFQMDVKSAFLNGVIEEEVYVKQPPRFENPKFPNHVFKLDKTLYGLKQAPRAWYERLKTFLLQNGFEMGGVDKTLFTLHSGIDFLLVQIYVDDIIFGGSSHALVAQFSDVMSREFEMSMIGELTFFLGLQIKQTKEGIFVHQTKYSKELLKKFDMADCKPIATPMATTSSLGPDEDGEEVDQREYRSMIGSLLYLTASRPDIHFSVCLCARFQASPRTSHRQAVKCIFRYIKSTLEYGIWYPCSSALSVRAFSDADFAGCKIDRKSTSSTCHFLGTSLVSWSSRKQSSVAQSTAEAEYVAAASACSQVLWMISTLKDYGLSFSGVPLLCDNTSAINIAKIPVQHSRTKHIEIQYHFLRDNVEKGTIVLEFVESENQLADIFTKPLDRSHFEFLRTFICLSSLCDHVMLFKLVETCLN

SEQ ID NO: 19520 - protein, 339 aa, Oryza sativa
  unsure (1)..(339): unsure at all Xaa locations
  Clone ID: TF_OSC14140j.C1.p1.np
MTNKTLREFAAPSADNVTIGPQINLGDVDFDLKSSLITMQASPFCGPNENANAHLQXFLEICSTYTMKGVSPNNVRLRLFPFSLLGKAKKXFYANHATINTWDRCFTTFLSKFFPMEAREEARERLQEYVAACPHHGMDDWLILQNFYNGLTPMSHDHLDTAAGXDFFSKTVRGAIDLIEKMVSNMGWSEERLQTRQRGMHTVKEMEMLAAKMDLLMKXLDDHDKRPQGIVKALDSHVTCEVCGSTGHSGNDCPETHELAMYMGNNNNGYRPQGGQGWNQPCPYYQGANNNGNFSNQPSLKDLVFVQAKTTDALSKKLAANSQLAALVPANESGRIPGQ

SEQ ID NO: 19521 - protein, 676 aa, Oryza sativa
  unsure (1)..(676): unsure at all Xaa locations
  Clone ID: TF_OSC15762j.C1.p1.np
MTNKTLREFAAPSADNVTIGPQINLGDVDFDLKSSLITMQASPFCGPNENANAHLQXFLEICSTYTMKGVSPNNVRLRLFPFSLLGKAKKXFYANHATINTWDRCFTTFLSKFFPMEAREEARERLQEYVAACPHHGMDDWLILQNFYNGLTPMSHDHLDTAAGXDFFSKTVRGAIDLIEKMVSNMGWSEERLQTRQRGMHTVKEMEMLAAKMDLLMKXLDDHDKRPQGIVKALDSHVTCEVCGSTGHSGNDCPETHELAMYMGNNNNGYRPQGGQGWNQPCPYYQGANNNGNFSNQPSLKDLVFVQAKTTDALSKKLAANSQLAALVPANESGRIPGQDSSIENVKVITTRGGKSTCDLPYPNPVGTNKEAPSGTSADKKIQLEKVVPQAYYDTQLLPFPQRNRKPSVDEQFARFVEVIXKIHINMPXLDAIXVLTYARYLKDILNNKRPLPTMEVVKLMEQCNNAILHKFPEKKKDPGCPTITCSIGAQQFNQAFCDIGASVSVMPMDVFEKLNFTMLAPTPMHLQLADSLVRYPTGIAEDVPVKIRDSFIPDGFVVLDMETGKETLLILVHPFLKTAGANIDVGTGSIRFRINGKEEKFEFQPRTKHCSMVRIKYGPNLQNILVKFMQNFLEKETTFPRNRYWNTLVKPSVPAKKLEQPAXKKLSPAPKPKKV

SEQ ID NO: 19522 - protein, 766 aa, Oryza sativa
  Clone ID: TF_OSC19000j.C1.p1.fg
MSWHRAGVLLLGAQSCLPVPGVPAMAGSVSHRGLDMTGFVLELRGMCVVLGYPHGVDYQGRPLPEQEGDDAEPHAAWEVTAVILTGSPERTSLAVTAGGDSFPAACQNAALLAIGTLHQRYPDKLQHSPYRYHPRRGGARDYATFRDASSEDDATIMHLARMVEAYDAARIDFHQMVCRGMVENNLKILELRQENLQLKKDLDAVEAQLHQLKIAQGEVCRPKRRRVCRSQKITARKSTSRRELIRQSLAWTCFVETPRAEPAPVVPQEGEASGVGSTEDALLLTFRPGPSQRRSANTGDGNQPEGSNHNNHGSPPPPPPPPPPPPPDTNAILTQILAQQANMMTAFLHHLQNPPQQNAPPPPPQHSKLAEFLRIRPPTFSSSNNPVDALDWLHAVGKKLDTVQCSDEEKVIFAAHQLQGPASLWWDHFQATQPEGQPITWARFTAAFRRTHVPAGVMALKKREFRELKQGNRSVMEYLHEFNNLARYAPEDVREDEEKQEKFLAGMDPELSVRLVSGDYPDFQRLVDKSIRLEAKHKELESHKRRLANFRNQQGANQRIRYTNPYPGGSSSQQQQQQQPRSVPRPQFVVRVPQPQQQQSQQGTRAPRPPMPTVQPGQGRRDVQGPQRLCFNCFEPEHFADKCPKPRRQQGQAPPRSNKGGKDVIRGRVNHVTAEDVLTTPDVIVGVAVDPETVTAVTDWKQPKTVTQIRSFLGLAGYYWSVSRQSTNDRPDFSNLSKYRNGNGMKLGWISSPDFQKPKVDMILYG

SEQ ID NO: 19523 - protein, 1493 aa, Oryza sativa
  Clone ID: TF_OSC23329j.C1.p1.fg
MVKTRNGSRDSNNASGSEEPIDGPRASNAPNSSPSPPPENPTIAQVLDNQTQMMAMMMQQMQQQYHQVLQQVQQQAQQQQQNLQFGPPPPQSKLLESLRVKPPTFSSTTNPIEAHDWLHAIEKKLNLLQCNEQEKVAFATHQLQGPASVWWDNYMVTRPAWAEVTWTEFCHSFNKAQVPEGIVAQKKREFRSLQQGTRTVIEYLHEFNHLARYAPEDVRTDAERQEKFLSGLDDELINQLISRDYEDFEKLVDKAIRQEEHCNKINRKRKAAQFRTSQGKSQKPRFTMGHHGGPSTMIIRQYRPYHPGSFNKNHHSGSHNNSEQHSLNPTPSSLKIPAQSVQPALPEQPKRLGEKPKLCFNCNKPGHTVGKCPKPRRAGPKFVQARVNHASAEEAQSAPEVILGTFPVNSTLAVILFDSGATHSFISKRFAGAHGLSLVKLKIPMRVHTPGGGMTTTHYCPSVTVEIQGLIFPANLILLESKDLDVILGMDWLTRHRGVIDCASRTIKLTNAKGEEVTFQSPVPRKPGISLNQAAGEEQEVAVEKTTKKLEDIPIVREYPEVFPDDLTTMPPKRDIEFRIDLVPGTAPIHKRPYRMGANELAEVKKQVDEQLQKGYIRPSTSPWGAPVIFVEKKDKTKRMCVDYRALNEVTIKNKYPLPRIDDLFDQLKGATVFSKIDLRSGYHQLRIREEDISKTAFITRYGLFECTVMSFGLTNAPAFFMNLMNKVFMEFLDKFVVVFIDDILIYSKSEEEHEQHLRLVLEKLKEHQLYAKFSKCDFWLKEVQFLGHIVNAQGVAVDPANVESVTKWTPPRTVTQVRSFLGLAGYYRRFIENFSKIAKPMAQLLKKEEKFIWSAECNRSFEELKRRLDGKVVSYASRQLRPHEGNYPTHDLELAAVVHALKIWRHYLISIRCEVYTDHKSLKYIFTQPDLNLRQRRWLELIKDYDMGIHYHPGKANVVADALSRKSHCNVAWVEELCCEVQRDLEHLNLGIVEHGFVAALEAQPTLVEQVRIAQASDPEIAELKRNMRVGKARGFVEDEQGTIWTGERLCVPENKELKDLILTEAHQTQYSIHPGSTKMYQDLKEKFWWVSMRREIAEFVALCDVCQRVKAEHQRPAGLLQPLQIPEWKWEEIGMDFITGLPRTSSGHDSIWVVVDRLTKVAHFIPVHTTYSGKKLAELYLARIMCLHGVPKKIVSDRGSQFTSKFWQKLQEELGTRLNFSTAYHPQTDGQTERVNQILEDMLRACALDFGGAWDKSLPYAEFSYNNSYQASLQMAPFEALYGRRCRTPLFWDQTGERQLFGTEVLNEAEEKVRVVRERLRIAQSRQKSYADNRRRELAFETGDYVYLRVTPLRGVHRFQTKGKLAPRFVGPYRILERRGEVAYQLELPSNMLGIHNVFHVSQLKKCLRVPEEQASPDHIEIQEDLTYVEKPTRIPETSERRTRNKVIRFCKVQWSHHSEEEATWEREDELKATHPYLFASSSESRGRDSV

SEQ ID NO: 19524 - protein, 1115 aa, Oryza sativa
  Clone ID: TF_OSC23329j.C1.p2.gm
MVKTRNGSRDSNNASGSEEPIDGPRASNAPNSSPSPPPENPTIAQVLDNQTQMMAMMMQQMQQQYHQVLQQVQQQAQQQQQNLQFGPPPPQSKLLESLRVKPPTFSSTTNPIEAHDWLHAIEKKLNLLQCNEQEKVAFATHQLQGPASVWWDNYMVTRPAWAEVTWTEFCHSFNKAQVPEGIVAQKKREFRSLQQGTRTVIEYLHEFNHLARYAPEDVRTDAERQEKFLSGLDDELINQLISRDYEDFEKLVDKAIRQEEHCNKINRKRKAAQFRTSQGKSQKPRFTMGHHGGPSTMIIRQYRPYHPGSFNKNHHSGSHNNSEQHSLNPTPSSLKIPAQSVQPALPEQPKRLGEKPKLCFNCNKPGHTVGKCPKPRRAGPKFVQARVNHASAEEAQSAPEVILGTFPVNSTLAVILFDSGATHSFISKRFAGAHGLSLVKLKIPMRVHTPGGGMTTTHYCPSVTVEIQGLIFPANLILLESKDLDVILGMDWLTRHRGVIDCASRTIKLTNAKGEEVTFQSPVPRKPGISLNQAAGEEQEVAVEKTTKKLEDIPIVREYPEVFPDDLTTMPPKRDIEFRIDLVPGTAPIHKRPYRMGANELAEVKKQVDEQLQKGYIRPSTSPWGAPVIFVEKKDKTKRMCVDYRALNEVTIKNKYPLPRIDDLFDQLKGATVFSKIDLRSGYHQLRIREEDISKTAFITRYGLFECTVMSFGLTNAPAFFMNLMNKVFMEFLDKFVVVFIDDILIYSKSEEEHEQHLRLVLEKLKEHQLYAKFSKCDFWLKEVQFLGHIVNAQGVAVDPANVESVTKWTPPRTVTQDGKVVSYASRQLRPHEGNYPTHDLELAAVVHALKIWRHYLISIRYALSRKSHCNVAWVEELCCEVQRDLEHLNLGIVEHGFVAALEAQPTLVEQVRIAQASDPEIAELKRNMRVGKARGFVEDEQGTIWTGERLILERRGEVAYQLELPSNMLGIHNVFHVSQLKKCLRVPEEQASPDHIEIQEDLTYVEKPTRIPETSERRTRNKVGPTCRVVPNLQPCAHTGNRRCRPAFSAPRRAPHRARTPRPRRPPPPPFPLARAPTNGRDSLSNPTPLSLSPPHVAGEIGGFPGHVRLLPHH

SEQ ID NO: 19525 - protein, 1048 aa, Oryza sativa
  Clone ID: TF_OSC28109j.C1.p1.fg
MASKTLCEFAAPSAANVAVGPQVNIGDVDFDLKSSLITMAQASPFCGKPNEDANAHLQQFQEICTTYTIKGVSPDAVRLRLFPLSLLGRAKQWFYANRAAINTRDKCSTAFLSKFFPMGKTNALHGRISSFQQTRDESVPEAWERLQEHMAACPHHGMDDWLILQNFYNGLTPMSRDHLDAAAGGAFFSKTVQGAVELIEKMVSNMGWSEERLQTCQRGMHTVKETELLAAKLDLLMKRLDDHEKRPQGTVKALDSHVTCEVCGSTGHSGNDCPETREEAMYMGNNNGYRPQGGQGWNQLSPYYHEDLVFAQAKTIDVLSKKLAANDKILENINVKLDGFASAFQNQMSFNKMIETQLAQLESLVPANESGRIPGQPDPSIENVKAITTRRGTNEISKGAPSSDSVDKEVQPEKTMPQEKPSVDEQFTRFVEVIQKIHINVPLLDAMQVPTYARYLKEILNNKRPLPTTEVVKLMEQCSNVILHKLPEKEKDPGCPTITCSIRAQQLDQALCDLGASVSVVPKDVFDKLNFTVLAPKPMRLQLADSSVCYPARIAEDVPVKIRDFFIPVDFVDKVRAEPTEYSSGRSGATQDGQPREVYAEFPGGGNNDAQEPLLEDAGKITCTRQKVRAASLEEAVFRTEIKEGAEGKAKDTRSITSGDGWKIRELNQNDATFANSDRERQAYYMLSDREYAHTQEYSLELLKKIGLDVEFRSIWKAVGWQRFVVVDEPGSRLLTLQFLCTLKEIEDGISFRFFRKEFTLTWKGLSTLLGFHDSCKIDLQKGISGFEKNRFWEDISGAPICKKPRTNDIHNPTLGLMHKWIAMTLFPRSDLRPIRGDELIIMFAMVRKIKISPMKCMIRQWLESIKFSAPIECTSLITRIAKGLGVVSNQIAFISAARPHIYEAYLVQGHILKHGADGSLIYFFPGCTNEIPLPNVGYHLYNCHELTIPLQTIEESCAGGTYRETRNMTRNEQGSSSSSTPVQMRMDTLDVQMGEIQYDLTEHIAQTQEWQQSADAQFTNINNMMQQQHDDLQAYFRFQGFNPYQGP

SEQ ID NO: 19526 - protein, 1190 aa, Oryza sativa
  Clone ID: TF_OSC29791j.C1.p1.fg
MPDDKIGHKVAHGGRTPCKEVFATDFAREAKPIQPFLVAQDDGWISRQGGQAEQAQDKTTAHGIGTMRGQAREIARGTRAQWTRGGKEFGACGRGVHAVSSGSEAGVVLGPTRDFASMRGSSSAGRVEALDWMRADPASLIAAVLARMEAYLQSQGHNVWNKVKSPYTVPDDADITPANMAQVDFNYRARNAIIGGISSGEFNRVQHHKSAHDMWTALCNFHEGNNDIQLVRQNQFHKEYQRFEMHPGESIDSYFKRFGEIVSKLRSVGKEFSDNDNARHLLNCLDYGVWEMKVTSITESAPLSDLTMDKLYSKLKTHEMDVFHRKGLKHSMALVADPSGSTSSNDSAFVCGGFSLAALHSVTEEQLEKIPEDDLALFARKFSRAYKNVRDKKRGKTNEPFVCFECGEPNHIRVNCPKLKKKSDKTTKKPEGQGRKGKKDLMKKAIHKVLAALEEVQLSDIDSDDDDQEKGDKDFSGMCCLANNEDFINLCLMALEDKDDSSEHPEVCLDDIPSLDGSLCDDFCSDNDSVDDELSKERMAHLMIEISDKYRSSKYKIEKLKSENDGMALEIARLRSMIPEEDTCSTCASYLSKINLLKDKLKSCALGAGNSSSASAACSTCYEMKVDMGLLEMELKELKEKFVHDRIGRCENCPILTSDNNELRQQVAMLRTKNDLLESFATKEPIHSSCANCAILETELKDAKTVIDSIKSIDSCSSCISLKVDLESAKKENSYLQQSLERFAQGKKKLNMILDQSKVSINNQGIGYDFAESLRIGTHEILGVTDGMIELAQKPITFKSAGFIGNISSSTPKTSEPKMVSALERLEKSDKNVLGLEELLESLRGSSDFGVGRSNSWLVDSGCSRHMTGEAKWFTSLTRASGDETITFGDASSGRVMAKGTIKVNDKFMLKDVALVSKLKYNLLSVSQLCDENLEVRFKKDRSRVLDASESPVFDISRVGRVFFANFDSSAPGPSRCLIASENRDLFFWHRRLGHIGFDHLSRISGMDLIRGLPKLKAPKDLVCAPCRHGKMTSSSHKPVTMVMTDGPGQLLHMDTVGPARVQSVGGKWYVLVVVDDFSRYSWVYFLESKEETFGFFQSLARSLALEFPGALRAIRSDNGSEFKNSAFEFFCDSSGVEQQFSSPYVPQQNGVVERKNRTLVEMARTMLDEFTTPRKFWTEAISAACFISN

SEQ ID NO: 19527 - protein, 631 aa, Oryza sativa
  Clone ID: TF_OSC400128j.C1.p22.fg
MTGFNLPENFKENPEAFFRRVRPRVVAPQKTLPTEKPVVLAPPTFKIMASRTLREFAAPSTDNVAVGPQVNIGEVDFDFKSSLITMAQASPFCGKPNEDANAHLQQFLETCSMYTIKGVSPDAVRLRLFLFSLLGRAKQWFYANRAAINTWDKCSMAFLSKFFPMGKTNALRGRIFSFQQTRDESIPEAWERLQEYVAACPHHGMDDWLILQNFYNGLTPMSRDHLDAAAGGAFFSKMVQGAVDLIEKMDTELLAAKLDLLMKRLDDHEKRPQGTVKALDTHVTCEVCGSTGHSGNDCPETHEEAMYIGNKNNGYSPQGGQGWNQPRPHYQGETQLAQLASLVPANEIGRIPGQLDSSIENVKAITTRGGTSGMSKETPSNNSADKEIQPEKNVPQEYGDTRWLPFPQRSRKPSVDEQFARFVEVIQKIYINVPLLDAMQVPTYARYLKDILNNKRPLPTTEALCDLGASISVMPKDVFDKLNFTVLAPTPMRLQLADSSVRYPTGIAGGRASQESSTGQTRRIFKRLKWSHPRRIACMRRRLSRPFKGLGSSLSHHDEASTHLADVSMEDANTPRQLLNNADLDLVSDRERQAYYMLSDREYAQTREYSPELLKKIGMDVEFRSIWKAVG

SEQ ID NO: 19528 - protein, 1737 aa, Oryza sativa
  Clone ID: TF_OSC400850j.C1.p79.fg
MPGDKIGHKVAHGGRTPCEEVFATDFAREAKPIQPFLMAQDDGWISRQGGQAEQAQDKTTAHGIGTMRGQAREIARGTRAQWTRGGKEFGACGRGVHAVSSGSEAGVVLGPTRDFASMRGSSSAGHVEALDWMRAAMEEKYSAKPFVFDGHNFVIWKARMEAYLQSQGHNVWNKVKSPYTVPDDADITPANMAQVDFNYRARNAIIGGISSGEFNRVQHHKSAHDMWTALCNFHEGNNDIQLVRQNQFHKEYQRFEMHPGESIDSYFKRFGEIVSKLRSVGKEFSDNDNARHLLNCLDYGVWEMKVTSITESAPLSDLTMDKLYSKLKTHEMDVFHRKGLKHSMALVADPSGSTSSNDSAFVCGGFSLAALHSVTEEQLEKIPEDDLALFARKFSRAYKNVRNKKRGKTNEPFVCFECGEPNHIRVNCPKLKKKSDKTTKKPEGQGRKGKNDLMKKAIHKVLAALEEVQLSDIDSDDDDQEKGDKDFSGMCCLANNEDFINLCLMALEDKDDSSEHPEDFGVGRSNSWLVDSGCSRHMTGEAKWFTSLTRASGDETITFGDASSGRVMAKGTIKVNDKFMLKDVALVSKLKYNLLSVSQLCDENLEVRFKKDRSRVLDASESPVFDISRVGRVFFANFDSSAPGPSRCLVASENRDLFFWHRRLGHIGFDHLSRISGMDLIRGLPKLKAPKDLVCAPCRHGKMTSSSHKPVTMVMTDGPGQLLHMNTVGPARVQSVGGKWYVLVVVDDFSRYSWVYFLESKEETFGFFQSLARSLALEFPGALRAIRSDNGSEFKNSAFESFCDSSGVEHQFSSPYVPQQNGVVERKNRTLVEMARTMLDEFTTPRKFWTEAISAACFISNRVFLRTILHKTPYELRFGRRPKVSHLRVFGCKCFVLKSGNLDKFESRSLDGIFLGYATHSRAYRVYVLSTNKIVETCEVTFDEASPGARPEISGVLDESIFVDEDSDDDDDDSIPPPLDSTPPVQETGSPSTTSPSGDAPTTSSSAAEEIDGGTSGPTAPRHIQNRHPPDSMIGGLGERVTRNRSYDLVNSAFVASFEPKNVCHALSDENWVNAMHEELENFERNKVWSLVEPPLGFNVIGTKWVFKNKLGEDGSIVRNKARLVAQGFTQVEGLDFEETFAPVARLEAIRILLAFAASKGFKLFQMDVKSAFLNGVIEEEVYVKQPPGFENPKFPNHVFKLDKALYGLKQAPRAWYERLKTFLLQNGFEMGAVDKTLFTLHSGIDFLLVQIYVDDIIFGGSSHALVAQFSDVMSREFEMSMMGELTFFLGLQIKQTKEGIFVHQTKYSKELLKKFDMADCKPIATPMATTSSLGPDEDGEEVDQREYRSMIGSLLYLTASRPDIHFSVCLCARFQASPRTSHRQAVKRIFRYIKSTLEYGIWYSCSSALSVRAFSDADFAGCKIDRKSTSGTCHFLGTSLVSWSSRKQSSVAQSTAEAEYVAAASACSQVLWMISTLKDYGLSFSGVPLLCDNTSAINIAKNPVQHSRTKHIEIRYHFLRDNVEKGTIVLEFVESEKQLADIFTKPLDRSRFEFLRSELGITLKALKTLKFVIGVDLGQRRIGTRLREELRSKAIKDAGEAKPIQPFLMAQDDGWISRQGGQAEQAQDKTTAHGIGTMRGQAREIARGTRAQWTRGGKEFGACGRGVHAVSSGSEAGVVLGPTRDFASMRGSSSAGHVEALDWMRAVVAIEVAIYSSVKIHYRYNDRYKSYLLPRL

SEQ ID NO: 19529 - protein, 1773 aa, Oryza sativa
  Clone ID: TF_OSC401256j.C1.p18.fg
MEEKYSAKPFVFDGHNFVIWKARMEAYLQSQGHNVWNKVKSPYTVPDDADITPANVAQVDFNYRARNAIIGGISSGEFNCVQHHKSAHDMWTALCNFHKGNNDIQLVRQNQFHKEYQRFEMHPGESIDSYFKRFGEIVSKLRSVGKEFSNNDNARHLLNCLDYGVWEMKVTSITESAPLSDLTMDKLYSKLKTHEMDIFHRKGLKHSMALVADPSGSTSSNDSAFVCGGFSLAALHSVTEEQLEKIPEEDLALFARKFSRAYKNVRDRKRGKTNEPFVCFECGEPNHIRVNCPKLKKKSDKTTKKPEGQGRKGNKDLMKKAIHKVLAALEEVQLSDIDSDDDDQEKGDKDFSGMCCLANNEDFINLCLMALEDKDDSSEHPEVCLDDIPSLDGSLCDDFCSDNDSVDDELSKERMAHLMIEISDKYRSSKYKIEKLKSENDGMALEIARLRSMIPEEDTCSTCASYLSEINLLKDKLKSCALGAGNPSSASVACSTCYEMKVDMGLLEMELKELKEKKFHDRIGRCENCPILTSDNDELRQQVAMLRTKNDLLESFATKEPIHSSCANCAILETELKDAKTVIDSIKSIDSCSSCISLKVDLESAKRENFYLQQSLERIGTHEILGVTDGMIELAQKPITFKSAGFIGNTSSSSPKTSEPKMVPMTSKSKPVELPRPKNPKQVEHKQNQKQTKPVEKTKYECTYCGKAGHLDFGVGRSNSWLVDSGCSRHMTGEAKWFTSLTRASGDETITFGDASSGRMMAKGTIKVNDKFMLKDVALVSKLKYNLLSVSQLCDENLEVRFKKDRSRVLDASESPVFNISQVGRVFFANFDSSAPGPSRCFIASENRDLFFWHRRLGHIGFDHLSRNSGMDLIRGLPKLKAPKDLVCAPCRHGKMTSSSHKPVTMVMTDGPGQLLHMDTVGPAQVQSVGGKWYVLVVVDDFSRYSWVYFLESKEETFGFFQSLARSLALEFPSALRAIRSDNGSEFKNSAFESFCDSSGVEHQFSSPYVPQQNGVVERKNRTLVEMARTMLDEFTTPRKFWTEAISAACFISNRVFLRTILHKTPYELRFGRRPKVSHLRVFSCKCFVLKPGNLDKFESRSVDGIFLGYATHSRAYRVYVLSTNKIVETCEVTFDEASPGARPEISGVPDESILVDEDSDDDDDDSISPPLDSTPPVQETGSPSTTSPSGDAPTTSSSAAEEIDGGTSGPTAPRHIQNRHPPDSMIGGLGERVTKNRSYELVNSAFVASFEPKNVCHALSDENWVNAMHEELENFERNKVWSLVEPSLGFNVIGTKWVFKNKLSEDGSIVRNKARLVAQGFTQVEGLDFEETFAPVARLEAIRILLAFAASKGFKLFQMDVKSAFLNGVIEEEVYVKQPPRFENPKFPNHVFKLDKTLYGLKQAPRAWYERLKTFLLQNGFEMGGVDKTLFTLHSGIDFLLVQIYVDDIIFGGSSHALVAQFSDVMSREFEMSMIGELTFFLGLQIKQTKEGIFVHQTKYSKELLKKFDMADCKPIATPMATTSSLGPDEDGEEVDQREYRSMIGSLLYLTASRPDIHFSVCLCARFQASPRTSHRQAVKCIFRYIKSTLEYGIWYPCSSALSVRAFSDADFAGCKIDRKSTSSTCHFLGTSLVSWSSRKQSSVAQSTAEAEYVAAASACSQVLWMISTLKDYGLSFSGVPLLCDNTSAINIAKIPVQHSRTKHIEIQYHFLRDNVEKGTIVLEFVESENQLADIFTKPLDRSHFEFLRTFICLSSLCDHVMLFKLVETCLN

SEQ ID NO: 19530 - protein, 1662 aa, Oryza sativa
  Clone ID: TF_OSC401367j.C1.p83.fg
MEEKYSAKPFVFDGHNFVIWKARMEAYLQSQGHNVWNKVKSPYTVPDDADITPANMAQVDFNYRARNAIIGGISSGEFNRVQHHKSVHDMWTALCNFQGNNDIQLVRQNQFHKEYQRFEMHPGESIDSYFKRFGEIVSKLRSVGKEFSDNDNARHLLNCLYYGVWEMKVASITESAPLSDLTMDKLYSKLKTHEMDVFHRKGLKHSVALVADPFGSTSSNDSAFVCGGFSLAALHSVTEEQLEKIPKDDLALFARKFSRAYKNVRDRKRGKTNEPFVCFECGEPNHIRVNCPKLKKKSDKMTKKTEGQGRKGRKDLMKKAIHKVLAALEEVQLSDIDSDDDDQEKGDKDFSGMCCLANNEDFINLCLMALKDKDDSSEHPEVCLDDIPSLDGSLCDDSCSDNDSVDDELSKERMAHLMIEISDKYRSSKYKIEKLKSENDGMELEIARLRSMIPKEDTCSTCASYLSEIYLLKDKLKSCALGAGNPSSASATCSTCYEMKVDMGLLEMELKELKEKFVHDRIGRCENCPILTSDNDELRQQVDMLRTKNDLLESFATKEPVHSSCANCAILETEQKDAKTVIDSIKSIDSCSSCISLKVDLESAKRENSYLQQSLERFAQGKKKLNMILDQSKVSINNQGIGYDFAYDFAESLRIGTHEILGVRWDDRTSSKTYNLQVCSWLERLEKNDKNVLGLGELLESLGGSSVRVIVVQVVYLAFLAEMCTLDVTQQGWGKTDMDFGVGRSNSWLVDSGCSRHMTGEAKWFTSLTRASGDETITFRDASSGRVMAKGTIKVNDKFMLKDVALVSKLKYNLLSVSQLCDENLEVRFKKDRSRVLDASKSPVFDISRVGRVFFANFDSSAPGPSRCLIASENRDLFFWHHRLGHIGFDHLSRISGMDLIRGLPKLKAPKDLVCAPCRHGKMTSSSHKPITMVMTDGPGQLLHMDTVGPARVQSVGGKWYVLVVVDDFSRYSWVYFLESKEKTFGFFQSLVRRLALEFPGALQAIRSDNGSEFKNSAFEYFYDSSGVEHQFSSPYVPQQNGVVERKNRTLVEMARTILDEFTTPRKFWTEAISMACFISNRVFLRTILHKTPYELRFGHRPKVSHLRVFGCKCFVLKPGNLDKFESRSVDGIFLGYATHSRAYRVYVLSTNKIVETCEVTFDEASPGARPEISGVSDESIFVDEDSDDDDDDSFPPPLDSTPPVQETGSPSTTSPSGDAPTTSSSAAEEIDGGTSGPTAPRHIQNRHPPDLMIGGLGERVTRNRSYELVNSAFVASFEPKNVCHALSDENWVNAMHEELENFERNKVWSLVEPPLGFNVIGTKWVFKNKLGEDGSIVRNKARLVAQGFTQVKGLDFEETFAPVARLEAIRILLAFAASKGFKFFQMDVKSAFLNGVIEEEIYVDDIIFGGSSHALVAQFSYVMSREFEMSMMGELTFFLGLQIKQTKEGIFVHQTKYSKELLKFDMADCKPIATPMATTSSLGPDEDGEEVDQHEYRSMIGSLLYLTASRPDIHFSVCLCARFQASPRTSHHQAVKRIFRYIKSTLEYAEAEYVAAASACSQVLWMISTLKDYGLSFSGVPLLCDNTSAINIAKNPVQHSRTKHIEIRYHFLRDNVEKGTIVLEFVESEKQLADIFTKPLDRSRFEFLRSELGVIHPYGLI

SEQ ID NO: 19531 - protein, 2055 aa, Oryza sativa
  Clone ID: TF_OSC401864j.C1.p2.fg
MMSSSPYTRTCHVVPATNVHCISWHMMEVISSHSTTVIGVDLGQRRIGTRLREELRSKAIKDAGEAKPIQPFLVAQDDGWISRQGGQAEQAQDKTTAHGIGTMRGQAREIARGTRAQWTRGGKEFGACGRGVHAVSSGSEAGVVLGPTRDFASMRGSSSAGRVEALDWMRADPASLIAAVLARMEAYLQSQGHNVWNKVKSPYTMPDDADITPANMAQVDFNYRARNAIIGGISSGEFNRVQHHKSAHDMWTALCNFHEGNNDIQLVRQNQFHKEYQRFEMHPGESIDSYFKRFGEIVSKLRSVGKEFSDNDNARHLLNCLDYGVWEMKVTSITESAPLSDLTMDKLYSKLKTHEMDVFHRKGLKHSMALVADPSGSTSSNDSAFVCGGFSLAALHSVTEEQLEKIPEDDLALFARKFSRAYKNVRDKKRGKTNEPFVCFECGEPNHIRVNCPKLKKKSDKTTKKPEGQGRKGKKNLMKKAIHKVLAALEEVQLSDIDSDDDDQEKGDKDFSGMCCLANNEDFINLCLMALEDKDDSSEHPEVCLDDIPSLDGSLCDDFCSDNDSVDDELSKERMAHLMIEISDKYRSSKYKIEKLKSENDGMALEIARLRSMIPEEDTCSTCASYLSEINLLKDKLKSCALGAGNSSSASAACSTCYEMKVDMGLLEMELKELKEKFVHDRIGRCENCPILTSDNNELRQQVAMLRTKNDLLESFATKEPIHFSCANCAILETELKDAKTVIDSIKSIDSCSSCISLKVDLESAKKENSYLQQSLERFAQGKKKLNMILDQSKVSINNQGIGYDFAESLRIGTHEILGVTDGMIELAQKPITFKSAGFIGNISSSTPKTSEPKMVSALERLEKSDKNVLGLEELLESLRGSSDFGVGRSNSWLVDSGCSRHMTGEAKWFTSLTRASGDETITFGDASIGRVMAKGTIKVNDKFMLKDVALVSKLKYNLLSVSQLCDENLEVRFKKDRSRVLDASESPVFDISRVGRVFFANFDSSAPGPSRCLIASENRDLFFWHRRLGHIGFDHLSRISGMDLIRGLPKLKAPKDLVCAPCRHGKMTSSSHKPVTMVMTDGPGQLLHMDTVGPARVQSVGGKWYVLVVVDDFSRYSWVYFLESKEESFGFFQSLARSLALEFPGALRAIRSDNGSEFKNSAFEFFCDSSGVEHQFSSPYVPQQNGVVERKNRTLVEMARTMLDEFTTPRKFWTEAISAACFISNRVFLRTILHKTPYELRFGRRPKVSHLRVFGCKCFVLKSGNLDKFESRSLDGIFLGYATHSRAYRVYVLSTNKIVETCEVTFDEASPGARPEISGVLDESIFVDEDSDDDDDDSIPPPLDSTPPVQETGSPSTTSPSGDAPTTSSSAAEEIDGGTSGPTAPRHIQNRHPPDSMIGGLGERVTRNRSYDLVNLAFVASFEPKNVCHALSDENWVNAMHEELENFERNKVWSLVEPPLGFNVIGTKWVFKNKLGEDGSIVRNKARLVAQGFTQVEGLDFEETFAPVARLEAIRILLAFAASKGFKLFQMDVKSAFLNGVIEEEVYVKQPPGFENLKFPNHVFKLDKALYGLKQAPRACGIDFLLVEIYVDDIIFGGSSHALVAQFSDVMSREFEMSMMGELTFFLGLQIKQTKEGIFVHQTKYSKELLKKFDMADCKPIATPMATTSSLGPDEDGEEVDQREYRSMIGSLLYLTASRPDIHFSVCLCARFQASPRTSHRQAVKRIFRYIKSTLEYGIWYSCSSALSVRAFSDADFAGCKIDRKSTSGTCHFLGTSLVSWSSRKQSSVAQSTAEAEYVAAASACSQVLWMISTLKDYGLFFSGVPLLCDNTSAINIAKNPVQHSRTKHIEIRYHFLRDNVEKGTIVLEFVESEKQLADIFTKPLDRSRFEFLRSELGITLKALKTLKFVIGVDLGQRRIGTRLREELRSKAIKDAGEAKPIQPFLVAQDDGWISRQGGQAEQAQDKTTAHGIGTMRGQAREIARGTRAQWTRGGKEFGAVSSGSEAGVVLGPTRDFASMRGSSSAGRVEALDWMRAGERGIHAVERALSRAEA

SEQ ID NO: 19532 - protein, 1570 aa, Oryza sativa
  Clone ID: TF_OSC402311j.C1.p16.fg
MEEKYSAKPFVFDGHNFVIWKARMEAYLQSQGNNVWNKVKSPYTVPDDDDITPANVAQVDFNYRARNAIIGGISFEFSDNDNARHLLNCLDYGVWEMKVTSITDSAPLSDLTMDKLYSKLKTHEMDVFHRKGLKHSMALVADPSGSTSSNDSAFVCGGFSLAALHSVTEEQLEKIPEDDLALFARKFSRAYKNVRERERRKTNEPFVCFECGEPNHIRVNCPKLKKKSDKTTKKPEGQGRKGRKDLMKKAIHKVLATLEEVQLSDIDSDDDDQEKGDKDFSRMCYLANNEDFINLCLMALEDKDDSSEHLEVCLDDIPSLDGSPCDDSCSDNDSVDDELSKERMAHLMIEISDKYRSSKYKIEKLKSENDGMALEIARLRSMIPEEDTCSTCASYLSEINLLKNKLKSCALGAGNPSSASAACSTCYKMKVDMGLLEMELKELKEKFVHDRIGRCENCPIFTSDNDELRQQVAMLRTNNDLLESFATKEPVHSSCANCAILDTELKDAKTVIYSIKSIDSCSSCISLKVDLESAKRENSYLQQSLERFAQGKKKLNMILDQSKVSINNQGFIGNTSSSSPKTSEPKMVSALERLEKSDKNVLGLEELLESLRGSSDFGVGRSNSWLVDSGCSRHMTSEAKWFTSLTRASGDETITFGDASSGRVMAKGTIKVNDKFMLKDVALVSKLKYNSLSVSQLCDENLEVRFEKDRSRVLDASESPIFDISRVGRVFFANFDSSAPGPSRCLIASENRDLFFWHRRLGHIGFDYLSRISGMDLIRGSPKLKAPKGLIWTGITASHGYGWSCSGPVNWGEVSLARSLALEFPGALRAIRSDNGSEFKNSAFEFFCDSSGVEHQFSSPYVPQQNGVVERKNHTLVEMARTMLDEFTTPRKFWTEAISAACFISNRVFLRTILHKTPYELRFGHRPKVSHLRVFCCKCFVLKPGNLDKFESRSVDGIFLGYATHSRAYRVYVLSTNKIVETCEVTFEEASPRARPEISGVSDETIFVEDDSDEDDDDSIPPPLDSSPPVQETGSPSTTSPSGDAPTTSSSAAEEIDGGTSGPTAPRYIQNRHPPDLMIGGLGERVTRNRSYELVNLAFVAYFEPKNVCHALSDENWVNAMHEELENFERNKVCWSLVEPPLGFNVIGTKWVFKNKIGEDGSIVRNKARLVAQGFTQVEGLDFEETFAPVARLEAIRILLAFAASKGFKLFQMDVKSAFLNGVIEEEVYVKQPPGFENPKFPNHVFKLDKALYGLKQAPRAWYERLKTFLLQNGFEMGAIDKTLFTLHSGIDFLLVQIYVDDIIFGGSSRALVAQFSDVMSREFEMSMMGELTFFLGLQIKQTKEGIFVPQTKYSKELLKKFDMADCKPIATPMATTSSLGPDEDGEEVDQREYRSMIGSLLYLTASRPDIHFSVCLCARFQASPRASHRQAVKRIFRASSATSSLHLSTSSVAQSTAEAEYVAAASACSQVLWMILTLKDYGLSFSGVPLLCDNTSAINIAKNPVQHSRTKHIEIRYHFLRDNVEKGTIVLEFVESEKQLADIFTKPLDRSRFEFLRSELGVIHPYGLI

SEQ ID NO: 19533 - protein, 586 aa, Oryza sativa
  Clone ID: TF_OSC900064j.C1.p21.gm
MASKTLCEFAAPSAANVAVGPQVNIGDVDFDLKSSLITMAQASPFCGKPNEDANAHLQQFQEICTTYTIKGVSPDAVRLRLFPLSLLGRAKQWFYANRAAINTRDKCSTAFLSKFFPMGKTNALHGRISSFQQTRDESVPEAWERLQEHMAACPHHGMDDWLILQNFYNGLTPMSRDHLDAAAGGAFFSKTVQGAVELIEKMVSNMGWSEERLQTCQRGMHTVKETELLAAKLDLLMKRLDDHEKRPQGTVKALDSHVTCEVCGSTGHSGNDCPETREEAMYMGNNNGYRPQGGQGWNQLSPYYHESLQMNPGGFRGNPTPPLKMSRRSRRGEKIHINVPLLDAMQVPTYARYLKEILNNKRPLPTTEVVKLMEQCSNVILHKLPEKEKDPGCPTITCSIRAQQLDQALCDLGASVSVVPKDVFDKLNFTVLAPKPMRLQLADSSVCYPARIAEDVPVKIRDFFIPVDFVEVKFEFQPWTEQCSMVRIKYGPNPQNIQVVEVEPPKTDSLVKAASLEEAVFRTEIKEGAEGKAKDTRSITSGDGWKIRELNQNDATFANRWNIQGDAQHDKERTRKFIILDTRADV

SEQ ID NO: 19534 - protein, 1493 aa, Oryza sativa
  Clone ID: TF_OSC900185j.C1.p17.fg
MVKTRNGSRDSNNASGSEEPIDGPRASNAPNSSPSPPPENPTIAQVLDNQTQMMAMMMQQMQQQYHQVLQQVQQQAQQQQQNLQFGPPPPQSKLLESLRVKPPTFSSTTNPIEAHDWLHAIEKKLNLLQCNEQEKVAFATHQLQGPASVWWDNYMVTRPAWAEVTWTEFCHSFNKAQVPEGIVAQKKREFRSLQQGTRTVIEYLHEFNHLARYAPEDVRTDAERQEKFLSGLDDELINQLISRDYEDFEKLVDKAIRQEEHCNKINRKRKAAQFRTSQGKSQKPRFTMGHHGGPSTMIIRQYRPYHPGSFNKNHHSGSHNNSEQHSLNPTPSSLKIPAQSVQPALPEQPKRLGEKPKLCFNCNKPGHTVGKCPKPRRAGPKFVQARVNHASAEEAQSAPEVILGTFPVNSTLAVILFDSGATHSFISKRFAGAHGLSLVKLKIPMRVHTPGGGMTTTHYCPSVTVEIQGLIFPANLILLESKDLDVILGMDWLTRHRGVIDCASRTIKLTNAKGEEVTFQSPVPRKPGISLNQAAGEEQEVAVEKTTKKLEDIPIVREYPEVFPDDLTTMPPKRDIEFRIDLVPGTAPIHKRPYRMGANELAEVKKQVDEQLQKGYIRPSTSPWGAPVIFVEKKDKTKRMCVDYRALNEVTIKNKYPLPRIDDLFDQLKGATVFSKIDLRSGYHQLRIREEDISKTAFITRYGLFECTVMSFGLTNAPAFFMNLMNKVFMEFLDKFVVVFIDDILIYSKSEEEHEQHLRLVLEKLKEHQLYAKFSKCDFWLKEVQFLGHIVNAQGVAVDPANVESVTKWTPPRTVTQVRSFLGLAGYYRRFIENFSKIAKPMAQLLKKEEKFIWSAECNRSFEELKRRLDGKVVSYASRQLRPHEGNYPTHDLELAAVVHALKIWRHYLISIRCEVYTDHKSLKYIFTQPDLNLRQRRWLELIKDYDMGIHYHPGKANVVADALSRKSHCNVAWVEELCCEVQRDLEHLNLGIVEHGFVAALEAQPTLVEQVRIAQASDPEIAELKRNMRVGKARGFVEDEQGTIWTGERLCVPENKELKDLILTEAHQTQYSIHPGSTKMYQDLKEKFWWVSMRREIAEFVALCDVCQRVKAEHQRPAGLLQPLQIPEWKWEEIGMDFITGLPRTSSGHDSIWVVVDRLTKVAHFIPVHTTYSGKKLAELYLARIMCLHGVPKKIVSDRGSQFTSKFWQKLQEELGTRLNFSTAYHPQTDGQTERVNQILEDMLRACALDFGGAWDKSLPYAEFSYNNSYQASLQMAPFEALYGRRCRTPLFWDQTGERQLFGTEVLNEAEEKVRAVRERLRIAQSRQKSYADNRRRELAFETGDYVYLRVTPLRGVHRFQTKGKLAPRFVGPYRILERRGEVAYQLELPSNMLGIHNVFHVSQLKKCLRVPEEQASPDHIEIQEDLTYVEKPTRIPETSERRTRNKVIRFCKVQWSHHSEEEATWEREDELKATHPYLFASSSESRGRDSV

SEQ ID NO: 19535 - protein, 132 aa, Oryza sativa
  Clone ID: TF_OSC13261j.C1.p1.np
NEKRKCRVRRYLCFNCQGMGHFADKCPKPRNIAAGTSVHATLQSEACSSTNGHPCIKQCTNAPPAAPDSAINLSNHSLQRQPQQRIVVDGRSCVSPRPTPGRAKGNQPPEGDTKQKTVIRCNQQSEGSFSCE

SEQ ID NO: 19536 - protein, 510 aa, Oryza sativa
  Clone ID: TF_OSC25450j.C1.p1.fg
MSNEVNHVGKAPIFNGTNYSTWKIKMSTHLKAMSFHIWSIVYVGFAITGTPLTEIDHRNLQLNAQAMNALFNSLSQEEFDRVSNLETAYEIWNKLAEIHEGTSEYKDAKLHFLKIQYETFYMLPHESVNDMYGRLNVIVNDLKGLGANYTDLEVAQKMLRALPEKYETLVTMLINSDMSRMTPASLLGKINTNDMYKLKKKEMEEASPSKKCIALQAEVEDKSKSKVNEVNEDLEEEMILLARRFNDLLERRKERGRGSNSNRRRNRRLNKTLSNLRCFEYGEKGHFASKCPSKDDDGDKSSKKKSGGYKLMKKLKKEGKKIEAFIGEWDSNEESSASSGSEEEGGDDASSKKKKMVVVAIKEAPSLFAPLCLMAKGSSKVTSLSDSESDDDCDDVSYEELVSMFEELHAYSEKEIVKFKALNKDYASLDVLYEELKTSNERLTISHEKLKEAHDNLLSTTQHGAHIDVGISCDLLDDSATCHIAHVASSSISTSCDDLMDMPSPCSSSS

SEQ ID NO: 19537 - protein, 436 aa, Oryza sativa
  Clone ID: TF_OSC100511j.C1.p3.fg
MEMDEVGGRWTSLGQMKATRAAARISETNNTSARRVSSFKVLSLVLMFNREKGKNVSGYASSNLSFQLNPPLASRELTRAHPWSIPSMLLSSQLPLVGSQDQNRYVFDRAFATQVNELPMPEEHVPFCHDCREQGHYALNCPWVYAKEAPSFGLAGQTSLNQPPHTKSSLQPSVQSREPNGENPLNTGKCFPPSLSHHVGSRTKQAKGKKSKNQKRKAPMRTEEEVRKMTITNTEWPPAGITIPRRQRGNTFRGARQLTQHLLSHGGRVSDSEGSDQVSLDYEDESPRHVGRDEMESKACPHCGEIGHVASMCLTLCPHCEEDHPPGECPTRKVTCFLCEAPTILCTDGLSKELSSMEEVVSLPDLLQAEQRAINLRRAIPSRRPLSASNSNQKEASPVNDSNIQSYHIITEPIKDAVTRTMPAISLQNQNEYPCL

SEQ ID NO: 19538 - protein, 1294 aa, Oryza sativa
  Clone ID: TF_OSC409287j.C1.p3.fg
MADPARGSSGSAFLYPQLTSTNYTSWVIRVQAMMEDQGVWEAIEPAAGAAVDPRKDKKVKSHLLQSLPEDLLMQVAKKRTAKEVWDCLKTRFVGADKVRDARLQTLKGEFASMVMEAGESLDQYAGRITMMGVRHSALGATLNDAAMVKKLFDTVPEKFVSLVVGIEQFYNVDDMPFEEAVGRLKAYDERVRKKKAAASGVTADGQVLLTKAEWEARFKKGRGETSSPQKNKPSGEGANRGQARRSRGRGRGRGGTQSSGGGSGGGGRDKSHIKCFNYEEFGHYSTQCPHPKKKKAEAHLVQTDDAGPALLLAVTKAVQNAPGQGMDCGLVVHEERVWPRLMLAEKGAAAGDLWYLDNGASNHMTGDRRKFRELDETVTGVVRFGDASSVQIMGKGLILFACKNGDQWLLDDVYYIPSLCCNMVSLGQLTETGHRVVMDNDDLEVFDKNPWRLVIKVRRTSNRLYRIELQLASPVCLLTSLGDPAWLWHARLGHVNFQTLKLLVDKEMAAGVPQVHHPNQLCQACLMAKQIRQPFPAMANYRAEAPLELLHMDLCGPITPSTFAVNRYFLLIVDDFSRWMWVFVIKTKDQALEMFAKFKPLAENTADHSIKTLRTDHSGEFLSGEFARVCDEAGIERHLTAPYSPQQNGVVEHRNRSVMAMARSLLKGMSVPGRMWGEAVRHAVFLLNRLPTKSMGEHTPFEAWTGKKPHLGHLQVFGCTAHTKVTTPNLKKLDDRREENSTEFVVEEPVGEQQPALAEQSTTVEASLSTAGSDDGPLRYRSLADIMLEAPRVDLVDEEDGEALLAETEEPSSYREAAGEPAWVDAMQKELEAIEKNSTWSLCTLPVGHKAIGLKWVFELKKNTTGEVIKHKAWLVAKGYVQRHGVDFEEVFAPVARLDTVRTILAVAADRGWRVHHLDVKSAFLNGELEEEVYVAQLEGFIKKGQEHLVLKLSKALYGLRQAPRAWNICLDKSLKELGFMRCKQEQAVYTRGRGAEAMIVGVYVDDLIVTGENPARVEAFKKQMMGEFEMNDLGLLSYYLGIEVGQVPVDPKTQLQKDADGHPVDAIEYRRVIGCLRYLLHTRPDLSYAVGVASRFMEHPTMTHLKAVKQILRYLKGTIDCGLVYTAGIGEITITGYTDSDLAGDVDDRRSTGGMAFYINNSLVAWSSQKQKTVTLSSCEAEFMAATAAACHALWLRALLGELLGEEAKLVKLFVDNKSAIALMKNPVFRGRSKHIDTRYQFIRECIERRQILVEFVRSEEQRADALTKGLPAAKLVTARFLLRVRDLGERQA

SEQ ID NO: 19539 - protein, 1253 aa, Oryza sativa
  unsure (1)..(1253): unsure at all Xaa locations
  Clone ID: TF_OSC19560j.C1.p3.np
FQHLGLDLDVFFAHQVVSEAVVKSVQDAFTKIGFLNHMERLDKQISTLTDRVAALETPSNEEVVSGDDDAHSEDTVYDSSGYIDTPATRQARLXRRLRINRTGMGGTRHQQGNNNRVPDDPYAKVKFKIPSFSGYYDAEKYLDWEMAIEQKFNAHLVPEQHRVKQASSEFKDFAIMXWAGLSDEGVLPTTWEELKVAMHDRFVPPSYHRDLRKKLMRLEQGDKSVQDYYGELQKGVRRCGIVEGVEDAIFRFYSGLREEIQNIVDYKEFNSMNQLFWFAMLEEKELQGRDHQGKNKASTYTPRTMPSTGLPPASKRPAAFGASAAPASKRPAAFGASAAPKPSPPQPAESGNGSSQVPAKSASSVASTGRIQCHRCQGFGHVQKDCPIQRAYVATEDGYITTSDVEEEEEEEVEDEDGEVFGRDDTTDYRTIVVQRVLSMQVQQPERLQRHNLFQIFFVINNRRARVIIDGGSCNNLVSSDLVKKLGLTTRTHPHPYHIQWLNDFGRAKVTQVCRVSFSIGSYADSVDCDVVPMQACSLLQGHAWEHDNDYTLVHNGKKITLLPLTPAEIVEADKERAASLKLDESENQQSPSSKVEGIKLKGGVMLSPSSKVEGIKLKGGVMLATKCDIAEISDDDICYFLICKQALVSLDDIASSIPRVVTNLLQEYEDVFPAEIPPGLPPMRGIXHQINLIPGASLPNRAAYRTNPEETKGIQRQVQDLLDRGYVCXSLSPCVVLVILVPKKDSSXRMCVDCRAINNITIRYRHPIPRLDDMLDELCGSIIFTKIDLRSGYHQIRMKLGDEWKTSFKTKFGLYEWLVMTFGLTNAPSTFMRLMNEVLRPFIGRFVVVYFDDILIYSKSLDEHMDHLRAVFNALRDARLFANIEKCIFCTERDSFLGYVVTPQGIEVDESKIEAIKSWPVPXTITQVRSFLGLAGFYRRFVKDFSTFAAPLNELMKKGVVFHWEKTQEKSFDTLKDKLTHAPLLQLPNFGKTFELECDESGVGIGGVLMQDGKPVAYFSEKLHGPVLNYSTYDKELYALVRSLETWRHYLWPKEFCIHSDHESLKYFRSQNNLNRRHAKWVEFIESFPYVIKHKKGKDNVIANALSRRYTFLSQLDCRIFRLESIKEQYALDPDFNEVMLNCKEGRTWNKFVINGGFVYRANRLCIPVGSLRLLLIQEAHGGGLMGHFGAKKTVDVLAMHFFWPRMRKDVERFVARCTSCQKAKSRLNPHGLYMPLPVPSIPWTDISMDFV

SEQ ID NO: 19540 - protein, 849 aa, Oryza sativa
  Clone ID: TF_OSC19560j.C1.p5.fg
MGPTWAGVPNEVTSPKDHDSRWPNRIPAFGGLDLDVFLFIYDVSNGCIHSSYGHITKASGPHRMRRRLSQLFKGSGPSSSHHDGSSTRSSANISMEDAEAPRHDTDITTSDTHNNPPMVIQGLIARARARQLNLEVSSFLCSSLYEFEKRLLPNEYIVIRNNRGDKETLGEGLRAMEDHRGRPSQGGGPNQFDLGAIRSLGPVCTKTGAQVAYVLGLGRSLYEWKTKKITFPMVLVPHPNTFRVNGYRPNKLTSRICPGAVSPYLGLWAITFRKIGNPSAHQVVSEAVVKSVQDAFTKIGFLNHMERLDKQISTLTDRVAALETPSNEEVWAGLSDEGVLPTTWEELKVAMHDRFVPPSYHRDLRKKLMRLEQGDKSVQDYYGELQKGVRRCGIVEGVEDAIFRFYSGLREEIQNIVDYKEFNSMNQLFWFAMLEEKELQGRDHQGKNKASTYTPRTMPSTGLPRAVSFRAPSQPASKRPAAFGASAAPKPSPPQPAESGNGSSQVPAKSASSVASTGRIQCHRCQGFGHVQKDCPIQRAYVATEDGYITTSDVEEEEEEEEVEDEDGEVFGRDDTTDYRTIVVQRVLSMQIFFVINNRRARVIIDGGSCNNLVSSDLVKKLGLTTRTHPHPYHIQWLNDFGRAKILLIVMWFLCKLVHFCKEHHCQTVLLIEPTQRRLREFSGKFKISWTAGFYRRFVKDFSTFAAPLNELMKKGVVFHWEKTQEKSFDTLKDKLTHAPLLQLPNFGGKTEPQTKPYPLDMWKYGSALQQRPELNPDSTRGVLMQDGKPVAYFSEKLHGPVLNYSTYDKELYALEAHGGGLMGHFGAKKTVDVLAMHFFWPRMRKDVE

SEQ ID NO: 19541 - protein, 438 aa, Oryza sativa
  Clone ID: TF_OSC33342j.C1.p1.fg
MEDHRGRPSQGGGPNQFDLGAIRSLGPVCTKTGAQVAYVLGLGRSLYEWKTKKITFPMVLVPHPNTFRVNGYRPNKLTSRICPGAVSPYLGLWAITFRKIGNPSAHQVVSEAVVKSVQDAFTKIGFLNHMERLDKQISTLTDRVAALETPSNEEVWAGLSDEGVLPTTWEELKVAMHDRFVPPSYHRDLRKKLMRLEQGDKSVQDYYGELQKGVRRCGIVEGVEDAIFRFYSGLREEIQNIVDYKEFNSMNQLFWFAMLEEKELQGRDHQGKNKASTYTPRTMPSTGLPRAVSFRAPSQPASKRPAAFGASAAPKPSPPQPAESGNGSSQVPAKSASSVASTGRIQCHRCQGFGHVQKDCPIQRAYVATEDGYITTSDVEEEEEEEEVEDEDGEVFGRDDTTDYRTIVVQRVLSMQIFFVINNRRARVIIDGGSCNNL

SEQ ID NO: 19542 - protein, 419 aa, Oryza sativa
  Clone ID: TF_OSC401549j.C1.p27.fg
MAATVVSKFEVVKFDGTGNFVLWQMRLKDLLAQQGISKALEETMPEKMDAGKWEEMKAQAAATIRLSLSDSVMYQVMDEKSLKEIWDKLASLYMSKSLMSKLYLKQQLYGLQMQEESDLRKHVDVFNQLVVDLSKLDVKLDDEDKAIILLCSLPPSYEHVVTTLTHGKDTVKTDEIISSLLARDLRRSKKNEAMEASQAESLLVRAKHDHEAGVSKSKEKRARCYKCHEFGHIRRNCLLLKKRKGGIASLAARGDDSDSSSHEILTVSNEKSGEAWMLDLASSYHVTSKREWFSSYKSGDFGVVYLGDDTSYRVVGVGDVKFKMYDGNEVLLSNVRHVPGLRKSLISLGSLHETGWLYQVDSNRKTMNIMKDGKTVMTGERTSSCLYKLQGSAVAGGVMEDGYAGVVVHDPEGGKPGVG

SEQ ID NO: 19543 - protein, 624 aa, Oryza sativa
  Clone ID: TF_OSC417388j.C1.p2.gm
MAATVVSKFEVVKFDGTGNFVLWQMRLKDLLAQQGISKALEETMPEKMDAGKWEEMKAQAAATIRLSLSDSVMYQVMDEKSLKEIWDKLASLYMSKSLMSKLYLKQQLYGLQMQEESDLRKHVDVFNQLVVDLSKLDVKLDDEDKAIILLCSLPPSYEHVVTTLTHGKDTVKTDEIISSLLARDLRRSKKNEAMEASQAESLLVRAKHDHEAGVSKSKEKRARCYKCHEFGHIRRNCLLLKKRKGGIASLAARGDDSDSSSHEILTVSNEKSGEAWMLDLASSYHVTSKREWFSSYKSGDFGVVYLGDDTSYRVVGVGDVKFKMYDGNEVDSNRKTMNIMKDGKTVMTGERTSSCLYKLQGSAVAGGVMEDGYAGVVVHDPEGGKPGERDGVDVAGLAVGEEVGAVLRHDRVGTGSDRVGARNRRMEQAPELGLRGARACAHGEHLAPKLRHAVPSLARPGSGCFSALWSSCPRASRALAPATNLHKSRQQKRQQIGRRGRRRGEAHDGGIPDVPPQHGRRGGATAWEEPLAASTIVSAFWIHRRVPNLLRRVPSLLRCRRREERGEERPPAGRREKPPAGRGERRGHRRGERRSRRRGEGKCSVVEERRGQPVELEEGEGRGD

SEQ ID NO: 19544 - protein, 1172 aa, Oryza sativa
  Clone ID: TF_OSC418783j.C1.p5.fg
MVKTRNGSRESHNASGSEEQISRARASDASSNSSSPPPENPTIAQVLDNQTQMMTMMMQQIQQQYHQSKLLEFLRVKLPTFSRTTNPIEATDWLHAIEKKLKLLQCNDQEKVAFATHQLQGPASVWWDNYMVTRPAGTEVTWLEFCKSFNKAQVPERIVAQKKREFRSLQQGTRTVIEYLHKFNRLARYAPEDVRTDDERQEKFLSGIDDELTNQLISRDYEDFEKLVDKAIRQEEQCNKMNRKRQATQFRAPQGKNQKPHFTMGCQGGPSTMIIRQHRPYHPGNFNGINNSGNHSNSEHHSLNPTPSPLMNEAQSVQPALPAQSKQPKEFEGKPELCFNCNEPGHMVGTCPKPRRAGLKFVQAHVNHASAEEAQSAPEVILGTFPVNSTPAIILFDSGATHSFISKRFAGAHGLSLVKLKIPIRVHTPGGGMTTTHYCPSVTVEIKGLIFPANLILLESKDLDVILGMDWLTRNRGVIDCASRTIKLTKQEVAVEKTTKKLEDIPIVREYPEVFPEDLTSMPPKRDIEFRIDLAPGTAPIHKRLYRMGANELEEVKKQVDEQLQKGYIRPSTSPWGAPVVFVEKKDKTNRMCIDYRTLNEVTIKNKYHLPRIDDLFDQLKGATVFMEFLDKFAVVFIDDILIYSKSKEGHEQHLRLVLEKLKEHRLYAKFNKCDFWLKEVQFLGHVVNAQGVAMDPANVESVPKWTPPRTVTQIRSFRDLRAITADQTKDFQVYCDASCQGLGCVLMQDGKVVAYASRQLRPHEGNYPTHDLELAAVVHALKIWRHYLIGNYCERRWLELIKDYDMGIYYIPGKANVVADALSRKSYCNVVWVEELCCEVQRDLEHLNLGIVEHRFVAALEAQPTLVEQVRITQASDSEIEELKKNMRVGKARGFTEDENGTIWMGERLCVPENKELKDLILTEAHQTHYSIYPDSTKMYQDLKEKFYYQASLQMAPFEALYGRRCRTSLFWDQTGERQLFGTKVLNEAEEKVRAVRERLRIAQSRQKSYADNHRRELTFEAGDYVYLRVTPLRGVHCFQTKGKLAPCFVGPYRILERRGEVAYRLELPSSMLGIHNVFHVSQLKKCLRVPEEQASPDHIEIQEDLTYVEKPARILETSNRRTRNNVIRFCKVQWSHHSEEEATWEREDELKADHPHLFASSSESRGRDSV

SEQ ID NO: 19545 - protein, 199 aa, Oryza sativa
  Clone ID: TF_OSC28636j.C1.p1.gm
MHIVKETELLAAKLDLLMKRLDDHDKRPQDTVKALDSHVTCEVCGNTGHSRNDCRETREEAMYMGNNNNNGYRPQGGQGWNQPRLYYQGGNNNGNFSNQPSLKDLVIAQAKTTDALNKKLAANDKILENINVKLDVPAKETGRIPGQPDSSLENVKAITTMGENPHKRAVVGCYASTNICPLSQGHTQQQETTPNNGGG

SEQ ID NO: 19546 - protein, 442 aa, Oryza sativa
  Clone ID: TF_OSC25720j.C1.p1.fg
MSWHRAGVLLLGAQSCLPVPGVPAVGGIGSVLLSMARMGWKLCHVFRPYTVVMFNREKGKNVSGYASSNSSFQLNPPLASRELTRAHPWSIPSMLLSSQLPLVGSQDQNQYVFDRAFATQVNELSMPEEHVPFCHDCREQGHYALNCPWVYAKEAPSFGLAGQTSLNQPPRTKSSLQASVQSREPNGENPLNPRKCFPPSLSYHVGSRTKQAKGKKSKNQKRKALMRTEEEVRKMTITSTEWPPAGITIPRRQRGNTFRGARQLTQHLLSHGGRVSDSEGSDQVSSDDEDESPRHLGEEEMESKACTRCGEIGHVASRCLTLCPHCEEDHPPGECPTRKVTCFLCEAPTILYTDSLNKELSSMEEVVSLPDLLQAEQRAINLRRAIPSKRPSSASNSNQKEASPVNDSNMQSYHIITEPIKDAVTRTMPAISLQNQNEYPCL

SEQ ID NO: 19547 - protein, 1336 aa, Oryza sativa
  Clone ID: TF_OSC400775j.C1.p70.gm
MANDRDLPRVRRGTVLGPTQGCTTTLLPVEGTRLSLLAGAPSGRAVASSSIAVASPSPACPPFPAETPGAAFPPSPFPFLRAGRLQPPLSPCLSAGRRRHHLPRLRDATLIPGITSSSPEFRRNTVARAGLTFLLVDVSSGNPFRHARASAGAAVPSLGTVTGVEHAVLVSVQPLPAALVASSLVPVVVVVVLSSFPVSLVVAFVPPSSRSRPSSAFVQCAAAAPVVVFVLGSVSSSLVPAASRLRPRIAAEVVPSPSVSAAPVRRCRSHASSRGGKDLSSRCPVLVLSVSPRTRCAVVDPVTMVEVLEQEVVVRTPTPSGSDDASGSRDPRHRRQNSPTPLRRSPRRQEDPNRSGGSALSPPPGGGRPRRAGVRRHLTYGDGGSPQGALQAVGALLWHPLVNPEPETPVQRWLYDVANLVTAAQRTKESPSVSLDIEAIDSSNVVKALGQPKARRRPVWGTRRSDQHRAQQGQAPCCPHGEGAYSSGVSRLSARDARSPRPFPVGPGARPSCINPSEFLQIYTTIIMAAGGDDRVMANYFPMALKGVRHNRMLEKIASKEPKTTTELFELADKAVGQEEEQEAGPLRRRGLRPCCGRLADYRTVKNLVERYRKTDGERRQSRREGKAPATSASDRREEAKKKAPADDDDDSDNLEFQVPHGTVATLDGGACAHASRRSFKAMRRKVLAAVPTREAARQARWSENFYNGLTPMSRDHLDAAAGGAFFSKMVQGAIELIEKMVSNMGWSEERLQTRQRGMHTVKEMELLAAKLDLLMKRLDDHEKRPQGTVKPLDSHVTCEVCGGTGHSGNDCPETLTANESGRILGQPDSSIENVKAITTRGVIQKIHISIPLLDAMQVPTYAHNLKDILNNKRPLPTTEVVKLTEHCSNLILHKLPEKKKDPGCPTITCSIRAQQFDQALCDLGASISVMPKLTSLTSSTSRRKSLSFNQGRNNAPSSESKLPRKGNNNAQELLLEDASKITCTGQEVRAVGSEEAVSRTEIKEGVEEEAKDARSITSGDGWKIRELNRKEGSGSPSSRHDESSTRSSADVSMEDADAPRQLLSDDDLDLVSDRERQAYYMLSDWEYAHMREYSPELLKKISGTYRETRNMTRNEQESSSSSTPMQMYEAGWAPIGDAPGWTQAPRHSIGVSTWSSTSEDRWHAPHDIHWGNNQPSRSSGVPPAPSEWHSSSSRWDLGEITRRMDTLDMQTGEIRRAAPGLWSQSPLSVVAVGFARSRSTSAAPFQPPKTAGAPSLTLTRAEPPLEFVAGLRSSSSVVVFHTGCQTEKRREVRGVAGDSMPLVIFIEEWYTSGQSKTIRIAVPAVMGGLSNVFRD

SEQ ID NO: 19548 - protein, 1286 aa, Oryza sativa
  unsure (1)..(1286): unsure at all Xaa locations
  Clone ID: TF_OSC401354j.C1.p14.np
SXSSSKGERMEVWLAALPSTLTNQEISKDYADFERLVDRTIRXEDQRNKIDRKRKAMQFRFQQGGQQKHRCGYGQHSGSTIMIVRXHRPYQLGNFSRGNSGNQNNHNVPRAQSQALQPHQPKKKSEQKPLMCFNYGDTGHFANKCPKTMRNGPKVVQARVYHVSTKEAQAASEVVLGTFPVNSIPSTVLFDSGATHSFISKRFVWVHGLRKVXLSTPMKVNTPSNSLTLVSFCSSLMIEIQGSPFLANLILLECKDLDVILGMDWLTRHKGVIDCASRTITLVNXNGEVVVIQSPFIQKKEVSLNXVESEQQDEVMKDVPKLEDIPVVCEYSEVFLEESTAMLPKKDIEFRINLVLGTAPIYKRPYRMAAEEMAEVKKQVDEQLQKGYIRPSTSPWGALVIFVEKKDKTKRMSTDYRALNDVTIKNKYPLLRIDDMFHQLKGATVLSKIYLXSGYHQFRIREEDIPKTTFTTRYELFECIVMSFGLTNAPTFFMNLMNNVFMEYLDFVVVFIDDILVYSKSKEEHGNHLHVVLEKMKEHXLYPKFSKCDFWLKEVKFHVITTKRVAVDSXNVEAVTKWIPPKTVMQVRSFLGLTGYYCRFIENFSRIAKPMTQLLKKEEKFVRTSQCQESFEELKRRLVSALILILPNQRKDFEVYCDASRQGLGWVLIQEGRVVAYASRQLRTHEDNYPTHDLELAVVVHALKIWRHYLIGNRSEIYTDHKSMKYIFTQPDLNLRQCRLLELIKDYDVCIDYHPGKANVVADALSRKNYCNATCLEEVSTQLIQDLERLNLGIVEHGFVAALEAQPTLVAHAKYPEIAELKKNMRVDKARDFTEDEHGTIWMGERLCVPDNKELKELTLSEAHQIQYSIHPGSTKMYQYFKEKFWSVSMKREIAEFVALRDVCQRVKAEHXRPAGLQSIQIPEWKWEEIGMFITGLPRTSSGHDSIWVIVDRLMKVAHFLPVHTTYIGKRLAELYLSRIVCLHGVPKKIVSDRGSQFTSKFWHKLQEELGTRLNFSTAYHLQTDGQTEQVNQILEDMLRVCALDFGGSWDKNLLYAEFSYNNSYQASLYMAPFEALXGRKCRMPLFWDQTRERQLFGTEVLSXAEVKVRAIRERLTIAQSRQKSNADNHRRELSFEVVDQVYLTVMSLRGVHRFQTKKMVQRYIGSYRILERRGEVAYQFEIPPNMASIHDVFQVSQLKKCLSVLEEPASPDNVEIQEDLTYVEKPTCILETSERRTRNKVIRFCRLXWSHHSXDEATWEREDELKATHPHLFTSSSESRGQDSV

SEQ ID NO: 19549 - protein, 680 aa, Oryza sativa
  Clone ID: TF_OSC402891j.C1.p9.fg
MHTVKETKLLATKLNLLMKRLDDHEKRPRGTVKALDSHVTCEVCGGTGHSGNDCPETREEAMYMGNNNNGYRPQGGQGWNQPCPYYQGGNINGNFSNQPSLKDLVFAQAKTTDSLSKKLAANDKILDNINVKLDGFASTFQNQLSFNKMIETQLAQLASLVPANESGRIPGQPDSSIENVKAITRRGVIQKIHINVPLLDAMQVPTYARYLKDILNNKRLLPTTEVVKLTEQCSNQILHKFPEKKKDPGCPTITCSIGAQQFNGKEEKFEFQPRTEQCSMVREDLQKMRELVAGNERQRQGLEHRMSKLENHLSEICGSLWVTYTGLHQLAGECGVKATIPANPDEFSLTSLLAELATAMEHYDLEYFVVVCRDVDVKDVQQSGQPELPVIVPALASEPHVPRTKFEVAELERIMLEVKKDQAVETLGGREVWFNSYLKSCCTSMSRVCRELRVPRGDPEESAAGYISWLNGACAQLDSIGQRIDEAFKQECGRSSRYAEGHVLACIRDHRPQLHLEFLREGFSRSRRTPTEINGLAKSMAPLAEKEFANLRPSPSAILNAPGRRTCVIVSVGSMASEPYTRKKGVSLLDVVGVYYAVCPLDLSIALRVRNRGEADLDSQPDAVILEIGTDELGAVVRYDTVGQSESAEYPFDEFDGVVGLDFPRGCRFNPLSEFVGRHE

SEQ ID NO: 19550 - protein, 956 aa, Oryza sativa
  Clone ID: TF_OSC415111j.C1.p9.gm
MPAGNFWVRYARRFLGLQFKFTHDRWASHGAVDYVLRWKESYSDRTGSSMYRAGSGWCMTGFNLPKNFNENPEAFFRSVRPRVVAPQKTLPTEKPAIPVPPTFKTMASKTLREFAAPSADNVAIGPQVNIGDVDFDLKSSLITMAQASPFCGKPNEDANAHLQQFLEICSTYTIKGVSPDTIRLRLFLFSLLGRAKQWFYANHAAVNTWDKCYTAFLSKFFPMGKTNALRGRILSFQQTRDGSIPEAWECLQEYVAACPHYGMDDWLILQNFYNGLTPMSRDHLDTAAGGAFFSKTVQGAVELIEKMVSNMGWSEERLQTCQRGMHTVKETELLAAKLDLLMKCLDNHEKRPQGTVKALDSHVTCEVCGGTGHSGNDCPETREEAMYMGNNNGYHPQGGQGWNQPHPYYQGGNNNGNFSNQPSLKDLIFVQAKTTDALSKKLAANDKILENINVKLDGFASAFQNQLSFNKMIETQLAQLASLVPANETGRILGQPDSSIENVKAITMRGGKSTRDPPYPNPAGTNGMSKEAPSNDLADKEIQPDKTVPQEYCDTRLLPFLQRMRKPSADEQFARFVEVIQKIHINMSLLDAIVSVMPKDVFDKLNFTVLSPTPMCLQLADSSVRYPAGIEEDVPVKIQDFFISVDFVVLDMDTGKETPLILGRPFLSTAGANIDVGTGNIHFDINRKEEKFEFQPRTEQCSMPGEIYAELPGEGNNDAQEPLLKNAGKITRTGQEVRPAGSEEAVFRTKTKEGVEGKAKGARSITFGDGWKIRKLNRKEVRSCTSDFKRRDLRQQGFGRTPWFGLTGQANGRLPLSLRQWLVGPTADVSMKDAEAPRRLLNDTDLDLVSDRERQAYYMLSDQEYAHTREYSPELLKKIVRTGGMRLMTSNGGTINLPDQVTGEIQYNLMEHIAQTQEWQQSADAQFTNINNMMQQQRDDLQAYFRFQGFNPYQGP

SEQ ID NO: 19551 - protein, 461 aa, Oryza sativa
  Clone ID: TF_OSC6294j.C1.p3.fg
MAFLSKFFPMGKTNALRGRISNFQQTRDESIPEAWERPHHGMDNSLILQNFYNGLTTMSHDHLDAAAGGAFFSKTVRGAIDLIEKMVSNMGWSKERLQTRQQGIHTVKETELLAAKLDLLMKRLDDHDNRPQDTVKALDLHVTCEVCGGTGHSGNDCPETHEEAMYMGKNNNEYRPQGGQGWNQPRPYYQGENNNSNFSNQPSLKDLIFVQAKTTDALSKKLAANDKILENINVQLDGFTSSFQNQLIFNKMIETQLAQLASLVPANEIGRIPRRGGKSTRDRPYPNPAGTNGVAREAPSSDSANKEVQPEKAVPQEYYDTRLLSFPQRSRKPSVDEQFARFVEVIQKIHINVSLFDAMQVPTYARYLKDILNNKRPLPTTEVIELTEQCSNVILHKLSEKRKHPGCPTITCSIGAQQFNQALRDLGVSVSVIPMDVFDKLNFTVLAPTPMRLQLADSSVR

SEQ ID NO: 19552 - protein, 474 aa, Oryza sativa
  Clone ID: TF_OSC900064j.C1.p23.gm
MHTVKETELLAAKLDLLMKCLDDHEKRPQGTVKALDSHVTCEVCGGTGHSGNDCPETREEAMYMGNNNGNPKDPHQRAVVGRYASTNICPFLKDILNNKRPLPTTEVVKLTEHCSNLILHKLLEKKKDPGCPTITCSIGAQQFDQALCDLEASVSVMPKDVFDKLNFTVLAPTPMRLQLTDLSVRYPAEIAEDVPVKIRDFFIPVDFVVLDMDTGKETPLILGRPFLSTAGTNIDVGTGSIRFHINGKEEKFEFQPKTEQCSMVRIKYGPNPQNIQVVKVEPPKTDSLVRFMQNFLERETTMLRNRYWRTPVKAPVPAKKSEQPAQKKPSSAPKSKKTIEESRAGGTYRETRNMTRNEQGSSSSSTPVQMYEVGWAPTGMHLDGPKLHAIASESQPGQAPVRTGGMRLMTSTGGTTNPPDQVTGEIQYDLTEHIAQTQEWQQSADAQFTNINNMMQQQHDDLQAYFRFKGFNPP

SEQ ID NO: 19553 - protein, 565 aa, Oryza sativa
  Clone ID: TF_OSC900333j.C1.p23.fg
MANDLSQSLDLSIYRHEDYILLISTVDQASPFCGKPNEDANAHLQQFLEICSTYTIKGVSPDAVRLRLFPFSLLGRAKQWFYANRAAINTWDKCSMAFLSKFFPMGKTNALRGRISSFQQTRDESIPKAWERPQEHVAACPHHGMDDWLILQNFYNGLTPMSRDHLDAAAGGAFFSKTVQGAVELREKMVSNMGWSEERLQTRQRGMHTVKETELLAAKLDLLMKRLDDHEKRPQGTVKALDSHVTCEVCGGTGHSGNDCPETREEVMYMGNNNRYRPQGGQGWNQPRPYYQGVPANESGRIPGQPDSSIENVKAITTRGVIQKIHINVPLLDAMQVPTYARYLKDILNNKRPLPTMEVVKLTEHCNNLKLHKLPEKKKDPGCPTITCSIGAQQFDQALCDLGASVSVMPKDVFDKLNFTVLAPTPMRLQLADSSVCYPEMQLILGRSFLSTAGGNIDVGKGSICFHINGKEEKFEFQPRTEQCSMVRIKYGPNPQNIQVVEVEPPKTDSLVRFMQNFLEKETTMPRNRYWRTPVKSPVPAKKLEQPAQKKPSSAPKPKKVWKEK

SEQ ID NO: 19554 - protein, 138 aa, Oryza sativa
  Clone ID: TF_OSC11082j.C1.p1.fg
MESKACNRCGEIGHIASMCLTLCPHCGEDHPPGECPTRKVTCFLCEAPTILCTDSLSKELSSMEEVVSLPDLLQAEQRAINLRRAIPSRRPFSASNSNQKEASPVNDSNMQSYHIITEPIKDAVTRTMPAIPLQNQNE

SEQ ID NO: 19555 - protein, 1448 aa, Oryza sativa
  Clone ID: TF_OSC1509j.C1.p1.fg
MVGLGWLGTSWDPASGCQNAALLAIGTLHQRYPDELQHSPYRYHPRRGGARDYAIFRDASSEDDATIMHLARMVEAYDATRIDFHQMVRRGLVENSMKILELRQENLQLKKDLDAVEAQLHQLKIAQGEMVTTRRSAATGEGSHPEGSNHNNHGSPPPPPPPLPPPPPDTNAILTQILAQQANMMAAFLHHIQNPPQHNAPPPPPQHSKLAEFLRIRPPTFSSSNNPVDALDWLHAVGKKLDIVQCSDEEKVIFAAHQLQGPASLWWDHFQATQLEGQPITWARFTTSFRRTHVPAGVMALKKREFRELKQGNRSVMEYLHEFNNLAWYAPEDVREDEEKQEKFLAGMDPELSVRLVSGDYPDFQRLVDKSIRLEAKQKELESHKRRLANFRNQRGANQRVRYTNPYPGGSSSQQQQQQQPRSAPRPQFVVRVPQPQQQQSQQGTRAPRPPTPALQPGQGHRDAQGQQRLCFNYFEPGHFAAKCPKTRRQQGQAPPRSNNGGKDVIRGRVNHVTAEDVLTTPDIIVGVVYCARRTVTLYRGPEQPVVFFAPPTSVGSSELHQIRLSEIPIVREFGDVFPEELPGMPPKREIEFRIDLAPGTTPLYKHPYRMAANELAEVKKQLEELKEKGYIRPSTSPWGAPVIFVEKKDKTKRRCVDYRALNEVTIKNKYPLPRIDDLFDQLKGATFVVVFIDDILVYSQSEEDHQHHLRLVLGKLRQHQLYAKLSKCEFWLSEVKFLGHVISAKGVAVDPETVTAVTDWKQPKTVTQIRSFLGLAGYYRRFIENFSKIARPMTQLLKKEEKFVWSPQCEKAFQTLKEKLVSSPVLILPDTRKDFMVYCDASRQGLGCVLMQEGHVVAYASRQLRPHEGNYPTHDLELAAVVHALKIWRHYLIGNRCEIYTDHKSLKYIFTQSDLNLRQRRWLELIKDYDVGIHYHPGKANVVADALSRKSHCNTLEVRGIPPELNQQMEALNLSIVGRRFLATLEAKPTLLDQIREAQKNDPDMRELLKNMKQGKAAGFTEDEHGTLWNGNRICVPDDRELKQLILQEAHESPYSIHPGSTKMYLDLKGKYWWVSMKREIAEFVALCDVCQHVKAEHQRPAELLQPLQVPEWKWDEIGMDFITGLPKTQGGYDSIWTTYGGNKLAELYFARIVSLHGIPKKILSDRGSQFTSHIWKKLQEELGTRLNFSTAYHPQTDGQTERLNQVLEDMLRACVLDFRKTWDKSLPYAEFSYNNSYQASIQMAPYEALYGRKCRTLLLWDQVGESQVFGTDILREAEAKVRTIRDNLKVAQSRQKMDDFVYLRVTPLRGVHRFQTKGKLAPRFVGPFRIIARRGEVAYQLELPASLGNVHDVFHVSQLKKCLRVPSEQADSEQIEVREDLTYVERPVKMLDTMERRTRNWVIRFCKVQWSNHAEEETTWEREDEMKATHPDLFASSSESRGRDSV

SEQ ID NO: 19556 - protein, 1086 aa, Oryza sativa
  Clone ID: TF_OSC400628j.C1.p8.fg
MRQRRPEAEQWQQRHCCRWGCTSGGLRGKWTACRGRGGDCDAGGGDGTAGRRKARTCAAHAEGREGEEGGGLGRQVGWAGIGQGRPKRKRREERKLTLIHCPDAEKTNLAAEQLQGAAGDWWENFLAMQPAGRVVTWAQFRDAFHAAHVPKGIMDLKQREFLSLTQGNKSVMEYLREFNHLTRYAPDDVNTDTCKQNWFMNGLSAEMQLELVAHSFLDFQDLVNRSVVIESKMKNLEAECKRKRAAQISAAGGSQKPHGWQPPPPRFQAPPPPRPQGFVPCPPQQRVAPPVGGNQQAIRPPVRSNNCFNCGQAGHYINQCSYPHHAQLQGPRPAAPCPNPPLRSAPQGQQTQKRGRVNHVTAEEANDALDVLVGFRCYPRHGLAAQKSWVIDCGHRLITLKNNTGEPIFLALDDHSPQLHALSGAKTIDIAAVPVVCDYPDVFPEELPGMPPDRDVEFVIDLLPGTAPISKRPYRMPPNELEELKKQLTELQAKGFIKPSSSPWGCPALFVKKDLSLRMCVDYRPLNEVAVKNKYPLPRIDDLFDQLTGAHVFSKIDLRLGYHQIKIRPEDIPKIAFSTRFGLYEYTVMSFGLTNAPANFMSLINSVFMEYLDQFVVIFIDDILIYSKSEEEHEKNLYLVLEKLREHRLYAKFSKCEFWLKEVGFLGHVLSEGGVAVDPSNVQKVLDWGQPKNPSDIRSFLGLAGYYRRFIENFSKIAKPMTQLLKKNEKYVWSAECEQSFQTLKEKLTTAPVLILPDIHKSFDIYCDASRQGLGCVLMQEGRVVAYASRQLRPHEVNYPTHDLELASVVHALKIWRHYLIGNRCEIYTDHKSLKYILSQSDLNLRQRRWLELIKDYDMGLHYHPRKANVVADALSRKPQCNCLSVKPRSETLCSEIHKLGLEMVPHGSLAALEVKPTLYDQIKEAQKDDKALYGRRCRTPLNWSESGERPFFGPDLVKEADEQVRLIRERLQTAQSREKSYADRRRRELTFDVGDYVYLKVTPFKSTHRFGVKGKLAPQSLARSVTVHQEVLASIRDWKQPKTVTQIRSFLGLAGYYRRFIENFSKIARPMTQLLYKTFLTLFIS

SEQ ID NO: 19557 - protein, 1230 aa, Oryza sativa
  Clone ID: TF_OSC400732j.C1.p4.fg
MEQNNNNNNGTSQDGNNTSHGATGLIIPSASNQDPWANLLANILGKQQETQQRQMEILERITKSDANRNGLGEFQKLKPPTFSGTANPLEAEEWIVAMEKSFEAMGCTDKEKIIYATYMLQSSAFEWWDAHKKSYSERIFITWELFKEAFYKKYFPESVKRMKEKEFLELKQGNKSVAEYEIEFSRLARFAPEFVQTDGSKARRFESGLRQPLKRRVEAFELTIFREVVSKAQLLEKGYHEQRIEHGQPQKKFKTNNPQNQGRFRGNYSGQMQRKSSENQGRKCPICQGSHVPSICPNCWGRCFECGEAGHTRYQCPLLQKGKNRVSSTTQPNTKVLTPVPSLYLPGPSSANNHGPNQGKPLANTNTTRGMRSNNSQGGNHARVYNLTKSTAEESNTVVTGNVLICSYPGKVLFDSGATHSFISTNFVRKYTIPTSQLKERICIETPLDSQTTNLICKLCPITIDGWELTADLIPLDMHDFDIILGMDWLLPGTSPIYKAPYRMAPVELKELKLQLKELEDKGFIHPSVSPWGAPVLFVKKKDGSLRLCTDYRELNKVTIKNKYPLPRIDDLFDQLQGARVFSKIDLQSGYHQLKIKPSDIPKTAFRARYGHYEYLVMPFGLTNAPAAFMDLMNRIFKPYLDQFVVVFIDDILIYSKTKEDHANHLRIVLQTLRDHKLFAKLKKCDFWMDKVSFLGHVISGEAPLTRLTQKGVRYEWTQTCEESFQELKNRLTTAPILALPIMGEEFTIYCDASKIGLGCVLMQKDALSRKALCNMAIQITQDQHILRDLERLDVELKIHEPGVLLAVLQIKPTLEENILEKQRDDSELQKAKKNIEEGKRVKAEHQRPAGLLQPLSIPLWKWEEISMDFVQGLPTTPAGNDSIWVIVDRLTKSTHFLPVKRNFSLKKLAKLYVKEIVSLHGVPVRIVSDRDTRFLSKFWKSLHRAPGTKLDFSTAYHPQTDGQTERVNQIIEDMLRSCILEFKGSWEEFMPLAEFAYNNSYQSSIRMAPYEALYGRKCRTPVCWNEVGERKLLGPDIIQQTKETIRLIRKRLQTAQNRQKSYVDNRRRDLRFDIGDWVYLKVSPMKGVKRFGLGKKLSPRYVGPFAIVKRIGEVAYKVKLPDALIGVHDVFHISMIRKCLRRPSDQVEIPMAELRNDLTYQEYPVCILDTKDGKTRNRNIRFLKVQWSHHTQDEATWEKEDDLQKNYPQFFHHQGTTISRTKFLKEGSL

SEQ ID NO: 19558 - protein, 682 aa, Oryza sativa
  Clone ID: TF_OSC423363j.C1.p9.fg
MRGGPLMVTAQYGLTLFVFTFCCENRVVHDWFQPAGKLQRKSRSFLPERQAASRCSVENSTNRETSRTSATNFQDYGQQESREFVAPSTDNMAVGPQVNIGDMDFDLKSSLITMAQTSPFCGKPNEDANAHLQQFLEICSTYTIKEFFPMGKTNALRGRISSFQQTRDESIPEAWERLQEYVAACPHHKMDDWLILQNFYNGLTPMSRDHLDVAAGGAFFSKTVQGAVKLIEKMVSNMGWSEERLQTRQRGMHTVKETELLAAKLDLLMKRLDDHEKRPQGNVKALESHVTCEVCGGMGHSGNDCPETHEEAMYMGNNNGYRPQGGQGWNQPRPYYEGGNNNGNFSNQLLNKMTETQLTQLASLVPANESGRISGQPDSSIENVKAITTRGVIQKIHINVPLLDAMQVPTYARYLKDILNNKRPLPTTEVVKLTEHCSNVILNKFPEKKKDPGCPMITCSIGAQQFDQALCDLGASVSVMPKDVFDKLNFTVLAPTPMRLQLADSLVRYPAGIAEDVPVKIRDFFIPVDFVVLDMDTGKETPLILGRPFLSTAGANIDVGTGSIRFHINGKEEKFEFQPRTEQCSMVRIKYGPNPQNIQVVEVEPPKTDSLVKFMQNFLEKETTMPRNRYWRTPVKSPVPVKKLEHPAQKKPFFAPKSKKVWKEKPKTPAPSPLETGGKSAH

SEQ ID NO: 19559 - protein, 1105 aa, Oryza sativa
  Clone ID: TF_OSC33327j.C1.p1.fg
MWANICHDEDIPSNDTTTPIAQQGPMTRARARELNYQVQGCSWHGKNSNNVESVYRLLRRSTPVVVVVGPPTSYPSPNRSLPSSHRKIGNPRCCIKCCTLILLAATYSSTNFYLLYHRIVLVVGSGGSGEHPQHSPRMRGIIQHFERQVREHAEGLDEDVRVANDRLGQLEAAQIDTNSKLSSLERSLVAVNTSLAGILNTLERMGQEGHDGSARRNHNGHDANSSIAAREELEYAADTEHDEEVLGRPQRQQRRQRHGMGAPPRREVRDNDDSLGKIKFTIPCFDGKYDPDAYLTWELAIDQKFACHDFPENKRVRAATSEFTDFASIWWSEFVRSNPNNTPQTWDAMKRVMRARFVPSYHARDLLHKLQQLRQGNKSVEEYYQALQTGMLRCGLVENDDAGMARFMGGLNREIQDILAYKEYNSINRLFHLACKAEREVQGRRASFRTNISAGRASSWTSSNAAAPSTRAAAPSSSSNKLRPSTTNSTPCPSEPTRGVAATPSKSSSSVASSGRTRDIQCLRCRGYGHVRKDCPSTRVMIVRADGGYSSASDLDEETYALLATNNAGEGDASHQDEEHIGAEAAEHYESLVVQRVLSAQMERAEQNQRHTLFQTKCVIKERSCRVIIDGGSCNNLASAEMVEKLALSTQPHPQPYYIQWLNSSGKVKERTRSEHLIAANELEKHKKKPTNSVQNNKNEIKLKGSCFIATKSDLDEVDTDTVVCYDLEYADIFPKEVPPGLPPIRGIEHQIDLIPGASLPNRAPYRTNPEETKEIQRQVQELLDKGFVVVYFDDILIYSRSIEDHHGHLRAVFDALRDARLFGNLEKCTFCTDRVSFLGYVVTPQGIEVDQAKVEAIHSWPVPTTITQVRSFLGLAGFYRRFVKDFSTIAAPLHELTKKNVTFTWAAAQRNAFDTLKDKLTHAPLLQLPDFNKTFELECDASGIGLGGVLLQEGKPVAYFSEKLSGPSLNYSTYDKELFALVRTLETWQHYLWPKEFVIHSDHESLKHIRSQAKLNRRHAKWVEFIESFPYVIKHKKGKENVIADALSRRYAMLSQLDFKIFGLETIKEQYAHDDDFKDVLLNCKEGRTWNKFVLTNGKRMVEG

SEQ ID NO: 19560 - protein, 1513 aa, Oryza sativa
  Clone ID: TF_OSC400098j.C1.p17.fg
MLATESAPYLVDPTVTQPPAPEIVHTPLISTPSPQLGFSLETPIQVDSKTEGTDTEPEIEPDITDLSEDETPVLRITFLGGPRTLSTARKSTRPPGKKPKPDPEATTSEPWGLRVMATQTQLLQAIVNNQGNRGGSSFGEFMRTKPPTFATAEEPMDAEDWLRIIEKKLTLVRVRKADKVIFTANQLEGPAGDWWDTYKEAREEDAGEPNWEEFTTAFRDNFVPAAVMRMKKNEFRRLQQGNTTIQEYLNRFTQLARYATGDLADEEEKIDKFIEGLNDELRGPMIGQDHDSFQRLINKVVRLENDRKVVEHNHKRRLAMNRPPQVAPQRPKGAASSVWKPTVVTTNRPAASSNFHRTVTIQNRAPAPHQAATGSVRPGSYFNCGEYGHFANKCPHPNKTPIRTRANVMAIHGTTTPAAGRGLFRTPQTNRTATGFGRGQVNHVRAEEAQEDQGVLMGTFSIHFTPVKVLFDLGASHSFISLKASQRHNLTRVKLRQPMLVHSPGGEIAVDTACIDVPIRLRDVVFPSNLMVLVPQTLDVILGMDWLTKNRGVIDCRRREVTLTTPWGSGMRATMDQDPRLTERAGGIFTMLPMKGMPIVQQFPDVFPEDLPGMPPDRDIEFIIDLIPGTAPISKRPYRMPVNELEELKKQIRELQEKGFVRPSSSPWGAPVLFVKKKDGSMRMCVDYRSLNEVTIKNKYPLPRIDDLFDQLKGAKVFSKIDLRSGYHQLKIRTGDIPKTAFSTRYGLYKFTVMSFGLTNAPAYFMNLMNKVFMDYLDKFMVVFIDDILIYSKDEEEHAEHLRLVLEKLRKHKLYAKFSKCEFWLKEVAFLGHVISAGGVAVDPTKVEAVTEWKAPKSVTEIRSFLGLAGYYRRFIEGFSMIARPMTQLLKKEKKFVWSEQCQESFEQLKEKLTSAPILVLPDIRKDFVIYCDASRQGLGGVLMQDGKVVAYASRQLRPHEENYPTHDLELAAVVHALKIWRHYLIGNHCDIYTDHKSLKYIFTQSDLNLRQRRWLELIKDYDLEVHYHPGKTNVVADALSQKSHCNHLRTEGMAPELKEEIAQLNLHIIPYGQINTLDIQPLMRTQIEEAQKDNEEIREVKECLAAGFAKEFSTDEKDVLWYKKRIYVPEQGGQRGLILMEAHESAYSLHPGSTKMYQDLKEGYWWPNIKRDVAEYVALCDVCQKVKAEHQRPAGLLQPLRIPEWKWNEIGMDFIVGLPKTTTGYDSIWVIVDRLTKTARFIPVKTNYSSAKLAELYMTRIEKVHEALGSYLAFSTAYHPQTDGQTERTNQVLDDMLRACALDFSKDWERCLSYAEFSYNNSFQASLKMSPNEALFGRRCRTPLMWSETGERAVFGLDIIQEAEEKSYADTRRRNLEFKEGDYVYLKVSPLRGTKRFKVKGKLAPRYVEPFQINARRGEVAYQLQLPENIADVHPVFHVSELKKCLRVLEEQATLEEIHISNDLTYPEHPVRILDEAEKRTRMKVWRMYKVQWSNHTKDEATWESEEFLKTE

SEQ ID NO: 19561 - protein, 1276 aa, Oryza sativa
  Clone ID: TF_OSC400773j.C1.p68.gm
MATQTQVLQAIANNQGDRGGSSFGEFMRTKPPTFATAEEPMDAEDWLRIIEKKLTLVRVREADKVIFAANQLEGPAGDWWDTYKEAREEDAGEPNWEEFTTAFRDNFVPAAVMRMKKNEFRRLQQGNTTVQEYLNRFTQLARYATRDLADEEEKIDKFIEGLNDKLRGPMIGQDHDSFQSLINKVVRLENDRKVVEHNRKRRLAMNRSPQTAPQRPKGTTSSAWRPTVVTTSRPAASSNFHRPVTIQNRAPAPNQAATGSVRPGSYFNCGEYGHFANKCPHPNKTPIRTGANATAIHGTATPAAGRAKHRGIIDCRHREVTLTTPWGSDMRATMDQDPRLTERAGGIFTMLPLKGMPVVQRFPDVFPEDLPGMPPDRDIEFIIDLIPGTAPISKRPYRMPVNELEELKKQIRELQEKGFVRPSSSPWGAPVLFVKKKDGSMRMCVDYRSLNKVTIKNKYPLPWIDDLFDQLKGAKVFSKIDLRSGYHQLKIRTGDIPKTAFSTRYGLYEFTVMSFGLTNAPAYFMNLMNKVFMDYLDKFVVVFIDDILIYSKDEEEHAEHLRLVLEKLRKHKLYAKFSKCEFWLKEVAFLGHVISAGGVAVDSAKVEAVTEWKAPKYVTEIQSFLGLAGYYRRFIEGFSKIARPMTQLLKKEKKFVWSEQCQESFEQLKEKLTSAPILVLPDIKKDFVIYCDASRQGLGGVLMQDGKVVAYASRQLRPHEENYPTHDLELAAVVHALKIWRHYLIGNHCDIYTDHKSLKYIFTQSDLNLRQRRWLELIKDYDLEVHYHPGKANVVADALSRKSHCNHVRMEGMVPELREEIAQLNLHIVRRGRINTLDIQPLLRTQIEEAQKDNEEVREVSPMRGTKRFKVKGKLAPRYVGPFQIIAKRGEVAYQLQLPENIADVHPVFHVSQLKKCLRVPEEQAPLEEIHISNDLTYPEHPIRILDEAEKRTRSKPLLCRVALAPRAPRAVRRSASPLPSPSPSPRVPPSPRRPPVAIAACRRADVTEPPRARADIATPVPRVLPSRCRVASSPAPPSLRHVAARRRQARAAPRRAVLSLLSRRAVVSPPIASRPEPRATAVAVAIDVPSPRASHRRCRAARRLVASRREPAASRPAPPSFHPSSSFPSLYSPLPYKDPGPIPPFSTPLHSHLFSLFPFSTRRRRRAAAPPLSCRRAATFEAAAPSPRSRRAVRRRLAPPSPSSPPPPPPSPRELRIQAKAKTRKTLSKVRYDGTAVEVGPRSVPYIGVAIEAGDEASEDPYAYYQEGDEDDGAQ

SEQ ID NO: 19562 - protein, 797 aa, Oryza sativa
  Clone ID: TF_OSC401834j.C1.p22.fg
MTSLASSATGRENNPLEFYSLPISPNIEQRSFSVVGFAAALKPHAFDGSNYKRWKTRALLWLTVMQCFYVSRGKRSEPPLSPEEEVKFEASDCLFRGALISVLADNIVDVYMHMPSGKDMWDALEAKFGVSDAGSELYVMEQFYDYKMFVVGGIIAKLPTSWSDFATSLKHKRQEFSVSDLISSLGVEENARAKDNRDKKVEGGSSANMVQKKNPHASHNNKKFKPDVKPMATTNFKKKGKGKAKGDCFVCGKSGYWAKDCPKRKDRKSANMVTSEGRGTSGYDWWVDTGANIHVGRGSSLLMGNGSLTAVHGVDEALHYFKTYKAEVENQLERKIKRLRSNRGGEYFSNEFTSFCEEFGIIHERTPPYSPQSNGVAERKNRTLTEMVNAMLDTTDFPRNGGHKEVTPFEKWERKKLNLSYLRTWGCLAKVNVPIAKKRKLVPNTVDCVFLGYAIHSVGYRFLIVNSRVPNMRVGTIIESRDATFFENEFPMKNTPSTSSQETVISYEHFAPIEHNDQTPEGNREEDSIVDTRRSKRQRVAKSFGDDCIIYLVDDTPRTIEEAYSSPDADYWKEAVHSEMDSIMSNGTWEVVEHPYGCKPVGCKWVFKKKLRPDGTIEKYKARLVAKASHGLLVHQMDVKTAFLNGELEEIYMDQPDCLNVIEVVKDFLSKSFEMKDLGEADVILNIKLLRGDEGGITLVQSHYVDKVLSRFGYSDCMPDPTPYDPSVLLRKNRRIARDQLRYSQIIGSLMYLASTTRPDISFADGLYLNVIQVAFLSRDVDLKNISEGTHLYEFDC

SEQ ID NO: 19563 - protein, 259 aa, Oryza sativa
  Clone ID: TF_OSC6577j.C1.p3.fg
MAASTSKGKGSWREKIEIALALSNIDLALTEPCPTAPVAPKYDTDHAKWESSNRKCLMVIKSSIVEAVRGAIPVCTTATEYLQRVENQFTISSKAYASSLIKSLVTMKYHGGDVREYILKMSGITSKLKKIDLVLPDDFLVHLIFASLPSEFESFAVNYNSLPENWNIEKLIAMCVQEEDRPKTRGDSANYVKNKKRNNHSQNVASPKARGKAPQVDPNPRQEVERDACRWCKQKGHFQKDCPEFLKHLLKKGETSLHS

SEQ ID NO: 19564 - protein, 509 aa, Oryza sativa
  Clone ID: TF_OSC11374j.C1.p1.fg
MAVKDRFTGNPGRLTVLTTSGSGDLMHIQLRNSGSRISGRDKLVSEPTLTMEIRNGSRDSNNASGSEEPNNGARANGASDNSPSPPPENPTIAQVLDNQTQMMTMMMQQMQQQYHQVLQQVQQQAQLQQQNLQFGPPPPQSKLLEFLRVKPPTFSSTTNPIEAHDWLHAIEKKLNLLQCNEQEKVAFATHQLQGPASIWWDNYMVTRPAGAEVTWTEFRHSFNKAQVPEGIVAQKKREFRSLQQGTRTVIEYLHEFNRLARYAPEDVRTDAEKQEKFLSGLDDELTNQLISRDYEDFEKLVDKAIRQEEHGNKINRKRKAAQFRTPQGKSQKPRFTMGRHGGPSTMIIRQHRPYHPGSFNKNHHNGSHNNSEQHSLNPTPSSLKIPAQSVQPALPEQPKRLGEKPELCFNCNKPGHTVGKCPKPRRAGPKFVQARVNHASAEEAQSAPEVILGTFPVNSTPAVILFDSGATHSFISKRFAGAHGLSLVKLACLQVDSRGSPGTELEFAL

SEQ ID NO: 19565 - protein, 498 aa, Oryza sativa
  Clone ID: TF_OSC11376j.C1.p1.fg
MAVKDRFTGNPGRLTVLTTSGSGDLMHIQLRNSGSRISGRDKLVSEPTLTMEIRNGSRDSNNASGSEEPNNGARANGASDNSPSPPPENPTIAQVLDNQTQMMTMMMQQMQQQYHQVLQQVQQQAQLQQQNLQFGPPPPQSKLLEFLRVKPPTFSSTTNPIEAHDWLHAIEKKLNLLQCNEQEKVAFATHQLQGPASIWWDNYMVTRPAGAEVTWTEFRHSFNKAQVPEGIVAQKKREFRSLQQGTRTVIEYLHEFNRLARYAPEDVRTDAEKQEKFLSGLDDELTNQLISRDYEDFEKLVDKAIRQEEHGNKINRKRKAAQFRTPQGKSQKPRFTMGRHGGPSTMIIRQHRPYHPGSFNKNHHNGSHNNSEQHSLNPTPSSLKIPAQSVQPALPEQPKRLGEKPELCFNCNKPGHTVGKCPKPRRAGPKFVQARVNHASAEEAQSAPEVILGTFPVNSTPAVILFDSGATHSFISKRFAGAHGLSLVKLEYSIVSPK

SEQ ID NO: 19566 - protein, 460 aa, Oryza sativa
  unsure (1)..(460): unsure at all Xaa locations
  Clone ID: TF_OSC11376j.C1.p2.np
MEIRNGSRDSNNASGSEEPNNGARANGASDNSPSPPPENPTIAQVLDNQTQMMTMMMQQMQQQYHQVLQQVQQQAQLQQQNLQFGPPPPQSKLLEFLRVKPPTFSSTTNPIEAHDWLHAIEKKLNLLQCNEQEKVAFATHQLQGPASIWWDNYMVTRPAGAEVTWTEFRHSFNKAQVPEGIVAQKKREFRSLQQGTRTVIEYLHEFNRLARYAPEDVRTDAEKQEKFLSGLDDELTNQLISRDYEDFEKLVDKAIRQEEHGNKINRKRKAAQFRTPQGKSQKPRFTMGRHGGPSTMIIRQHRPYHPGSFNKNHHNGSHNNSEQHSLNPTPSSLKIPAQSVQPALPEQPKRLGEKPELCFNCNKPGHTVGKCPKPRRAGPKFVQARVNHASAEEAQSAPEVILGTFPVNSTPAVILFDSGATHSFISKRFAGAHGLSLVKLEYSIKVXSLGWKVXSLGWGC

SEQ ID NO: 19567 - protein, 1491 aa, Oryza sativa
  Clone ID: TF_OSC14967j.C1.p1.fg
METRNGSRDSNNASGSEEPINGARANGASDNSPSPPPENPTIAQVLDNQTQMMTMMMQQMQQQYHQVLQQVQQQAQLQQQNLQFGPPPPQSKLLEFLRVKPPTFSSTTNPIEAHDWLHAVEKKLNLLQCNEQEKVAFATHQLQGSRGNRGTKKREFRSLQQGPRPVIEYLHEFNRLARYAPEDVRTDAERQEKFLSGLDDELTNQLISRDYEDFEKLVDKAIRQEEHCNKINRKRKAAQFRTPQGKSQKPRFTMGHHGGPSTMIIRQHRPYHPGNFNKNHHSDSHNNSEQHSLNPTPSSLKIPAQSVQPALTEQPKRLGEKPELCFNCNKPGHTVGKCPKPRRAGPKFVQARVNHASAEEAQSAPEVILGTFPVNSTPAVILFDSGATHSFISKRFAGAHGLSLVKLKIPMRVHTPGGGMTTTHYCPSVTVEIQGLIFPANLILLESKDLDVILGMDWLARHRGVIDCASRTIKLTNAKGEVVIFQSPVPQKPGISLNQAAGEEQEVAVEKTTKKLEDIPIVREYPEVFPDDLTTMPPKRDIEFRIDLVPGTAPIHKRPYRMGANELAEVKKQVDEQLQKGYIRPSTSPWGAPVIFVEKKDKTKRMCVDYRALNEVTIKNKYPLPRIDDLFDQLKGATVFSKIDLRSGYHQLRIREEDIPKTAFITRYGLFECTVMSFGLTNAPAFFMNLMNKVFMEFLDKFVVVFIDDILIYSKSEEEHEQHLRLVLEKLKEHQLYAKFSKCDFWLKEVQFLGHIVNAQGVAVDPANVESVTKWTPPRTVTQVRSFLGLAGYYRRFIENFSKIAKPMTQLLKKEEKFIWSAECNRSFEELKRRLVSAPVLILPDQTKDFQVYCDASRQGLGCVLMQDGKVVSYASRQLRPHEGNYPTHDLELAAVVHALKIWRHYLIGNRCEVYTDHKSLKYIFTQPDLNLRQRRWLELIKDYDMGIHYHPGKANVVADALSRKSYCNVAWVEELCCEVQHDLEHLNLGIVEHGFVAALEAQPTLVEQVRIAQASDPEIAELKKNMRVGKARGFVEDEQGTIWMGERLCVPENKELKDLILTEAHQTQYSIHPGSTKMYQDLKEKFWWVSMRREIAEFVALCDVCQRVKAEHQRPAGLLQPLQIPEWKWEEIGMDFITGLPRTSSGHDSIWVVIDRLTKVAHFIPVHTTYSGKKLAELYLARIMCLHGVPKKIVSDRGSQFTSKFWQKLQEELGTRLNFSTAYHPQTDGQTERVNQILEDMLRACALDFGGAWDKSLPYAEFSYNNSYQASLQMAPFEALYGRRCRTPLFWYQTGERQLFGTEVLNEAEEKVRAVRERLRIAQSRQKSYADNRRRELAFETGDYVYLRVTPLRGVHRFQTKGKLAPRFVGPYRVLERRGEVAYQLELPSNMLGIHNVFHVSQLKKCLRVPEEQASPDQIEIQEDLTYVEKPTRILETSERKTRNKVIRFCKVQWSHHSEEEATWEREDELKATHPHLFASSSESRGRDSV

SEQ ID NO: 19568 - protein, 1505 aa, Oryza sativa
  Clone ID: TF_OSC17627j.C1.p1.fg
METRNGSRDSNNASGSEEPINGARANGASDNSPSPPPENPTIAQVLDNQTQMMTMMMQQMQQQYHQVLQQVQQQAQLQQQNLQFGPPPPQSKLLEFLRVKPPTFSSTTNPIEAHDWLHAVEKKLNLLQCNEQEKVAFATHQLQGPASIWWDNYMVTRPAGAEVTWTEFCHSFNKAQVPEGIVAQKKREFRSLQQGTRTVIEYLHEFNRLARYAPEDVRTDAERQEKFLSGLDDELTNQLISRDYEDFEKLVDKAIRQEEHCNKINRKRKAAQFRTPQGKSQKPRFTMGHHGGPSTMIIRQHRPYHPGNFNKNHHSDSHNNSEQHSLNPTPSSLKIPAQSVQPALTEQPKRLGEKPELCFNCNKPGHTVGKCPKPRRAGPKFVQARVNHASAEEAQSAPEVILGTFPVNSTPAVILFDSVKLKIPMRVHTPGGGMTTTHYCPSVTVEIQGLIFPANLILLESKDLDVILGMDWLARHRGVIDCASRTIKLTNAKGEVVIFQSPVPQKPGISLNQAAGEEQEVAVEKTTKKLEDIPIVREYPEVFPDDLTTMPPKRDIEFRIDLVPGTAPIHKRPYRMGANELAEVKKQVDEQLQKGYIRPSTSPWGAPVIFVEKKDKTKRMCVDYRALNEVTIKNKYPLPRIDDLFDQLKGATVFSKIDLRSGYHQLRIREEDIPKTAFITRYGLFECTVMSFGLTNAPAFFMNLMNKVFMEFLDKFVVVFIDDILIYSKSEEEHEQHLRLVLEKLKEHQLYAKFSKCDFWLKEVQFLGHIVNAQGVAVDPANVESVTKWTPPRTVTQVRSFLGLAGYYRRFIENFSKIAKPMTQLLKKEEKFIWSAECNRSFEELKRRLVSAPVLILPDQTKDFQVYCDASRQGLGCVLMQDGKVVSYASRQLRPHEGNYPTHDLELAAVVHALKIWRHYLIGNRCEVYTDHKSLKYIFTQPDLNLRQRRWLELIKDYDMGIHYHPGKANVVADALSRKSYCNVAWVEELCCEVQHDLEHLNLGIVEHGFVAALEAQPTLVEQVRIAQASDPEIAELKKNMRVGKARGFVEDEQGTIWMGERLCVPENKELKDLILTEAHQTQYSIHPGSTKMYQDLKEKFWWVSMRREIAEFVALCDVCQRVKAEHQRPAGLLQPLQIPEWKWEEIGMDFITGLPRTSSGHDSIWVVIDRLTKVAHFIPVHTTYSGKKLAELYLARIMCLHGVPKKIVSDRGSQFTSKFWQKLQEELGTRLNFSTAYHPQTDGQTERVNQILEDMLRACALDFGGAWDKSLPYAEFSYNNSYQASLQMAPFEALYGRRCRTPLFWYQTGERQLFGTEVLNEAEEKVRAVRERLRIAQSRQKSYADNRRRELAFETGDYVYLRVTPLRGVHRFQTKGKLAPRFVGPYRVLERRGEVAYQLELPSNMLGIHNVFHVSQLKKCLRVPEEQASPDQIEIQEDLTYVEKPTRILETSERKTRNKVIRFCKVQWSHHSEEEATWEREDELKATHPHLFASSSESRGRDSV

SEQ ID NO: 19569 - protein, 659 aa, Oryza sativa
  Clone ID: TF_OSC2469j.C1.p1.gm
MPPPSARASPRFGHAPPPFGRRRRFPRHRSPPSVVVPRRRLAPVGLEAELSPADASLPLPFLPSTRAPPPLAVPPLRPSAAAFRAVRRRLPAPPAVVRRRRLAMAGRPVLKPSRVVPSRRRAVRSVSRPIWTVGPVDRRWTTRVVPVHGGPTPFEPLPSTGGEGGRDGVGSAGVSGCPAAGFTAAQEGTAHCLLRGGELKIFLVGAVLSKLVSSLPSRIACGVESLAAEMEIRNGSRDSNNASGSEEPINGARANGASDNSPSPPPENPTIAQVLDNQTQMMTMMMQQMQQQYHQVLQQVQQQAQLQQQNLQFGPPPPQSKLLEFLRVKPPTFSSTTNPIEAHDWLHAIEKKLNLLQCNEQEKVAFATHQLQGPASVWWDNYMVTRPAGAEVTWTEFCHSFNKAQVPEGIVAQKKREFRSLQQGTRTVIEYLHEFNRLARYTPEDVRTDAERQEKFLSGLDDELTNQLISRDYEDIEKLVDKAIRQEEHCNKINRKRKAAQFRTPQGKSQKPRFTMGRHGGPSTMIIRQHRPYHPGSFNKNHHSGSHNNSEQHSLNPTPSSLKIPAQSVQPALPEQPKRLGEKPELCFNCNKPGHTVGKCPKPRRAGPKFVQARVNHASAEEAQSAPEVILGTFPVNSTPAVILFDSGATHSFISKRFA

SEQ ID NO: 19570 - protein, 386 aa, Oryza sativa
  Clone ID: TF_OSC2478j.C1.p1.fg
YHPGSFTKNHHSGSHNNSEQHSLNPTPSSLKIPAQSVQPALPEQPKRLGEKPELCFNCNKPGHTVGKCPKPRRAGPKFVQARVNHASAEEAQSAPEVILGTFPVNSTPAVILFDSGATHSFISKRFAGAHGLSLVKLKIPMRVHTPGGGMTTTHYCPSVTVEIQGSIFPANLILLESKDLDVILGMDWLTRHRGVIDCASRTIKLTNAKGEVVTFQSPVPRKPGISLNQAAGEEQEVAVEKTTKKLEDIPIVREYREVFPDDLTTMPPKRDIEFRIDLVPGTAPIHKRPYRMGANELAEVKKQKKDKTKRMCVDYRALNEVTIKNKYPLPRIDDLFDQLKGAIVFSKIDLRSGYHQLRIREEDIPKTAFIGDPLESTCRHASLSIL

SEQ ID NO: 19571 - protein, 254 aa, Oryza sativa
  Clone ID: TF_OSC2964j.C1.p1.fg
MGRHGGPSTMIIRQHRPYHPGSFNKTHHSDSHNNSEQHSLNPTPSSLKIPAQSVQPALPEQPKRLGEKPELCFNCNKPGHTVGKCPKPRRAGPKFVQARVNHASAEEAQSAPEVILGTFPVNSTPAVILFDSGATHSFISKRFAGAHGLSLVKLKIPMRVHTPGGGMTTTHYCPSVTVEIQGLIFPANLILLESKDLDVILGMDWLARHRGVIDCASRTIKLTMQKERWYLPVSSAAEGDPLESTCRHASLSIL

SEQ ID NO: 19572 - protein, 1139 aa, Oryza sativa
  Clone ID: TF_OSC32576j.C1.p1.fg
MVKTRNGSRDSSNVSGSEEQISGARANSASDNSPSPPPENPTITQVLDNQTQMMSMIMQQMQQQYHQPPTFSSTTNPIEANDWLRAIEKKLNLLQCNDQEKVAFAIHQLQGPASVWWDNYVVTRPAGTKVTWAEFCQSFNKAQVPEGIMAQKKREFRSLQQGTKTVIEYLHEFNRLAHYAPEDHRPYHPGSFGRIYHSGSHGNSEKHSLNLTPSPLMFLAQSVQPALPAQSKQPKEFEGKPELCFNCNKPGHTVGKCPKPRHAGPKFVQAHVNHASAEEAQSAPEVILGTFPVNSTPAVILFDSGATHSFISKRFAGAHGLSLVKLKIPMRVHTPGGGMTTTHYCPSVTVEIQGLIFPANLILLESKDLDVILRMDWLTRHRGVIDCTSHTIKLTNAKGEVAAGEEQEVAVEKTTKKLEDIPIDREYPEVFPDDLTTMPPKRDIEFRIDLAPGTAPIHKRPYRMGANELAEVKKQVDEQLQKGYIRPSTLPWGAPVIFVEKKDKTKRMCVDYRALNVVTVKNKYPLPRIDDLFDQLKGATVFSKIDLRSGYHQLRIREEDIPKTAFITRYDKFVVVFIDDILIYSKSEEEHKQHLRLVLEKLKEHQLYAKFSKCDFWLKEVQFLGHIVNAQGVAVDPANVESVTKWTPPRTVTQVRSFLRLAGYYRRFIENFSKIAKPMTQLLKKEEKFIWSAECNRSFEELKGRLVSAPVLILPNQTKDFQDGKVVSYASRQLRPHEGSYPTHDLELAAVVHALKIWRHYLIGNRCERRWLELIKDYDMGIHYHPGKANVVADALSRKSYCNVTWVEQLCCEVQRDLEHLNLGIVEHGFVVALEAQPTLVEQRVKAEHQRPAGLLQPLQIPEWKWEEIGMDFIMGLPRTLSGHDSIWVVIDRLTKVAHFIPVHTIYSGKKLAELYLARIMCLHGVPKKIVSDRGSQFTSKFWQKLQEELGTRLKFSTAYHPQTDGQTERVNQILEDMLRACALDFGGAWDKSLPYAEFSYNNSYQASLQMEPFEALYGRKCRTLLFWDQTEERQLFGTEVLNEAEEKVRAVRESLRIAQSRQKSYVDNRRRELVFETGDYVYLRVTPLREYIASKPKENWNHALWDHTGSWNVEVKLLTSLSFPPTCLASTMCSTSLS

SEQ ID NO: 19573 - protein, 1355 aa, Oryza sativa
  Clone ID: TF_OSC32846j.C1.p1.fg
METRNGSRDSNNASGSEEPINGARANGASDNSPSPPPENPTIAQVLDNQTQMMTMMMQQMQQQYHQVLQQVQQQAQLQQQNLQFGPPPPQSKLLEFLRVKPPTFSSTTNPIEAHDWLHAIEKKLNLLQCNEQEKVAFATHQLQGPASIWWDNYMVTRPAGAEVTWTEFRHSFNKAQVPEGIVGQKKREFRSLQQGTRTVIEYLHEFNRLARYAPEDVRTDAEKQEKFMSGLDDELTNQLISRDYEDFEKLVDKAIRQEEQCNKMTRKRKAAQFRTPQGKCQKPRYTMGRHGGPSTMIIRQHRPYHPGSFNKTHHSDSHNNSGSHSSLNPTPSPLMIPAQSDQPALPEQPKRLVEKPELCFNCNKPGHTVGKCPKPRRAGPKFVQARVNHASAEEAQSAPEVILGTFPVNSTPAVILFDSGATHSFISKRFAGAHGLSLVKLKIPMRVHTPGGGMTTTHYCPSVTVEIQGSIFPANLILLESKDLDKDKTKRMCVDYRALNEVTIKNKYPLPRIDDLFDQLKGATVFSKIDLRSGYHQLRIREEDIPKTAFITRYGLFECTVMSFGLTNAPAFFMNLMNKSEEEHKQHLRLVLEKLKEPQLYAEFSKCDFWLKEVQFLGHIVNAQGVAVDPANVQSVTKWTPPRTVTQVRSFLGLAGYYRRFIENFSKIAKPMTQLLKKEEKFIWSAECNRSFEELKRRLVSAPVLILPDQTKDFQVYCDASRQGLGCVLMQDGKVVSYASRQMRPHEGNYPTHDLELAAVVHALKIWRHYLISNRCEVYTDHKSLKYIFTQADLNLRQRRWLELIKDYDMGIHYHPGKANVVADALSRKSYCNVAWVEQLCCEVQRDLEHLNLGIVEHGFVAALEAQPTLVEQVRIAQASDPEIAELKKNMRVGKARGFVEDEQGTIWMGERLCVPENKELKDLILTEAHQTQYSIHPGSTKMYQDLKEKFWWVSMRREIAEFVALCDVCQRVKAEHQRPAGLLQPLQIPEWKWEEIGMDFVTGLPRTSSGHDSIWVVRDRLTKVAHFHSVHTTYSGKKLAELYLARIMCLHGVPKKIVSDRGSQFTSKFWQKLQEELGTRLNFSTAYHPQTDGQTERVNQILEDMLRACALDFGGAWDKSLPYAEFSYNNSYQASLQMAPFEALYGRRCRTPLFWDQTGERQLFGTEVLNEAEEKVRAVRERLRIAQSREKSYADNRRRELVFQVGDYVYLRVTPLRGVHRFQTKGKLAPRFVGPYRILERRGEVAYQLELPSNMLGIHNVFHVSQLKKCLRVPEEQASPDQIEIQEDLTYVEKPTRILETSERKTRNKVIRFCKVQWSHHSEEEATWEREDELKATHPHLFASSSESRGRDSV

SEQ ID NO: 19574 - protein, 1340 aa, Oryza sativa
  Clone ID: TF_OSC400061j.C1.p1.fg
MAAKSRSMEHVPTVHLTTVRLPPPENPTICSGVGQSDSDDDNDDATDAATVPSGVDSRDYEDFEKLVDKAIRQEEHCNKINRKRKAAQFRTPQRKSQKPRFTMGHHGGPSTMIIRQHRPYHPGRFFKNHHSGSHNNSEQHSLNPTPSSLKIPAQSVQPALPEQPKRLVEKPELCFNCNKPGHTVGKCPKPRRAGPKFVQARVNHASAEEAQSAPEVILGTFPVNSTPAVILFDSGATHSFISKRFAGAHGLSLVKLKIPMRVHTPGGGMTTTHYCPSVTVEIQGSIFPANLILLESKDLDVILGMDWLTRHRGVIDCASRTIKLTNAKGEVVTFQSPVPQKPRISLNQAAGEEQEVAVEKTTKKLEDIPIVREYPEVFPDDLTTMPPKRDIEFRIDLVPGTAPIHKRPYRMGANELAEVKKQVDEQLQKGYIRPSTSPWGAPVIFVEKKDKTKRMCVDYRALNEVTIKNKYPLPRIDDLFDQLKGATVFSKIDLRSGYHQLRIREEDIPKTAFITRYGLFECTVMSFGLTNAPAFFMNLMNKVFMEFLDKFVVVFIDDILIYSKSEEEHEQHLRLVLEKLKEHQLYAKFSKCDFWLKEVQFLGHIVNAQGVAVDPANVESVTKWTPPRTVTQVRSFLGLAGYYRRFIENFSKIAKPMTQLLKKEEKFIWSAECNRSFEELKRRLVSAPVLILPDQTKDFQVYCDASRQGLGCVLMQDGKVVSYASRQLRPHEGNYPTHDLELAAVVHALKIWRHYLIGNRCEVYTDHKSLKYIFTQPDLNLRQRRWLELIKDYDMGIHYHPGKANVVADALSRKSHCNVAWVEELCCEVQRDLGHLNLGIVEHGFVAALEAQPTLVEQVRIAQASDPEIAELKKNMRVGKARGFVEDEQGTIWMGERLCVPENKELKDLILTEAHQTQYSIHPGSTKMYQDLKEKFWWVSMRREIAEFVALCDVCQRVKAEHQRPAGLLQPLQIPEWKWEEIGMDFITGLPRTSSGHDSIWVVVDRLTKMAHFIPVHTTYSGKKLAELYLARIMCLHGVPKKIVSDRGSQFTSKFWQKLQEELGTRLNFSTAYHPQTDGQTERVNQILEDMLRACALDFGGAWDKSLPYAEFSYNNSYQASLQMAPFEALYGRRCRTPLFWDQTGERQLFGTEVLNEAEEKVRAVRERLRIAQSRQKSYADNRRRELAFETGDYVYLRVTPLRGVHRFQTKGKLAPRFVGPYRILERRGEVAYQLELPSNMLGIHNVFHVSQLKKCLRVPEEQASPDHIEIQEDLTYVEKPTRILETSERKTRNKVIRFCKVQWSHHSEEEATWEREDELKATHPHLFASPSESRGRDSV

SEQ ID NO: 19575 - protein, 604 aa, Oryza sativa
  Clone ID: TF_OSC400219j.C1.p1.fg
MEIRNGSRDSNNASGSEEPINGARANGASDNSPSPPPENPTIAQVLDNQTQMMTMMMQQMQQQYHQVLQQVQQQAQQQQQNLQFGPPPPQSKLLEFLRVKPPTFSSTTNPIEAYDWLHAIEKKLNLLQCNEQEKVAFATHQLQGPASIWWDNYMVTRPAGAEVTWTEFRHSFNKAQVPEGIVAQKKREFRSLQQGTRTVIEYLHEFNRLARYAPEDVRTDAERQEKFLSGLDDELTNQLISRDYEDFEKQVHKAIRQEEQCSKMNRKRKAAQFRTPQGKCQKPRFTMGRQGGPSTMIIRQHRPYHPGNFNKNNNSGSHSSLNPTPSLLMIPAQSDQPAQPALPEQPKRLGEKPELCFNCNQPGHTVGKCPKPRRAGPKFVQARVNHASAEEAQSAPEVILGTFPVNSTPAVILFDSGATHSFISKRFAGAHGLSLVKLKIPMRVHTPGGGMTTTHYCPAVTVEIQGLIFPANLILLESKDLDVILGMDWLTRHRGVIDCASRTIKLTNAKGEVVTFQSPVLQKPRISLNQAAGEEQEVAVEKTTKKLEDIPIVREYPEVFPDDLTTMPPKRDIEFRIDLVPGTAPIHKRPYRMGASELAEVKKQ

SEQ ID NO: 19576 - protein, 1522 aa, Oryza sativa
  Clone ID: TF_OSC400221j.C1.p7.fg
MEIRNGSRDSNNASGSEEPINGARANGASDNSPSPPPENPTIAQVLDNQTQMMTMMMQQMQQQYHQVLQQVQQQAQQQQQNLQFGPPPPQSKLLEFLRVKPPTFSSTTNPIEAYDWLHAIEKKLNLLQCNEQEKVAFATHQLQGPASIWWDNYMVTRPAGAEVTWTEFRHSFNKAQVPEGIVAQKKREFRSLQQGTRTVIEYLHEFNRLARYAPEDVRTDAERQEKFLSGLDDELTNQLISRDYEDFEKQVHKAIRQEEQCSKMNRKRKAAQFRTPQGKCQKPRFTMGRQGGPSTMIIRQHRPYHPGNFNKNNNSGSHSSLNPTPSLLMIPAQSDQPAQPALPEQPKRLGEKPELCFNCNQPGHTVGKCPKPRRAGPKFVQARVNHASAEEAQSAPEVILGTFPVNSTPAVILFDSGATHSFISKRFAGAHGLSLVKLKIPMRVHTPGGGMTTTHYCPAVTVEIQGLIFPANLILLESKDLDVILGMDWLTRHRGVIDCASRTIKLTNAKGEVVTFQSPVLQKPRISLNQAAGEEQEVAVEKTTKKLEDIPIVREYPEVFPDDLTTMPPKRDIEFRIDLVPGTAPIHKRPYRMGASELAEVKKQVDEQLQKGYIRPSTSPWGAPVIFVEKKDKTKRMCVDYRALNEVTIKNKYPLPRIDDLFDQLKGATVFSKIDLRSGYHQLRIREEDIPKTAFITRYGSFECTVMSFGLTNAPAFFMNLMNKVFMEFLDKFVVVFIDDILIYSKSEEEHEQHLRLVLEKLKEHQLYAKFSKCDFWLKEVQFLGHIVNAQGVAVDPANVESVTEWTPPRTVTQVRSFLGLAGYYRRFIENFSKIAKPMTQLLKKEEKFIWSAECNRSFEELKRRLVSAPVLTLPDQTKDFQVYCDASRQGVGCVLMQDGKLVSYASRQLRPHEGNYPTHDLELAAVVHALKIWRHYLIGNRCEVYTDHKSLKYIFTQPDLNLRQRRWLELIKDYDMGIHYHPGKANVVADALSRKSYCNVAWVEQLCCEVQRDLEHLNLGIVEHGFVAALEAQPTLVEQVRIAQASDPEIAELKKNMRVGKARGFVEDEQGTIWMGERLCVPENKELKDLILTEAHQTQYSIHPGSTKMYQDLKEKFWWVSMRREIAEFVALCDVCQRVKAEHQRPAGLLQPLQIPEWKWEEIGMDFITGLPRTSSGHDSIWVVVDRLTKVAHFIPVHTTYSGKKLAELYLARIMCLHGVPKKIVSDRGSQFTSKFWQKLQEELGTRLNFSTAYHPQTDGQTERVNQILEDMLRACALDFGGAWDKSLPYAEFSYNNSYQASLQMAPFEALYGRRCRTPLFWDQTGERQLFGTEVLNEAEEKVRAVRERLRIAQSRQKSYADNRRRELAFETGDYVYLRVTPLRGVHRFQTKGKLAPRFVGPYRILERRGEVAYQLELPSNMLGIHNVFHVSQLKKCLRVPEEQASPDHIEIQEDLTYVEKPIRILETSERRTRNKVIRFCKVQWSHHSEEEATWEREDELKATHPHLFASSSESRGRDSV

SEQ ID NO: 19577 - protein, 1261 aa, Oryza sativa
  Clone ID: TF_OSC400271j.C1.p5.fg
MAVKYWFTGNPGRLTVLTTSGTVLPFSTTGFKCLLYANEPLAFFGYTLHHTSSSELKIFLVGAVLLRFVACGLVGGRYHVSVMVKTRNGSHDSNNASGSEERISGPCASDTFDNSSSPSPENPTIAQVLENQTQMMTMMMQQMQQQYHQVLQQVQQQAAAELAAWSSASLLGQKLLGQSFARVLIRHRFPRESWHKRRESSVPCNKKPEQLEYLHEFNRLARYAPKDVRTDAERQEKFLSGLDDELTNQLIPRDYEDFEKLVDKAIRQEELCNKMNRKRKAAQFRTPQGESQKPCFTMGHQGGPSTMIIRQHRPYHPGSFNKNHHNGSHNNSEQHSLNPTPSSLMILAQSVQPALPEQPKRLGEKPELCFNCNKPGHTVGKCPKPRHAGPKFVQARVNHASAEEAQSAPEVILGTFPINSTPAVILFDSGATHSFISKRFAGAHGLSFVKLKIPMRVHTPGGGMTTTHYCPSVTVEIQGLIFPANLILLESKDLDVILGMDWLTRHKGVIDCASRIIKLTNAKGEVVTFQSPVPQKPGISLNQAVGEGQEVAVEKTTKKLEDIPIVREYPEVFLDDLTTMPPKRDIEFRIDLAPGTAPIHKRPYIMGANELAEDKFVVVFIDDILIYSKSQEEHEQHLRLELEKLKEHQLYAKFGKCDFWLKEVQFLGHIVNAQGVAVDPANVESVTKWTSPKTVTQIRSFLGLAGYYRRFIENFSKIAKPMTQLLKKEEKFIWSAEWNRSFEELKRRLGLGCVLMQDGKVVSYASRQLRPHEGNYPTHDLELAAVVHALKIWRHYLIGNRCEVRIAQASDPEIAELKKNMRVGKARGFVEDEQGTIWMGERLCVPKNKELKDLILTEAHQTRYSIHPGSTKMYQDLKEKFWWVSMRREIAEFVALCDVCQRVKAEHERPAGLLQPLQIPEWKWEEIGMDFITGLPRTSSGHDSIWVVVDRLTKVAHFIPVHTTYSGKKSQFTSKFWQKLQEELGTRLNFSTAYHPQTDGQTERVNQILEDMLRACALDFGGAWDKSLPYAEFSYNNSYQASLQMATFEALYGRRCRTPLFWNQTGERQLFGTEVLNEAEEKVRAVMERLRIAQSRQKSYADNRQRELTFEAGDYVYLRVTPLRGVHRFQTKGKLAPRFVGPYRVLERRGEVAYQLELPSNMFGIHNVFHVSQLKKCLRVPEEQASPDQIEIQEDLTYVEKPTRILEISERRTRNKVIRFCKVQWSHHSEKEATWKREDELKATHPHLFASSSESRGRDSV

SEQ ID NO: 19578 - protein, 1441 aa, Oryza sativa
  Clone ID: TF_OSC400535j.C1.p1.fg
METRNGSRDSNNASGSEKPINGARANSASDNSPSPPPENPTIAQVLDNQTQMMTMMMQQMQQQYHQVLQQVQQQAQLQQQNLQFGPPPPQSKLLEFLRVKPPTFSSTTNPIEAHDWLHAIEKKLNLLQCNEQEKVAFATHQLQGPASIWWDNYMVTRPAGAEVTWTEFRHSFNKAQVPEGIVAQKKREFRSLQQGTRTVIEYLHEFNRLARYAPEDVRTDAERQEKFLSGLDDELTNQLISRDYEDFEKLVDKAIRQEEQCNKMNRKRKAAQFRTPQGKCQKPRFTMGHQGGPSTMIIRQHRPYHPGNFNKNNNSGSHSSLNPTPSPLMIPAQSDQSDQLAQPALPEQPKRLGEKPELCFNCNKPGHTVGKCPKPRRAGPKFVQARVNHASAEEAQSAPEVILGTFPVNSTPAVILFDSGATHSFISKRFAGAHGLSLVKLKIPMRVHTPGGGMTTTHYCPSVTVEIQGLIFPANLILLESKDLDVILGMDWLTRHRGVIDCASRTIKLTNAKGEVVTFQSLVPRKPGISLNQVAGEEQEVAVEKTTKKLEDIPIVREYPEVFPDDLTTMPPKRDIEFRIDLVPGTAPIHKRPYRMGASELAEVKKQVDEQLQKGYIRPSTSPWGAPVIFVEKKDKTKRMCVDYRALNEVTIKNKYPLPRIDDLFDQLKGATVFSKIDLRSGYHQLRIREEDIPKTAFITRYGLFECTVMSFGLTNAPAFFMNLMNKVFMEFLDKFVVVFIDDILIYSKSEEEHEQHLRLVLEKLKEHQLYAKFSKCDFWLKEVQFLGHIVNAQGVAVDPANVESVTKWTPPRTVTQDGKVVSYASRQLRPHEGNYPTHDLELAAVVHALKIWRHYLIGNRCEVYTDHKSLKYIFTQPDLNLRQRRWLELIKDYDMGIHYHPGKANVVADALSRKSYCNVAWVEQLCCEVQRDLEHLNLGIVEHGFVAALEAQPTLVEQVRIAQASDPEIAELKKNMRVGKARGFVEDEQGTIWMGERLCVPENKELKDLILTEAHQTQYSIHPGSTKMYQDLKEKFWWVSMRREIAEFVALCDVCQRVKAEHQRPAGLLQPLQIPEWKWEEIGMDFITGLPRTSSGHDSIWVVVDRLTKVAHFIPVHTTYSGKKLAELYLSRIMCLHGVPKKIVSDRGSQFTSKFWQKLQEELGTRLNFSTAYHPQTDGQTERVNQILEDMLRACALDFGGAWDKSLPYAEFSYNNSYQASLQMAPFEALYGRRCRTPLFWDQTGERQLFGTEVLNEAEEKVRAVRERLRIAQSRQKSYADNRRRELVFQVGDYVYLRVTPLRGVHRFQTKGKLAPRFVGPYRILERRGEVAYQLELPSNMLGIHNVFHVSQLKKCLRVPEEQASPDQIEIQEDLTYVEKPTRILETSERKTRNKVIRFCKVQWSHHSEEEATWEREDELKATHPHLFASSSESRGRDSV

SEQ ID NO: 19579 - protein, 1524 aa, Oryza sativa
  Clone ID: TF_OSC400563j.C1.p6.fg
MEIRNGSRDSNNASGSEEPINGARANGASDNSPSPPPENPTIAQVLDNQTQIMTMMMQQMQQQYHQVMQQVQQQAQLQQQNLQFGPPPPQSKLLEFLRVKPPTFSSTTNPIEAHDWLHAIEKKLNLLQCNEQEKVAFATHQLQGPASIWWDNYMVTRPAGAEVTWTEFRHSFNKAQVPEGIVGQKKREFRSLQQGTRTVIEYLHEFNRLARYAPEDVRTDAEKQEKFMSGLDDELTNQLISRDYEDFEKLVDKAIRQEEQCNKMNRKRKAAQFRTPQGKCQKPRYTMGRHGGPSTMIIRQHRPYHPGSFNKTHHSDSHNNSEQHSLNPTPSSLKIPAQSVQPALPEQPKRLGEKPELCFNCNKPGHTVGKCPKPRRAGPKFVQARVNHASAEEAQSAPEVILGTFPVNSTPAVILFDSGATHSFISKRFAGAHGLSLVKLKIPMRVHTPGGGMTTTHYCPSVTVEIQGLIFPANLILLESKDLDVILGMDWLARHRGVIDCASRTIKLTNAKGEVVIFQSPVPQKPGISLNQAAGEEQEVAVEKTTKKLEDIPIVREYPEVFPDDLTTMPPKRDIEFRIDLVTGTAPIHKRPYRMGASELAEVKKQVDEQLQKGYIRPSTSPWGAPVIFVEKKDKTKRMCVDYRALNEVTIKNKYPLPRIDDLFDQLKGATVFSKIDLRSGYHQLRIREEDIPKTAFITRYGLFECTVMSFGLTNAPAFFMNLMNKVFMEFLDKFVVVFIDDILIYSKSEEEHEQHLRLVLEKLKEHQLYAKFSKCDFWLKEVQFLGHIVNAQGVAVDPANVESVTKWTPPRTVTQVRSFLGLAGYYRRFIENFSKIAKPMTQLLKKEEKFIWSAECNRSFEELKRRLVSAPVLILPDQTKDFQVYCDASRQGLGCVLMQDGKVVSYASRQLRPHEGNYPTHDLELAAVVHALKIWRHYLISNRCEVYTDHKSLKYIFTQPDLNPRQRRWLELIKDYDMGIHYHPGKANVVADALSRKSYCNVAWVEELCCEVQRDLEHLNLGIVEHGFVAALEAQPTLVEQVRIAQASDPEIAELKKNMRVGKARGFVEDEQGTIWMGERLCVPENKELKDLILTEAHQTQYSIHPGSTKMYQELKEKFWWVSMRREIAEFVALCDVCQRVKAEHQRPAGLLQPLQIPEWKWEEIGMDFITGLPRTSSGHDSIWVVVDRLTKVAHFIPVHTTYSGKKLAELYLARIMCLHGVPKKIVSDRGSQFTSKFWQKLQEELGTRLNFSTAYHPQTDGQTERVNQILEDMLRACALDFGGAWDKSLPYAEFSYNNSYQASLQMAPFEALYGRRCRTPLFWDQTGERQLFGTEVLNEAEEKVRAVRERLRIAQSRQKSYADNRRRELAFETGDYVYLRVTPLRGVHRFQTKGKLAPRFVGPYRILERRGEVAYQLELPSNMLGIHNVFHVSQLKKCLRVPEEQASPDQIKIQEDLTYMEKPTRILETSERRTRNKVIRFCKVQWSHHSEEEATWEREDELKATHPHLFASSSESRGRDSV

SEQ ID NO: 19580 - protein, 494 aa, Oryza sativa
  Clone ID: TF_OSC400719j.C1.p30.fg
MAVKDRFTGNPGRLTVLTTSGSGVEVLLSWSRLREVGFVAAVKMEIRNGSRDSNNASGSEELINGARANSASDNSPSPPPENPTIAQVLDNQTQMMTMMMQQMQQQYHQVLQQVQQQAQQQQQNLQFGPPPPQSKLLEFLRVKPPTFSCTTNPIEAHDWLHAIEKKLNLLQCNEQEKVAFATHQLQGPASVWWDNYMVTRLAGAEVTWTEFCHSFNKAQVPEGIVAQKKREFRSLQQGTRTVIEYLHEFNRLARYAPEDVRTDDGRQEKFLSGLDDELTNQLISRDYEDFEKLVDKAIRQEEHCNKINRKRKAAQFRTPQGKSQKPRFTMGRHGGPSTMIIRQHRPYHPGSFNKNHHSGSHNNSEQHSLNPTPSSLKIPTQSVQPALPEQPKRLGEKPELCFNCNKPGHTVGKCPKPRRAGPKFVQARVNHASAEEAQSAPKVILGTFPVNSTPAVILFDSGATHSFISKRFAGAHGLSLVKLKIPMRVHTPEA

SEQ ID NO: 19581 - protein, 1525 aa, Oryza sativa
  Clone ID: TF_OSC400746j.C1.p1.fg
MEIRNGSRDSNNASGSEEPINGARANGASDNSPSPPPENPTIAQVLDNQTQMMTMMMQQMQQQYHQVLQQVQQQAQLQQQNLQFGPPPPQSKLLEFLRVKPPTFSSTTNPIEAHDWLHAIEKKLNLLQCNEQEKVAFATHQLQGPASIWWDNYMVTRPAGAEVTWTEFRHSFNKAQVPEGIVAQKKREFRSLQQGTRTVIEYLHEFNRLARYAPEDVRTDAERQEKFLSGLDDELTNQLISRDYEDFEKLVDKAIRQEEQCNKMNRKRKAAQFRTPQGKCQKPRFTMGHQGGPSTMIIRQHRPYHPGNFNKNNNSGSHSSLNPTPSPLMIPAQSDQSDQLAQPALPEQPKRLGEKPELCFNCNKPGHTVGKCPKPRHAGPKFVQARVNHASAEEAQSAPEVILGTFPVNSTPAVILFDSGATHSFISKRFAGAHGLSLVKLKIPMRVHTPGGGMTTTHYCPSVTVEIQGLIFPANLILLESKDLDVILGMDWLTRHRGVIDCASRTIKLTNAKGEVVTFQSLVPRKPGISLNQAAGEEQEVAVEKTTKKLEDIPIVREYPEVFPDDLTTMPPKRDIEFRIDLVPGTAPIHKRPYRMGANELAEVKKQVDEQLQKGYIRPSTSPWGAPVIFVEKKDKTKRMCVDYRALNEVTIKNKYPLPRIDDLFDQLKGATVFSKIDLRSGYHQLRIREEDIPKTAFITRYGLFECTVMSFGLTNAPAFFMNLMNKVFMEFLDKFVVVFIDDILIYSKSEEEHEQHLRLVLEKLKEHQLYAKFSKCDFWLKEVQFLGHIVNAQGVAVDPANVESVTKWTPPRTVTQVRSFLGLAGYYRRFIENFSKIAKPMTQLLKKEEKFIWSAECNRSFEELKRRLVSAPVLILPDQTKDFQVYCDASRQGLGCVLMQDGKVVSYASRQLRPHEGNYPTHDLELAAVVHALKIWRHYLIGNRCEVYTDHKSLKYIFTQPDLNLRQRRWLELIKDYDMGIHYHPGKANVVADALSRKSYCNVAWVEELCCEVQRDLEHLNLGIVEHGFVAALEAQPTLVEQVRIAQASDPEIAELKKNMRVGKARGFVEDEQGTIWMGERLCVPENKELKDLILTEAHQTQYSIHPGSTKMYQDLKEKFWWVSMRREIAEFVALCDVCQRVKAEHQRPAGLLQPLQIPEWKWEEIGMDFITGLPRTSSGHDSIWVVVDRLTKVAHFIPVHTTYSGKKLAELYLARIMCLHGVPKKIVSDRGSQFTSKFWQKLQEELGTRLNFSTAYHPQTDGQTERVNQILEDMLRACALDFGGAWDKSLPYAEFSYNNSYQASLQMAPFEALYGRRCRTPLFWDQTGERQLFGTEVLNEAEEKVRAVRERLRIAQSRQKSYADNRRRELVFQVGDYVYLRVTPLRGVHRFQTKGKLAPRFVGPYRILERRGEVAYQLELPSNMLGIHNVFHVSQLKKCLRVPEEQASPDQIEIQEDLTYVEKPTRILETSERRTRNKVIRFCKVQWSHHSEEEATWEREDELKATHPHLFTSSSESRGRDSV

SEQ ID NO: 19582 - protein, 2013 aa, Oryza sativa
  unsure (1)..(2013): unsure at all Xaa locations
  Clone ID: TF_OSC400770j.C1.p18.np
MAAGSRAYSFPTGRSLPLPTLYKPSPHLLRPFPPLAALPPRRNRARAVALSLRRRRRAPVRRRRRPGPPPTSAPPPSASPHPRRPRPPLRFARRPPERRRPRRPEPRRRLPPLRPPFSSPSTXGEPWTAASFPPFPPFSRPPLRHAYGRRRRPXGRGRAASRWPCRRGRLRAHRAAAAWGPAVSRSRPRVRLTRGAHGAGRCEPGAPGPPWTHLGHIRTGLRASVAKRYRFHMSSGTNEGYTSYGLVAKMSWHRAGVLLLGAQSCLPVPGVPAVGGVGSMYTSDQSIIYSNSRALGYGQAEQCTQMAGSINRRGLDLTGFVLELRGMCVVLGYPHGVDYQGKQLPEQEGDDAEPHAAWEVTAVILTGSPERTSLAVTAGGDSFSAACQNAALLAIGTLHQRYPDELQHLPYRYHPRRGGARDYATFRDASSEDDATIMHLAHMVEAYDAARIDFHQMVRRGLVKNNMKILELRQENLQLKKDLDAVEAQLRQLKIAQGEVCRPKRRRVCRSLKITARKSTSRPELVRQSLAWTCFVETPRAEPAPVVPQEDGASGVGSTEDALLLTFHGETRRSAATGEGSHPEGSNHNNHVSPPPPPSPPPPPPPDTNAILTQIVAQXANMMAAFLHHIQNPPQHNAPPPPPQHSKLAEFLRICPPTFSSSNNPVDALDWLHAVEKKLDTVQCSDEEKVIFAAHQLQGPASLWWNHFQATQLEGQPITWARFTAAFQRTHVPAGVMALKKREFRELKQGNRSVMEYLHEFNNLAWYAPEDVREDEEKXEKFLAGMDPELSVRLVSGDYSDFQRLVDKSIRLEAKHKELESHKRRLANFRNQQGANQRVRYTNPYPGGSSSQQQQQQQPRSAPRPQFVVRIPQPQQQQSQQGTRAPRPPTPAVQPGQGRRDVQGQQRLCFNCFEHGHFADKCPKPRRQQGQAPPRSNNGGKDVIRGRVNHVTAEDVLTTPDIIVGTFLIHSIPATILFDSGASHSFISVPFVGRNRLGIERLRNPLLITTPGGVMTAKYYSPAIPIEIQGIPFPSDLILLDTKNLDVILGMNWLAQFQGVVDCARRTVTLYRGPEQPVVFFAPPTSVGSSELHQIGLSEIPIVREFGDVFPEKLPGMLPKREIEFRIDLAPGTTPLYKRPYRMAANELAEVKKQLEELKEKGYIRPSTSPWGAPVIFVEKKDKTKRMCVDYRALNEVTIKNKYPLPRIDDLFDQLKGATVFSKIDLRSGYHQLRIREEDIPKTAFTTRYGLYEFTVMSFGLTNAPAFFMNLVNKVFMEYLDKFVVVFINDILVYSQSEEDHQHHLRLVLGKLREHQLYAKLSKCEFWLSEVKFLGHVISAKGVAVDPETVTAVIDWKQPKTVTQIRSFLGLAGYYRRFIENFSKIARPMTQLLKKEEKFVWSPQCEKAFQTLKERLVSSPVLVXPDTRKDFMVYCDASRQGLGCVLMQEGHVVAYASRQLRPHEGNYPTHDLELAAVVHALKIWRHYLIGNRCEIYTDHKSLKYIFTQSDLNLRXRRWLELIKDYDVGIHYHPGKANVVADALSRKSHCNTLDVRGIPPELNQQMEALNLSIVGRGFLATLEAKPTLLDQIREAQKNDPDMHGLLKNMKQGKAAGFTEDEHGTLWNGNRRVKAEHQRPAGLLQPLQVPEWKWDEIGMDFITGLPKTQGGYDSIWVVVDRLTKVARFIPVKTTYGGNKLAELYFARIVSLHGVPKKIVSDRGSQFTSHFWKKLQEELGTRLNFSTAYHPQTDGQTERLNQILEDMLRSCVLDFGKTWDKSLPYAEFSYNNSYQASLXMAPYEALYGRKCRTPLLWDQVGESQVFGTDILREAEAKVRTIRDNLKVAQSRQKSYADNRRRNLEFAVDDFVYLRVTPLRGVHMFQTKGKLAPRFVGPFRIIARRGEVAYQLELPASLGNVHDVFHVSQLKKCLRVPSEQADSEQIEVREDLTYVERPVKILDTMERRTRNWVIRFCKVQWSNHAEEEATWEREDELKAAHPNLFGSSSESRGRDSV

SEQ ID NO: 19583 - protein, 1524 aa, Oryza sativa
  Clone ID: TF_OSC400903j.C1.p71.fg
MEIRNGSRDSNNASGSEEPINGARANGASDNSPSPPPENPTIAQVLDNQTQMMTMMMQQMQQQYHQVLQQVQRQAQQQQQNLQFGPPPPQSKLLEFLRVKPPTFSSTTNPIEAHDWLHAIEKKLNLLQCNEQEKVAFATHQLQGPASVWWDNYMVTRPAGAEVTWTEFRHSFNKAQVPEGIVAQKKREFRSLQQGTRTVIEYLHEFNLLARYAPEDVRTDAEKQEKFMSGLDDELTNQLISRDYEDFEKLVDKAIRQEEHCNKINRKRKAAQFRTPQGKSQKPRFTMGHHGGPSTMIIRQHRPYHPGNFNKNHHNGSHNNSEQHSLNPTPSSLKIPAQSVQPALPEQPKRLGEKPELCFNCNKPGHTVGKCPKPRRAGPKFVQARVNHASAEEAQSAPEVILGTFPVNSTPAVILFDSGATHSFISKRFAGAHGLSLVKLKIPMRVHTPGGGMTTTHYCPSVTVEIQGLIFPANLILLESKDLDVILGMDWLTRHRGVIDCASRTIKLTNAKGEEVTFQSLVPRKPGVSLNQAAGEEQEVAVEKTTKKLEDIPIVREYPEVFPDDLTTMPPKRDIEFRIDLVPGTAPIHKRPYRMGANELAEVKKQVDEQLQKGYIRPSTSPWGAPVIFVEKKDKTKRMCVDYRALNEVTIKNKYPLPRIDDLFDQLKGATVFSKIDLRSGYHQLRIREEDIPKTAFITRYGLFECTVMSFGLTNAPAFFMNLMNKVFMEFLDKFVVVFIDDILIYSKSEEEHEQHLRLVLEKLKEHQLYAKFSKCDFWLKEVQFLGHIVNAQGVAVDPANVESVTKWTPPRTVTQVRSFLGLAGYYRRFIENFSKIAKPMTQLLKKEEKFIWSAECNRSFVELKRRLVSAPVLILPDQTKDFQVYCDASRQGLGCVLMQDGKVVSYASRQLRPHEGNYPTHDLELAAVVHALKIWRHYLIGNRCEVYTDHKSLKYIFTQPDLNLRQRRWLELIKDYDMGIHYHPGKANVVADALSRKSYCNVAWVEQLCCEVQRDLEHLNLGIVEHGFVAALEAQPTLVEQVRIAQASDPEIAELKKNMRVGKARGFVEDEQGTIWMGERLCVPENKELKDLILTEAHQTQYSIHPGSTKMYQDLKEKFWWVSMRREIAEFVALCDVCQRVKAEHQRPAGLLQPLQIPEWKWEEIGMDFITGLPRTSSGHDSIWVVVDRLTKVAHFIPVHTTYSGKKLAELYLARIMCLHGVPKKIVSDRGSQFTSKFWQKLQEELGTRLNFSTAYHPQTDGQTERVNQILEDMLRACALDFGGAWDKSLPYAEFSYNNSYQASLQMAPFEALYGRRCRTPLFWDQTGERQLFGTEVLNEAEEKVRAVRERLRIAQSRQKSYADNRRRELAFETGDYVYLRVTPLRGVHRFQTKGKLAPRFVGPYRILERRGEVAYQLELPSNMLGIHNVFHVSQLKKCLRVPEEQASPDQIEIQEDLTYVEKPTRILETSERKTRNKVIRFCKVQWSHHSEEEATWEREDELKATHPHLFASSSESRGRDSV

SEQ ID NO: 19584 - protein, 1562 aa, Oryza sativa
  Clone ID: TF_OSC401058j.C1.p66.fg
MAVKDRFTGNPGRLTVLTTSGSGFVACGLVGGRYHVSVMEIRNGSRDSNNASGSEEPINGARANGASYNSPSPPPENPTIAQVLDNQTQMMTMMMQQMQQQYHQVLQQVQQQAQPQQQNLQFGPPPPQSKLLEFLRVKPPTFSSTTTPIEAHDWLHAIEKKLNLLQCNEQEKVAFATHQLQGPASIWWDNYMVTRPAGAEVTWTEFCHSFNKAQVPEGIVAQKKREFRSLQQGTRTVIEYLHEFNRLARYAPEDVRTDAERQEKFMSGLDDELTNQLISRDYEDFEKLVDKAIRQEEQCNKMNRKRKAAQFRTPQGKCRKPRFTMGRHGGPSTMIIRQHRPYHPGSFNKNHHSGSYNNSEQHSLNPTPSSLKIPAQSVQPALPEQPKRLGEKPELCFNCNKPGHTVGKCPKPRRAGPKFVQARVNHASAEEAQSAPEVILGTFPVNSTPAVILFDSGATHSFISKRFAGAHGLSLVKLKIPMRVHTPGGGMTTTHYCPSVTVEIQGLIFPANLILLESKDLDVILGMDWLARHRGVIDCASRTIKLTNAKGEVVIFQSPVPQKPGISLNQAAGEEQEVAVEKTTKKLEDIPIVREYPEVFPDDLTTMPPKRDIEFRIDLVPGTAPIHKRPYRMGANELAEVKKQVDEQLQKGYIRPSTSPWGAPVIFVEKKDKTKRMCVDYRALNEVTIKNKYPLPRIDDLFDQLKGATVFSKIDLRSGYHQLRIREEDIPKTAFITRYGLFECTVMSFGLTNAPAFFMNLMNKVFMEFLDKFVVVFIDDILIYSKSEEEHEQHLRLVLEKLKEHQLYAKFSKCDFWLKEVQFLGHIVNAQGVAVDPANVESVTKWTPPRTVTQVRSFLGLAGYYRRFIENFSKIAKPMTQLLKKEEKFIWSAECNRSFEELKRRLVSAPVLILPDQTKDFQVYCDASRQGLGCVLMQDGKVVSYASRQLRPHEGNYPTHDLELAAVVHALKIWRHYLIGNRCEVYTDHKSLKYIFTQPDLNLRQRRWLELVKDYDMGIHYHPGKANVVADALSRKSYCNVAWVEQLCCEVQRDLEHLNLGIVEHGFVAALEAQPTLVEQVRIAQASDPEIAELKKNMRVGKARGFVEDEQGTIWMGERLCVPENKELKDLILTEAHQTQYSIHPGSTKMYQDLKEKFWWVSMRREIAEFVALCDVCQRVKAEHQRPAGLLQPLQIPEWKWEEIGMDFITGLPRTSSGHDSIWVVVDRLTKVAHFIPVHTTYSGKKLAELYLARIMCLHGVPKKIVSDRGSQFTSKFWQKLQEELGTRLNFSTAYHPQTDGQTERVNQILEDMLRACALDFGGAWDKSLPYAEFSYNNSYQASLQMAPFEALYGRRCRTPLFWDQTGERQLFGTEVLNEAEEKVRAVRERLRIAQSRQKSYADNRRRELVFQVGDYVYLRVTPLRGVHRFQTKGKLAPRFVGPYRILERRGEVAYQLELPSNMLGIHNVFHVSQLKKCLRVPEEQASPDQIEIQEDLTYVEKPTRILETSERKTRNKVIRFCKVQWSHHSEEEATWEREDELKATHPHLFASSSESRGRDSV

SEQ ID NO: 19585 - protein, 1567 aa, Oryza sativa
  Clone ID: TF_OSC401064j.C1.p47.fg
MAIKDRFTGNPGRLTVLTTSGSGVEVLLSWSRLREVGFVAAVKMEIRNGSRDSNNASGSEEPINGARANGASDNSPSPPPENPTIAQVLDNQTQMMTMMMQQMQQQYHQVLQQVQQQAQLQQQNLQFGPPPPQSKLLEFLRVKPPTFSSTTNPIEAHDWLHAIEKKLNLLQCNEQEKVAFATHQLQGPASIWWDNYMVTRPAGAEVTWTEFRHSFNKAQVPEGIVAQKKREFRSLQQGTRTVIEYLREFNLLARYAPEDVRTDAERQEKFLSGLDDELTNQLISRDYEDFEKLVDKAIRQEEHCNKINRKRKAAQFRTPQGKSQKPRFTMGHHGGPSTMIIRQHRPYHPGNFNKNHHSDSHNNSEQHSLNPTPSSLKIPAQSVQPALPEQPKRLGEKPELCFNCNKPGHTVGKCPKPRRAGPKFVQARVNHASAEEAQSAPEVILGTFPVNSTPAVILFDSGATHSFISKRFAGAHGLSLVKLKIPMRVHTPGGGMTTTHYCPSVTVEIQGLIFPANLILLESKDLDVILGMDWLARHRGVIDCASRTIKLTNAKGEVVIFQSPVPQKPGISLNQAAGEEQEVAVEKTTKKLEDIPMVREYPEVFPDDLTTMPPKRDIEFRIDLVPGTAPIHKRPYRMGANELAEVKKQVDEQLQKGYIRPSTSPWGAPVIFVEKKDKTKRMCVDYRALNEVTIKNKYPLPRIDDLFDQLKGATVFSKIDLRSGYHQLRIREEDIPKTAFITRYGLFECTVMSFGLTNAPAFFMNLMNKVFMEFLDKFVVVFIDDILIYSKSEEEHEQHLRLVLEKLKEHQLYAKFSKCDFWLKEVQFLGHIVNAQGVAVDPANVESVTKWTPPRTVTQVRSFLGLAGYYRRFIENFSKIAKPMTQLLKKEEKFIWSAECNRSFEELKRRLVSAPVLILPDQTKDFQVYCDASRQGLGCVLMQDGKVVSYASRQLRPHEGNYPTHDLELAAVVHALKIWRHYLIGNRCEVYTDHKSLKYIFTQPDLNLRQRRWLELIKDYDMGIHYHPGKANVVADALSRKSYCNVAWVEELCCEVQHDLERLNLGIVEHGFVAALEAQPTLVEQVRIAQASDPEIAELKKNMRVGKARGFVEDEQGTIWMGERLCVPENKELKDLILTEAHQTQYSIHPGSTKMYQDLKEKFWWVSMRREIAEFVALCDVCQRVKAEHQRPAGLLQPLQIPEWKWEEIGMDFITGLPRTSSGHDSIWVVVDRLTKVAHFIPVHTTYSGKKLAELYLARIMCLHGVPKKIVSDRGSQFTSKFWQKLQEELGTRLNFSTAYHPQTDGQTERVNQILEDMLRACALDFGGAWDKSLPYAEFSYNNSYQASLQMAPFEALYGRRCHTPLFWDQTGERQLFGIEVLNEAEEKVRAVRERLRIAQSRQKSYADNRRRELVFQVGDYVYLRVTPLRGVHRFQTKGKLAPRFVGPYRILERRGEVAYQLELPSNMLGIHNVFHVSQLKKCLRVPEEQASPDQIEIQEDLTYVEKPTRILETSERKTRNKVIRFCKVQWSHHSEEEATWEREDELKATHPHLFASPSESRGRDSV

SEQ ID NO: 19586 - protein, 1829 aa, Oryza sativa
  Clone ID: TF_OSC401065j.C1.p27.gm
METRNGSRDSNNASGSEEPINGARANGASDNSPSPPPENPTIAQVLDNQTQMMTMMMQQMQRQYHQVLQQVQQQAQQQQQNPQFGPPPPQSKLLEFLRVKPPTFSSTTNPIEAHDWLHAIEKKLNLLQCNEQEKVAFATHQLQGPASIWWDNYMVTRPTGAEVTWTEFRHSFNKAQVPEGIVGQKKREFRSLQQGTKTVIEYLHEFNRLARYAPEDVRTDAEKQEKFMSGLDDELTNQLISRDYEDFEKLVDKAIRQEEQCNKMNRKRKAAQFRTPQGKCQKPRYTMGRHGGPSTMIIRQHRPYHPAQSVQPALPEQPKRLGEKPELCFNCNKPGHTVGKCPKPRRAGPKFVQARVNHASAEEAQSAPEVILGTFPVNSTPAVILFDSGATHSFISKRFAGAHGLSLVKLKIPMRVHTPGGGMTTTHYCPSVTVEIQGLIFPANLILLESKDLDVILGMDWLTRHRGVIDCASRTIKLTNAKGEVVIFQSPVPQKPGISLNQAAGEGQEVAVEKTTKKLEDIPIVREYPEVFPDDLTTMPPKRDIEFRIDLVPGTASIHKRPYRMGASELAEVKKQVDEQLQKGYIRPSTSPWGAPIIFVEKKDKTKRMCVDYRALNEVTIKNKYPLPRIDDLFDQLKGATVFSKIDLRSGYHQLRIREEDIPKTAFITRYGLFECTVMSFGLTNAPAFFMNLMNKVFMEFLDKFVVVFIDDILIYSKSEEEHEQHLRLVLEKLKEHQLYAKFSKCDFWLKEVQFLGHIVNAQGVAVDPANVESVTKWTPPRTVTQVRSFLGLAGYYRRFIENFSKIAKPMTQLLKKEEKFIWSAECNRSFEELKRRLVSAPVLILPDQTKDFQVYCDASRQGLGCVLMQDGKVVSYASRQLRPHEGNYPTHDLELAAVVHALKIWRHYLIGNRCEDYDMGIHYHPGKANVVADALSRKSYCNVAWVEQLCCEVQRDLEHLNLGIVEHGFVAALEAQPTLVEQMAPFEALYGRRCRTPLFWDQTGERQLFGTEVLNEAEEKVRAVRERLRIAQSRQKSYADNRRRELAFETGDYVYLRVTPLRGVHHFQTKGKLAPRFVGPYRILERRGEVAYQLELPSNMLGIHNVFHVSQLKKCLRVPEEQASPDHIEIQEDLTYVEKPTRILETSERRTRNKVIRFCKVQWSHHSEEEATWEREDELKATHPHLFASSSESRAPPLAAAFGREPPPLESPPRQTAAAVSFAAARAFPAAASRRRNPTGAPLPSRAGCRRRPSVPPRRRSSPLVSSHAGRRHRLGEESPFLLPFLSPVSAAALRACAVVFGCRRRLRAGRRRLPAPPVTAGGTGGEGGRDGVGSAGVSGCPAAGFTAAQEGTAHCLLRGGELEIFLVGAVLSKLVSSLPSRIACGVESPAAEVKLPGQTSKSANVTIGNTGNGSGYGNLPTVARRSTVLIGNGSHASVHGVGTVDLKFNSGKIVQLKNGQHVPSIDMNLVSGSRLTRDGFKLVFESNKVVVSKHGYFIGKGYECGGLFHFSLSDFCNNEAPRRSKRQRTAKSFGDDFTVYLMDDTPKSISEAYASPDADYWKEAVRSEMDSIITNGTWEVTERPCGCKPVGCKWVFKKKLRPDASHGLLVHQMDVKTAFLNGELDEEIYMDQPNGFVVEGFAVNEADKCVYYRHGGGEGVILCLYVDDVLIFGTNLEVINESHYVEKILNRFGYIDSKPSPTPYDPSLLLRKNKRIARNQLEYSQIIGSLMYLASATRLDISFAGLPPTLYRASLVDYSIPLAGMHRRSGEQVSGTSAFDVLHREKAAIRFLGSASLDCSLFVRDGSASSPLACFAPSSTLATASSS

SEQ ID NO: 19587 - protein, 1524 aa, Oryza sativa
  Clone ID: TF_OSC401242j.C1.p1.fg
METRNGSRDSNNASGSEEPINGARANGASDNSPSPPPENPTIAQVLDNQTQMMTMMMQQMQQQYHQVLQQVQQQAQLQQQNLQFGSPPPQSKLLEFLRVKPPTFSSTTNPIEAHDWLHAIEKKLNLLQCNEQEKVAFATHQLQGPASIWWDNYMVTRPTGAEVTWTEFRHSFNKAQVPEGIVGQKKREFRSLQQGTRTVIEYLHEFNRLARYAPEDVRTDAERQEKFLSGLDDELTNQLISRDYEDFEKLVDKAIRQEEHCNKINRKRKAAQFRTPQGKSQKPRFTMGHHGGPSTMIIRQHRPYHPGNFNKNHHSDSHNNSEQHSLNPTPSSLKIPAQSVQPALPEQPKRWGEKPELCFNCNKPGHTVGKCPKPRRAGPKFVQARVNHASAEEAQSAPEVILGTFPVNSTPAVILFDSGATHSFISKRFAGAHGLSLVKLKIPMRVHTPGGGMTTTHYCPSVTVEIQGLIFPANLILLESKDLDVILGMDWLARHRGVIDCASRTIKLTNAKGEVVIFQSPVPQKPGISLNQAAGEEQEVAVEKTTKKLEDIPIVREYPEVFPDDLTTMPPKRDIEFRIDLVPGTAPIHKRPYRMGANELAEVKKQVDEQLQKGYIRPSTSPWGAPVIFVEKKDKTKRMCVDYRALNEVTIKNKYPLPRIDDLFDQLKGATVFSKIDLRSGYHQLRIREEDIPKTAFITRYGLFECTVMSFGLTNAPAFFMNLMNKVFMEFLDKFVVVFIDDILIYSKSEEEHEQHLRLVLEKLKEHQLYAKFSKCDFWLKEVQFLGHIVNAQGVAVDPANVESVTKWTPPRTVTQVRSFLGLAGYYRRFIENFSKIAKPMTQLLKKEEKFIWSAECNRSFEELKRRLVSAPVLILPDQTKDFQVYCDASRQGLGCVLMQDGKVVSYASRQLRPHEGNYPTHDLELAAVVHALKIWRHYLIGNRCEVYTDHKSLKYIFTQPDLNLRQRRWLELIKDYDMGIHYHPGKANVVADALSRKSYCNVAWVEELCCEVQHDLEHLNLGIVEHGFVAALEAQPTLVEQVRIAQASDPEIAELKKNMRVGKARGFVEDEQGTIWMGERLCVPENKELKDLILTEAHQTQYSIHPGSTKMYQDLKEKFWWVSMRREIAEFVALCDVCQRVKAEHQRPAGLLQPLQIPEWKWEEIGMDFITGLPRTSSGHDSIWVVVDRLTKVAHFIPVHTTYSGKKLAELYLARIMCLHGVPKKIVSDRGSQFTSKFWQKLQEELGTRLNFSTAYHPQTDGQTERVNQILEDMLRACALDFGGAWDKSLPYAEFSYNNSYQASLQMAPFEALYGRRCRTPLFWDQTGERQLFGTEVLNEAEEKVRAVRERLRIAQSRQKSYADNRRRELAFETGDYVYLRVTPLSGVHRFQTKGKLAPRFVGPYRILERRGEVAYQLELPSNMLGIHNVFHVSQLKKCLRVPEEQASPDQIEIQEDLTYVEKPTRILETSERKTRNKVIRFCKVQWSHHSEEEATWEREDELKATHPHLFASSSESRGRDSV

SEQ ID NO: 19588 - protein, 1229 aa, Oryza sativa
  Clone ID: TF_OSC401246j.C1.p16.fg
MIIRQHRPYHPGNFNKNHHSDSHNNSEQHSLNPTPSSLKIPAQSVQPALPEQPKRLGEKPELCFNCNKPGHTVGKCPKPRRAGPKFVQARVNHASAEEAQSAPEVILGTFPVNSTPAVILFDSGATHSFISKRFAGAHGLSLVKLKIPMRVHTPGGGMTTTHYCPSVTVEIQGLIFPANLILLESKDLDVILGMDWLARHRGVIDCASRTIKLTNAKGEVVIFQSPVPQKPGISLNQAAGEEQEVAVEKTTKKLEDIPIVREYPEVFPDDLTTMPPKRDIEFRIDLVPGTAPIHKRPYRMGANELAEVKKQVDEQLQKGYIRPSTSPWGAPVIFVEKKDKTKRMCVDYRALNEVTIKNKYPLPRIDDLFDQLKGATVFSKIDLRSGYHQLRIREEDIPKTAFITRYGLFECTVMSFGLTNAPAFFMNLMNKVFMEFLDKFVVVFIDDILIYSKSEEEHEQHLRLVLEKLKEHQLYAKFSKCDFWLKEVQFLGHIVNAQGVAVDPANVESVTKWTPPRTVTQVRSFLGLAGYYRRFIENFSKIAKPMTQLLKKEEKFIWSAECNRSFEELKRRLVSAPVLILPDQTKDFQVYCDASRQGLGCVLMQDGKVVSYASRQLRPHEGNYPTHDLELAAVVHALKIWRHYLIGNRCEVYTDHKSLKYIFTQPDLNLRQRRWLELIKDYDMGIHYHPGKANVVADALSRKSYCNVAWVEELCCEVQHDLEHLNLGIVEHGFVAALEAQPTLVEQVRIAQASDPEIAELKKNMRVGKARGFVEDEQGTIWMGERLCVPENKELKDLILTEAHQTQYSIHPGSTKMYQDLKEKFWWVSMRREIAEFVALCDVCQRVKAEHQRPAGLLQPLQIPEWKWEEIGMDFITGLPRTSSGHDSIWVVVDRLTKVAHFIPVHTTYSGKKLAELYLARIMCLHGVPKKIVSDRGSQFTSKFWQKLQEELGTRLNFSTAYHPQTDGQTERVNQILEDMLRACALDFGGAWDKSLPYAEFSYNNSYQASLQMAPFEALYGRRCRTPLFWDQTGERQLFGTEVLNEAEEKVRAVRERLRIAQSRQKSYADNRRRELAFETGDYVYLRVTPLRGVHRFQTKGKLAPRFVGPYRVLERRGEVAYQLELPSNMLGIHNVFHVSQLKKCLRVPEEQASPDQIEIQEDLTYVEKPTRILETSERKTRNKVIRFCKVQWSHHSEEEATWEREDELKATHPHLFASSSESRGRDSV

SEQ ID NO: 19589 - protein, 1827 aa, Oryza sativa
  unsure (1)..(1827): unsure at all Xaa locations
  Clone ID: TF_OSC401339j.C1.p12.np
MSWHRAGVLLLGAQSCLPVPEVPAVGRVGSVLLSMARMGWKLCHVFRSYAVVMADTLNRRGLDLTGFVLELRGLCVVLGYPHGVDYQCKKLPEQDGDDAEPRAAWEVTAVILTGSPERTSLAITTDGDSFPAACQNAALLAIGTLHQRYPDELXHSPYRYHPRRGGARDYATFRDASSEDDATIMYLARMVEEYDAARIDFHHMVRRGLVENNMKILELRQENLQLKKDLDAVEAQLCQLKIAQGEVCRPKRRRVCRSLKITAHKSTSRPELVRQSLAWTCFVETPRAEPAPLVPQEEEASGVGSTEDLSLFASSVWDFQMVTTRRSAATGDWXGSHPEGSNHNNHGSPPPPPPQPPPPPQDTNPILTQILAQQANMMVAFLHHIQNPPQHNAPPPPPPPQHSKLAEFLRIRPPTFSSSHNPVDALDWLHAVGKNLDTVQCNDEEKVIFAAHQLQGPASLWWDHFQATQPEGQPIIWARFAAAFRRTHVPAGVMALKKREFRELKQGNCSVMEYLHEFNNLARYAPEDVREDEEKQEKSLAGMDPELSMRLVSGDYPDFQRLVDKSIRLEAKHKELESHKRRLANFRNQQGANQRIRYTNPYPGGSSSQQQQQPRSAPRPQFVVRVLQPQQQQNQQGTRAPHPPAPAVQPGQGRRDAQGQQRLCFNCFEHGHFADKCPKPRRQQGQAPPRPNNGGKDVTRGRVNHVTAEDMLTTPDVIVGTFLIHSIPATILFDSGASHSFISVPFVGRNQLGVERLRNPLLITTPGGVMTAKYYSPAVPIEIQGIPFPSDLILLDTKNLDVILGMNWLAQFQGVVDCARRTVTLYRGPDQPVVFFAPPTSAGSSVLHQLGLPEIPIVSEFGDVFPEELPGMPPKREIEFRIDLAPGTTPLYKRPYHMAANELAEVKRQLEELKEKGYIRPSTSPWGAPVIFVEKKDKTKRMCVDYRALNEVTIKNKYPLPRIDDLFDQLKGATVFSKIDLRSGYHQLRIREEDIPKTAFTTRYGLYEFMVMSFGLTNAPAFFMNLMNKVFMEYLDKFVVVFIDDILVYSQSEADHQQHLRLVLGKLREHQLYAKLSKCEFXLSEVKFLGHVISAKGVAVDPETVTAVTDWKQPKTVTQVRSFLGLAGYYQRFIENFSKIARPMTQLLKKEEKFVWSPQCEKAFQTLKEKLVSSPVLILPDTRKEFLVYCDASRQGLGCVLMQEGHVVAYASRQLRPHEGNYPTHDLELAAVVHALKIWRHYLIGNRCEIYTDHKSLKYIFTQSDLNLRQRRWLELIKDYDVGIHYHPCKANVVADALSRKSRCNTLGVRGIPPELNQXLEALNLSIVSHGFLATLEAKPTLLDQIREAQKNDPDMHGILKNMKQGKAVGFIEDEHGTLWNGNRVCVPNDKELKQLILQEAHESPYSIHPGSTKMYLDLKEKYWWVSMKREIAEFVALCDVCQRVKAKHQRPAGLLQPLQVPEWKWDEIGMDFITGVPKSQDGYDSIWVVVDRLTKVARFIPVKTTYGGNKLTEVYFARIVSLHGVPKKIVSDRGSQFTSHFWKKLQEELGTRLNFSTAYHPQTDGQTERLNQILEDMLRACVLDFGKTWDKSLPYAEFSYNNSYQSSIQMAPYEALYGRKCRTPLLWDQVGESQVFGTDILREVEAKVRTIRDNLKVAQSRQKSYADNRRRNLEFAVDDFVYLRVTPLRGVHRFQTKGNLAPRFVGPFRIIARRGEVAYQLELPASLGNVHDVFHVSQLKKCLRVPSEQADSEQIEVREDLTYVEKPVKVLDTMERRTRNRVIRFCKVQWSNHAEEEATWEREDKLKAAYPDLFASSSESQGRDSV

SEQ ID NO: 19590 - protein, 1525 aa, Oryza sativa
  Clone ID: TF_OSC401513j.C1.p9.fg
METRNGSRDSNNASGSEEPINGARANGASDNSPSPPPENPTIAQVLDNQTQMMTMMMQQMQQQYHQVLQQVQQQAQLQQQNLQFGSPPPQSKLLEFLRVKPPTFSSTTNPIEAHDWLHAIEKKLNLLQCNEQEKVAFATHQLQGPASIWWDNYMVTRPTGAEVTWTEFRHSFNKAQVPEGIVAQKKREFRSLQQGTRTVIEYLHEFNRLARYAPEDVRTDAERQEKFLSGLDDELTNQLISRDYEDFEKLVDKAIRQEEQCNKMNRKRKAAQFRTPQGKCQKPRFTMGHQGGPSTMIIRQHRPYHPGNFNKNNNSGSHSSLNPTPSPLMIPAQSDQSDQLAQPALPEQPKRLGEKPELCFNCNKPGHTVGKCPKPRRAGPKFVQARVNHASAEEAQSAPEVILGTFPVNSTPAVILFDSGATHSFISKRFAGAHGLSLVKLKIPMRVHTPGGGMTTTHYCPSVTVEIQGLIFPANLILLESKDLDVILGMDWLTRHRGVIDCASRTIKLTNAKGEVVTFQSQVPQKPGISLNQAAGEEQEVAVEKTTKKLEDIPIVREYPEVFPDDLTTMPPKRDIEFRIDLVPGTAPIHKRPYRMGANELAEVKKQVDEQLQKGYIRPSTSPWGAPVIFVEKKDKTKRMCVDYRALNEVTIKNKYPLPRIDDLFDQLKGATVFSKIDLRSGYHQLRIREEDIPKTAFITRYGLFECTVMSFGLTNAPAFFMNLMNKVFMEFLDKFVVVFIDDILIYSKSEEEHEQHLRLVLEKLKEHQLYAKFSKCDFWLKEVQFLGHIVNAQGVAVDPANVESVTKWTPQRTVTQVRSFLGLAGYYRRFIENFSKIAKPMTQLLKKEEKFIWSAECNRSFEELKRRLVSAPVLILPDQTKDFQVYCDASRQGLGCVLMQDGKVVSYASRQLRPHEGNYPTHDLELAAVVHALKIWRHYLIGNRCEVYTDHKSLKYIFTQPDLNLRQRRWLELIKDYDMGIHYHPGKANVVADALSRKSYCNVAWVEQLCCEVQRDLEHLNLGIVEHGFVAALEAQPTLVEQVRIAQASDPEIAELKKNMRVGKARGFVEDEQGTIWMGERLCVPENKELKDLILTEAHQTQYSIHPGSTKMYQDLKEKFWWVSMRREIAEFVALCDVCQRVKAEHQRPAGLLQPLQIPEWKWEEIGMDFITGLPRTSSGHDSIWVVVDRLTKVAHFIPVHTTYSGKKLAELYLARIMCLHGVPKKIVSDRGSQFTSKFWQKLQEELGTRLNFSTAYHPQTDGQTERVNQILDDMLRACALDFGGAWDKSLPYAEFSYNNSYQASLQMAPFEALYGRRCRTPLFWDQTGERQLFGTEVLNEAEEKVRAVRERLRIAQSRQKSYADNRRRELAFETGDYVYLRVTPLRGVHRFQTKGKLAPRFVGPYRILERRGEVAYQLELPSNMLGIHNVFHVSQLKKCLRVPEERASPDQIEIQEDLTYVEKPTRILETSERKTRNKVIRFCKVQWSHHSEEEATWEREDELKATHPHLFASSSESRGRDSV

SEQ ID NO: 19591 - protein, 1553 aa, Oryza sativa
  Clone ID: TF_OSC401564j.C1.p13.fg
MAVKDRFTGNPGRLTVLTTSGSGCFTAFNYCFEMPALCKRTPSFLWLYPASYLLFRFVACGLVSGRYHVSVMGTRNGSRNSNNASGSEEPINGARANGASDNSPSPPPENPTIAQVLDNQTQMMTMMMQQMQQQYNQVLQQVQQQAQQQQQNLQFGPPPPQSKLLEFLRVKPPTFSSTTNPIEAHDWLHAIEKKLNLLQCNEQEKVPEGIVAQKKREFRSLQQGTRTVIEYLHEFNRLARYAPEDVRTDDRRQEKFLSGLDDELTNQLISRDYEDFEKLVNKAIRQEEHCNKINRKRKAAQFRTPQGKSQKPRFTMGHHGGPSTMIIRQHRPYHPGSFNKNHHSGSHNNSEQHSLNPTPSSLKIPAQSVQPALPEQPKRLGEKPELCFNCNKPGHTVGKCPKPRRAGPKFVQARVNHASAEEAQSAPEVILGTFPVNSTPAVILFDSGATHSFISKCFAGAHGLSLVKLKIPMRVHTPGGGMTTTHYCPSVTVEIQGLIFPAHLILLESKDLDVILGMDWLTRHRGVIDCASRTIKLTNAKGEVVTFQSPVPQKPGISLNQAAGEEQEVAVEKTTKKLEDIPIVREYPEVFPDDLTTMPPKRDIEFRIDLVPGTAPIHKRPYRMGANELAEVKKQVDEQLQKGYIRPSTSPWGAPVIFVEKKDKTKRMCVDYRALNEVTIKNKYPLPRIDDLFDQLKGATVFSKIDLRSGYHQLRIREEDIPKTAFITRYGLFECTVMSFGLTNAPAFFMNLMNKVFMEFLDKFVVVFIDDILIYSKSEEEHEQHLRLVLEKLKEHQLYAKFSKCDFWLKEVQFLGHIVNAQGVAVDPANVESVTKWTPPRTVTQVRSFLGLAGYYRRFIENFSKIAKPMTQLLKKEEKFIWSAECNRSFEELKRRLVSAPVLILPDQTKDFQVYCDASRQGLGCVLMQDGKVVSYASRQLRPHEGNYPTHDLELAAVVHALKIWRHYLIGNHCEVYTDHKSLKYIFTQPDLNLRQRRWLELIKDYDMGIHYHPGKANVVADASSRKSYCNVAWVEQLCCEVQRNLEHLNLGIVEHGFVVALEAQPTLVEQVRIAQASDPEIAELKKNMRVGKARGFVEDEQGTIWMGERLCVPENKELKDLILTEAHQTQYSIHPGSTKMYQDLKEKFWWISMRREIAEFVALCDVCQRVKAEHQRPAGLLQPLQILEWKWEEIGMDFITGLPRTSLGHDSIWVVVDRLTKVAHFIPVHTTYSGKKLAELYLARIMCLHGVPKKIVSDRGSQFTSKFWQKLQEELGTRLNFSTAYHPQTDGQTERVNQILEDMLRACALDFGGAWDKSLPYAEFSYNNSYQASLQMAPFEALYGRRCRTPLFWDQTGERQLFGTEVLNEAEEKVRAVRERLRIAQSRQKSYADNRRRELAFETRDYVYLRVTPLRGVHRFQTKGKLAPRFVGPYRILERRGEVAYQLELPSNMLGIHNVFHVSQLKKCLRVPEEQASPDHIEIQEDLTYVEKPTRILETSERKTRNKVIRFCKVQWSHHSEEEATWEREDELKATHPHLFASSSESRGRDSV

SEQ ID NO: 19592 - protein, 2039 aa, Oryza sativa
  Clone ID: TF_OSC401577j.C1.p9.gm
METRNGSRDSNNASGSEEPINGARANSASDNSPSPPPENPTIAQVLDNQTQMMTMMMQQMQQQYHQVLQQVQQQAQQQQQNLQFGPPPPQSKLLEFLRVKPPTFSSTTNPIEAHDWLHAIEKKLNLLQCNEQEKVPEGIVAQKKREFRSLQQGTRTVIEYLHEFNRLARYAPEDVRTDDGRQEKFLSGLDDELTNQLISKDYEDFEKLVDKAIRQEEHCNKINRKRKAAQFRTPQGKSQKPRFTMGRHGGPSTMIIRQHRPYHPGSFNENHHSGSHNNSEQHSLNPTPSSLKIPAQSVQLALPEQPKRLGEKPELCFNCNKPGHTVGKCPKPRCAGPKFVQACVNHASAEEAQSAPEVILGTFPVNSTPAVILFDSGATHSFISKRFAGAHGLSLVKLKIPMRVHTPGGGMTTTHYCPSVTVEIQGLIFPTNLILLESKDLDVILGMDWLTRHRGVIDCASRTIKLTNAKGEVVTFQSPVPQKPGISLNQAAGEEQEVAVEKTTKKLEDIPIVREYPEVFPDDLTTMPPKRDTEFRIDLVPGTAPIHKRPYRMGANELAEVKKQVDEQLQKGYIRPSTSPWGAPVIFVEKKDKTKRMCVDYRALNEVTIKNKYPLPRIDDLFDQLKGATVFSKIDLRSGYHQLRIREEDIPKTTFITRYGLFECTVMSFGLTNAPVFFMNLMNKVFMEFLDKFVVVFIDDILIYSKSEEEHEQHLWLVLEKLKEHQLYAKFSKCDFWLKEVQFLGHIVNAQGVAVDPANMESVTKWTPPRTVTQVRSFLGLAGYYRRFIENFSKIAKPMTAIEEGRKVYLDGKVVSYASRQLRPHEGNYPTHDLELAAVVHALKIWRHYLIGNRCEVYTYHKSLKYIFTQPDLNLRQRRWLELIKDYDMRIHYHPGKANVVADALSRKSYCNVAWVEQLCCEVQRDLEHLNLGIVEHGFVVALEAQPTLVEQVRIAQASNPEIAELKKNMRVGKARGFVEDEQGTIWMGERLCVPENKELKDLILTEAHQTQYSIHPGSTKMYQDLKEKFWWVSMRREIAEFVALCDVCQRVKAEHQRPAEVLNEAEEKVRAIRERLRIAQSRQKSYADNRRRELAFETGDYVILERRGEVAYQLELPSNMLGIHNVFHVSQLKKCLRVPEEQASPDHIEIQEDLTQPVVNCDVYAICGPFTICNDNKDPFCDCMKGYSIRSPKDWELDDRTGGCMRNTPLSCGAGKDRTGLTDKFYPVQSIRLPHNAENLQAPTSREECSQQLSDASPNGDEGVLYIRLAAKELQNSQRKMSGKIIGVAIDFGMAKMLGREFSRAMTTMRGTIGYIAPEWISGTVVTSKVDVYSYGMVLFEIISGRRNRSHEHFMDGDYSFYFPMQVARKLLKGEIGCLVDANLEGDVNLMEVERACKIACWCIQDHEFDRPTMAEVVQSLEDRDKPIDDPTAVELTISRMNVRVIHRAEWGGLRDRLANHNTGHVFLLHHSSPVFIFCFPMLLPCHVLLGLLLLSLHTPASSAAATDTVSPGHSLAGSDRLVSNNSKFALGFFKPGNESSYTNHNSYLGIWFNKVSKLTPLWTANGENPVVDPTSPELAISGDGNLAILDHATKSIIWSTRANITTNDTIAVLLNNGNLVLRSSSNSSNIFWQSFDYPTDTLFAGAKIGWDKVTGMNRRLVSRKSSVDQAPGIFSLELGLNGEGHLLWNSTVAYWSSGDWNGRYFGLAPEMIGDVMPNFTFVHNDKEAYFTYTLYDDTAIVHAGLDVFGIGFVGMWLEGNQEWFKNYRQPVVHCDVYAVCGPFTICDDNKDLFCDCMKGFSVRSPKDWELDDQTGGCIRNTPLSCGSSKDRTSLTDKFYPMQNFGMAKILGREFSRAMTTMRGTIGYMAPEWISGTVVTSKVDVYSYGMVLFEIISGRRNSSHECFRDGDYSFFFPMQVARKLLNGDIGSLVDASLKGDMNLVEVERACKIACWCIQDNEFDRPTMAEVVQALEGLLELDMPPLPRLLSAITGDSHSVTPQYFDSVPIVFITVAEEAHHSPPNLRTTGQCRDRSSDT

SEQ ID NO: 19593 - protein, 1514 aa, Oryza sativa
  Clone ID: TF_OSC401766j.C1.p14.fg
MEIRNGSRDSNNASGSEELINGACANSASDNSPSPPPENPTIAQVLDNQTQMMTVMMQQMQQQYHQVLQQVQQQAQQQQQNLQFGPPPPQSKLLEFLRVKPPTFSSTTNPIEAHDWLHAIEKKLNLLQCNEQEKVAFATHQLQGPASVWWDNYMVTRPTGAEVTWTEFCHSFNKAQVPEGIVAQKKREFRSLQQGTRTVIEYLHEFNRLARYAPEDVRTDDGRREKFLSGLDDELTNQLISRDYEDFEKLVDKAIRQEEHCNKINRKRKTAQFRTPQGKSQKPRFTMGHHGGPSTMIIRQHRPYHPGSFNKNHHSGSHNNSEQHSLNPTPSSLKIPAQSVQPALPEQPKRLGEKPELCFNCNKPGHTVGKCPKPRRAGPKFVQARVTHASAEEAQSAPEVILGTFPVNSTPAVILFDSGATHSFISKRFAGAHGLSLVKLKIPMRVHTPGGGMTTTHYCPSVTVEIQGLIFPANLILLESKDLDVILGMDWLTRHRGVIDCASRTIKLTNAKGEVVTFQSLVPQKPGISLNQAAGEEQEVAVEKTTKKLEDIPIVREYPKVFPDDLTTMPPKRDIEFRIDLVPGTAPIHKRPYRMGANELAEVKKQVDEQLQKGYIHPSTSPWGAPVIFVEKKDKTKRMCVDYRAFNEVTIKNKYPLPRIDDLFDQLKGATVFSKIDLRSGYHQLRIHEEDIPKTAFITRYGLFECTVMSFGLTNTPAFFMNLMNKVFMKFLDKFVVVFIDDILIYSKSEEEHEQHLRLVLEKLKEHQLYAKFSKCDFWLKEVQFLGHIVNAQGVAMDPANVESVTKWTPPRTVTQVRSFLGLAGYYRRFIENFSKIAKPMTQLLKKEEKFIWSAKCNRSFEELKRRLVSAPVLILPDQTKDFQVYCDASRQGLGCVLMQDGKVVSYASRQLRPHEGNYPTHDLELAAVVHALKIWRHYLIGNRCEVYTDHKSLKYIFTQPDLNLRQRRWLELIKDYDMGIHYHPGKANVVADALSRKSYCNVAWVEQLCCEVQRDLEHLNLGIVEHGFVVALEAQPTLVEQVRIAQASDPEVAELKKNMRVGKARGFVEDEQGTIWMGERLCVPENKELKDLILTEAHQTQYSILSGSTKMYQDLKEKFWWVSMRREIAEFVALCDVCQRVKAEHQRPAGLLQPLQIPEWKWEEIGMDFITGLPRTSSGHDSIWVVVDRLTKVAHFIPVHTTYSGKKLAELYLARIMCLHGVPKKIVSDRGSQFTSKFWQKLQEELGTRLNFSTAYHPQTDGQTERVNQILEDMLRACALDFGGAWDKSLPYAEFSYNNSYQASLQMAPFEALYGRRCRTPLFWDQTGERQLFGTEVLNEAEEKVRAVRERLRIAQSRQKSYADNRRRELAFETGDYVYLRVTPLRGVHRFQTKGKLAPRFVGPYRILERRGEVAYQLELPSNMLGIHNVFHVSQLKKCLRVPEEQASPDHIEIQEDLTYVEKPTRILETSERRTRNKVIRFCKVQWSHHSEEEATHPHLFASSSESRGRDSV

SEQ ID NO: 19594 - protein, 1238 aa, Oryza sativa
  Clone ID: TF_OSC401774j.C1.p5.fg
MGRHGGPSTMIIRQHRPYHPGSFNKNHHSGSHNNSEQHSLNPTPSSLKIPAQSVQPALPEQPKRLGEKPELCFNCNKPGHTVGKCPKPRCAGPKFVQARVNHASAEEAQSAPEVILGTFPVNSTPAVILFDSGATHSFISKRFAGAHGLSLVKLKIPMRVHTPGGGMTTTHYCPSVTVEIQGLIFPANLILLESKDLDVILGMDWLTRHRGVIDCASRTIKLTNAKGEVVTFQSPVPQKPGISLNQAAGEEQEVAVEKTTKKLEDIPIVREYPKVFPDDLTTMPPKRDIEFRIDLVPGTAPIHKRPYRMGANELAEVKKQVDEQLQKGYIRLSTSPWGAPVIFVEKKDKTKRMCVDYRTLNEVTIKNEYPLPRIDDLFDQLKGATVFSKIDLQSGYHQLRIREEDIPKTAFITRYGLFECTVMSFGLTNAPDFFMNLMNKVFMEFLDKFVVVFIDDILIYSKSEEEHEQHLRLVLEKLKEHQLYAKFSKCDFWLKEVQFLGHIVNAQGVAVDPANVESVTKWTPPRTVTQVRSFLGLAGYYRRFIQNFSKIAKPMTQLLKKEEKFIWSAECNRSFEELKRWLVSAPVLILPDQTKDFQVYCDASRQGLGCVLMQDGKVVSYASRQLRSHEGNYPTHDLELAAVVHALKIWRHYLIGNRCEVYTDHKSLKYIFTQPDLNLRQQRWLELIKDYDMGIHYHPGKANVVADALSRKSYCNVAWVEQLCCEVQRDLEHLNLGIVEHGFVVALEAQPTLVEQVRIAQASDPEIAELKKNMRVGKARGFVEDEQGTIWMGERLCVPENKELKDLILTEAHQTQYSIHPGSTKMYQDLKEKFWWVSMRREIAEFVALCNVYQRVKAEHQRPAGLLQPLQIPEWKWEEIGMDFITGLPRTSSGHDSIWVVVDRLTKVAHFIPVHTTYSGKKLAELYLARIMCLHGVPKKIVSDRGSQFTSKFWQKLQEELGTRLNFSTTYHPQTDGQTERVNQILEDMLRACALDFGGAWDKSLPYAEFSYNNSYQASLQMAPFEALYGRRCPTPLFWDQTGERQLFGTEVLNEAEEKVRAVRERLRIAQSRQKSYADNRRRELAFETGDYVYLRVTPLRGVHRFQTKGKLAPRFVGPYRILERRGEVAYQLELPSNMLGIHNVFHVSQLKKCLRGPEEQASPDHIKIQEDLTYLEKPTRILETSERRTRNKVIRFCKVQWSHHSEEEATWEREDELKATHPHLFASTSESRGRDSV

SEQ ID NO: 19595 - protein, 747 aa, Oryza sativa
  Clone ID: TF_OSC401854j.C1.p6.fg
MEIRNGSRDSNNASGSEEPINGARANGASDNSPSPPPENPTIAQVLDNQTQIMTMMMQQMQQQYHQVMQQVQQQAQLQQQNLQFGPPPPQSKLLEFLRVKPPTFSSTTNPIEAHDWLHAIEKKLNLLQCNEQEKVAFATHQLQGPASIWWDNYMVTRPAGAEVTWTEFRHSFNKAQVPEGIVGQKKREFRSLQQGTRTVIEYLHEFNRLARYAPEDVRTDAEKQEKFMSGLDDELTNQLISRDYEDFEKLVDKAIRQEEQCNKMNRKRKAAQFRTPQGKCQKPRYTMGRHGGPSTMIIRQHRPYHPGSFNKTHHSDSHNNSEQHSLNPTPSSLKIPAQSVQPALPEQPKRLGEKPELCFNCNKPGHTVGKCPKPRRAGPKFVQARVNHASAEEAQSAPEVILGTFPVNSTPAVILFDSGATHSFISKRFAGAHGLSLVKLKIPMRVHTPGGGMTTTHYCPSVTVEIQGLIFPANLILLESKDLDVILGMDWLARHRGVIDCASRTIKLTNAKGEVVIFQSPVPQKPGISLNQAAGEEQEVAVEKTTKKLEDIPIVREYPEVFPDDLTTMPPKRDIEFRIDLVTGTAPIHKRPYRMGASELAEVKKQVDEQLQKGYIRPSTSPWGAPVIFVEKKDKTKRMCVDYRALNEVTIKNKYPLPRIDDLFDQLKGATVFSKIDLRSGYHQLRIREEDIPKTAFTQPDHKSLKCLTSIVVSLGRTKSSANLGAVTGGEIIFGRSTKFDNSPGSI

SEQ ID NO: 19596 - protein, 1562 aa, Oryza sativa
  Clone ID: TF_OSC401858j.C1.p23.fg
MAVKDRFTGNPGRLTVLSTSGSGFDACGLVGGRYHVSVMETRNGSRDSNNASGSEKPINGARANSASDNSPSPPPENPTIAQVLDNQTQMMTMMMQQMQQQYHQVLQQVQQQAQLQQQNLQFGSPPPQSKLLEFLRVKPPTFSSTTNPIEAHDWLHAIEKKLNLLQCNEQEKVAFATHQLQGPASIWWDNYMVTRPAGAEVTWTEFRHSFNKAQVPEGIVAQKKREFRSLQQGTRTVIEYLHEFNLLARYAPEDVRTDAERQEKFLSGLDDELTNQLISRDYEDFEKLVDKAIRQEEHCNKINRKRKAAQFRTPQGKSQKPRFTMGRHGGPSTMIIRQHRPYHPGSFNKNHHNGSHNNSEQHSLNPTPSSLKIPAQSVQPALPEQPKRLGEKPELCFNCNKPGHTVGKCPKPRRAGPKFVQARVNHASAEEAQSAPEVILGTFPVNSTPAVILFDSGATHSFISKRFAGAHGLSLVKLKIPMRVHTPGGGMTTTHYCPSVTVEIQGLIFPANLILLESKDLDVILGMDWLTRHRGVIDCASRTIKLTNAKGEVVTFQSLVPRKPGISLNQAAGEEQEVAVEKTTKKLEDIPIVREYPEVFPDDLTTMPPKRDIEFRIDLVPGTAPIHKRPYRMGASELAEVKKQVDEQLQKGYIRPSTSPWGAPVIFVEKKDKTKRMCVDYRALNEVTIKNKYPLPRIDDLFDQLKGATVFSKIDLRSGYHQLRIREEDIPKTAFITRYGLFECTVMSFGLTNAPAFFMNLMNKVFMEFLDKFVVVFIDDILIYSKSEEEHEQHLRLVLEKLKEHQLYAKFSKCDFWLKEVQFLGHIVNAQGVAVDPANVESVTKWTPPRTVTQVRSFLGLAGYYRRFIENFSKIAKPMTQLLKKEEKFIWSAECNRSFEELKRRLVSAPVLILPDQTKDFQVYCDASRQGLGCVLMQDGKVVSYASRQLRPHEGNYPTHDLELAAVVHALKIWRHYLIGNRCEVYTDHKSLKYIFTQPDLNLRQRRWLELIKDYDMGIHYHPGKANVVADALSRKSYCNVAWVEQLCGEVQRDLEHLNLGIVEHGFVAALEAQPTLVEQVRIAQASDPEIAELKKNMRVGKARGFVEDEQGTIWMGERLCVPENKELKDLILTEAHQTQYSIHPGSTKMYQDLKEKFWWVSMRREIAEFVALCDVCQRVKAEHQRPAGLLQPLQIPEWKWEEIGMDFITGLPRTSSGHDSIWVVVDRLTKVAHFIPVHTTYSGKKLAELYLSRIMCLHGVPKKIVSDRGSQFTSKFWQKLQEELGTRLNFSTAYHPQTDGQTERVNQILEDMLRACALDFGGAWDKSLPYAEFSYNNSYQASLQMAPFEALYGRRCRTPLFWDQTGERQLFGTEVLNEAEEKVRAVRERLRIAQSRQKSYADNRRRELVFQVGDYVYLRVTPLRGVHRFQTKGKLAPRFVGPYRILERRGEVAYQLELPSNMLGIHNVFHVSQLKKCLRVPEEQASPDQIEIQEDLTYVEKPTRILETSERKTRNKVIRFCKVQWSHHSEEEATWEREDELKATHPHLFASSSESRGRDSV

SEQ ID NO: 19597 - protein, 1413 aa, Oryza sativa
  Clone ID: TF_OSC403689j.C1.p1.fg
MEIRNGSRDSNNASGSEEPINGARANGASDNSPSPPPENPTIAQVLDNQTQMMTMMMQQMQQQYHQVMQQVQQQAQLQQQNLQFGPPPPQSKLLEFLRVKPPTFSSTTNPIEAHDWLHAIEKKLNLLQCNEQEKVAFATHQLQGPASIWFPRELWHKRREFRSLQQGTRTVIEYLHEFNRLARYAPEDVRTDAERQEKFLSGLDDELTNQLISRDYEDFEKLVDKAIRQEEHGNKINRKRKAAQFRTPQGKSQKPRFTMGRHGGPSTMIIRQHCPYHPGSFNKNHHSGSHNNSEQHSLNPTPSSLKIPAQSVQPALPEQPKRLGEKPELCFNCNKPGHTVGKCPKPRRAGPKFVQARVNHASAEEAQSAPEVILGTFPVNSTPAVILFDSGATHSFISKRFAGAHGLSLVKLKIPMRVHTPGGGMTTTHYCPSVTVEIQGLIFPANLILLESKDLDVILGMDWLARHRGVIDCASRTIKLTNAKGEVVTSQSLVPRKPGISLNQAAGEEQEVAVEKITKKLEDIPIVREYPEVFPDDLTTMPPKRDIEFRIDLVPGTAPIHKRPYRMGANELAEVKKQVDEQLQKGYIRPSTSPWGAPVIFVEKKDKTKRMCIDYRALNEVTIKNKYPLPRIDDLFDQLKGATVFSKIDLRSGYHQLRIREEDIPKTAFITRYGLFECTVMSFGLTNAPAFFMNLMNKVFMEFLDKFVVVFIDDILIYSKSEEEHEQHLRLVLEKLKEHQLYAKFSKCDFWLKEVQFLGHIVNAQGVAVDPANVESVTKWTPPRTVTQVRSFLGLAGYYRRFIENFSKIAKPMTQLLKKEEKFIWSAECNRSFEELKRRLVSAPVLILPDQTKDFQRRWLELIKDYDMGIHYHPGKANVVADALSRKSYCNVAWVEELCCEVQRDLEHLNLGIVERGFVAALEAQPTLMEQVRIAQASDPEIAELKKNMRVGKARGFVEDEQGTIWMGERLCVPENKELKDLILTEAHQTQYSIHPGSTRMYQDLKEKFWWVSMRREIAEFVALCDVCQRVKAEHQRPAGLLQPLQIPEWKWEEIGMDFITGLPRTSSGHDSIWVVVDRLTKVAYFIPVHTTYSGKKLAELYLARIMCLHGVPKKIVSDRGSQFTSKFWQKLQEELGTRLNFSTAYHPQTDGQTERVNQILEDMLRACALDFGGAWDKSLPYAEFSYNNSYQASLQMAPFEALYGRRCRTPLFWDQTGERQLFGTEVLNEAEEKVRAVRERLRIAQSRQKSYADNRRRELAFETGDYVYLRVTPLRGVHRFQTKGKLAPRFVGPYRILERRGEVAYQLELPSNMLGIHNVFHVSQLKKCLRVPEEQASPDHIEIQEDLTYVEKPTRILETSERRTRNKVIRFCKVQCSHHSEEEATWEREDELKATHPHLFASSSESRGRDSV

SEQ ID NO: 19598 - protein, 1524 aa, Oryza sativa
  Clone ID: TF_OSC404799j.C1.p1.fg
MEIRNGSRDSNNASGSEEPTNGARANGASDNSPSPPPENPTIAQVLDNQTQMMTMMMQQMQQQYHQVLQQVQQQAQLQQQNLQFGSPPPQSKLLEFLRVKPPTFSSTTNPIEAHDWLHAIEKKLNLLQCNEQEKVAFATHQLQGPASIWWDNYMVTRPAGAEFTWTEFRHSFNKAQVPEGIVAQKKREFRSLQQGTRTVIEYLHEFNLLARYAPEDVRTDAEKQEKFLSGLDDELTNQLISRDYEDFEKLVDKAIRQEEHCNKINRKRKAAQFRTPQGKSQKPRFTMGHHGGPSTMIIRQHRPYHPGNFNKNHHSDSHNNSEQHSLNPTPSSLKIPAQSVQPALPEQPKRLGEKPELCFNCNKPGHTVGKCPKPRRAGPKFVQARVNHASAEEAQSAPEVILGTFPVNSTPAVILFDSGATHSFISKRFAGAHGLSLVKLKIPMRVHTPGGGMTTTHYCPSVTVEIQGLIFPANLILLESKDLDVILGMDWLARHRGVIDCASRTIKLTNAKGEVVIFQSPVPQKPGISLNQAAGEEQEVAVEKTTKKLEDIPIVREYPEVFPDDLTTMPPKRDIEFRIDLVPGTAPIHKRPYRMGANELAEVKKQVDEQLQKGYIRPSTSPWGAPVIFVEKKDKTKRMCVDYRALNEVTIKNKYPLPRIDDLFDQLKGATVFSKIDLWSGYHQLRIREEDIPKTAFITRYGLFECTVMSFGLTNAPAFFMNLMNKVFMEFLDKFVMVFIDDILIYSKSEEEHEQHLRLVLEKLKEHQLYAKFSKCDFWLKEVQFLGHIVNAQGVAVDPANVESVTKWTPPRTVTQVRSFLGLAGYYRRFIENFSKIAKPMTQLLKKEEKFIWSAECNRSFEELKRRLVSAPVLILPDQTKDFQVYCDASRQGLGCVLMQDGKVVSYASRQLRPHEGNYPTHDLELAAVVHALKIWRHYLISNRCEVYTDHKSLKYIFTQPDLNLRQRRWLELIKDYDMGIHYHPGKANVVADALSRKSYCNVAWVKQLCCEVQRDLEHLNLGIVEHGFVAALEAQPTLVEQVRIAQASDPEIAELKKNMRVGKARGFVEDEQGTIWMGERLCVPENKELKDLILTEAHQTQYSIHPGSTKMYQDLKEKFWWVSMRREIAEFVALCDVCQRVKAEHQRPAGLLQPLQIPEWKWEEIGMDFITGLPRTSSGHDSIWVVVDRLTKVAHFIPVHTTYSGKKLAELYLARIMCLHGVPKKIVSDRGSQFTSKFWQKLQEELGTRLNFSTAYHPQTDGQTERVNQILEDMLRACALDFGGAWDKSLPYAEFSYNNSYQASLQMAPFEALYGRRCRTPLFWDQTGERQLFGTEVLNEAEEKVRAVRERLRIAQSRQKSYADNRRRELAFETGDYVYLRVTPLRGVHRFQTKGKLAPRFVGPYRILERRGEVAYQLELPSNMLGIHNVFHVSQLKKCLRVPEEQASPDQIEIQEDLTYVEKPTRILETSERKTRNKVIRFCKVQWSHHSEEEATWEREDELKATHPHLFASSSESRGRDSV

SEQ ID NO: 19599 - protein, 1524 aa, Oryza sativa
  Clone ID: TF_OSC404802j.C1.p1.fg
MEIRNGSRDSNNASGSEEPINGARANGASDNSPSPPPENPTIAQVLDNQTQMMTMMMQQMQQQYHQVLQQVQQQAQLQQQNLQFGPPPPQSKLLEFLRVKPPTFSSTTNPIEAHDWLHAIEKKLNLLQCNEQEKVTFATHQLQGPASIWWDNYMVTRPAGAEVTWTEFRHSFNKAQVPEGIVAQKKREFRSLQQGTRTVIEYLHEFNRLARYAPEDVRTDAERQEKFLSGLDDELTNQLISRDYEDFEKLVDKAIRQEEHCNKINRKRKAAQFRTPQGKSQKPRFTMGHHGGPSTMIIRQHRPYHPGNFNKNHHSDSHNNSEQHSLNPTPSSLKIPAQSVQPALPEQPKRLGEKPELCFNCNKPGHTVGKCPKPRRAGPKFVQARVNHASAEEAQSAPEVILGTFPVNSTPAVILFDSGATHSFISKRFAGAHGLSLVKLKIPMRVHTPGGGMTTTHYCPSVTVEIQGLIFPANLILLESKDLDVILGMDWLARHRGVIDCASRTIKLTNAKGEVVIFQSPVPQKPGISLNQAAGEEQEVAVEKTTKKLEDIPIVREYPEVFPDDLTTMPPKRDIEFRIDLVPGTAPIHKRPYRMGANELAKVKKQVDEQLQKGYIRPSTSPWGAPVIFVEKKDKTKRMCVDYRALNEVTIKNKYPLPRIDDLFDQLKGATVFSKIDLRSGYHQLRIREEDIPKTAFITRYGLFECTVMSFGLTNAPAFFMNLMNKVFMEFLDKFVVVFIDDILIYSKSEEEHEQHLRLVLEKLKEHQLYAKFSKCDFWLKEVQFLGHIVNAQGVAVDPANVESVTKWTPPRTVTQVRSFLGLAGYYRRFIENFSKIAKPMTQLLKKEEKFIWSAECNRSFEELKRRLVSAPVLILPDQTKDFQVYCDASRQGLGCVLMQDGKVVSYASRQLRPHEGNYPTHDLELAAVVHALKIWRHYLISNRCEVYTDHKSLKYIFTQPDLNLRQRRWLELIKDYDMGIHYHPGKANVVADALSRKSYCNVAWVKQLCCEVQRDLEHLNLGIVEHGFVAALEAQPTLVEQVRIAQASDPEIAELKKNMRVGKARGFVEDEQGTIWMGERLCVPENKELKDLILTEAHQTQYSIHPGSTKMYQDLKEKFWWVSMRREIAEFVALCDVCQRVKAEHQRPAGLLQPLQIPEWKWEEIGMDFITGLPRTSSGHDSIWVVVDRLTKVAHFIPVHTTYSGKKLAELYLARIMCLHGVPKKIVSDRGSQFTSKFWQKLQEELGTRLNFSTAYHPQTDGQTERVNQILEDMLRACALDFGGAWDKSLPYAEFSYNNSYQASLQMAPFEALYGRRCRTPLFWDQTGERQLFGTEVLNEAEEKVRAVRERLRIAQSRQKSYADNRRRELVFQVGDYVYLRVTPLRGVHRFQTKGKLAPRFVGPYRILERRGEVAYQLELPSNMLGIHNVFHVSQLKKCLRVPEEQASPDQIEIQEDLTYVEKPTRILETSERKTRNKVIRFCKVQWSHHSEEEATWEREDELKATHPHLFASSSESRGRDSV

SEQ ID NO: 19600 - protein, 1561 aa, Oryza sativa
  Clone ID: TF_OSC405598j.C1.p1.fg
MAGCECMVLLVAPIAVKDRFTGNPGRLTVLTTSGSGSFTAFNYCFEMPALCKRTPSFLWLYPASYLLFRVEVLLSWSCLREVGFLAAVKMEIRNGSRDSNNASGSEELINGACANSASDNSPSPPPENPTIAQVLDNQTQMMTVMMQQMQQQYHQVLQQVQQQAQQQQQNLQFGPPPPQSKLLEFLRVKPPTFSSTTNPIEAHDWLHAIEKKLNLLQCNEQEKVAFATHQLQGPASVWWDNYMVTRPTGAEVTWTEFCHSFNKAQVPEGIVAQKKREFRSLQQGTRTVIEYLHEFNRLARYAPEDVRTDDGRREKFLSGLDDELTNQLISRDYEDFEKLVDKAIRQEEHCNKINRKRKTAQFRTPQGRHRPYHPGSFNKNHHSGSHNNSEQHSLNPTPSSLKIPAQSVQPALPEQPKRLGEKPELCFNCNKPGHTVGKCPKPRRAGPKFVQARVTHASAEEAQSAPEVILGTFPVNSTPAVILFDSGATHSFISKRFAGAHGLSLVKLKIPMRVHTPGGGMTTTHYCPSVTVEIQGLIFPANLILLESKDLDVILGMDWLTRHRGVIDCASRTIKLTNAKGEVVTFQSLVPQKPGISLNQAAGEEQEVAVEKTTKKLEDIPIVREYPKVFPDDLTTMPPKRDIEFRIDLVPGTAPIHKRPYRMGANELAEVKKQVDEQLQKGYIHPSTSPWGAPVIFVEKKDKTKRMCVDYRAFNEVTIKNKYPLPRIDDLFDQLKGATVFSKIDLRSGYHQLRIHEEDIPKTAFITRYGLFECTVMSFGLTNTPAFFMNLMNKVFMKFLDKFVVVFIDDILIYSKSEEEHEQHLRLVLEKLKEHQLYAKFSKCDFWLKEVQFLGHIVNAQGVAMDPANVESVTKWTPPRTVTQVRSFLGLAGYYRRFIENFSKIAKPMTQLLKKEEKFIWSAKCNRSFEELKRRLVSAPVLILPDQTKDFQVYCDASRQGLGCVLMQDGKVVSYASRQLRPHEGNYPTHDLELAAVVHALKIWRHYLIGYRCERRWLELIKDYDMGIHYHPGKANVVADALSRKSYCNVAWVEQLCCEVQRDLEHLNLGIVEHGFVVALEAQPTLVEQVRIAQASDPEVAELKKNMRVGKARGFVEDEQGTIWMGERLCVPENKELKDLILTEAHQTQYSILSGSTKMYQDLKEKFWWVSMRREIAEFVALCDVCQRVKAEHQRPAGLLQPLQIPEWKWEEIGMDFITGLPRTSSGHDSIWVVVDRLTKVAHFIPVHTTYSGKKLAELYLARIMCLHGVPKKIVSDRGSQFTSKFWQKLQEELGTRLNFSTAYHPQTDGQTERVNQILEDMLRACALDFGGAWDKSLPYAEFSYNNSYQASLQMAPFEALYGRRCRTPLFWDQTGERQLFGTEVLNEAEEKVRAVRERLRIAQSRQKSYADNRRRELAFETGDYVYLRVTPLRGVHRFQTKGKLAPRFVGPYRILERRGEVAYQLELPSNMLGIHNVFHVSQLKKCLRVPEEQASPDHIEIQEDLTYVEKPTRILETSERRTRNKVIRFCKVQWSHHSEEEATHPHLFASSSESRGRDSV

SEQ ID NO: 19601 - protein, 1458 aa, Oryza sativa
  Clone ID: TF_OSC406439j.C1.p14.fg
METRNGSRDSNNASGSEEPINGARANGASDNSPSPPPENPTIAQVLDNQTRMMTMMMQQMQQQYHQVLQQVQQQAQLQQQNLQFGPPPPQSKLLEFLRVKPPTFSSTTNPIEAHDWLHAIEKKLNLLQYNEQEKVAFATHQLQGPASIWWDNYMVTRPTGAEVTWTEFCHSFNKAQVPEGIVAQKKREFRSLQQGTRTVIEYLHEFNRLAHYAPEDVRTDAERQEKFLSGLDDELTNQLVSRDYEDFEKLVDKAIRQEEQCNKMNRKRKAAQFRTPQGKCQKPRFTMGHHGGPSTMIIRQHRPYHPGNFNKNHHSDSHNNSKQHSLNPTPSSLKIPAQSVQPALPEQPKRLGEKPELCFNCNKPGHTVGKCPKPRRAGPKFVQARVNHASAEEAQSAPEVILGTFPVNSTPAVILFDSGATHSFISKRFAGAHGLSLVKLKIPMRVHTPGGGMTTTHYCPSVTVEIQGLIFPANLILLESKDLDVILGMDWLARHRGVIDCASRTIKLTNAKGEVVIFQSPVPQKPGISLNQAAGEEQEVAVEKTTKKLEDIPIVREYPEVFPDDLTTMPPKRDIEFRIDLVPGTAPIHKRPYRMGANELAEVKKQVDEQLQKGYIRPSTSPWGAPVIFVEKKDKTKRMCVDYRALNEVTIKNKYPLPRIDDLFDQLKGATVFSKIDLRSGYHQLRIREEDIPKTAFITRYGLFECTVMSFGLTNAPAFFMNLMNKVFMEFLDKFVVVFIDDILIYSKSEEEHEQHLRLVLEKLKEHQLYAKFSKCDFWLKEVQFLGHIVNAQGVAVDPANVESVTKWTPPRTVTQVRSFLGLAGYYRRFIENFSKIAKPMTQLLKKEEKFIWSAECNRSFEELKRRLVSAPVLILPDQTKDFQVYCDASRQGLGCVLMQDGKVVSYASRQLRPHEGNYPTHDLELAAVVHALKIWRHYLIGNRCEVQRDLEHLNLGIVEHGFVAALEAQPTLVEQVRIAQASDPEIAELKKNMRVGKARGFVEDEQGTIWMGERLCVPENKELKDLILTEAHQTQYSIHPGSTKMYQDLKEKFWWVSMRREIAEFVALCDVCQRVKAEHQRPAGLLQPLQIPEWKWEEIGMDFITGLPRTSSGHDSIWVVVDRLTKVAHFIPVHTTYSGKKLAELYLARIMCLHGVPKKIVSDRGSQFTSKFWQELQEELGTRLNFSTAYHPQTDGQTERVNQILEDMLRACALDFGGAWDKSLPYAEFSYNNSYQASLQMAPFEALYGRRCRTPLFWDQTGERQLFGTEVLNEAEEKVRAVRERLRIAQSRQKSYADNRRRELVFQVGDYVYLRVTPLRGVHRFQTKGKLAPRFVGPYRILERRGEVAYQLELPSNMLGIHNVFHVSQLKKCLRVPEEQASPDQIEIQEDLTYVEKPTRILETSERKTRNKVIRFCKVQWSHHSEEEATWEREDELKATHPHLFASSSESRGRDSV

SEQ ID NO: 19602 - protein, 1517 aa, Oryza sativa
  Clone ID: TF_OSC411372j.C1.p3.fg
MAGCECMVLLVAPIAVKDRFTGNPGRLTVLTTSGSGCFTAFNYCFEMPALCKRTPSFLWLYPASYLLFRVEVLLSWSRLREVGFVAAVKMETRNGSRDSNNASGSEEPINGARANGASDNSPSPPPKNPTIAQVLDNQTQMMTMMMQQMQQQYHQVLQQVQQQAQQQQQNLQFGPPPPQSKLLEFLRVKPPTFSSTTNPIEAHDWLHAIEKKLNLLQCNEQEKVAFATHQLQGPASIWWDNYMVTCPTGAEVTWTEFRHSFNKAQIPEGIVAQKKREFRSLQQGTRTVIEYLHEFNRLARYAPEDVRTDDGRQEKFLSGLDDELTNQLISRDYEDFEKLVDKAIRQEEQCNKMNRKRKAAQFRTPQGKSQKPRFTMGRHGGPSTMIIRQHRPYHPGSFNKNHHSDSHNNSEQHSLNPTPSSLKIPAQSVQPALPEQPKRLGEKPELCFNCNKPGHTVGKCPKPRRAGPKFVQARVNHTSAEEAQSAPEVILGTFPVNSTPAVILFDSGATHSFVSKRFAGAHGLSLVKLKIPMRVHTPGGGMTTTHYCPSVTVEIQGLIFPANLILLESKDLDVILGMDWLTRHRGVIDCASRTIKLTNAKGEVVIFQSPVPQKPGISLNQAAGEEQEVAVEKTTKKLEDIPIVREYPEVFPDDLTTMPPKRDIEFRIDLVPGTAPIHKRPYRMGANELVEVKKQVDEQLQKGYIRPSTSPWGAPVIFVEKKDKTKRMCVDYRALNEVTIKNKYPLPRIDDLFDQLKGATVFSKIDLRSGYHQLRIREEDIPKTAFITRYGLFECTVMSFGLTNAPAFFMNLMNKVFMEFLDKFVVVFIDDILIYSKSEEEHEQHLRLVHEKLKAHQLYAKFSKCVFWLKEVQFLGHIVNAQGVAVDPANVESVTKWTPPRTVTQVRSFLGLAGYYRRFIENFSKIAKPMTQLLKKEEKFIWSAECNRSFEELKRRLVSAPVLILPDQTKDFQVYCDASRQGLGCVLMQDGKVVSYASRQLRPHEGNYPTHDLELAAIVHALKIWRHYLIGNRCEVYIDHKSLKYIFTQPDLNLRQRRWLELIKDYDMGIHYHPGKANVVADALSRKSYCNVAWVEQLCCEVQRDLEHLNLGIVEHGFVVALEAQPTLVEQVRIAQASDPEIAELKKNMRVGKARGFVEDEQGTIWRGERFTKMYQDLKEKFWWVSMRREIAEFVALCDVCQRVKAEHQRPAGLLQPLQIPEWKWEEIGMDFITGLPRTSSGHDSIWVVVDRLTKVAHFIPVHTTYSGKKLAELYLARIMCLHGVPKKIVSDRGSQFTSKFWQKLQEELGTRLNFSTAYHPQTDGQTERVNQILEDMLRACALDFGGAWDKSLPYAEFSYNNSYQASLQMAPFEALYGRRCRTPLFWDQTGERQLFGTEVLNEAEEKVRAVRERLRIAQSRQKSYADNRRRELAFETGDYVYLRVTPLRGVHRFQTKGKLAPRFVGPYRILERRGEVAYQLELPSNMLGIHNVFHVSQLKKCLRVPEEQASPDHIEI

SEQ ID NO: 19603 - protein, 1524 aa, Oryza sativa
  Clone ID: TF_OSC412783j.C1.p1.fg
MEIRNGSRDSNNANGSEEPINGARANGASDNSPSPPPENPTIAQVLDNQTQMMTMMMQQMQQQYHQVLQQVQQQAQLQQQNLQFGPPPPQSKLLEFLRVKPPTFSSTTNPIEAHDWLHAIEKKLNLLQCNEQEKVAFATHQLQGPASIWWDNYMVTRPTGAEVTWTEFCHSFNKAQVPEGIVAQKKREFRSLQQGTRTVIEYLHEFNRLARYAPEDVRTDAERQEKFLSGLDDELTNQLISRDYEDFEKLVDKAIRQEEHCNKINRKRKAAQFRTPQGKSQKPRFTMGHHGGPSTMIIRQHRPYHPGSFNKNHHSGSHNNSEQHSLNPTPSSLKIPAQSVQPALPEQPKRLVEKPELCFNCNKPGHTVGKCPKPRRAGPKFVQARVNHASAEEAQSAPEVILGTFPVNSTPAVILFDSGATHSFISKRFAGAHGLSLVKLKIPMRVHTPGGGMTTTHYCPSVTVEIQGSIFPANLILLESKDLDVILGMDWLTRHRGVIDCASRTIKLTNAKGEVVTFQSPVPQKPRISLNQAAGEEQEVAVEKTTKKLEDIPIVREYPEVFPDDLTTMPPKRDIEFRIDLVPGTAPIHKRPYRMGANELAEVKKQVDEQLQKGYIRPSTSPWGAPVIFVEKKDKTKRMCVDYRALNEVTIKNKYPLPRIDDLFDQLKGATVFSKIDLRSGYHQLRIREEDIPKTAFITRYGLFECTVMSFGLTNAPAFFMNLMNKVFMEFLDKFVVVFIDDILIYSKSEEEHEQHLRLVLEKLKEHQLYAKFSKCDFWLKEVQFLGHIVNAQGVAVDPANVESVTKWTPPRTVTQVRSFLGLAGYYRRFIENFSKIAKPMTQLLKKEEKFIWSAECNRSFEELKRRLVSAPVLILPDQTKDFQVYCDASRQGLGCVLMQDGKVVSYASRQLRPHEGNYPTHDLELAAVVHALKIWRHYLIGNRCEVYTDHKSLKYIFTQPDLNLRQRRWLELIKDYDMGIHYHPGKANVVADALSRKSHCNVAWVEELCCEVQRDLGHLNLGIVEHGFVAALEAQPTLVEQVRIAQASDPEIAELKKNMRVGKARGFVEDEQGTIWMGERLCVPENKELKDLILTEAHQTQYSIHPGSTKMYQDLKEKFWWVSMRREIAEFVALCDVCQRVKAEHQRPAGLLQPLQIPEWKWEEIGMDFITGLPRTSSGHDSIWVVVDRLTKMAHFIPVHTTYSGKKLAELYLARIMCLHGVPKKIVSDRGSQFTSKFWQKLQEELGTRLNFSTAYHPQTDGQTERVNQILEDMLRACALDFGGAWDKSLPYAEFSYNNSYQASLQMAPFEALYGRRCRTPLFWDQTGERQLFGTEVLNEAEEKVRAVRERLRIAQSRQKSYADNRRRELAFETGDYVYLRVTPLRGVHRFQTKGKLAPRFVGPYRILERRGEVAYQLELPSNMLGIHNVFHVSQLKKCLRVPEEQASPDHIEIQEDLTYVEKPTRILETSERKTRNKVIRFCKVQWSHHSEEEATWEREDELKATHPHLFASPSESRGRDSV

SEQ ID NO: 19604 - protein, 1526 aa, Oryza sativa
  Clone ID: TF_OSC416334j.C1.p3.fg
MAVKDRFTGNPGRLTVLSTSGSGFDACGLVGGRYHVSVMETRNGSRDSNNASGSEKPINGARANSASDNSPSPPPENPTIAQVLDNQTQMMTMMMQQMQQQYHQVLQQVQQQAQLQQQNLQFGSPPPQSKLLEFLRVKPPTFSSTTNPIEAHDWLHAIEKKLNLLQCNEQEKVAFATHQLQGPASIWWDNYMVTRPAGAEVTWTEFRHSFNKAQVPEGIVAQKKREFRSLQQGTRTVIEYLHEFNLLARYAPEDVRTDAERQEKFLSGLDDELTNQLISRDYEDFEKLVDKAIRQEEHCNKINRKRKAAQFRTPQGKSQKPRFTMGRHGGPSTMIIRQHRPYHPGSFNKNHHNGSHNNSEQHSLNPTPSSLKIPAQSVQPALPEQPKRLGEKPELCFNCNKPGHTVGKCPKPRRAGPKFVQARVNHASAEEAQSAPEVILGTFPVNSTPAVILFDSGATHSFISKRFAGAHGLSLVKLKIPMRVHTPGGGMTTTHYCPSVTVEIQGLIFPANLILLESKDLDVILGMDWLTRHRGVIDCASRTIKLTNAKGEVVTFQSLVPRKPGISLNQAAGEEQEVAVEKTTKKLEDIPIVREYPEVFPDDLTTMPPKRDIEFRIDLVPGTAPIHKRPYRMGASELAEVKKQVDEQLQKGYIRPSTSPWGAPVIFVEKKDKTKRMCVDYRALNEVTIKNKYPLPRIDDLFDQLKGVTVFSKIDLRSGYHQLRIREEDIPKTAFITRYGLFECTVMSFGLTNAPAFFMNLMNKVFMEFLDKFVVVFIDDILIYSKSEEEHEQHLRLVLEKLKEHQLYAKFSKCDFWLKEVQFLGHIVNAQGVAVDPANVESVTKWTPPRTVTQVRSFLGLAGYYRRFIENFSKIAKPMTQLLKKEEKFIWSAECNRSFEELKRRLVSAPVLILPDQTKDFQVYCDASRQGLGCVLMQDGKVVSYASRQLRPHEGNYPTHDLELAAVVHALKIWRHYLIGNRCEVYTDHKSLKYIFTQPDLNLRQRRWLELIKDYDMGIHYHPGKANVVADALSRKSYCNVAWVEQLCGEVQRDLEHLNLGIVEHGFVAALEAQPTLVEQVRIAQASDPEIAELKKNMRVGKARGFVEDEQGTIWMGERLCVPENKELKDLILTEAHQTQYSIHPGSTKMYQDLKEKFWWVSMRREIAEFVALCDVCQRVKAEHQRPAVVDRLTKVAHFIPVHTTYSGKKLAELYLSRIMCLHGVPKKIVSDRGSQFTSKFWQKLQEELGTRLNFSTAYHPQTDGQTERVNQILEDMLRACALDFGGAWDKSLPYAEFSYNNSYQASLQMAPFEALYGRRCRTPLFWDQTGERQLFGTEVLNEAEEKVRAVRERLRIAQSRQKSYADNRRRELVFQVGDYVYLRVTPLRGVHRFQTKGKLAPRFVGPYRILERRGEVAYQLELPSNMLGIHNVFHVSQLKKCLRVPEEQASPDQIEIQEDLTYVEKPTRILETSERKTRNKVIRFCKVQWSHHSEEEATWEREDELKATHPHLFASSSESRGRDSV

SEQ ID NO: 19605 - protein, 1525 aa, Oryza sativa
  Clone ID: TF_OSC416668j.C1.p19.fg
MEIRNGSRDSNNASGSEEPINGARANGASDNSPSPPPENPTIAQVLDNQTQMMTMMMQQMQQQYHQVLQQVQQQAQLQQQNLQFGPPPPQSKLLEFLRVKPPTFSSTTNPIEAHDWLHAIEKKLNLLQCNEQEKVAFATHQLQGPASIWWDNYMVTRPAGAEVTWTEFRHSFNKAQVPEGIVAQKKREFRSLQQGTRTVIEYLHEFNRLARYAPEDVRTDAERQEKFLSGLDDELTNQLISRDYEDFEKLVDKAIRQEEQCNKMNRKRKAAQFRTPQGKCQKPRFTMGHQGGPSTMIIRQHRPYHPGNFNKNNNSGSHSSLNPTPSPLMIPAQSDQSDQLAQPALPEQPKRLGEKPELCFNCNKPGHTVGKCPKPRHAGPKFVQARVNHASAEEAQSAPEVILGTFPVNSTPAVILFDSGATHSLISKRFAGAHGLSLVKLKIPMRVHTPGGGMTTTHYCPSVTVEIQGLIFPANLILLESKDLDVILGMDWLTRHRGVIDCASRTIKLTNAKGEVVTFQSLVPRKPGISLNQAAGEEQEVAVEKTTKKLEDIPIVREYPEVFPDDLTTMPPKRDIEFRIDLVPGTAPIHKRPYRMGANELAEVKKQVDEQLQKGYIRPSTSPWGAPVIFVEKKDKTKRMCVDYRALNEVTIKNKYPLPRIDDLFDQLKGATVFSKIDLRSGYHQLRIREEDIPKTAFITRYGLFECTVMSFGLTNAPAFFMNLMNKVFMEFLDKFVVVFIDDILIYSKSEEEHEQHLRLVLEKLKEHQLYAKFSKCDFWLKEVQFLGHIVNAQGVAVDPANVESVTKWTPPRTVTQVRSFLGLAGYYRRFIENFSKIAKPMTQLLKKEEKFIWSAECNRSFEELKRRLVSAPVLILPDQTKDFQVYCDASRQGLGCVLMQDGKVVSYASRQLRPHEGNYPTHDLELAAVVHALKIWRHYLIGNRCEVYTDHKSLKYIFTQPDLNLRQRRWLELIKDYDMGIHYHPGKANVVADALSRKSYCNVAWVEELCCEVQRDLEHLNLGIVEHGFVAALEAQPTLVEQVRIAQASDPEIAELKKNMRVGKARGFVEDEQGTIWMGERLCVPENKELKDLILTEAHQTQYSIHPGSTKMYQDLKEKFWWVSMRREIAEFVALCDVCQRVKAEHQRPAGLLQPLQIPEWKWEEIGMDFITGLPRTSSGHDSIWVVVDRLTKVAHFIPVHTTYSGKKLAELYLARIMCLHGVPKKIVSDRGSQFTSKFWQKLQEELGTRLNFSTAYHPQTDGQTERVNQILEDMLRACALDFGGAWDKSLPYAEFSYNNSYQASLQMAPFEALYGRRCRTPLFWDQTGERQLFGTEVLNEAEEKVRAVRERLRIAQSRQKSYADNRRRELVFQVGDYVYLRVTPLRGVHRFQTKGKLAPRFVGPYRILERRGEVAYQLELPSNMLGIHNVFHVSQLKKCLRVPEEQASPDQIEIQEDLTYVEKPTRILETSERRTRNKVIRFCKVQWSHHSEEEATWEREDELKATHPHLFTSSSESRGRDSV

SEQ ID NO: 19606 - protein, 1562 aa, Oryza sativa
  Clone ID: TF_OSC418722j.C1.p18.fg
MAVKDRFTGNPGRLTVLTTSGSGFVACGLVGGRYYVSVMEIRNGSRDSNNASGSEEPINGARANGASDNSLSPPPENPTIAQVLDNQTQMMTMMMQQMQQQYHQVMQQVQQQAQLQQQNLQFGPPPPQSKLLEFLRVKPPTFSSTTNPIEAHDWLHAIEKKLNLLQCNEQEKVAFATHQLQGPASVWWDNYMVTRPAGAEVTWTEFRHSFNKAQVPEGIVAQKKREFHSLQQGTRTVIEYLHEFNRLARYAPEDVRTDAERQEKFLSGLDDELTNQLISRDYEDFEKLVDKAIRQEEHCNKINRKRKAAQFRTPQGKSQKPRFTMGHHGGPSTMIIRQHRPYHPGNFNKNHHSDSHNNSEQHSLNPTPSSLKIPAQSVQPALPEQPKRLGEKPELCFNCNKPGHTVGKCPKPRRAGPKFVQVRVNHASAEEAQSAPEVILGTFPVNSTPAVILFDSGATHSFISKRFAGAHGLSLVKLKIPMRVHTPGGGMTTTHYCPSVTVEIQGLIFPANLILLESKDLDVILGMDWLARHRGVIDCASRTIKLTNAKGEVVIFQSPVPQKPGISLNQAAGEEQEVAVEKTTKKLEDIPMVREYPEVFSDDLTTMPPKRDIEFRIDLVPGTAPIHKRPYRMGANELAEVKKQVDEQLQKGYIRPSTSPWGAPVIFVEKKDKTKRMCVDYRTLNEVTIKNKYPLPRIDDLFDQLKGATVFSKIDLRSGYHQLRIREEDIPKTAFITRYGLFECTVMSFGLTNAPAFFMNLMNKVFMEFLDKFVVVFIDDILIYSKSEEEHEQHLRLVLEKLKEHQLYAKFSKCDFWLKEVQFLGHIVNAQGVAVDPANVESVTKWTPPRTVTQVRSFLGLAGYYRRFIENFSKIAKPMTQLLKKEEKFIWSAECNRSFEELKRRLVSAPVLILPDQTKDFQVYCDASRQGLGCVLMQDGKVVSYASRQLRPHEGNYPTHDLELAAVVHALKIWRHCLIGNRCEVYTDHKSLKYIFTQPDLNLRQRRWFELIKDYDMGIHYHPGKANVVADALSRKSYCNVAWVEELCCEVQHDLEHLNLGIVEHGFVAALEAQPTLVEQVRIAQASDPEIAELKKNMRVGKARGFVKDEQGTIWMGERLCVPENKELKDLILTEAHQTQYSIHPGSTKMYQDLKEKFWWVSMRREIAEFVALCDVCQRVKAEHQRPAGLLQPLQIPEWKWEEIGMDFITGLPRTSSGHDSIWVVVDRLTKVAHFIPVHTTYSGKKLAELYLARIMCLHGVPKKIVSDRGSQFTSKFWQKLQEELGTRLNFSTAYHPQTDGQTERVNQILEDMLRACALDFGGAWDKSLPYAEFSYNNSYQASLQMAPFEALYGRRCRTPLFWDQTGERQLFGTEVLNEAEEKVRAVRERLRIAQSRQKSYADNRRRELVFQVGDYVYLRVTPLRGVHRFQTKGKLAPRFVGPYRILERRGEVAYQLELPSNMLGIHNVFHVSQLKKCLRVPEEQASPDQIEIQEDLTYVEKPTRILETSERKTRNKVIRFCKVQWSHHSEEEATWEREDELKATHPHLFASSSESRGRDSV

SEQ ID NO: 19607 - protein, 1557 aa, Oryza sativa
  Clone ID: TF_OSC420229j.C1.p1.fg
MAIKDRFTGNPGTLTVLTTSASGCFTAFNYCFEMPALCKRTPSFLWLYPASYLLFRFVACGLVGGRYHVSVMEIRNGSRDSNNASGSEEPINGARANGASDNSPSPPPENPTIAQVLDNQTQMMTMMMQQMQQQYHQVLQQVQQQAQLQQQNLQFGSPPHQSKLLEFLRVKPPTFSSTTNPIEAHDWLHAIEKKLNLLQCNEQEKVAFATHQLQGPASVWWDNYMVTRPTGAEVTWTEFRHSFNKAQVPEGIVAQKKREFRSLQQGTRTVIEYLHEFNRLARYAPEDVRTDAERQEKFLSGLDDELTNQLISRDYEDFEKLVDKAIRQEEHCNKINRKRKAAQFRTPQGKSQKPRFTMGHHGGPSTMIIRQHRPYHPGNFNKNHHSDSHNNSEQHSLNPTPSSLKIPAQSVQPALPEQPKRLGEKPELCFNCNKPGHTVGKCPKPRRAGPKFVQARVNHASAEEAQSAPEVILGTFPVNSTPAVILFDSGATHSFISKRFAGAHGLSLVKLKIPMRVHTPGGGMTTTHYCPSVTVEIQGLIFPANLILLESKDLDVILGMDWLTRHRGVIDCASRTIKLTHAKGEVAVGEEQEVAVEKTTKKLEDIPIVREYPGVFPDDLTTMPPKRDIEFRIDLVPGTAPIHKRPYRMGANELAEVKKQVDEQLQKGYIRPSTSPWGAPVIFVEKKDKTKRMCVDYRAHNEVTIKNKYPLPRIDDLFDQLKGATVFSKIDLRSGYHQLRIREEDIPKTAFITRYGLFECTVMSFGLTNAPAFFMNLMNKVFMEFLDKFVVVFIDDILIYSKSEEEHEQHLRLVLEKLKEHQLYAKFSKCDFWLKEVQFLGHIVNAQGVAVDPANVESVTKWTPPRTVTQVRSFLGLAGYYRRFIENFSKIAKPMTQLLKKEEKFICSAECNRSFEELKRRLVSAPVLILPDQTKDFQVYCDASRQGLGCVLMQDGKVVSYASRQLRPHEGNYPTHDLELAAVVHALKIWRHYLIGNRCEVYTDHKSLKYIFTQPDLNLRQRRWLELIKDYDMGIHYHPGKANVVADALSRKSYCNVAWVEQLCCEVQRDLEHLNLGIVEHGFVAALEAQPTLVEQVRIAQASDPEIAELKKNMRVGKARGFVEDEQGTIWMGERLCVPENKELKDLILTEAHQTQYSIHPGSTKMYQDLKEKFWWAEHQRPAGLLQPLQIPEWKWEEIGMDFITGLPRTSSGHDSIWVVVDRLTKVAHFIPVHTTYSGKKLAELYLARIMCLHGVPKKIVSDRGSQFTSKFWQKLQEELGTRLNFSTAYHPQTDGQTERVNQILEDMLRACALDLGGAWDKSLPYAEFSYNNSYQASLQMAPFEALYGRRCRTPLFWDQTGERQLFGTEVLNEAEEKVRAVRERLRIAQSRQKSYADNRRRELVFQVGDYVYLRVTPLRGVHRFQTKGKLAPRFVGPYRILERRGEVAYQLELPSNMLGIHNVFHVSQLKKCLRVPEEQASPDQIEIQEDLTYVEKPTRILETSERKTRNKVIRFCKVQWSHHSEEEATWEREDELKATHPHLFASSSESRGRDSV

SEQ ID NO: 19608 - protein, 1406 aa, Oryza sativa
  Clone ID: TF_OSC420231j.C1.p1.fg
MAVKDRFTGNPGRLTVLTTSGSGDLMHIQLRNSGSRISGRDKLVSEPTLTMEIRNGSRDSNNASGSEEPNNGARANGASDNSPSPPPENPTIAQVLDNQTQMMTMMMQQMQQQYHQVLQQVQQQAQLQQQNLQFGPPPPQSKLLEFLRVKPPTFSSTTNPIEAHDWLHAIEKKLNLLQCNEQEKVAFATHQLQGPASIWWDNYMVTRPAGAEVTWTEFRHSFNKAQVPEGIVAQKKREFRSLQQGTRTVIEYLHEFNRLARYAPEDVRTDAEKQEKFLSGLDDELTNQLISRDYEDFEKLVDKAIRQEEHGNKINRKRKAAQFRTPQGKSQKPRFTMGRHGGPSTMIIRQHRPYHPGSFNKNHHNGSHNNSEQHSLNPTPSSLKIPAQSVQPALPEQPKRLGEKPELCFNCNKPGHTVGKCPKPRRAGPKFVQARVNHASAEEAQSAPEVILGTFPVNSTPAVILFDSGATHSFISKRFAGAHGLSLVKLKIPMRVHTPGGGMTTTHYCPSVTVEIQGLIFPANLILLESKDLDVILGMDWLTRHRGVIDCASRTIKLTHAKGEVVTFQSLVPRKPGISLNQAAGEEQEVAVEKTTKKLEDIPIVREYPEVFPDDLTTMPPKRDIEFRIDLVPGTAPIHKRPYRMGANELAEVKKQVDEQLQKGYIRPSTSPWGAPVIFVEKKDKTKRMCVDYRALNEVTIKNKYPLPRIDDLFDQLKGATVFSKIDLRSGYHQLRIREEDIPKTAFITRYGLFECTVMSFGLTNAPAFFMNLMNKVFMEFLDKFVVVFIDDILIYSKSEEEHEQHLRLVLEKLKEHQLYAKFSKCDFWLKEVQFLGHIVNAQGVAVDPANVESVTKWTPPRTVTQVRSFLGLAGYYRRFIENFSKIAKPMTQLLKKEEKFIWSAECNRSFEELKRRLVSAPVLILPDQTKDFQVYCDASRQGLGCVLMQDGKVVSYASRQLRPHEGNYPTHDLELAAVVHALKIWRHYLISNRCEVYTDHKSLKYIFTQADLNLRQRRWLELIKDYDMGIHYHPGKANVVADALSRKSYCNVAWVEQLCCEVQRDLEHLNLGIVEHGFVAALEAQPTLVEQVRIAQASDPEIAELKKNMRVGKARGFVEDEQGTIWMGERLCVPENKELKDLILTEAHQTQYSIHPGSTKMYQDLKEKFWWVSMRREIAEFVALCDVCQRVKAEHQRPAGLLQPLQIPEWKWEEIGMDFITGLPRTSSGHDSIWVVVDRLTKVAHFIPVHTTYSGKKLAELYLARIMCLHGVPKKIVSDRGSQFTSKFWQKLQEELGTRLNFSTAYHPQTDGQTERVNQILEDMLRACALDFGGAWDKSLPYAEFSYNNSYQASLQMAPFEALYGRRCRTPLFWDQTGERQLFGTEVLNEAEEKVRAVRERLRIA

SEQ ID NO: 19609 - protein, 2022 aa, Oryza sativa
  unsure (1)..(2022): unsure at all Xaa locations
  Clone ID: TF_OSC420276j.C1.p1.np
MAAGSRTYSFPAGRSLPLPTLYKPSLHLLRPFPPLAALPPRRNRARAVALSLRRRRRAPVHRRCRPGPPPTSAPPPSASPHPRRPRPPLRFARRPPERRRPRRPEPRRRLPPLRPPFSSPSTXGEPWTAASFPPFPPFSRPPLRRAYGRRRRPXGRGRAASRRPRRRGRLRAHRAASAWGPAVSRSRPRVWLTRGAHGAGRCEPGAPGPPWTHLGHIRTGLRASVAKRYRFHMSSGTNEGYTSYGTNEGYTSYGLVAKMSWHRAGVLLLGAQSCLPVPGVPAVGGVGSMYTSDQSIIYSNSRALGYGQAEQCTQMAGSINRRGLDLTGFVLELRGMCVVLGYPHGVDYQGKQLPEQEGDDAEPHAAWEVTAVILTGSPERTSLAVTAGGDSFSAACQNAALLAIGTLHQRYPDELQHLPYRYHPRRGGARDYATFRDASSEDDATIMHLAHMVEAYDAARIDFHQMVRRGLVKNNMKILELRQENLQLKKDLDAVEAQLRQLKIAQGEVCRPKRRRVCRSLKITARKSTSRPELVRQSLAWTCFVETPRAEPAPVVPQEDGASGVGSTEDALLLTFHGETRRSAATGEGSHPEGSNHNNHVSPPPPPSPPPPPPPDTNAILTQIVAQXANMMAAFLHHIQNPPQHNAPPPPPQHSKLAEFLRICPPTFSSSNNPVDALDWLHAVEKKLDTVQCSDEEKVIFAAHQLQGPASLWWNHFQATQLEGQPITWARFTAAFQRTHVPAGVMALKKREFRELKQGNRSVMEYLHEFNNLAWYAPEDVREDEEKXEKFLAGMDPELSVRLVSGDYSDFQRLVDKSIRLEAKHKELESHKRRLANFRNQQGANQRVRYTNPYPGGSSSQQQQQQQPRSAPRPQFVVRIPQPQQQQSQQGTRAPRPPTPAVQPGQGRRDVQGQQRLCFNCFEHGHFADKCPKPRRQQGQAPPRSNNGGKDVIRGRVNHVTAEDVLTTPDIIVGTFLIHSIPATILFDSGASHSFISVPFVGRNRLGIERLRNPLLITTPGGVMTAKYYSPAIPIEIQGIPFPSDLILLDTKNLDVILGMNWLAQFQGVVDCARRTVTLYRGPEQPVVFFAPPTSVGSSELHQIGLSEIPIVREFGDVFPEKLPGMLPKREIEFRIDLAPGTTPLYKRPYRMAANELAEVKKQLEELKEKGYIRPSTSPWGAPVIFVEKKDKTKRMCVDYRALNEVTIKNKYPLPRIDDLFDQLKGATVFSKIDLRSGYHQLRIREEDIPKTAFTTRYGLYEFTVMSFGLTNAPAFFMNLVNKVFMEYLDKFVVVFINDILVYSQSEEDHQHHLRLVLGKLREHQLYAKLSKCEFWLSEVKFLGHVISAKGVAVDPETVTAVIDWKQPKTVTQIRSFLGLAGYYRRFIENFSKIARPMTQLLKKEEKFVWSPQCEKAFQTLKERLVSSPVLVXPDTRKDFMVYCDASRQGLGCVLMQEGHVVAYASRQLRPHEGNYPTHDLELAAVVHALKIWRHYLIGNRCEIYTDHKSLKYIFTQSDLNLRXRRWLELIKDYDVGIHYHPGKANVVADALSRKSHCNTLDVRGIPPELNQQMEALNLSIVGRGFLATLEAKPTLLDQIREAQKNDPDMHGLLKNMKQGKAAGFTEDEHGTLWNGNRRVKAEHQRPAGLLQPLQVPEWKWDEIGMDFITGLPKTQGGYDSIWVVVDRLTKVARFIPVKTTYGGNKLAELYFARIVSLHGVPKKIVSDRGSQFTSHFWKKLQEELGTRLNFSTAYHPQTDGQTERLNQILEDMLRSCVLDFGKTWDKSLPYAEFSYNNSYQASLXMAPYEALYGRKCRTPLLWDQVGESQVFGTDILREAEAKVRTIRDNLKVAQSRQKSYADNRRRNLEFAVDDFVYLRVTPLRGVHMFQTKGKLAPRFVGPFRIIARRGEVAYQLELPASLGNVHDVFHVSQLKKCLRVPSEQADSEQIEVREDLTYVERPVKILDTMERRTRNWVIRFCKVQWSNHAEEEATWEREDELKAAHPNLFGSSSESRGRDSV

SEQ ID NO: 19610 - protein, 1473 aa, Oryza sativa
  Clone ID: TF_OSC421431j.C1.p24.fg
METRNGSRDSNNASGSEEPINGARANGASDNSPSPPPENPTIAQVLDNQTQMMTMMMQQMQQQYHQSKLLEFLRVKPPTFSSTTNPIEAHDWLHAIEKKLNLLQCNEQEKVAFATHQLQGPASVWWDNYMVTRPTGAEVTWTEFRHSFNKAQVPEGIVAQKKREFRSLQQGTRTVIEYLHEFNRLARYAPEDVRTDAEKQEKFLSGLDDELTNQLISRDYEDFEKLGKSQKPRFTMGHHGGPSTMVIRPHRPYHPGSFNKNHHSGSHNNSEQHSLNPTPSSLKIPAQSVRPALPEQPKRLGEKPELCFNCNKPGHTVGKCPKPRRTGPKFVQARVNHASAEEARSAPEVILGTFPVNSTPAVILFDSGATHSFISKRFAGAHGLSLVKLKIPMRVHTPGGGMTTTHYCPSVTVEIQGLIFPANLILLESKDLDVILGMDWLTRHRGVIDCASRTIKLTNAKGEVVTFQSPVPRKPGISLNQAAGEEQEVAVEKTTKKLEDIPIVREYPEVFPDDLTTMPPKRDIEFRIDLVPGTAPIHKRPYRMGANELAEVKKQVDEQLQKGYIRPSTSPWGAPVIFVEKKDKTKRMCVDYRALNEVTIKNKYPLPRIDDLFDQLKGATVFSKIDLRSGYHQLRIREEDIPKTAFITRYGLFECTVMSFGLTNAPAFFMNLMNKVFMEFLDKFVVVFIDDILIYSKSEEEHEQHLRLVLEKLKEHQLYAKFSKCDFWLKEVQFLGHIVNAQGVAVDPANVESVTKWTPPRTVTQVRSFLGLAGYYRRFIENFSKIAKPMTQLLKKEEKFIWSAECNRSFEELKRRLVSAPVLILPDQTKDFQVYCDASRQGLGCVLMQDGKVVSYASRQLRPHEGNYPTHDLELAAVVHALKIWRHYLIGNRCEVYTDHKSLKYIFTQPDLNLRQRRWLELIKDYDMGIHYHPGKANVVADALSRKSYCNVAWVEQLCCEVQRDLEHLNLGIVEHGFVAALEAQPTLVEQVRIAQASDPEIAELKKNMRVGKARGFVEDEQGTIWMGERLCVPENKELKDLILTEAHQTQYSIHPGSTKMYQDLKEKFWWISMRREIAEFVALCDVCQRVKAEHQRPAGLLQPLQIPEWKWEEIGMDFITGLPRTSSGHDSIWVVVDRLTKVAHFIPVHTTYSGKKLAELYLARIMCLHGVPKKIVSDRGSQFTSKFWQKLQEELGTRLNFSTAYHPQTDGQTERVNQILEDMLRACALDFGGAWDKSLPYAEFSYNNSYQASLQMAPFEALYGRRCRTPLFWDQTGERQLFGTEVLNEAEEKVRAVRERLRIVQSRQKSYADNRRRELAFETGDYVYLRVTPLRGVHRFQTKGKLAPRFVGPYRILERRGEVAYQLELPSNMLGIHNVFHVSQLKKCLRVPEEQASPDHIEIQEDLTYVEKPTRILETSERRTRNKVIRFCKVQWSHHSEEEATWEREDELKATHPHLFASSSESRGRDSV

SEQ ID NO: 19611 - protein, 1565 aa, Oryza sativa
  Clone ID: TF_OSC422389j.C1.p1.fg
MAVKDRFTGNPGRLTVLTTSGSGQKNPELPLVISCIIPPLPMETRNGSRDSNNASGSEKPINGARANSASDNSPSPPPENPTIAQVLDNQTQMMTMMMQQMQQQYHQVLQQVQQQAQQQQQNLQFGPPPPQSKLLEFLRVKPPTFSSTTNPIEAHDWLHAIEKKLNLLQCNEQEKVAFATHQLQGPASVWWDNYMVTRPTGAEVTWTEFCHSFNKAQVPEGIVAQKKREFRSLQQGTRTVIEYLHEFNRLARYAPEDVRTDDGRQEKFLSGLDDELTNQLISRDYEDFEKLVDKAIRQEEHCNKINRKRKAAQFRTPQGKSQKPRFTMGHHGGPSTMIIRQHRPYHPGNFNKNHHSDSHNNSEQHSLNPTLSSLKIPAQSVQPALPEQPKRLGEKPELCFNCNKPGHTVGKCPKPRRAGPKFVQARVNHASAEEAQSAPEVILGTFPVNSTPAVILFDSGATHSFISKRFAGAHGLSLVKLKIPMRVHTPGGGMTTTHYCPSVTVEIQGLIFPANLILLESKDLDVILGMDWLTRHRGVIDCASRTIKLTNAKGEVVTFQSPVPRKPGISLNQAAGEEQEVAVEKTTKKLEDIPIVREYPEVFPDDLTTMPPKRDIEFRIDLVPGTAPIHKRPYRMGANELAEVKKQVDEQLQKGYIRPSTSPWGAPVIFVEKKDKPKRMCVDYRALNEVTIKNKYPLPRIDDLFDQLKGATVFSKIDLRSGYHQLRIREEDIPKTAFITRYGLFECTVMSFGLTNAPAFFMNLMNKVFMEFLDKIVVVFIDDILIYSKSEEEHEQHLRLVLEKLKEHQLYAKFSKCDFWLKEVQFLGHIVNAQGVAVDPANVESVTKWTPPRTVTQVRSFLGLAGYYRRFIENFSKIAKPMTQLLKKEEKFIWSAECNRSFEELKRRLVSAPVLILPDQTKDFQVYCDASRQGLGCVLMQDGKVVSYASRQLRPHEGNYPTHDLELAAVVHALKIWRHYLISNRCEVYTDHKSLKYIFTQPDLNLRQRRWLELIKDYDMGIHYHPGKANVVADALSRKSYCNVAWVEQLCCEVQRDLEHLNLGIVEHGFVAALEAQPTLVEQVRIAQASDPEIAELKKNMRVGKARGFVEDEQGTIWMGERLCVPENKELKDLILTEAHQTQYSIHPGSTKMYQDLKEKFWWVSMRREIAEFVALCDVCQRVKAEHQRPAGLLQPLQIPEWKWEEIGMDFITGLPRTSSGHDSIWVVVDRLTKVAHFIPVHTTYSGKKLAELYLARIMCLHGVPKKIVSDRGSQFTSKFWQKLQEELGTRLNFSTAYHPQTDGQTERVNQILEDMLRACALNFGGAWDKSLPYAEFSYNNSYQASLQMAPFEALYGRRCRTPLFWDQTEERQLFGTEVLNEAEEKVRAVRERLRIAQSRQKSYADNRRRELVFQVGDYVYLRVTPLRGVHRFQTKGKLAPRFVGPYRILERRGEVAYQLELSSNMLGIHNVFHVSQLKKCLRVPEEQASPDQIEIQEDLTYVEKPTRILETSERKTRNKVIRFCKVQWSHHSEEEATWEREDELKATHPHLFASSSESRGRDSV

SEQ ID NO: 19612 - protein, 1169 aa, Oryza sativa
  Clone ID: TF_OSC5662j.C1.p1.fg
MAVKDRFTGNPGRLTVLTTSGSGCFTAFNYCFEMPALCKRIPSFLWLYPASYLLFRYDLLSTVGSTQSCSLFPHTRVEVLLSGAVSERLASLLPSRWRQGMVHATPTTPVAAKSRSMEHVPTVHLTTVRPHRPGVGQSDSDDDNDDVTDAATVPSGVAAGAAASTAAAAEPAVWSSTSSVQTLHAIEKKLNLLQCNEQEKVAFATHQLQGPASVWWDNYMVTRPTGAEVTWTEFCHSFNKAQVPEGIVAQKKREFRSLQQGTRTVIEYLHEFNRLARYAPEDVRTDDGRQEKFLSGLDDELTNQLISRDYEDFEKLVDKAIRQEEHCNKINRKRKAAQFRTPQGKSQKPRFTMGRHGGPSTMIIRQHRPYHPGSFNKNHHSGSHNNSEQHSLNPTPSSLKIPAQSVQPALPEQPKRLGEKPELCFNCNKPGHTVGKCPKPRRAGPKFVQARVNHASAEEAQSATEVILGTFPVNSTPAVILFDSGATHSFISKRFAGAHGLSLVKLKIPMRVHTPGGGMTTTHYCPSVTVEIQGLIFPANLILLESKDLDVILGMDWLTRHRGVIDCASRTIKLTNAKEEVVTFQSPVPQKPGISLNQAAGEEQEVAVEKTTKKLEDIPIVREYPEVFPDDLTTMPPKRDIEFRIDLVPGTAPIHKRPYRMGANELAEVKKQVDEQLQKGYIRPSTSPWGAPVIFVEKKDKTKRMCVDYRALNEVFMEFLDKFVMVFIDDILIYSKSEEEHEQHLRLVLEKLKKHQLYAKFSKCDFWLKEVQFLGHIVNAQGVAVDPANVESVTKWTPPRTVTQDGKVVSYASRQLRPHEGNYPTHDLELAAVVHALKIWRHYLIGNRCERRWLELIKDYDMGIHYHPGKANVVADALSRKSYCNVVWVEQLCCEVQRDLEHLNLGIVEHGFVVALEAQPTLVEQYSIHPGSTKMYQDLKEKFWWVNMRREIAEFVALCDVCQRVRAEHQRPAGERQLFGTEVLNEAEEKVRAVRERLRIAQSRQKSYADNRRRELAFETGDYVYLRVTPLRGVHHFQTKGKLAPRFVGPYRILERRGEAAYQLELPSNMLGIHNVFHVSKLKKCLRVPEEQASPDHIEIQEDLTYVEKPTRILETSERRTRNKVIRFCKVQWSHHSEEVATWEREDELKATHPHLFASHSESRGRDSV

SEQ ID NO: 19613 - protein, 572 aa, Oryza sativa
  Clone ID: TF_OSC5662j.C1.p5.gm
MEHVPTVHLTTVRPHRPGVGQSDSDDDNDDLQGPASVWWDNYMVTRPTGAEVTWTEFCHSFNKAQVPEGIVAQKKREFRSLQQGTRTVIEYLHEFNRLARYAPEDVRTDDGRQEKFLSGLDDELTNQLISRDYEDFEKLVDKAIRQEEHCNKINRKRKAAQFRTPQGKSQKPRFTMGRHGGPSTMIIRQHRPYHPGSFNKNHHSGSHNNSEQHSLNPTPSSLKIPAQSVQPALPEQPKRLGEKPELCFNCNKPGHTVGKCPKPRRAGPKFVQARVNHASAEEAQSATEVILGTFPVNSTPAVILFDSGATHSFISKRFAGAHGLSLVKLKIPMRVHTPGGGMTTTHYCPSVTVEIQGLIFPANLILLESKDLDVILGMDWLTRHRGVIDCASRTIKLTNAKEEVVTFQSPVPQKPGISLNQAAGEEQEVAVEKTTKKLEDIPIVREYPEVFPDDLTTMPPKRDIEFRIDLVPGTAPIHKRPYRMGANELAEVKKQVDEQLQKGYIRPSTSPWGAPVIFVEKKDKTKRMCVDYRALNEVTIKNKYPLPRIDDLFDQLKGATVFSKIDLRSGYH

SEQ ID NO: 19614 - protein, 1135 aa, Oryza sativa
  Clone ID: TF_OSC6239j.C1.p4.gm
MEIRNGSRDSNNACGSEEPIDGARANSASGNSPSPPPENPTIAQVLDNQTQMMTMMMQQMQQQYHQSKLLEFLRVKPPTFSSTTNPIEAHDWLHAIEKKLNLLQCNEQEKVAFATHQLQGPASIWWDNYMVTRPAGAEVTWTEFRHSFNKAQVPEGIVAQKKREFRSLQQGTRTVIEYLHEFNRLARYAPEDVRTNAERQEKFLSGLDDELTNQLISRDYEDFEKLVDKAIRQEEHGNKINRKRKAAQFRTPQGKSQKPRFTMGRHGGPSTMIIRQHRPYHPGSFNKNHHNGSHNNSEQHSLNPTPSSLKIPAQSVQPALPEQPKRLGEKPELCFNCNKPGHTVGKCPKPRRAGPKFVQARVNHASAEEAQSAPERFAGAHGLSLVKLKIPMRVNTPGGGMTTTHYCPSVTVEIQGLIFPANLILLESKDLDVILGMDWLTRHRGVIDCASRTIKLTHAKGEVVTFQSLVPRKPGISLNQAAGEEQEVAVEKTTKKLEDIPIVREYPEVFPDDLTTMPPKRDIEFRIDLVPGTAPIHKRPYSMGANELAEVKKQVDEQLQKGYIRPSTSPWGAPVIFVEKKDKTKRMCVDYRALNEVTIKNKYPLPRIDDLFDQLKGATVFSKIDLRSGYHQLRIREEDIPKTAFITRYGLFECTVMSFGLTNAPAFFMNLMNKVFMEFLDKFVVVFIDDILIYSKSEEEHEQHLQLVLEKLKEHQLYAKFSKCDFWLKEVQFLGHIVNAQGVAVDPANVESVTKWTPPRTVTQVRSFLGLAGYYRRFIENISKIAKPMTQLLKKEEKFIWSAECNRSFEELKRRLVSAPVLILPDQTKDFQVYCDASRQGLGCVLMQDGKVVSYASRQLRPHEGNYPTHDLELAAVVHALKIWQHYLISNRCEVYTDHKSLKYIFTQADLNLRQRRWLELIKDYDMGIHYHPGKANVVADALSRKSYCNVAWVEQLCCEVQRDLEHLNLGIVEHGFVAALEAQPTLVEQVRIAQASDPEIAELKKNMRVGKARGFVEDEQGTIWMGERFTVWTKVSYSALLGSDRVTELVAPHRETAQAPLCQSGRGLREEGGHLTLGPDVPEGARPRGRLRLPQASGHDTPGPISPTVAPGVMPEQFPFPREAVRCDATPKAW

SEQ ID NO: 19615 - protein, 1562 aa, Oryza sativa
  Clone ID: TF_OSC7720j.C1.p1.fg
MAVKDRFTGNPGRLTVLTTSGSGFVACGLVGGRYHVSVMEIRNGSRDSNNASGSEEPINGARANGASDNSPSPPPENPTIAQVLDNQTQMMTMMMQQMQQQYHQVLQQVQQQAQLQQQNLQFGPPPPQSKLLEFLRVKPPTFSSTPNPIEAHDWLHAIEKKLNLLQCNEQEKVAFATHQLQGPASIWWDNYMVTRPAGAEVTWTEFCHSFNKAQVPEGIVAQKKREFRSLQQGTRTVIEYLHEFNRLARYAPEDVRTDAERQEKFMSGLDDELTNQLISRDYEDFEKLVDKAIRQEEQCNKMNRKRKAAQFRTPQGKCQKPRFTMGRHGGPSTMIIRQHRPYHPGSFNKNHHSGSHNNSEQHSLNPTPSSLKIPAQSVQPALPEQPKRLGEKPELCFNCNKPGHTVGKCPKPRRAGPKFVQARVNHASAEEAQSAPEVILGTFPVNSTPAVILFDSGATHSFISKRFAGAHGLSLVKLKIPMRVHTPGGGMTTTHYCPSVTVEIQGLIFPANLILLESKDLDVMLGMDWLARHRGVIDCASRTIKLTNAKGEVVIFQSPVPQKPGISLNQAAGEEQEVAVEKTTKKLEDIPIVREYPEVFPDDLTTMPPKRDIEFRIDLVPGTAPIHKRPYRMGANELAEVKKQVDEQLQKGYIRPSTSPWGAPVIFVEKKDKTKRMCVDYRALNEVTIKNKYPLPRIDDLFDQLKGATVFSKIDLQSGYHQLRIREEDIPKTAFITRYGLFECTVMSFGLTNAPAFFMNLMNKVFMEFLDKFVVVFIDDILIYSKSEEEHEQHLRLVLEKLKEHQLYAKFSKCDFWLKEVQFLGHIVNAQGVAVDPANVESVTKWTPPRTVTQVRSFLGLAGYYRRFIENFSKIAKPMTQLLKKEEKFIWSAECNRSFEELKRRLVSAPVLILPDQTKDFQVYCDASRQGLGCVLMQDGKVVSYASRQLRPHEGNYPTHDLELAAVVHALKIWRHYLIGNRCEVYTDHKSLKYIFTQPDLNLRQRRWLELIKDYDMGIHYHPGKANVVADALSRKSYCNVAWVEQLCCEVQRDLEHLNLGIVEHGFVAALEAQPTLVEQVRIAQASDPEIAELKKNMRVGKARGFVEDEQGTIWMGERLCVPENKELKDLILTEAHQTQYSIHPGSTKMYQDLKEKFWWVSMRREIAEFVALCDVCQRVKAEHQRPAGLLQPLQIPEWKWEEIGMDFITGLPRTSSGHDSIWVVVDRLTKVAHFIPVHTTYSGKKLAELYLARIMCLHGVPKKIVSDRGSQFTSKFWQKLQEELGTRLNFSTAYHPQTDGQTERVNQILEDMLRACALDFGGAWDKSLPYAEFSYNNSYQASLQMAPFEALYGRRCRTPLFWDQTGERQLFGTEVLNEAEEKVRAVRERLRIAQSRQKSYADNRRRELVFQVGDYVYLRVTPLRGVHRFQTKGKLAPRFVGPYRILERRGEVAYQLELPSNMLGIHNVFHVSQLKKCLRVPEEQASPDQIEIQEDLTYVEKPTRILETSERKTRNKVIRFCKVQWSHHSEEEATWEREDELKATHPHLFASSSESRGRDSV

SEQ ID NO: 19616 - protein, 606 aa, Oryza sativa
  Clone ID: TF_OSC900109j.C1.p5.fg
MADKTLSEFAAPSTDNVAIGPQINMGDMDFDLKSSLMTMAQASLFCGKPNEDANAHLQQFLEICSTYTIKGVSPDAIRLRLFPFSLLGRVKQWFYANRATINTWDKCSTAFLSKFFPMGNFYNGLTPVSRNHLDAAAGGTFFSKTVRGAVDLIEKMVSNMGWSEERLQTRQRGMHTVKETELLAAKPDLLMKRLDDHEKRPQGTIKALDSHVTCEVCGNTGHTRNNCPETREEAMYMGNNSSGYRPQGGQGWNQPHPYYQGGRILRQPDSSVENVKAIMMRGGINRTAKEAPSSDSADKEVQPEKTVPPEYYDTRLLPFPQRSRKPSVDEQFAHFVEVIQKIHINVPLLDAMQVVKLTEQCSNIILHKLPEKKKDPGYPTITCSIGAQQFDQALCDLGASVSVMPKDVFNKLNFTVLAPTPMRLQLADSSVRYPAGIAEDVLVKIRDFFIPVDFIVLDMDTGKETPLILGRPFLSTVGANIDMGTGSIRFHINGKEEKFEFQPRTEQSSMVRIKYEPNTQNIQVVEVEPTKMDSLLKFMQNFLEKETTMPRNRYWKTPVKTNTPDKKLEQPAQRKPFSAPKPKKVWKEKPKTPAPSPREMGGKSTN

SEQ ID NO: 19617 - protein, 1524 aa, Oryza sativa
  Clone ID: TF_OSC900229j.C1.p20.fg
METRNGSRDSNNASGSEEPINGARANGASDNSPSPPPENPTIAQVLDNQTQMMTMMMQQMQQQYHQVLQQVQQQAQLQQQNLQFGPPPPQSKLLEFLRVKPPTFSSTTNPIEAHDWLHAVEKKLNLLQCNEQEKVAFATHQLQGPASIWWDNYMVTRPAGAEVTWTEFCHSFNKAQVPEGIVAQKKREFRSLQQGTRTVIEYLHEFNRLARYAPEDVRTDAERQEKFLSGLDDELTNQLISRDYEDFEKLVDKAIRQEEHCNKINRKRKAAQFRTPQGKSQKPRFTMGHHGGPSTMIIRQHRPYHPGNFNKNHHSDSHNNSEQHSLNPTPSSLKIPAQSVQPALTEQPKRLGEKPELCFNCNKPGHTVGKCPKPRRAGPKFVQARVNHASAEEAQSAPEVILGTFPVNSTPAVILFDSGATHSFISKRFAGAHGLSLVKLKIPMRVHTPGGGMTTTHYCPSVTVEIQGLIFPANLILLESKDLDVILGMDWLARHRGVIDCASRTIKLTNAKGEVVIFQSPVPQKPGISLNQAAGEEQEVAVEKTTKKLEDIPIVREYPEVFPDDLTTMPPKRDIEFRIDLVPGTAPIHKRPYRMGANELAEVKKQVDEQLQKGYIRPSTSPWGAPVIFVEKKDKTKRMCVDYRALNEVTIKNKYPLPRIDDLFDQLKGATVFSKIDLRSGYHQLRIREEDIPKTAFITRYGLFECTVMSFGLTNAPAFFMNLMNKVFMEFLDKFVVVFIDDILIYSKSEEEHEQHLRLVLEKLKEHQLYAKFSKCDFWLKEVQFLGHIVNAQGVAVDPANVESVTKWTPPRTVTQVRSFLGLAGYYRRFIENFSKIAKPMTQLLKKEEKFIWSAECNRSFEELKRRLVSAPVLILPDQTKDFQVYCDASRQGLGCVLMQDGKVVSYASRQLRPHEGNYPTHDLELAAVVHALKIWRHYLIGNRCEVYTDHKSLKYIFTQPDLNLRQRRWLELIKDYDMGIHYHPGKANVVADALSRKSYCNVAWVEELCCEVQHDLEHLNLGIVEHGFVAALEAQPTLVEQVRIAQASDPEIAELKKNMRVGKARGFVEDEQGTIWMGERLCVPENKELKDLILTEAHQTQYSIHPGSTKMYQDLKEKFWWVSMRREIAEFVALCDVCQRVKAEHQRPAGLLQPLQIPEWKWEEIGMDFITGLPRTSSGHDSIWVVIDRLTKVAHFIPVHTTYSGKKLAELYLARIMCLHGVPKKIVSDRGSQFTSKFWQKLQEELGTRLNFSTAYHPQTDGQTERVNQILEDMLRACALDFGGAWDKSLPYAEFSYNNSYQASLQMAPFEALYGRRCRTPLFWYQTGERQLFGTEVLNEAEEKVRAVRERLRIAQSRQKSYADNRRRELAFETGDYVYLRVTPLRGVHRFQTKGKLAPRFVGPYRVLERRGEVAYQLELPSNMLGIHNVFHVSQLKKCLRVPEEQASPDQIEIQEDLTYVEKPTRILETSERKTRNKVIRFCKVQWSHHSEEEATWEREDELKATHPHLFASSSESRGRDSV

SEQ ID NO: 19618 - protein, 1562 aa, Oryza sativa
  Clone ID: TF_OSC900288j.C1.p23.fg
MAVKDRFTGNPGRLTVLSTSGSGFDACGLVGGRYHVSVMETRNGSRDSNNASGSEKPINGARANSASDNSPSPPPENPTIAQVLDNQTQMMTMMMQQMQQQYHQVLQQVQQQAQLQQQNLQFGSPPPQSKLLEFLRVKPPTFSSTTNPIEAHDWLHAIEKKLNLLQCNEQEKVAFATHQLQGPASIWWDNYMVTRPAGAEVTWTEFRHSFNKAQVPEGIVAQKKREFRSLQQGTRTVIEYLHEFNLLARYAPEDVRTDAERQEKFLSGLDDELTNQLISRDYEDFEKLVDKAIRQEEHCNKINRKRKAAQFRTPQGKSQKPRFTMGRHGGPSTMIIRQHRPYHPGSFNKNHHNGSHNNSEQHSLNPTPSSLKIPAQSVQPALPEQPKRLGEKPELCFNCNKPGHTVGKCPKPRRAGPKFVQARVNHASAEEAQSAPEVILGTFPVNSTPAVILFDSGATHSFISKRFAGAHGLSLVKLKIPMRVHTPGGGMTTTHYCPSVTVEIQGLIFPANLILLESKDLDVILGMDWLTRHRGVIDCASRTIKLTNAKGEVVTFQSLVPRKPGISLNQAAGEEQEVAVEKTTKKLEDIPIVREYPEVFPDDLTTMPPKRDIEFRIDLVPGTAPIHKRPYRMGASELAEVKKQVDEQLQKGYIRPSTSPWGAPVIFVEKKDKTKRMCVDYRALNEVTIKNKYPLPRIDDLFDQLKGVTVFSKIDLRSGYHQLRIREEDIPKTAFITRYGLFECTVMSFGLTNAPAFFMNLMNKVFMEFLDKFVVVFIDDILIYSKSEEEHEQHLRLVLEKLKEHQLYAKFSKCDFWLKEVQFLGHIVNAQGVAVDPANVESVTKWTPPRTVTQVRSFLGLAGYYRRFIENFSKIAKPMTQLLKKEEKFIWSAECNRSFEELKRRLVSAPVLILPDQTKDFQVYCDASRQGLGCVLMQDGKVVSYASRQLRPHEGNYPTHDLELAAVVHALKIWRHYLIGNRCEVYTDHKSLKYIFTQPDLNLRQRRWLELIKDYDMGIHYHPGKANVVADALSRKSYCNVAWVEQLCGEVQRDLEHLNLGIVEHGFVAALEAQPTLVEQVRIAQASDPEIAELKKNMRVGKARGFVEDEQGTIWMGERLCVPENKELKDLILTEAHQTQYSIHPGSTKMYQDLKEKFWWVSMRREIAEFVALCDVCQRVKAEHQRPAGLLQPLQIPEWKWEEIGMDFITGLPRTSSGHDSIWVVVDRLTKVAHFIPVHTTYSGKKLAELYLSRIMCLHGVPKKIVSDRGSQFTSKFWQKLQEELGTRLNFSTAYHPQTDGQTERVNQILEDMLRACALDFGGAWDKSLPYAEFSYNNSYQASLQMAPFEALYGRRCRTPLFWDQTGERQLFGTEVLNEAEEKVRAVRERLRIAQSRQKSYADNRRRELVFQVGDYVYLRVTPLRGVHRFQTKGKLAPRFVGPYRILERRGEVAYQLELPSNMLGIHNVFHVSQLKKCLRVPEEQASPDQIEIQEDLTYVEKPTRILETSERKTRNKVIRFCKVQWSHHSEEEATWEREDELKATHPHLFASSSESRGRDSV

SEQ ID NO: 19619 - protein, 1458 aa, Oryza sativa
  Clone ID: TF_OSC900332j.C1.p23.fg
MVKTRNGSCDSNNASGSKEQISGACASDAPNSSSSPLPENLTIAQVLDNQTQMMTMMMQQMQQQYHQVLQQVQQQAQQQQQNLQFGLQPPQSKLLEFLRIKPPTFSSTTNPIEANDWLYAIEKKLNLLQCNEQEKVAFATHQLQGPASVWWDNYMVTRPAGTEVTWESWHRRREFRSLQQGTRTVIEYLHEFNRLARYAPEDVRTDDERQEKFLSGLDDELTNQLISRDYEDFEKLVDKAIRQEEHCNKINRKRKAAQFRTPQGKSQKPRFTMGRQGGPSTMIIRQHRPYHPGSFNKNHHSGSHNNSEQHSLNPSPSSLKIPAQSVQPALPKQPKRLGEKPELCFNCNKPGHTVGKCPKPRRAGPKFVQARVNHASAEEAQSAPERFAGAHGLSLVKLKIPMRVHTPGGGMTTTHYCPSVIVEIQGLIFPANLILLESKDLDVILGMDWLTRHRGVIDCASRTIKLTNAKGEVVTFQSPVPQKPGISLNQAAGEEQEVAVEETTKKLEDIPIVREYPELFPNDLTTMPPKRDIEFRIDLVPGTAPIHKRPYRMGANELAEVKKQVDEQLQKGYIRPSTSPWGAPVIFVEKKDKTKRMCVDYRALNEVTIKNKYPLPRIDDLFDQLKGATVFSKIDLRSGYHQLRIREEDIPKTAFITRYGLFECTVMSFGLTNAPAFFMNLMNKVFMEFLDKFAVVFIDDILIYSKSEEEHEQHLQLVLEKLKEHQLYAKFSKCDFWLKEVQFLGHIVNAQGVAVDPANMESVTKWTPPRTVTQVQSFLGLAGYYRWFIENFSKIAKPMTQLLKKEEKFIWSAECNRSFEELKRRLVSAPVLILPDQTKNFQVYYDASRQGLGCVLMQDGKVVSYASRQLRPHEGNYPTHDLELAAVVHALKIWRHYLIGNRCEVYTDHKSLKYIFTQPDLNLRQRRWLELIKDYDMGIHYHPSKANVVADALSRKSYCNVAWAQPTLVEQVRIAQASDPEIAELKKNMRVGKARGFVEDEQGTIWMGERLCVPKNKELKDLILIEAHQTQYSIHPGSTKMYQDLKEKFWWVSMRREIAEFVALCDVCQRVKAEHQRPAGLLQPLQIPEWKWEEIGMDFITGLPRTSSGHDSIWVVVDRLTKVAHFIPVHTTYSGKKLAELYLARIMCLHGVPKKIVSDRRSQFTSKFWQKLQEELGTRLNFSTAYHPQTDGQTERVNQILEDMLRACALDFGGAWDKSLPYAEFSYNNSYQASLQMAPFEALYGRKCRTPLFWDQTGERQLFGTEVLNEAEEKVRAVRERLRIAQSRQKSYADNRRRELVFQAGDYVYLCVTPLRGVHRFQTKGKLAPRFVGPYRILERRGEVAYQLELPSNMLGIHNVFHVSQLKKCLRVPEEQASPDQIEIQEDLTYVEKPTRILETSERRTRNKVIRFCKVQWSHHSEEEATWEREDELKATHPHLFASSFESRGRDSVCHTLK

SEQ ID NO: 19620 - protein, 1600 aa, Oryza sativa
  Clone ID: TF_OSC900357j.C1.p5.fg
MAVKDRFTGNPGRLTVLTTSGSGCFTAFNYCFEMPALCKRTPSFLWLYPASYLLFRAEDLPSWSCFIEVGFVAAVKMEIRNGSRDSNNASGSEEPINGARANGASDNSPSPPPENPTIAQVLNNQTQMMTMMMQQMQQQYHQVLQQVQQQAQPQQQNLQFGPPPPQSKLLEFLRVKPPTFSSTTNPIEAHDWLHAIEKKLNLLQCNEQEKVAFATHQLQGPASVWWDNYMVTRPTGAEVTWTEFRHSFNKAQVPEGIVAQKKREFRSLQQGTRTVIEYLHEFNRLARYAPEDVRTDAERQEKFLSGLDDELTNQLISRDYEDFEKLVDKAIRQEEHCNKINRKRKAAQFRTPQGKSQKPRFTMGHHGGPSTMIIRQHRPYHPGNFNKNHHSDSHNNSEQHSLNPTPSSLKIPAQSVQPALPEQPKRLGEKPELCFNCNKPGHTVGKCPKPRRAGPKFVQARVNHASAEEAQSAPEVILGTFPVNSTPAVILFDSGATHSFISKRFAGAHGLSLVKLKIPMRVHTPGGGMTTTHYCPSVTVEIQGLIFPANLILLESKDLDVILGMDWLARHRGVIDCASRTIKLTNAKGEVVIFQSPVPQKPGISLNQAAGEEQEVAVEKTTKKLEDIPIVREYPEVFPDDLTTMPPKRDIEFRIDLVPGTAPIHKRPYRMGANELAEVKKQVDEQLQKGYIRPSTSPWGAPVIFVEKKDKTKRMCVDYRALNEVTIKNKYPLPRIDDLFDQLKGATVFSKIDLRSGYHQLRIREEDIPKTAFITRYGLFECTVMSFGLTNAPAFFMNLMNKVFMEFLDKFVVVFIDDILIYSKSEEEHEQHLRLVLEKLKEHQLYAKISKCDFWLKEVQFLGHIVNAQGVAVDPANVESVTKWTPPRTVTQVRSFLGLAGYYRRFIENFSKIAKPMTQLLKKEEKFIWSAECNRSFEELKRRLVSAPVLILPDQTKDFQVYCDASRQGLGCVLMQDGKVVSYASRQLRPHEGNYPTHDLELAAVVHALKIWRHYLIGNRCEVYTDHKSLKYIFTQPDLNLRQRRWLELIKDYDMGIHYHPGKANVVADALSRKSYCNVAWVEELCGEVQRDLEHLNLGIVEHGFVAALEAQPTLVEQVRIAQASDPEIAELKKNMRVGKARGFVEDEQGTIWMGERLCVPENKELKDLILTEAHQTQYSIHPGSTKMYQDLKEKFWWVSMRREIAEFVALCDVCQRVKAEHQRPAGLLQPLQIPEWKWEEIGMDFVTGLPRTSSGHDSIWVVVDRLTKVAHFIPVHTTYSGKKLAELYLARIMCLHGVPKKIVSDRGSQFTSKFWQKLQEELGTRLNFSTAYHPQTDGQTERVNQILEDMLRACALDFGGAWDKSLPYAEFSYNNSYQASLQMAPFEALYGRRCRTPLFWDQTGERQLFGTEVLNEAEEKVRAVRERLRIAQSRQKSYADNRRRELAFETGDYVYLRVTPLRGVHRFQTKGKLAPRFVGPYRVLERRGEVAYQLELPSNMLGIHNVFHVSQLKKCLRVPEEQASPDHIEIQEDLTYVEKPTRILETSERRTRNKVIRFCKVQWSHHSEEEATWEREDELKATHPHLFASSSESRGRDSV

SEQ ID NO: 19621 - protein, 892 aa, Oryza sativa
  Clone ID: TF_OSC14567j.C1.p1.fg
MASGNDMWDALEAKFGVSDASSELYVMEKFYDYKMVDDRSVVEQAHEIQMLAKELENNNCELPDKFVAGGIIAKLPPFWSDFVTSLKHKRQEFSVSDLIGSLGVEENARAKDNLGKKVERGSSANMVQKKNPQASHNNKKVKPDVKPKATTNFKKKGKGKAKGDCFVSRKSGHWAKDCPERKDRKSANMVISKGGGTSGYGKILPTVLSFFHSPNWWVDIGANIHVGRGFSLLMRKGSLAAVHGVGSKCHTCVQSKQPRKPHKASEARDLAPLELVHSDLREMNGVLTKGGKKYFMTLIDDCTRFCYVYLLKTKDEALHYFKTYKAEVETQVERKIKRLSSDRSGEYFSNEFTSFCEEFGIIHERTPPYSPQSNGVAERKNHTLTKLHKEVTPFEEWEMKKLNLSYLRTWDCLAKSRDATFFENEFPMKNTPSTSSQEIVIPHQHFAPIKHNDQTPEGNPEEDKIVDTRKRCKWVFKKKLRPDGTIEKYKARLVAKGYTQKEGEEFFDTYSPVARLTTIRVLLALAASHGLLVHQMDVKTAFLNRELEEEIYMDQLDEYVLEGQEGIVCKLLKSLCGLKQASKQWHEKFDTTLISAGFVVNEADKCVYYRYGGGEEVILCLYVDDILIFGTSLNVIEEVKDFLSKSFEMKDLGEADVILNIKLLRGDEGMITLVKSYYMDKILSRFGYSDCKPAATPYDPSALERVMRYLNDTISYGIHTTGYPKVLEGYSDSNWIYDADEIKATSGYVFTLGGGAVSWKSCKQIILTRSTMEAELTALDTATVEAEWLRELLMDLPVVEKPVPAILMNCDNQTVIIKVISSKDNMKSSRHIKRRLKYVRKQKNSGVIALDYVQTAKNLDGLCLNVVQVAFLSRDIDLQNISEGTHLYEFDC

SEQ ID NO: 19622 - protein, 232 aa, Oryza sativa
  Clone ID: TF_OSC17650j.C1.p1.fg
MSVTEYLHEFNRLARYAPDDVRTDAEKQEKFLFGLDDELTNQLISGVYEDFEKLVDKAIRQEEQRNKIDRKRKTAQISFPQGNNQKPRFMTGQLGGPSTLIVCQHHPYHPSNFDNDYNGGSHNNSKQHNHNSTPPPLMAPAQSDPPAVSAQSEQPKKGAVGKPGHCFNCGKHGHFAGKCPKLNRTGPRLIQARANHVSAEEAQAAPEVVLGTFPVNSYPATVLFDSGSYPWK

SEQ ID NO: 19623 - protein, 207 aa, Oryza sativa
  unsure (1)..(207): unsure at all Xaa locations
  Clone ID: TF_OSC400321j.C1.p36.np
MSPLALRHFLVKWFKILLPVPLILLAVKPRTSHQLCACLEVKSSXASSFVQRARQMVSMRDNFIESGPCQFHGATQCNSNSIPHQPLEDQPQPQVMANQTQTVEELLQQMRRRYQIYQMQRQCQESRQCHQPQVQVQMPAQNPNQSQSQEFPILAPKTPVKMLSRSPKITTAKSSSDQRKVSATCYDCGEQGHYVRNCPWKVFARSP

SEQ ID NO: 19624 - protein, 1303 aa, Oryza sativa
  Clone ID: TF_OSC401128j.C1.p12.fg
MAQSMVPVFAGENYDIWSIKMRTLLLSQGLWDIVENGYQEYSAGETLTAEQKKSLAEDRMSDAKALFLIQQGVAESLFPRIIGAKKSKEAWDKLKEEFQGSQKVLAVKLQTLRRQFQNLLMKESEKVKDYFSRVIEIVNQMRLYGEDINDQKVVEKILISLPEKYEYIVAAIEESKDLSTLTIQQLMSSLESHEERKLQREGSSIENAFQSKLSFRPQNSRFRGNFQKNGFPMRDRGYFQKNGFSRQKEDGQERREKGTSSSNLWCDICQKSSHTTDMCWKKMTCNKCKRKGHIAKYCRTREINRANFSQEKEKSEEMVFSCHTAQEEKDDVWVIDSGCTNHMAADPNLFREMDSSYHAKIHMGNGSIAQSEGKGTVAVQTADGPKFIKDVLLVPDLKQNLLSIGQLLEHGYAVYFEDFSCKILDRKNNRLVAKINMEKNRNFLLRMNHTTQMALRSEVDISDLWHKRMGHLNYRALKLLRTKGMVQGLPFITLKSDPCEGCVFGKQIRASFPHSGAWRASAPFELVHTDIVGKVPTMSEGGNWYFITFIDDYTRMIWVYFLKEKSAALETFKKFKVMVENQSNRKIKVLRSDQGGEYISKEFEKYCENAGIRRQLTTGYSAQQNGVAERKNRTINDMANSMLQDKGMPKSFWAEAVNTAVYILNRSPTKAVPNRTPFEAWYGKKPVIGHMRVFGCICYAQVPAQKRVKFDNKSDRCIFVGYADGIKGYRLYNLEKKKIIISRDVIFDESATWNWKSPEASSTPLLPTTTITLGQPHMHGTHEVEDHTPSPQPSSPMSSSSASSDSSPSSEEQISTPESAPRRVRSMVELLESTSQQRGSEQHEFCNYSVVEPQSFQEAEKHDNWIKAMEDEIHMIEKNNTWELVDRPRDREVIGVKWVYKTKLNPDGSVQKYKARLVAKGFKQKPGIDYYETYAPVARLETIRTIIALAAQKRWKIYQLDVKSAFLNGYLDEEIYVEQPEGFSVQGGENKVFRLKKALYGLKQAPRAWYSQIDKYFIQKGFAKSISEPTLYVNKTGTDILIVSLYVDDLIYTGNSEKMMQDFKKDMMHTYEMSDLGLLHYFLGMEVHQSDEGIFISQRKYAENILKKFKMDNCKSVTTPLLSNEKQKARDGADKADPTIYRSLVGSLLYLTATRPDIMFAASLLSRYMSSPSQLNFTAAKRVLRYIKGTADYGIWYKPVKESKLIGYTDSDWAGCLDDMKSTSGYAFSLGSAEAEYVAASKAVSQVVWLRRIMEDLGEKQYQPTTIYCDSKSAIAISENPVSHDRTKHIAIKYHYIREAVDR

SEQ ID NO: 19625 - protein, 1055 aa, Oryza sativa
  Clone ID: TF_OSC412754j.C1.p1.fg
MAQSMVPVFARENYDIWSIKMRTLLLSQGLWDIVENGYQEYSAGETLTAEQKKSLVEDRMSDAKALFLIQQGVAESLFPRIIGAKKSKEAWDKLKEEFQASQKVLAVKLQTLRRQFQNLQMKESEKVKDYFSRVIEIVNQMRLYGEDINDQKVVKKILISLPEKYEYIVAAIEESKDLSTLTIQQLMSSLESHEERKLQREGSSVENAFQSKLSFRPQNSRFRGNFQKNGFPMRDRGFQKNGFSRQNEYGQERREKGTSSSNLWCDICQKSSHTTYMCWKKMTCNKCKRKGHIAKYCRTREINRANFSQEKEKSEEMVFSCHTAQEEKDDVWVIDSGCTNHMAADPNLFREMDSSYHAKIHMGNGSIAQSKGKALEIFKKFKAMVENQSNRKIKVLRSDQGGEYISKEFEKYCENAGIRRQLTAGYSAQQNGVAERKNRTINDMANSMLQDKEVLPRQYQTVHLLKLGMANHICKVLMKWNIILQVHSHQVQGQAQVLVQIQAQAVKSKFLTPESAPRRVRSMVELLESTSQQRGSEQHEFCNYSVVEPQSFQEAEKHDNWIKAMEDEIHMIEKNNTWELVDRPRDREVIGVKWVYKTKLNPDGSVQKYKARLVAKGFKQKPGIDYYETYAHVARLETIHTIIALAAQKRWKIYQLDVKSAFLNGYLDEEIYVEQPERFSVQGGENKVFRLKKALYGLKQAPRAWYSQIDKYFIQKGFAKSISEPILYVKKTGTDILIVSLYVDDLIYTGNSEKLMQDFKKDMMHTYEMSDLGLLHYFLGMEVHQSDEGIFISQRKYAENILKKFKMDNCKSVTTPLLPNEKQKARDGADKADPTIYRSLVGSLLYLTATRPDIMFAASLLSRYMSSPSQLNFTAAKRVLRYIKGTAYYGIWYKPVKESKLIGYTDSDWAGCLDDMKSTSGYAFSLGSGMWSWSTKKQNIVALSSAEAEYVAASKAVSQVVWLRRIMEDLGEKQYQPTTIYCDSKSAIAINENPVSHDRTKHIAIKYHYIREAVDRQEVKLEFCRTDEQLADIFTKALSKEKFICDRELIGVCKK

SEQ ID NO: 19626 - protein, 1441 aa, Oryza sativa
  unsure (1)..(1441): unsure at all Xaa locations
  Clone ID: TF_OSC416742j.C1.p2.np
SSATSSCTISSPPPPTPAPSGAGTGAPGAGAPIDNTNGGSSASQSSGGTFTGYNSLLLLRFLLFRLVTMLLRSMYMMVLIISEACSCMFDFITRSTHIVHAMIIVLIFWIKICXYMTISPTIQKPDRSFSVVGFAAALKPHAFDGSNYKRWKARILLWLTAMQCFYVSRGKRSEPPLSPKEEVMFEASDCLFRGALINVLADNIVDMYMHMPLGKDMWDALEAKFGVSDASSELYVMEQFFDYKMVDDRSVVEQAHEIQMLAKELENNNCELPDKFVARGIIAKLPPSWSDFATSLKRKRQEFSVSDLIGSLGVEEKARAKDNRGKKVEGGSSANMVQKKNPHASHNNKKVKPDVKPKATTNFKKKGKGKAKGDCFMCGKSGYWAKDCPERKDRKSANMVISEGGGTWGYDKILPTVLSVFHSPDWWIDIGANIHVCVDISLFSSYQVGRGSFLLMGNGSLAAVHGVGTVDLKFTSGKTVQLKNVQHIPSIKKNLVSGSLLCREDFRLVFESNKCVVSKYGTFIGKGYDSGGLFRFSLDDMCNNNNVVNHISENDESNVWHSLLCHVNFGCMTRLANMSLIPKFTLVKCFKCHTCVQSKQPRKPHKASEARDLAPLELVHSDLCEMNGVLTKGGKKYFMTLIDNCTRFCYVSLLKTKDEALHYFKTYKAKVENQLERKIKRLRSDRGGEYFSNEFTSFYEEFGIIHERTSPYSPQSNGIAERKNRTLTEMVNAMLDTAGLSKEWWGEAVLIACHVLNKIPMKHKEVTPFEEXERKKLNLSYLRTWGCLAKVNVPIAKKRKLGPNTVDCVFLGYAIHSVGYIFLIVNSGVPDMRVGTIIESRDATFFENEFPMKNTPSTSSQETVIPHEHFAPIEHNDQTPEGNPEEDNIVDTRKSKRQRVAKSFGDDYILYLVDDTPRTIEEAYSSPDADXWKEAVRSEIDSIMSNGTXEVVEHPYGCKPVGCKWVFKKKLRPDGTIEMYKARLVAKGYTQKEGKFFDTYSPVARLTTIQVLLALAASHGLLVHQMDVKTAFLNGKLEEEIYMDQPDWYVLEGQEGMVCKLLKSLYGLKQAPKQWHEKFDTTLTSAGFVVNKADECVYYRYGGGEGVILCLYVDDILIFGTSLNVIEEIKDFLSKSFEMKDLRESDIILTMKLLRGDEGGITLVQSHYVDKVLTLTPYDPSVLLRKNRRIARDQLRHYVDKVLTLTPYDPSVLLRKNRRIARDQLRYSQIIGSLMYLASAMRPDISFAASKLSRFVSNPGDDHWQALERVMRYLKGTMSYGIHYTXYPKVLEGYSDSNWISDADEIKATSGYVFTLGGGVVSWKTCKQTILTRSTMEAXLTALDTTTVEADXLRELLMDLLVVEKPVPAILMNCDNQTSKDNMKSSRHIKRRLKSVRKQKNSAVIALDYVQTARNPRWRSLRKQSKNRLESRSAESELDED

SEQ ID NO: 19627 - protein, 1060 aa, Oryza sativa
  Clone ID: TF_OSC8881j.C1.p1.fg
MTCNKCKRKGHIAKYCRTREINRANFSQEKEKSEEMVFSCHTAQEEKDDVWVIDSGCTNHMAADPNLFREMDSSYHAKIHMGNGSIAQSEGKGTVAVQTADGPKFIKDVLLVPDLKQNLLSIGQLLEHGYAVYFEDFSCKILDRKNNRLVAKINMEKNRNFLLRMNHPTQMALRSEIDISDLWHKRMGHLNYRALKLLRTKGMVQGLPFITLKSDPCEGCVFGKQIRASFPHSGAWRASAPLELVHTDIVGKVPTISEGGNWYFITFIDDYTRMIWVYFLKEKSAALEIFKKFKAMVENQSNRKIKVLRSDQGGEYISKEFEKYCENAGIRRQLTAGYSTQQNGVAERKNRTINDMANSMLQDKGMPKSFWAEAVNTAIYILNRSPTKAVPNRTPFEAWYGKKPVIGHMRVFGCICYAQVPAQKRVKFDNKSDRCIFVGYADGIKGYRLYNLEKKKIIIIRDVIFDESATWNWKSPEASSTPLLPTTTITLGQPHMHGTHEVEDHTPSPQPSSPMSSSSASSDSSPSSEEQISTPESAPRRVRSMVELLESTSQQRGSEQHEFCNYSVVEPQSFQEAEKHDNWIKAMEDEIHMIEKNNTWELVDRPRDREVIGVKWVYKTKLNLDGSVQKYKARLVAKGFKQKPGIDYYETYAPVARLETIRTIIALAAQKRWKIYQLDVKSAFLNGYLDEEIYVEQPEGFSVQGGENKVFRLKKALYGLKQAPRVWYSQIDKYFIQKGFAKSISEPTLYVNKTGTDILIVSLYVDDLIYTGNSEKMMQDFKKDMMHTYEMSDLGLLYYFLGMEVHQSDEGIFISQRKYAENILKKFKMDNCKSVTTPLLPNEKQKARDGADKVDPTIYRSLVGSLLYLTATRPDIMFAASLLSRYMSSPSQLNFTAAKRVLRYIKGTADYGIWYKPVKESKLIGYTDSDWAGCLDDMKGTSGYAFSLGSAEAEYVAASKAVSQVVWLRRIMEDLGEKQYQPTTIYCDSKSAIAISENPVSHDRTKHIAIKYHYIREAVDRQEVKLEFCRTDEQLADIFTKALSKEKFVRDRELIGVCKK

SEQ ID NO: 19628 - protein, 1198 aa, Oryza sativa
  Clone ID: TF_OSC900080j.C1.p8.fg
MAQSMVPVFAGENYDIWSIKMRTLLLSQGLWDIVENGYQEYSAGETLTAEQKKSLAEDRMSDAKALFLIQQGVAESLFPRIIGAKKSKEAWDKLKEEFQGSQKMRLYGEDINDQKVVEKILISLPEKYEYIVAAIEESKDMLTLTIQQLMSSLESHEERKLQREGSSIENAFQSKLSFRPQNSRFRGNFQKNEFPMRDRGYFQKNGFSRQKEDGQERREKDMCWKKMTCNKCKRKGHIAKYCRTREINRANFSQEKEKSEEMVFSCHTAQEEKDDVWVIDSGCTNHMAADPNLFREMDSSYHAKIHMGNGSIAQSEGKGTVAVQTADGPKFIKDVLLVPDLKQNLLSIGQLLEHGYAVYFEDFSCKILDRKNNRLVAKINMEKNINFLLRMNHPTQMALRSEIDISDLWHKRMGHLNYRALKLLRTKGMVQGLPFITLKSDPCEGCVFGKQIRASFPHSGAWRASAPLELVHTDIVGKVPTISEGGNWYFITFIDDYTRMIWVYFLKEKSAALEIFKKFKAMVENQSNRKIKVLRSDQGGEYISKEFEKYCENAGIRRQLTAGYSAQQNGVAERKNRTINDMANSMLQDKGMPKSFWAEAVNTAIYILNRSPTKAVPNRTPFEAWYGKKPVIGHMRVFGCICYAQVPAQKRVKFDNKSDRCIFVGYADGIKGYRLYNLEKKKIIISRDVIFDESATWNWKSPEASIVEPQSFQEAEKHDNWIKAMEDEIHMIEKNNTWELVDRPRDREVIGVKWVYKTKLNPDGSVQKYKARLVAKGFKQKPGIDYYETYAPVARLETIRTIIALAAQKRWKIYQLDVKSAFLNGYLDEEIYVEQPEGFSVQGGENKVFRLKKALYGLKQAPRAWYSQIDKYFIQKGFAKSISEPTLYVNKTGTDILIVSLYVDDLIYTGNSEKMMQDFKKDMMHTYEMSDLGLLHYFLGMEVHQSDEGIFISQRKYAKNILKKFKMDNCKSVTTPLLPNEKQKARYGADKADPTIYRSLVGSLLYLTATRPDIMFAASLLSRYMSSPSQLNFTAAKRVLRYIKGTADYGIWYKPVKESKLIGYTDSDWAGCLDDMKSTSSYAFSLGSAEAEYVAASKAVSQVVWLRRIMEDLGEKQYQPTTIYCDSKSAIAISENPVSHDRTKHIAIKYHYIREAVDRQEVKLKFCRTDEQLADIFTKALSKEKFVRDRELIGVCKK

SEQ ID NO: 19629 - protein, 1335 aa, Oryza sativa
  Clone ID: TF_OSC900089j.C1.p25.fg
MAQSMVPVFAGENYDIWSIKMRTLLLSQGLWDIVENGYQEYSAGETLTAEQKKSLAEDRMSDAKALFLIQQGVAESLFPRIIGAKKSKEAWDKLKEEFQGSQKVLAVKLQTLRRQFQNLLMKESEKVKDYFSRVIEIVNQMRLYGEDINDQKVVEKILISLPEKYEYIVAATEESKDLSKDSLESHEERKLQREGSSIENAFQSKLSFRPQNSRFRGNFQKNGFPMRDRGYFQKNGFSRQKEDGQERREKGTSSSNLWCDICQKSSHTTDMCWKKMTCNKCKRKGHIAKYCRTREINRANFSQEKEKSEEMVFSCHTAQEEKDDVWVIDSGCTNHMAADPNLFREMDSSYHAKIHMGNGSIAQSEGKGTVAVQTADGPKFIKDVLLVPDLKQNLLSIGQLLEHGYAVYFEDFSCKILDRKNNRLVAKINMEKNRNFLLRMNHTTQMALRSEVDISDLWHKRMGHLNYRALKLLRTKGMVQGLPFITLKSDPCEGCVFGKQIRASFPHSGAWRASAPLELVHADIVGKVPTISEGGNWYFITFIDDYTRMIWVYFLKEKSAALEIFKKFKAMVENQSNRKIKVLRSDQGREYISKEFEKYCENAGIRRQLTAGYSAQQNGVAERKNRTINDMANSMLQDKGMPKSFWAEAVNTAVYILNRSPTKAVTNRTPFEAWYGKKPVIGHMRVFGCICYAQVPAQKRVKFDNKSDRCIFVGYADGIKGYRLYNLEKKKIIISRDAIFDESATWNWKSPEASSTPLLPTTTITLGQPHMHGTHEVEDHTPSPQPSSPMSSSSASSDSSPSSEEQISTPESAPRRVRSMVELLESTSQQRGSEQHEFCNYSVVEPQSFQEAEKHDNWIKAMEDEIHMIEKNNTWELVDRPRDREVIGVKWVYKTKLNPDGSVQKYKARLVAKGFKQKPGIDYYETYAPVARLETIRTIIALAAQKRWKIYQLDVKSAFLNGYLDEEIYVEQPEGFSVQGGENKVFRLKKALYGLKQAPRAWYSQIDKYFIQKGFAKSISEPTLYVNKTGTDILIVSLYVDDLIYTGNSEKMMQDFKKDMMHTYEMSDLGLLHYFLGMEVHQSDEGIFISQRKYAENILKKFKMDNCKSVTTPLLPNEKQKARDGADKADPTIYRSLVGSLLYLTATRPDIMFAASLLSRYMSSPSQLNFTAAKRVLRYIKGTADYGIWYKPVKESKLIGYTDSDWAGCLDDMKSTSGYAFSLGSAEAEYVAASKAVSQVVWLRRIMEDLGEKQYQPTTIYCDSKSAIAISENPVSHDRTKHIAIKYHYIREAVDRQEVKLEFCRTDEQLADIFTKALSKEKFVRDRELIGVCKK

SEQ ID NO: 19630 - protein, 1515 aa, Oryza sativa
  unsure (1)..(1515): unsure at all Xaa locations
  Clone ID: TF_OSC900147j.C1.p12.np
MVKTRNDPRDSNDTSGSEEQIDGAHTSGASGSSSSPPPENPTVTQMMTMMMQQMQQHYHQMLQQAQQNQQFGPPPSRLSRLLEFLRIQPPTFSSTTNPMEANDWLRAIEKKLNLLQCNDQEKVAFATHQLQGSASAWWDNYVVTRPATMEVTWAEFCQSFRKAQILEGIMAQRKREFRALXQGTRTVTEYLHEFNRLARYAPEDVRTDAEKQEKFLFGLDDELTNQLISGVYEDFEKLVDKAICLEEQRNKMDCKRKAAQIRTPQGNNQKPRFMMGQLGGPSTLIVRQHHPYNPGNFNNDYNGGSHNNSEQHHHNLTPPPLMAPAESELPAMSAQLEQLKKESAGKPRPYFNCGKLGHFAGKCPKRKRAGPRFVQARVNHASAEEAQAAPEVVLGTFLVNLFLATILFDSGASHSFISKRFAGTHGLSVVELKIPMRVHTPGNDMNTAHYCPATIEIKRSQFQSNLILLESKDLDVILGMDWLTRHKGVIDCASRTITLTNDKGEKITFRSPVPQKSVASLNQAAIEDQTEIAEKSPQKLEDIPIVQEYPEVFPEDLTTMPPKREIEFRIDLAPGTAPIYKRPYRMAANELAEVKKQVDEQLQKGYIRPSTSPWGAPVIFVEKKDKTKRMCVDYRALNEVTIKNKYPLPRIDDLFDQLKGAKVFSKIDLRSGYHQLRIQEEDIPKTAFTTRYGLFECTVMSFGLTNAPVFFMNLMNKVFMEFLDKFVVVFIDDILIYSKSEEEHEQHLRLVLEKLKEHQLYTKFSKCDFWLSEVKFLGHVITTQGVAVDPSNVESVTKWTPPKTVSQIRSFFGLAGYYRRFIENFSKIARPMTQLLKKDEKFKWSAECNQSFEELKKKLVSAPVLILPDQTKDFQVYYDASRQGLGCLLLXEGRVVAYASRQLRPHETNYPTHDLELAPVVHALKIWRHYLIGNRCEVYTDHKSLKYIFTQSDLNLRQRRWLELIKDYDMGIHYHPGKANVVADALSRKSYCNAVCTEGMCDKLQQDLEHINLGIVEHGFAAALEARPTLVDQVRAAQVNDPEIAELKKNMRFGKARDFHEDEHDTIWLGERLCVPDDKELKDLILTEAHQTQYSIHPGSTKMYQDLKEKFWWASMRREIAEFVALCDICQRVKAEHQRPVGLLQPLQIPEWIWEEIGMDFITGLPRTSSGHDSIWVVVDRLTKVAHFIPVNTTYTGKSLAELYLARIMCLHGVPKKIVSDRGSQFTSKFWQKLQEELGTRLNFSTAYHPQTDGQTERVNQILDDMLRACALDFGGAWDKSLPYAEFSYNNSYQASLQMTPFEALYGRKCRTLLFWDQTGERQLFGTEVLTEAEEKVRTVRERLRITQSRQKSYADNRRRELSFEAGDYVYLHVTPLRGVHRFQTKGKLAPRFVGPYRILERRGEVTYQLKLPSNMAGIHDVFHVSQLKKCLRVPEEQADSEHIDIQEDLTYVVKPIGILETSERRTRNKVIRFCKVQRSHHSEEEATXEREDELKAAHPHLFASSFESRGRDSV

SEQ ID NO: 19631 - protein, 1364 aa, Oryza sativa
  unsure (1)..(1364): unsure at all Xaa locations
  Clone ID: TF_OSC900329j.C1.p22.np
TWAEFCQSFRKAQILEGIMAQRKREFRALXQGTRTVTEYLHEFNRLARYAPEDVRTDAEKQEKFLFGLDDELTNQLISGVYEDFEKLVDKAICLEEQRNKMDCKRKAAQIRTPQGNNQKPRFMMGQLGGPSTLIVRQHHPYNPGNFNNDYNGGSHNNSEQHHHNLTPPPLMAPAESELPAMSAQLEQLKKESAGKPRPYFNCGKLGHFAGKCPKRKRAGPRFVQARVNHASAEEAQAAPEVVLGTFLVNLFLATILFDSGASHSFISKRFAGTHGLSVVELKIPMRVHTPGNDMNTAHYCPATIEIKRSQFQSNLILLESKDLDVILGMDWLTRHKGVIDCASRTITLTNDKGEKITFRSPVPQKSVASLNQAAIEDQTEIAEKSPQKLEDIPIVQEYPEVFPEDLTTMPPKREIEFRIDLAPGTAPIYKRPYRMAANELAEVKKQVDEQLQKGYIRPSTSPWGAPVIFVEKKDKTKRMCVDYRALNEVTIKNKYPLPRIDDLFDQLKGAKVFSKIDLRSGYHQLRIQEEDIPKTAFTTRYGLFECTVMSFGLTNAPVFFMNLMNKVFMEFLDKFVVVFIDDILIYSKSEEEHEQHLRLVLEKLKEHQLYTKFSKCDFWLSEVKFLGHVITTQGVAVDPSNVESVTKWTPPKTVSQIRSFFGLAGYYRRFIENFSKIARPMTQLLKKDEKFKWSAECNQSFEELKKKLVSAPVLILPDQTKDFQVYYDASRQGLGCLLLXEGRVVAYASRQLRPHETNYPTHDLELAPVVHALKIWRHYLIGNRCEVYTDHKSLKYIFTQSDLNLRQRRWLELIKDYDMGIHYHPGKANVVADALSRKSYCNAVCTEGMCDKLQQDLEHINLGIVEHGFAAALEARPTLVDQVRAAQVNDPEIAELKKNMRFGKARDFHEDEHDTIWLGERLCVPDDKELKDLILTEAHQTQYSIHPGSTKMYQDLKEKFWWASMRREIAEFVALCDICQRVKAEHQRPVGLLQPLQIPEWIWEEIGMDFITGLPRTSSGHDSIWVVVDRLTKVAHFIPVNTTYTGKSLAELYLARIMCLHGVPKKIVSDRGSQFTSKFWQKLQEELGTRLNFSTAYHPQTDGQTERVNQILDDMLRACALDFGGAWDKSLPYAEFSYNNSYQASLQMTPFEALYGRKCRTLLFWDQTGERQLFGTEVLTEAEEKVRTVRERLRITQSRQKSYADNRRRELSFEAGDYVYLHVTPLRGVHRFQTKGKLAPRFVGPYRILERRGEVTYQLKLPSNMAGIHDVFHVSQLKKCLRVPEEQADSEHIDIQEDLTYVVKPIGILETSERRTRNKVIRFCKVQRSHHSEEEATXEREDELKAAHPHLFASSFESRGRDSV

SEQ ID NO: 19632 - protein, 1450 aa, Oryza sativa
  Clone ID: TF_OSC900402j.C1.p15.fg
MAGMSAFRVYFSEGEIMENESGVNLSNFRQCTLYHPNPDTLTMPEVWYWLTCTFSLDPGIYSVNVRVMWSRSANNIRWELKNVTRSKAWQDWLAGCRRRGYEYVMLVQACQGRVPTESAAGQSSNREELGSSSHEEDEVVAPHHGGDVGPDIQNLSIQGDEVVNRHPTGEADEGEDIPAIVEEIERVDRHAIEDEENLAAEENDDEDEQEVEEVPMPASWNLEDPGYIAENSCHDSIWFYGDGQINLGAMFRDKTGLQDAVKSWSFKTQRQFRVVKSNKTEYTVVFRLHGHVPKYESYWILSKLQEHSCLIRNTRESHRNLTAAYVANKYYKEIIEGDDLPVRHIIKLVEKGEQYTISYHKAWRAKQKAMEKRYGTFEEAYDTLSQMLNILKIRNPRTYVAVQDRESIRPPNYLVMQRAFFAFGACILAFQCSRPVLCVDGTFLTGKYRGQILTAVGADANNQIIPVAFAFVESENYESWLWFLQHLKWGVVQKRTSICIIHDRNAGLLKAIKELQEDGDGAYYWPDMHSRWCMRHMGANFFKQFNNRRLMNMFKRLCKANQSTKFDELWKQLDEVTRTHIRSKQTNINLLDVHVPQALEPMDDLIPSNGKKRRSSKNIKCFTHWIECEPNDKWALLHDTNGARHGIMTTNLAEAYNVVLSKLRPLPLTAIVEGIMHRTTMWMRTRRAAALQQMSNAQTPFCKKMAEYLQEKANKARFHTVITTGNVRRRWEVTCRTKGDFGSSTGVITHEVTLGHESDNTCSCSCNKPKLLHKPCSHVLAACAKIKLDSTSYVSTFYLKDRVLNAWSAEILGWRSLQHLVETGGDNRIYVPDLDLLKAGKGRRQTRRLRNDMDASEAGGPVRRCENCLQYGHRTRDCKNNKEGLLTFVQMTQARMHYDAREPKQKQMGAHRKRRQNIDKSLLMALVDRWRPETHTFHLPCGEMTITLQDVSMLMGLPLAGQAIVLPDPPKDWRDDIVSRYACILPWYATGDTDDDEDKIFFSEKETHGPTLKWLSQFEVRYMPDDVQEYQLTLYLEAYLLWLFGWVMFTGSHGNTVDAKLIPLAHQIAEDRAKRFSFGRPYMSVAVAHKDDYTNAIDDRPTFGTRWCYGPPQWARIQVHNVYEYFTEAFESLRENEVRWTPYTNEEAILRAPHGGYNVQRVMRQMGLYQQVPVPVGLHLPPDVHTQKRQADNRRPGHTTTTLTNNTWPGELVRDAKTLWEKLRDGMAGTNQEVMAAVDSLRRKGKRIMRLASCRHSSDVYNPATSTRTFEPMPECPSTSSRPSTSVRPSASARRSSDGRAGVRSTSFRDPPTIPTIPEITEISERLGGFGSTQEGTRMVRPVPHMPPARPQMIPQMALDVPTSHWQGGFAPFAGPTQSVPLHAPTYGTNPWQGQSIDYGGSFRPEIMSGFSPYTTSYDDMSSFGGGSSSVPNELRTSQTNDAPHVTQPT

SEQ ID NO: 19633 - protein, 476 aa, Oryza sativa
  Clone ID: TF_OSC400683j.C1.p15.fg
MSWHRAGVLLLGAQSCLPVPEVPAVDGAGSVLLFMARMGWELCDVFRPYAVVMDNTGNKGYVNDGSDDSRTQANGNEKSINETSPELIQIVVNQTNMLATAFQLLQNWNNPAGATNVQVPTVQQQCKLSEFLKTKPPTFAIAVDPMEASDWLRTVEKKLGLIQCTDQERVVFATHQLVGPASEWWDSYEASRPEGHTITWDEFSAVLKRSHVPAGMITLRKREFRYLKQEDLTVTEYLHEFHRLAHYGLKDEIAVQLLLEEYEDFEKLVDKTIQLESEHNRMKNCKRRIVSIPTFPCGNQRQRTEPLQITGSSIAHQEFLPQEDGHNADNNISNTNDDDTTNNHASCPISDHSNQACNVNIIHQGVDDSINDGTQNDNPRNCDSNYGTTDANVSKDFQPPIPTPSQNDRPQTDSSIKKTLICYNCKEPGHDLRDCLQPRQSRPPHYRQFTRSRHPNRIVVTGANAIPVRPRVNHNP

SEQ ID NO: 19634 - protein, 1113 aa, Oryza sativa
  Clone ID: TF_OSC401051j.C1.p8.fg
MSTTGDNNNTGDKEKEPLVNTNGGNTASNSSRGPFSGYNVSLLPFVLRFLQLSVAVLLRSLIYVDAYSILSMLMLYTSSTVTRSTQITNVMWKARALLWLTVMQCFFVSRGKPSEPPLSPEEEAKFEVADCLFRGALISVLADSIVDVYMHMPSRKDMWDALQAKFRVSDAGSELYVMEQFYDYNMVDDRSVVEQFVAGGIIAKLPPSWSDFATSLKHKRQEFSVTDLIGSLGVEEKARAKDNRGKKKNDGGSSANLVQKKNPHASHNNKKKVKPDVKPKATTNFKKKGQGKAKVDFFVCGKPGHWAKDCLDRKDKKSANMIISEGGGTSGRGSSLLMGNGSLAAVHDVGTVDLKFTSGKIVQLKNMQHVLSIKKNLVSGSLLCKGGFRLVFESNKCVVSKYGTFIGKGYDCGGLFRFSMDDMCNKVVNHVSDDDDESNVWHSRHCHVNFGCMTRLANMSLIPKFTLVKGSKCHTCVQSKQPRKPHRASEVRNLAPLELVHSDLCEMNGVLTKGGKKYFMRVIDNCTRFCYMYLLKTKDEALHYFKIDKAEVENHLERKIKRLRSDRGGEYFSNEFNSFCEEYEIIHERTPPYSPQSNGVAERKNRTLTEMVNAMLDTAGFSKEWWGEAILTVCHVLNRIPTKHKEVTPFKEWERKKLNLSHLHTWGCLVKVNVPIAKKCKLGQKTVDCVFLGYAIHSVGYRFLIVNSRVPNMRVGTITESRDATFFENEFPMKNALSTSSQEPILSPEHFVPIEHIDQMLEENPEEDNIVATRKSKRQRTAKSFGDDYIVYLVDDTPRTIEEAYSSLDADYWKEAVCSEMDSIMSNGTWEVAERPYGCKPVGCKWVFKKKLRSDGTIEKYKARLVAKGYTQKEGDDFFDTYSPVARLTTIRVLLALAASYGLLVHQMDVKDSFPQWRVGGRDLYGSTRWLKQWHEKFDNTLTSAGFIVNEADKCVYYRYGGGEGVILCLYVDDILIFGTSLNVIGEVKDFLSKSFEMKDLEVADVILNIKLLRGDEGRITLVQSHYMDKVLSRFGYSDCKAAPTPYHPSVLLRKNQRIGKDQLRYSQIIGSLMYLASATRPDISFVVSKLSRFISNPGDDHWHALERVMRAI

SEQ ID NO: 19635 - protein, 515 aa, Oryza sativa
  unsure (1)..(515): unsure at all Xaa locations
  Clone ID: TF_OSC413055j.C1.p5.np
LSTVLGQELELLLRRILGAMSWLKEQGCKWRFHASTIITLLYVQVKVNRPAHSCCSINKTGAAMATNSWVAERVIDWLKEIPTLGASALKVKLEKKYKFTIGYDKVFRGKEKALEKIFGKWEDSFALLPTFREELLKAQPGSIVDIDTEIHEDQVCFRRLFIALKPCIDGFLQGCRPYIAMDSTHLTGKHRGQLAAAVAIDGNNWLFPVAFGVIEAKTTERWTWFVQNLKNAIGNPPGLAISTDAGKGLERAVSDVYPTAEHRECMRHLWKNFKKQYHGPLFGENMWHAAKCYTSQQYNYHMNKIAEKSPEAIAYLKTNHPFFWSRSKFSELSKVDYINNNLSESFNNWVMKIKELHIVDLFDTLRQMIIDKFHLQLASKMEGRIIPSIIKTLNEQSKNLKDYNVVRSNCDDLAEVSMVSNKGVVWRHAVNLKAHTCFKLMRPKLRRKPGRPRTHRIKASDEPGCRKKRTCPECGDKGHFAKTCKQSRAAXSRGQVPAIFAKQGNGGLHPFVSDY

SEQ ID NO: 19636 - protein, 1174 aa, Oryza sativa
  Clone ID: TF_OSC409246j.C1.p6.fg
MVKTRNDPRDSNDASGSEEQIDGAHTSGASSNIPSPLPENPTVTQMMTMMMQQMQQHYHQMLQQAQQNQQFGPPPSHLSKLLDFLRIKPPTFSSTTNPMEANDWLRAIEKKLNLLQCNDQEKVAFATHQLQGPASTWWDNYVVTRPDATEVTWAEFCQSFRKAQIPEGIMAQRKREFRALQQGTMSVTEYLHEFNRLARYAPEDVRTDAEKQEKFLFGLDDELTNQLISGVYEDFEKLVDKAICQEEQHNKMDRKRKATQFRAPQGNNQKPRFMTGQQAQLDLPAVLAQSEQLKKESAGKPGPCFSCGKHGHFAGKCPKLKRAGPRFIQARVNHASAEEAQAAPEVVLGTFPVNSYLATVLFDSGASHSFISKRFAGTHGLSVVELKIPMRVHTPGNNMKTAHYCPSVTIEIKRSQFLSNLILLESKDLDVILGMDWLTRHKGVIDCASRTITLTNDKGEKITFRSPVSQKSVVSLNQAAIEDQTEIVKKSLKELEDIPKVQEYPKVFPEDLTTMPPKREIEFRIDLAPGTAPIYKRPYRMATNELAEVKKQVDEQLQKGYIRPSTSPWGAPVIFVEKKDKTKRMCVDYRALNEVTIKNKYPLPRIDDLFDQLKGAKVFSKIDLRSSYHQLRIQEEDLPKTAFTTRYGLFECTVMSFGLTNAPAFFMNLMNKVFMEFLDKFVVVFIDDILIYSKSEEQHEQHLCLVLEKLKEHQLYAKFSKCDFWLSEVKFLGHVITAQGVAVDPSNVESVTKWTPPKTISQIRSFLGLAGYYRQFIENFSKIARPMTQLLKKDEKFKWSAECNQSFEELKKKLVSAPVLILPDQMKDFQVYCDASRQGLGCVLMQEGRVVAYASRQLRPHETNYPTHDLELAAVVHALKIWRHYLIGNRCEVYTDHKSLKYIFTQPDLNLRQRRWLELIKDYDMGIHYHPGKANVVADALSRKSYCNLVCTEGICDKLQQDLEHLNLGIVEHGYVATLESRPTLVDQVRAAQEKVRTVRERLRIAQSRQKSYADNCRRELTFEAGDYVYLRVTPLRGVHRFQTKGKLAPRFVGPYRILERRGEVAYQLELLSNMAGIHDVFHVSQLKKCLRVPEEQASSKHIDIQEDLTYVEKPICILETSERRTRNKVIRFCKVQWSHHSDEEATWEREDELKAAHPHLFAGSSESRGRDSV

SEQ ID NO: 19637 - protein, 668 aa, Oryza sativa
  unsure (1)..(668): unsure at all Xaa locations
  Clone ID: TF_OSC414373j.C1.p37.np
SSVSCLLQREQHREGERQGAAVSVADGRNASSEDDATIMHLARMVEAYDTGRINFHHMVRRGLVEDNMKILELRXENLQLKDLDAVEAQLCQLKIAQGEICRPKRRRVCRSQKITARKSTSRPELVRQFLAWTCFVETPCVEPAPLVPXEEGASGVGSTEDVLLLTFRPGPSQKRSAATGEGSHPEGSNHNNHGSPPPPPPPPPPPPPDTNPILTQILAQQANMMAAFLHHIQTPPQHNAPPPPPPPPQHSKLAEFLHIRPPTFSSSNNPVDALDWLHAVGKKLDTVQCNDEEKVIFATHQLQGPASLWWDHFQAMQPEGQPITWARFTAAFQRTHVPAGVMALKKREFRELKQGNRSVMEYLHEFNNLAWYALEDVREDEEKQEKFLVGMDPELSVRLVSGDYPDFQLVVDKSIRLEAKHKELESHKRRLANFRNQQGANQRIRYTNPYPGGSSSQQQQQQPRPVPXPQFVVRVPQPQQQQNQQGNRAPRPPAPAVQPSHGRRDVQGQPRLCFNCLEPGHFADKFPKPRRXEGQAPPRPNNGGKDATRGRVNHVTAEDVQTTPDVIIGTFFIHSIPATILFDSGASHSFISVQFVGRNQLGLERLRNSLLITTPGGAMTAKYYSPAVPIEIQGIPFPSDLILIDTKDLDVILGMNLTQFRGVVDXAR

SEQ ID NO: 19638 - protein, 361 aa, Oryza sativa
  Clone ID: TF_OSC423123j.C1.p13.fg
MAPTGMKFDLVKFDGSGNFGLWQTRVKDLLAQQGASKALKGVKPAKMEDDDWEEMQLQVAATIRLCLSDQKLYGLKMQEGVDLTAHVNVFNQLVTDLVKMDVEVDDEDKAIVLLCSLPESYEHVMRKNKEGETSQAEGLLVKEDHAGHKVKKNKKKKVVQCFRCDEWGHISKKCPILKGKAKANAATSSNDSDSDGCDLLKMSSAQSKDAEAWILDSASSFHVTPRKEWFFSYKSSEFGFVYLGDDTSYPAVGVGEVKIKLEDGGEHVLQGVRHVPGLKRNLISLGTLHEEGLIFRGNRNKKTMEIMKGKTTVMTGEKVESQLYKLRGCTIAGGVQEEAVAGIAIAFGGGGSGADSSGGLR

SEQ ID NO: 19639 - protein, 1691 aa, Oryza sativa
  Clone ID: TF_OSC18587j.C1.p4.fg
MADYTTRGHEIKLDETQTIVATSSSISADNKAKQKQCHNLFLARFMVKHRSCRVIFDSGGSCNNLVSSDLVENLGLPIKPHPHRYYIQLFNSFHKNEGNDNGARFTQDKFNRFNDKVKPKTVSNQEGEDDEDTTSSDMTMPILCINQQKELAFSMAGSINRRGLDLTGFVLELRGMCVVLGYPHGVDYQGKQLPEQEGDDAEPHATWEVTAVILTGSPERTSLAVTNAALLAIGTLHQRYLDELQHSPYRYHPRRGGARDYATFRDASSEDDATIMHLARMVEAYDAARIDFHHMVRRGLVENNMKILELRQENLQLKKDLDAVEAQLCQLKIAQGEVCRPKRRRVCRSLKITARKSTSRPELVRQSLAWTCFVETPRAEPAPVVPQEEGASGVGSTEDALLLTFRPGPSQKVVWGMVIPMVTTRRSATTGDGNQPEGSNHNNHGSPPPPPPPPPPPPPDTNSILTQILAQQANMMAAFLHHIQNPPQHNAPPPPPPPQHSKLAEFLRIRPPTFSSSNNPVDALDWLHAVGKKLDTVQCNDEEKVIFAAHQLQGPASLWRDHFQATQPEGQPITWARFTAAFRRTHVPAGVMALKKREFQELKQGNRSVMEYLHEFNNLARYAPEDVREDEEKQEKFLAGMDPELSVRLVSGDYPDFQRLVDKSIRLEAKHKKLESHKHRLANFCNQQGANQRVRYTNPYPGGSSSQQQQQQQPHSAPRAQFVVRVPQLQQQQSQQGTRAPRPPTPAVQPGQGRRDVQGQQRLCFNCFKPRHFADKCPKPRRQQGQAPPRPNNGGKDVIRGRVNHVTAEDVLTTPDVIVGTFLIHSIPATILFDSGASHSFISVPFVGRNQLGVERLRNPLLITTPGGVMTAKHEELGCDPWDELVGSIPRSSGLRKRTVTLYRGPEQPVVFFAPPTSVGSSELHQIGLSETPIVSEFGDVFPEELPGMPPKREIEFRIDLAPGTTPLYKQPYRMAANELAEVKKQLEELKEKGYIRPSTSPWGAPVIFVEKKDKTKRMCVDYRALNEVTIKNKYPLPRTDDLFDQLKGATVFSKIDLRSGYHQLRIREEDIPKTAFTTRYGLYEFTVMSFGLTNAPAFFMNLMNKVFMEYLDKFVVVFIDDILVYSQSEEDHQQHLRRVLGKLREHQLYAKLSKCEFWLSEVKFLGHVISAKGVAVDPKTVTAVTDWKQPKTVTQIHSFLGLAGYYRKFIENFSKIARPMTQLLKKEEKFVWSPQCEKAFQTLKEKLVSSPVLILPDTRKDFLVYCDASRQGLGCVLMQEGHVVAYASRQLRPHEGNYPTHDLELAAVRRWLELIKDYDVGIYYHPGKANVVADALSRKSRCNTLGVHDIPPELNQQMEALNLSIVSRGSLAMLEAKPTLLDQIREAQKNDPDMHGILKNMKQEFVALCDVCQRVKAEHQRPAGLLQPLQVPEWKWDEIGMDFITGLPKTQGGYDSIWVVMDRLTKVARFIPVKTTYGGNKLAELYFARIVSLHGVPKKIVSDRGSQFTSHFWKKLQEELGTRLNFSTAYHLQTDGQTERLNQILEDMLRACVLDFGKTWDKSLPYAEFSYNNSYQASLQMAPYEALYGRKCRTPLLWDQVGESQVFRTDILREAEAKVRTIRENLKVAQSRQKSYADNRCRDLEFAVDDFVYLRVMPLRGVHRFQTKGKLAPRFMGPFRIIAQRGEVAY

SEQ ID NO: 19640 - protein, 546 aa, Oryza sativa
  unsure (1)..(546): unsure at all Xaa locations
  Clone ID: TF_OSC401453j.C1.p7.np
MAKKTLCEFAAPSADNVPVGPVNIGDTDFDLKSSLITMAQASPFFGKPNEDASVHLQQFLEICTTYTVKGVSLDAERLCLFPFSLLGKAKQWFYVNRMIVNTRDRCSTAFLSKFFPMEAWEEAWECLQEYVAACPNHGMDDWLILQSFYNRLTPSSMDHQDAATGVAFFSKIVRAAIDIIEKMVSNMGWSEERLQTSHRGMHTVKETEMLAAKLDVLMKRRDDQEKSKPQDTVKALDSHITCEVCGNTGHSGNDCPETHEEAMFMGNNGYRQQGGQGWNQLRPFYQGGNNSNNNGNFDQPSLKDLVFTQAKTTVAVKKLSINDKVAALVPTVAALVPTKETGRILRQPITTRGRKSTRDPPYPNTAGTRQAGEGGIAEPKEDEEAQLDKIPPQEYYDSTLLPFPPCQKKPSVDXQFARFMDVIQKIHINILLVDAMRVPIYARYLKDILNNKRPLPTMEMVKLTEECSNAILHXLPEKKKNPGCPTISCSIGTLHFNQALCDLGASVSVMRKDVFDKLNYTILIPTPMRLQLADFSICYQAILGGD

SEQ ID NO: 19641 - protein, 1804 aa, Oryza sativa
  Clone ID: TF_OSC407182j.C1.p1.fg
MDEVGGRWTFSRANEGYTSCGPMAGSVTRRGLGMTGFVLELRGMCVVLGYPHGVDYQARPLPEQEGEDAEPHAGWEVTAVILSGSPERTSLAVTAGGDSFPAACQNAALLAIGTLHQRYPDELQHSPYRYHPRRGGARDYATFRDASSEDDATVVHLARMVEAYDAARIDFHQMVRRGMVENNMKILELRQENLQLKKDLDALEAQLHQLKIAQGEDSRPKRRRVCRSQKITARKSTSRPELVRQSLAWTCFVETPRAEPAPVVPQEGEASGVGSSEGALLLTFRPGPSQRSPSLFAGSVWGFQMVTTRRNVNTGEGNQPEGSNPNPQGNPPPPPPPDTNAILTQILAQQANMMNAFLHHLQNPPQQNAPPPPPQHSKLAEFLRIRPPTFSSSNNPVDALDWLHAVGKKLDTVQCSDEEKVIFAAHQLQGPASLWWDHFQATQPEGQPITWARFTAAFRRTHVPAGVVALKKREFRELKQGNRSVMEYLHEFNNLARYAPEDVREDEEKQEKFLAGMDPELSVRLVSGDYPDFQRLVDKSIRLEAKHKELESHKRRLANFRNQQGANQRVRYTNPYPGGSSSQQQQQQQPPRPAPRPQFVVRVPQPQQQQNQQGTRAPRPPTPAVQPVQGRRDASGPQRLCFNCFEPGHFTDKCPKPRRQQGQAPPRSNNGGKDVIRGRVNHVTAEDVLTTPDVIVGTFLVHSIPATILFDSGASHSFISVPFVGRNQLGVERLRNPLLITTPGGVMTAKYYSPAVPIEIQGIPFPSDLILLDTKNLDVILGMNWLAQFQGVVDCARRTVTLYRGPEQPVVFFAPPTSVRSSELHQIGLSEIPIVREFGDVFPEELPGMPPKREIEFRIDLAPGTTPLYKRPYRMAANELAEVKKQLEELKEKGYIRPSTSPWGAPVIFVEKKDKTKRMCVDYRALNEVTIKNKYPLPRIDDLFDQLKGATVFSKVDLRSGYHQLRIREEDIPKTAFTTRYGLYEFTVMSFGLTNAPAFFMNLMNKVFMEYLDKFVVVFIDDILIYSQSEEDHQHHLRLVLGKLREHQLYAKLSKCEFWLSEVKFLGHVISAKGVAVDPETVTAVTDWKQPKTVTQVRSFLGLAGYYRRFIENFSKIARPMTQLLKKEEKFVWSPQCEKAFQTLKEKLVSSPVLILPDTRKDFMVYCDASRQGLGCVLMQDGHVVAYASRQLRPHEGNYPTHDLELAAVVHALKIWRHYLIGNRCEIYTDHKSLKYIFTQSDLNLRQSRWLELIKDYDVGIHYHPGKANVVADALSRKSHCNTLNVRGIPPELNQQMEALNLNIVGRGFLAALEAKPTLLDQIREAQKNDPDMHGLLKNMKQGKAAGFTEDEHGTLWNGKRVCVPDNRELKQLILQEAHESPYSIHPGSTKMYLDLKEKYWWVSMKREIAEFVALCDVCQRVKAEHQRPAGLLQPLQVPEWKWDEIGMDFITGLPKTQGGYDSIWVIVDRLTKVARFIPVKTTYGGNKLAELYIARIVSLHGIPKKIVSDRGSQFTSHFWKKLQEELGTRLNFSTAYHPQTDGQTERLNQILEDMLRACVLDFGKTWDKSLPYAEFSYNNSYQASIQMAPYEALYGRKCRTPLLWDQVGESQVFGTDILREAEAKVRIIRDNLKVAQSRQKSYADNRRRDLEFAVDDFVYLRVTPLRGVHRFQKKGKLAPRYVGPFRIIARRGEVAYQLELPASWGNVHDVFHVSQLKKCLRVPSEQANSEQIEVREDLTYVEKPVKILDTMERRTRNRVIRFCKVQWSNHAEEEATWEREDELKAAHPDLFASSSESRGRDSV

SEQ ID NO: 19642 - protein, 1516 aa, Oryza sativa
  unsure (1)..(1516): unsure at all Xaa locations
  Clone ID: TF_OSC900010j.C1.p10.np
NEVGARWTSRTNECYTSRGPVVEMSWHRAGVLLLGAQPWLPVSGILAVARVGSMYTSDQSIYSNSCALGYGQAXQCTQMADNLNRRGLDLTGFALELWGMCVVLGYSHGVDYQGKKLPEQDDDDAEPGAAWEVTTVILTGSPERTSLAVTAGGDSFPAACQNAALLATGTLHQRYPDGELQHSPYRYHPRRGGARDYAAFRDASSEDDATIMHLALMVEAYDTAHIDFHHMVRRGLVEKNMKVLELRQENLXLKKDLDAVEAQLCXLKIAQGQVCHPKRRRVCRSQKITARKSTSRPELVRXSLAWTCFVETPCAEPAPLVPQEEGASGVGHRGCAVAHLLPRPVVEVDEQLVGPRMVTTRKSAATGEGSHPEGSNHNNHGSPPPSPPPPPPPPPPPYTNPILTQILAQQANMMAAFLHHIQNPPQPNAPPPPPPPQHSKLAEFHRIRPPTFSSSNNPVDALDWLHAVGKKLDTVQCNVEEKVIFATHQLQGPASLWWDHFQATXPEGQPITWARFTAAFRRTHVPAGVMALKKREFQELKQGNRSVMEYLHEFNNLARYAPEDVHEDEEKQKKFLAGMDLELSVRLVSGDYPDFQRLVDKSIRLEAKHKELESHKRRLANFRNQXGANQRIRYTNPYPGGSSSQQQQQQQPRPAPXPQFVVRVPQPQQQQNQQGNRAPRSPAPAVQPSQGRRDVQGQPRLCFNCFEPGHFTDKCPKPRRQQGQAPPHPNNGGKDATRGRVNHVTTEDVLTTPDVIIGTFFIHSIPATILFDSGASHSFISVQFKGRNQLGVAKLRSSLLFTTPRGAMAKYYSPAVPIENXGIPFPSNLILLDTKDLDVILGMNWLTXFXGVVDCARRTVTMYRKPDLRVVFFAHPTPTGSILRQLGLSEILVANEFGDVFPEELPGMPKREIEFRIDLALGTTPMYKRPYRMAANELAEVKKQLEELKEKGYIRPSTSPWGAPVIFVEKKDMTNRMCVDYRALNEVTIKNKYPLPRIDDLFDQLKGATVFSKIDLRFGYHQLRIREEDIPKTAFTTRYGLYEFTVMSFGLTNAPAFFMNLMNKVFMEYLDKFVVVFIDDILVYSQSEEEHQQHLRLVLGKLREHQLYGKLSKCEFWLSEVKFLGHVISAKGVAVDLEIVTAVIGXQQPKTVTQVRSFLGLAGYYRRFIENLSKIARPMTQLLKKEQKFVWSPXCERAFQTLKEKLVSSPVLILLDTRKDFLVYCDASRQGLGCVLMQEGHVVAYASRQRXPYEGNYPIHDLELAAVVHALKIWRHYLIGNRYEIYTNHKSLEYIFTQSDLNLRKRRWLELIKDYDVGIHYHPDKANVVADALSRKGHCSTLCVRGIPPELNQQLENLSVVSHGFLAALEAKPTLLDQIREAQKNDPDMHGILKNMKQGKAAGFTEDEHGTLWNRNRVCVPGDKELKXLILXEAHESPYSIHPSSTKMYLDLKEKYWWVSMKREIAEFVALCDVCQRVKAEQQRPAGHLQPLKVPEWKWDEVSLDILFGTPFXTLC

SEQ ID NO: 19643 - protein, 2187 aa, Oryza sativa
  Clone ID: TF_OSC900197j.C1.p21.gm
MGNNRSKLTDFLSSRPPEFSQTVEPVEADDWLKDVDRKLNLVQCTPVEKTLYASHQLRGPAADWWENYCNAHPEPTNIAWDEFATAFRAAHVPESTIDMKKEEFNRLKQGNNSVNEYLSLFNKLARYAPEEVDTDKKKIRKEILPEAHLALAMEKKGTDFSIDDQGTVWCGPRICVPAKKELRDLILKEAHESAYSIHPGSTKMYQDIKAYFWWARMKRDVAEYVALCDICQRVKAEHQRPAGLLQPLPIPEWKWEEIGIDFITGLPRTPSGRRRVRALAPPPPRIAPHPAVPARIKERGITPRDSLSRFPRFPLSLSLGFVRIRPAKFAGVFNGARDLRARFPLSPAALSFPRRYKIVARAPLFRFRRSPLALAVDFVPAPCSALSAIAAELRSAAAAAPDFLLTRRHPRPLRRVAADPVRRSASPVDRRSTVVIVIPNRAAVFLRSVRRFHRLRRLGVSRGPLRSFPPFLLSLGCHSAAPLVAGGDHRGAGARRSRRPRRRGRPRARPRGCQVGPAVSRPRPRVRLTRGTHGADRRQPRAPGPPWTERLTHGPHFPWTRANEGYTSCGPMAGSVTRRGLGMTGFVLELRGMCVVLGYPHGVDYQARPLPEQEGEDAEPHAGWEVTAVILSGSPERTSLAVTAGGDSFPAACQNAALLAIGTLHQRYPDELQHSPYRYHPRRGGARDYATFRDASSEDDATVVHLARMVEAYDAARIDFHQMVRRGMVENNMKILELRQENLQLKKDLDALEAQLHQLKIAQGEDSRPKRRRVCRSQKITARKSTSRPELVRQSLAWTCFVETPRAEPAPVVPQEGEASGVGSSEGALLLTFRPGPSQRSPSLFAGSVWGFQMVTTRRNVNTGEGNQPEGSNPNPQGNPPPPPPPDTNAILTQILAQQANMMNAFLHHLQNPPQQNAPPPPPQHSKLAEFLRIRPPTFSSSNNPVDALDWLHAVGKKLDTVQCSDEEKVIFAAHQLQGPASLWWDHFQATQPEGQPITWARFTAAFRRTHVPAGVVALKKREFRELKQGNRSVMEYLHEFNNLARYAPEDVREDEEKQEKFLAGMDPELSVRLVSGDYPDFQRLVDKSIRLEAKHKELESHKRRLANFRNQQGANQRVRYTNPYPGGSSSQQQQQQQPPRPAPRPQFVVRVPQPQQQQNQQGTRAPRPPTPAVQPVQGRRDASGPQRLCFNCFEPGHFTDKCPKPRRQQGQAPPRSNNGGKDVIRGRVNHVTAEDVLTTPDVIVEIPIVREFGDVFPEELPGMPPKREIEFRIDLAPGTTPLYKRPYRMAANELAEVKKQLEELKEKGYIRPSTSPWGAPVIFVEKKDKTKRMCVDYRALNEVTIKNKYPLPRIDDLFDQLKGATVFSKVDLRSGYHQLRIREEDIPKTAFTTRYGLYEFTVMSFGLTNAPAFFMNLMNKVFMEYLDKFVVVFIDDILIYSQSEEDHQHHLRLVLGKLREHQLYAKLSKCEFWLSEVKFLGHVISAKGVAVDPETVTAVTDWKQPKTVTQVRSFLGLAGYYRRFIENFSKIARPMTQLLKKEEKFVWSPQCEKAFQTLKEKLDGHVVAYASRQLRPHEGNYPTHDLELAAVVHALKIWRHYLIGNRCEIYTDHKSLKYIFTQSDLNLRQSRWLELIKDYDVGIHYHPGKANVVADALSRKSHCNTLNVRGIPPELNQQMEALNLNIVGRGFLAALEAKPTLLDQIREAQKNDPDMHGLLKNMKQGKAAGFTEDEHGTLWNGKRVCVPDNRELKQLILQEAHESPYSIHPGSTKMYLDLKEKYWWVSMKREIAEFVALCDVCQRVKAEHQRPAGLLQPLQVPEWKWDEIGMDFITGLPKTQGGYDSIWVIVDRLTKVARFIPVKTTYGGNKLAELYIARIVSLHGIPKKIVSDRGSQFTSHFWKKLQEELGTRLNFSTAYHPQTDGQTERLNQILEDMLRACVLDFGKTWDKSLPYAEFSYNNSYQASIQMAPYEALYGRKCRTPLLWDQVGESQVFGTDILREAEAKVRIIRDNLKVAQSRQKSYADNRRRDLEFAVDDFVYLRVTPLRGVHRFQKKGKLAPRYVGPFRIIARRGEVAYQLELPASWGNVHDVFHVSQLKKCLRVPSEQANSEQIEVREDLTYVEKPVKILDTMERRTRNRVIRFCKVQWSNHAEEEATWEREDELKAAHPDLFASSSESRGRDSV

SEQ ID NO: 19644 - protein, 818 aa, Oryza sativa
  Clone ID: TF_OSC29718j.C1.p2.gm
MAPAQPAPSAQAKKETGAKPGSSYNCGELGHFADKCPKPRRAGPRFAQARVNHASAEEAQATPEVVLDLDIILGMDWLTKFKGVIDCANRTVTFTKEKGETVVYKSPVSPNQGIPLNQIEVENPVKGYIRPSTSPWGAPAIFVEKKDNTKRMCVDYRALNEVTIKNKYPLPWIDDLFDQLKGAKEHQLYAKFSKCDFWVSEVKFLGHVITAQGVAVDPSNVEKSYYNALCTGGMCKELQQELEHLNLGIVEHGYVAALEARPTLVDQVRAALVNDPEIAKLKNNMRVGKARDLLEDEHGTIWLGERFAVAAFVFSVHHRQPLQPPVAAASAIDDLRRRLSRLRKVKLHPVHPFPQAKIHRSFIVAVNPNAKPKAVHPFFSAGVRRKATVTVVPISPPLEARRRLPFIVARRRHGSLRGTRLRSGEKPVVVAGESMPLVIEGVIMIQERKSYCNASCTGGMCKEMQQELEHLNLGIIEHEYVAAPEARSTLVDQVRAAQVNDPEIAELKKNMRVGKARDFLEDEYGTIWLGERLCVPDDKELRELILTEAHQTQYSIHPGNTKITPETRRITTTSLDPGMEMGRDWNGFHNSTAYHPQTDGQTERVNQILEDMLRAYALDFGGAWDKSLPYAEFSYNNSYQTNLQMAPFEVLYGRKCRTPLFWDQIGERQLFGTEVLTEAEEKVRTIRERLRIAQSRQKSYADNHRRELTFEAGDYVYLRVTPLRGVHCFQTKGKLAPCFVGPYKILERRGEVAYKLELPSNMAGIHDVFHVSQLNKCLRVPEEQADSEHIDLQEDLTYVEKPIRILETSERRTRNKVT

SEQ ID NO: 19645 - protein, 752 aa, Oryza sativa
  Clone ID: TF_OSC101628j.C1.p6.fg
MEIMQQLAAAATATATATATPLCLPEPPPTAMTTAQVEAAIATLHGKKQGLREAYDSLVLHSPIPLPFRWSDLDSHLSSLQSSIHARFSQLQALQASRPAPPAAAAASHDEDVEMEDVQEQGEDEVMAPPSTVQVKEEPVEAAACASNTAGERAGVGQDGFVRPGGMAAAKMASPSKVQVKEEPVEVSPSPPAGATGLTAAACASMDAPRLTDVCKRAGGGGGQGLCARNGSGTAQSPPIPSCPVLQQQHTAGAPNGSHPVLRQHAANAMNAGHSAAFRPQQHMGKPRDTCDLRKAAAPNTGDRLPLQWRQQRVHANLTCPLPPPVVAGSSSSPPQQRVGVFPSPTPQIVGSSPPPPSQARVGEANVTNPSRQQFTASAPHAGDGQLQKRPPWQRLQRVGVANPMNAGDLPPQKPHFTANARNAGEHPFQEQQQPPPVAKPTDAAAGDLLPQQKQLMANAPNAGEHLLPEQQKQQPVTAAKPANAPPLQHAANATNPAVLRRQRQRQWVRLRPPTATNLPQTKQEQHHLFMADDGANARNPLSPPPPCGMAKPPNSGDPLTDQNNQQLMANTHSAPTPVSTPLVASNQSESSAMTTTTTTNSNQNSGGGRTGPQPVAAGAAPNPAGNQQQGQRKGGANRRGGRGQGNKNNNVANTNISNMSKVIGKGNKGQGNGNPQLNKNGNPQFNKNVPGDHHQKNKNAGQLCYRCGCRGHWSRICRTPEHLVKLYQQDRKAKLQAGANTNTVYVGAMTD

SEQ ID NO: 19646 - protein, 583 aa, Oryza sativa
  unsure (1)..(583): unsure at all Xaa locations
  Clone ID: TF_OSC15757j.C1.p1.np
MANKTLREFAAPSADNVAIRLQVNIGDMDFDLKSSLITMAQANPFCGKPNEDANAHLQQFLEIYSTYTIKGVSPDVVRLRLFPFSLLGRAKXWFYANRAAVNTWDKCSTTFLSKFFPMGKTNALRGRISSFQQMRDESILEAWERLXEYVAACPHHWMDDWLILQNFYNGLTPMSRDHLDAAAGGAFFSKTVQGAVDLIEKMVSNMGWSEERLQTRXRGMHTVKETELLAAKLDLLMKRLDDHEKWPQGTVKALDSHVTCEVCGNTGHSGNDCPETHEEAMYMGNNNNGYLPQGVTNETRRIPGQPDSSIENVKAITTRGGKSTRDPPYPNPTGINGISKEAPSKDSADKDVQPEKTVPQEYCDTRLLPFPQRIRKSSVDKHFARFIEEIQKIHINVPLPTMEVVKLMEQCSLPTMEVVKLMEQCSNVILHKLPEKKKDPGCPTTCSIGAQQFDPALCDLGASVSVMPKDVFDKLNFTVLAPTPMRLQLADSSVYYSAGIAEDVPVKIRDFFILVDFVMLDMDTGKETPLILGRTFLSTAGANIDVGMGIICFHINGKEEKFEFQPRMEQCSMIRIKYGPTAS

SEQ ID NO: 19647 - protein, 129 aa, Oryza sativa
  Clone ID: TF_OSC16925j.C1.p1.np
FHAHGMRSKDQKRKAPMRTEDEVRKMIITSTEWPPPGMTKRQRRNSFRGAPQLTEHLLASGGRVYDSEDSDQVSSDDEDEKSPQGFNQNKMEHKACSRCGEIGHVASSCATTCFHCEEDHPPECPMRKI

SEQ ID NO: 19648 - protein, 286 aa, Oryza sativa
  unsure (1)..(286): unsure at all Xaa locations
  Clone ID: TF_OSC19175j.C1.p2.np
IADKTLHEFAAPSAENVAIGPQINMGDMDFDLKSSLITMAXASPFCGKPNEDANAHLQQFLENCNTYAIKGVSPDTVRLRLFPVSLLRRAKQWFYANRAAVNTWDKCSTVFLSKFFPMGKTKSFQQTRDEAIPEAWERLQEYVAACPHHGIDNWLIMQNFYNTPMSRDHLDVAAGGAIFSKLVRGAADLIEKMVSNMGWSEERLQTRQRGMHTVKETELLAAKLDLLMKRLDDHDKRPQGTIKALDSHVTCEVCGNMGHSGNDCPETYEEAMYMGNNNNGYHPQGV

SEQ ID NO: 19649 - protein, 736 aa, Oryza sativa
  Clone ID: TF_OSC404812j.C1.p4.gm
MGMVKFSASAAHLQIAPSRYSRALGTTKIPKSLGRLRRHLARRRLMSSSSPHIVLVAHHGCVASLVKFSGLAVSLDVHSAAAIASLPASSVAAVALPEVKLDDNPTGRRPMARSSTCSTSTTWFLPPKDRTSDSGGGGVGSKEEEDEAWDEWLAKPIHERMPWQMPPATELQDAGLEAVTNCYGELYGDMMEYCGRSWKPGTGTAPCWCMTAIPPFNPTTSLSGARLEGHVLGTSVPPEAELEQKEGEKGEKTIRVPNPAYGEWFATDQQVIGFLFTSLTREILSQVADAPTAAAAWKTIENVFSTRSRAGAINVRLALTTTQKGQSTVTEYVSKMRALGDEIAATGKPIDDEELVAYIINGLDSEFDPVVEALVAKNASVTVAEVYSQLLGFENRVKIRTACAAMSGNRGGGNQGRGGGNPRGRGAGRGGSGRGGGRGRGNGRGGADNRPTCQVCHKKGHVAADCWHCYDENYVPDEKLGGAATHAYGVDTNWYVDTGATDHITGQLDKLTTREKYKGTDQIHTASGEDDTEADASDSNAEINAEQPDGTHPGASTGVHTAETEVAEESSSRTDQWRAVQAPEQPATATEPAAATSSAVQSSRASSRSIASHHQPGGDTSPGPRHDAAGSSAAPEVIAEIEQVSKGWSLRQLDVQNAFLHGVLEEEDLNQEFALKDLEDLHFFLGIEVKKDLTLYLGVHENKLQSLDQVLKLNTRHWQMQQQKLCGYKHYFRNLV

SEQ ID NO: 19650 - protein, 247 aa, Oryza sativa
  Clone ID: TF_OSC420074j.C1.p7.gm
MKRLDDHDKRPQGTVKALDSHVTCEVCGNMGHSGNDCPETREEAMYISNNNNGYRPQGGQGWNQPRPYYQGETNGVAKEAPSSDSADKEIQPEKVVPQEPRKSVRTGEGEEGHGNGGVEKKSTAPALSADWPVMANCGRRQRLRVRACAKRVHGTRRWRPRDREEDRLCGWASLGLGLLGGASNIFLFLFVFVFLFIFFFVRVSKRVFIFVFVRVLIFIFLHFVLIDIVFANAQPGGRLPEVEPSPG

SEQ ID NO: 19651 - protein, 488 aa, Oryza sativa
  Clone ID: TF_OSC20612j.C1.p3.fg
MDISRTNEGYTSCGPVVEMSWHRAGVLLLGAQSCLPVPEVPAVGGVGSVLLFMARMGWELCHVFRPYTVVMFNREKGKNVSGYASTNSSFQLNPPLSSRELTRAHPWSIPSMLLSSQLPLVGSQDQNQYVFDRAFATQVNELPMPEEHVPFCHDCREQGHYALNCPWVYAKQASSFGLAGQTSLNQPPRTKSSLQPSVQSREPNGENPLNPGKCFPPSLSYHVGSHTKQAKGKKSKNQKRKAPMRTEEEVRKMTITNTEWPPVGITIPRRQRGNTFRGARQLTQHLLSHGGRVSDSEGSDQVSSDDEDESPRHLGEEEMESKACTCCGEIGHVASMCLTLCPHCEEDHPPGECPTRKMTCFLCEGTNHVPKDCQLSVLLTKTVEIQRTTLRLSHQLVSSNSNIDDIIHSTNVPPAPPNSAINHSNNTFSTNHSLHRQPQQRIVVDGRSCVSPRPTPGRAKGNQPPEGDTKQKTVIRFKQQSEGSFSCE

SEQ ID NO: 19652 - protein, 711 aa, Oryza sativa
  Clone ID: TF_OSC401388j.C1.p4.fg
MASKTLREFAAPSANNVVVGPQVNIGDVDFDLKSSLITMAQASPFCGKPNEDANAHMQQFLEICSTYTIKGVSPDAVRLRLFPFSLLKRAKQWFYANRAAINTCDKCSTTFLSKFFPMGKTNALRGRISSFQQTRDESIPEAWERLQEYVAACPHHGMDDWLILQNFYNGLTPVSRDHQDAAAGGAFFSKTVQGAVELIEKMVSNMGWSKERFQTHQRGMHIVKEMELLVAKLDLLMKRLDDHDKRLQGTIKALDSHVTCEVCGGTGHSGNDCPKTREEAMYMGNNNNGYRPQGGQGWNSTSLHGNADVRRHAKRRFDKLNFTALASTPMYLQLADSSVRYPTRIAEDVPIKIRDFLIPVDFVEPLLEDAGKITRTGQEIRAAGSEEAVFRIEIKEGVEGKAKDTRSITSGDGWKIHELKRKEEFTLTWKGLSTLLGFHDSCKIDLQRGISGFEKNRFWEDISGAPICKKPRTNNIHNPTLRLVHKWIAMTLFSRSDLRPIRGDELIIMFAMVRKVKISPVKCMIRQWLESIMFSAPVECTSLITRIAKELGVVSDQIAFISAARPHIDEAYLVQGHILKQGADGSLIYFFPSCTNEIPLPNAGYHLYNCHELTIPLQTIEESRAGGTYRETRNMTRNEQESSSSSTPVQMYEAGWAPTGDAPRWTQAPRHSIGVSPWASAGEDRWHAAPLRLPSFHSPLNPRHGSGVWCR

SEQ ID NO: 19653 - protein, 1328 aa, Oryza sativa
  Clone ID: TF_OSC102349j.C1.p24.fg
MATNPKGSNHNNHGSPPPPPPPPPPPPPDTNSILTQILAQQANMMAAFLHHIQNPPQHNAPPPPPPPQHSKLAEFLRIRPPTFSSSNNPVDALDWLHTVGKKLYTVQCNDEEKATQPEGQPITWARFTAAFRRTHVPTGVMALKKREFRELKQGNRSMMEYLHEFNNLARYAPEDVREDEEKQEKFLAGMDPELSVRLVSGDYPDFQRLVDKSIRLEAKHKELESHKRRLANFRNQQGANQRVHYTNPYPGGSSSQQQQQQQPRSAPRPQFVVRVPQPQQQQSQQGTRASRPPTPAVQPGQGRRDVQGQQRLCFDCFEPGHFADKCPKPRRQQGQAPPRPNNGGKDVIRGRVNHVTAEDVLTTPDVIVGTFLIHSIPATILFDSGASHSFISVPFVGRNQLGVERLRNPLLITTPGGVMTAKYYSPAVPIEIHGIPFPSDLILLDTKNLDMILGMNWLAQFQGVVDCARRTVTLYRGPEQPVVFFAPPTSVGSSELHQIGLSETPIVSEFRDVFPEELPGMPPKREIEFRIDLAPGTTPLYKRPYRMAANELAEVKKQLEELKEKGYIRPSTSPWGAPVIFVEKKDKTKRMCVDYRALNEVTIKNKYPLPRIDDLFDQLKGATVFSKIDLRSGYHQLRIREKDIPKIVFTTRYGLYEFTVMSFGLTNAPAFFMNLMNKVFMEYLDKFVVVFIDDILVYSQSEEDHQQHLRRVLGKLREHQLYAKLSKCEFWLSEVKFLGHVISAKGVAVDPETVIAVTDWKQPKTVTQIRSFLGLAGYYRRFIENFSKIARPMTQLLKKEEKFVWSPQCEKAFQTLKEKLVSSPVLILPDTRKDFLVYCDASRQGLGCVLMQDGHVVAYASRQLRPHEGNYPTHDLELAAVVHALKIWRHYLIGNRCEIYTDHKSLKYIFTQSDLNLRQRRWLELIKDYDVGIHYHPGKANVVADALSRKSRCNTLGVCDIPPELNQQMEALNLSIVSRGFLATLEAKPTLLDQISEAQKNDPDMHGILKNMKQGKAAGFTEDEHGTLWNGNRVCVPDDKELRQLILQEAHESPYSIHPGSTKMYLDLKEKYWWVSMKREIAKFVALCDVCQRVKAEHQRPAGLLQPLQVPKWKWDEIGMDFITGLPKTQGEYDSIWVVVDRLTKVARFIPVKTTYGGNKLAELYFARIDKSLPYAEFSYNNSYQASIQMAPYEALYGRKCRTPLLWDQVGESQVFGTDILREVKAKIRTIRENLKVAQSRQKSYADNRRRDLEFAVDDFVYLRVTPLRGVHRFQTKGKLAPRFVGPFRIIARRGEVAYQLELPASLGNVHDVFHVSQLKKCLRVPSE

SEQ ID NO: 19654 - protein, 548 aa, Oryza sativa
  Clone ID: TF_OSC401716j.C1.p8.gm
MPPPRLGSAEPVSCRARAPAAPPRDRPIGFVPIRAVGSRGPAVDSLGGPGPRWTGAHVPLTGGARLPAPPLPLDDVSEGYGLRHWWGCDHTSRWSARGTISPDQDPVSFMGQLSAILIIFHVSLLKISLNPKSWLIKLRQWKSCYNRCDVDTKYTRCNRCNDNVRSHVNVTHHRSPEKDEKQCPGSNQAPSQSTNKKDGTLQHNFGANRKVIWKMDNGRTMIITSSEFTPEDAARIPKRTDHVPKDCQLNAVIAKTKKEQGTTVQPIRQPMTIDNSGHNPSALPPTPAPVEANHGRSNVTKDVHKSLLVPVSAAKVHNQKPAPRDQASRFCRNCRKPGHRFSDCPLPRAAKAVRRDSQVTSIAHDTNRHLNVQPPPQRIIVKGTVKGRIVPPATVSSLQHQRQQGKQCQENNSSLQLQRGGTLLRQHPRQVLSAPGRPTVVSSSNAPGIAPIWRPIDKSPLGNPTGKKILPVTADKTVAPPPSKINKQSNVPGSISGTQMKRVMEYLKVTMVGSMVLDTMKSLQRQYQGMWQFNVQISQTADQHQLSF

SEQ ID NO: 19655 - protein, 712 aa, Oryza sativa
  Clone ID: TF_OSC405120j.C1.p8.gm
MGQLSAILIVFHVSLLKISLNPKSWLIKLRQWKSCYNRYDVGVPNIGIEDPCQNAVQIPEDNDSQVNVFARSPEKDEKQCPGSNQAPSQSTDKKDGTLQPNSGVNRTVIWKMDNGRTMIITGSEFTPEDAARIPKRERFSADDDDDNDDDNDDNDDATLDSFRERELKFKAYHVPKDCQLNAVIAKTKKEQGTTVQPIRQPMTIDNSGHNPSALPPTPAPVEANHGRSNVTKDVHKSLLVPVSAAKVHNQEPAPRDQASRFCRNCRKPGHRFSDCPLPRAAKAVRRDSQVTSTAHDTNRHLNVQPPPQRIIVKGTVKGRIVPPAIVSSLQHQRQQGKQCQENNSSLQLQRGGTLLRQHPRQVLSAPGRATVVRSSNAPRIAPIWRPIDKSPLGNPTGKKILPVTADKTVAPPPSKINKQSNVPEVEGVLTQSGTSPDYKVGNRITDISQKMVEELKESVKEEQAEKKEEAAKEKPDEPQEIVLKVDMHCEGCAKKVEKSLLRFEGQKAFHTVSNYDFCRRAADPSKVCERVQRKTKRRVELIFPLPPPPEEEKKEEAPAPPPEEKKEEPPKTITVILKVQMHCDACAQILQKRISRTEGVESVETDLLNGLVVVKGVMDPAVLIESIQRKTRRPAVIVEEVKPREEEKKAEEEEKKPDEDKADGIEEIKKYDFWPPVQYYVEYVYPYPLPPPPTALVSEEFSDENPNACTVA

SEQ ID NO: 19656 - protein, 1090 aa, Oryza sativa
  Clone ID: TF_OSC14471j.C1.p1.fg
MASKLKSMEMEISKGFLVHFIMSSLPQEFSPFTINYNAMKIKWGIDELIAMYVQEEERLKAERVDHANLFKHSKKKKYKKFKKEYLKPKPSQFKEKGQSSNQSQQNKSGGNPYTEEKGKEKDGCYFCGKSGHRQKDCIGFMRWLSKKDTDVISFVDESLNIDYATNSWWIDSGATIHVANSLQGFAMRRTLRRGERRIRVANGERISTHGDCQRGPLGCKRACPGEGGTLQYYSPAVPIEIQGIPFPSDLILLDTKNLDVILGMNWLAQFQGVVDCARRTVTLYRGLEQPVVFFAPPTSVGSSELHQIGLSETPIVREFRDVFPEELPGMPPKREIEFRIDLAPGTTPLYKRPYRMAANELAEVKKQLEELKEKGGRPSAASPSGVGKVAGTPTVCKLSKCEFWLSEVKFLGHVISTKGVAVDPETVTAVTDWKQPKIVTQVRSFLGLAGYYRRFIENFSKIARPMTQLLKKEEKFVWSPQCEKAFQTLHEKLVSSPVLILPDTRKDYLVYCDASRQGLGCVLMQEGHVVAYASRQLRPHEGNYPTHDLELAAVVHALKIWRHYLIGNRCEIYTDHKSLKYIFTQSDLNLRQRRWLELIKDYDVGIRYHPGKANVVADALSRKSRCNTLGVRGIPPELHQQMEALNLSIVGRGFLAMLEAKPTLLDQIREAQKNDPDMHGILKNMKQGKAAGFTEDEHGTLWNGNRRVKAEHQRPARLLQPLQVPEWKWDEIGMDFITGLPKTQGGHDSIWVVVDRLTKVARFIPVKTTYGGNKLAELYFARIVSLHGVPKKIVSDRGSQFTSHFWKKLQEELGTRLNFSTAYHPQTDGQTERLNQILEDMLRACVLDFEKTWDKSLPYAEFSYNNSYQASIQMAPYEALYGRKCRTPLLWDQVGESQVFGTDILREAEAKVRTIWDNLKVAQSRQKSYADNRRRNLEFAVDDFVYLRVTPLRGVDRFQTKGKLAPRFVGPFRIIARRGEVAYQLELPASLGNVHDVFHVSQLKKCLRVPSEQADSEQIEVREDLTYVERLVKILDTMERRTRNRVIRFCKVQWSNNAEEEATWERESELKAAHPDLFASSSESRGRDSV

SEQ ID NO: 19657 - protein, 611 aa, Oryza sativa
  Clone ID: TF_OSC21716j.C1.p1.fg
MGNIEQLNGSNYASWKEKLEITLALLDIDYALHNDPPVEPRPENENYETLKRIYDEVKAKWDISNRKCLMIIKSSIIDAIRGAVPDTQTAREYLAKVEEQFKGSSKVYATTLIKRLVNERYDFTENLREHIMKKCHMVSKLKSMEMEISEGFLVHFIMSSLPQEFSPFTINYNAMKIKWGIDELIAMCVQEEERLKAERVDHANLFKHSEKKKYKKFKKEYLKPKPIQFKEKGQSSNQSQQNKSGGNPYTEEKGKEKDGCYFCGKSGHRQKDCIGFMRWLSKKGTDVISFVDESLNIDYATNSWWIDSGATIHVANSLQGFAMRRTLRRGQRRIRVANGVETEVEAIGDFTLTLHTGFKLQLHDVLYYRLGHISRGGIERLIKENILYPLDFSDADVDHCIDCIKGKYSKQIKKGANRSMGVLEIIHTDICGPFNEKHTTYGQIPGPFARFLQENGIKAQYSAPGEPQQNGVAERRNRTLMDMVSLGDQEHAVFLENDIIKGSMTPREVVLEEKRNYIPMPIIEEPVFSTHTHVAPSIERNNDATPAETPATTSSSVSNDENNEDAQQPQIVIDEQNNEPVRRSQRVRKSAIPSDYVTYINEEVNKPMGEE

SEQ ID NO: 19658 - protein, 1437 aa, Oryza sativa
  Clone ID: TF_OSC23733j.C1.p3.fg
MASSSSNPSALNGQTVSEKLTKSNFVLWKAQVLAALRGAQMAGFLDGSNQAPAATIIITKDDGKTTEKVANPALVQWKAQEQQVLSYLLSSLSREMEAIESLFASQSRARILNTRMALSTTVKGNRSMAEYVGKPVDDEELISYILAGLDFDYNSVVSSVTGRTGPISVSDVYALLVGFESRLELLQNAANPSANTASRGGRGGGGRDGRGRGGGNPGRGGSFGRGRNDGKPKPTCQLCGKIGHIVAKCWKRFDPSFTGEEKNANTAAVNSYGIDTNWYIDSGATDHITGEMEKLMVKDKYTGNDQVHNASGAGMNIDHVGHTAIRTPTRDLTLKNVLHVPDACKSLVSAHRFTRDNKTFVELHPFFFLVKDQVTRMPLLRGRCRSGLYPLPTDKLQTISNKQAFGVVKPSLFRWHSRLGHPSFSVVNRVISQNNLPVVRDSSQEFVCDACQKGKSHQLPYPKSSSVSIEPLQLVFSDVWGPAINSVGNKVYYVSFIDDFSKFTWIYLLKHKSEVFAKFQDFQNLVERLTNRKIKAVQTDWGGEYQRLNSFFQRIGIEHYVACPYAHQQNGSAERKHRHIVEVGLSLLAHASMPLKFWDEAFTTAAYLINRTPTKVINFETPLQRLFNLPPDYSLLRTFGCACWPNLRPYNARKLAFRSKQCAFLGYSTLHKGFKCLDISTGRVYISRDVVFDEQIYPFEKLHPNAGARLRAEINLLPAHLLPLLDHGGVQMHDQPLIDDSNPANPIIENSAGSSAGNGAKSGAQHGHDFMQSSGGQPTGGHHDSLTHSTMHGTENQADQENSASSRSAEPVTPRHAASPSAAPHAATAPIASSHAAASSLSGDIVGPGSRGPSQEDQDTSQEDQDTSASAPASSTSHDDDSAQFAAQPTRPVTRAQRGIHKPKKYTDGTVRYAGLTHTGEPGNLQEALSNTNWKSAMDSEFAALVRNKTWHLVPPKQGVNVIDCKWVYKIKRKADGTIDRYKARLVAKGFKQRYGIAYEDTFSPVVKAATIRLVLSLAVSQGWSLRQLDVQNAFLHGYLEEDVYMRQPPRYEEKKMPHYLCKLDKALYGLKQAPRAWYSRLSKRLQELGFVSSKADTSLFFYNKKGLVMFLLVYVDDIIVASSSGQAVTVLLKELEKDFALKDLGDLHYFLGIEVKKTEKGLLLTQERYAGDIIKRTGMSNCKPVSTPLCVSEKLWLNDGEFLGANDASQYRSIVGALQYLTLTRPDISFSVNKVCQFLQNPTIVHWAAVKRILRYLQGTLGLGLKIDKSFSYIVSAFSDADWAGCLDDRRSTGGFAVFLGSNLISWSARKQASVSRSSTEAEYKALANATAEVMWVRKLLEEIGLLHPGPSQLWCDNIGATYLSANPVFHARTKHIEVDYHFVREQVAQKMLEIRFVPSQDQIADGFTKPLPVRQLQLFCNNLNLGELRLRGSVR

SEQ ID NO: 19659 - protein, 548 aa, Oryza sativa
  Clone ID: TF_OSC23733j.C1.p3.gm
MALSTTVKGNRSMAEYVGKMKSLADDMASAGKPVDDEELISYILAGLDFDYNSVVSSVTGRTGPISVSDVYALLVGFESRLELLQNAANPSANTASRGGRGGGGRDGRGRGGGNPGRGGSFGRGRNDGKPKPTCQLCGKIGHIVAKCWKRFDPSFTGEEKNANTAAVNSYGIDTNWYIDSGATDHITGEMEKLMVKDKYTGNDQVHNASGADKLQTISNKQAFGVVKPSLFRWHSRLGHPSFSVVNRVISQNNLPVVRDSSQEFVCDACQKGKSHQLPYPKSSSVSIEPLQLRIGIEHYVACPYAHQQNGSAERKHRHIVEVGLSLLAHASMPLKFWDEAFTTAAYLINRTPTKVINFETPLQRLFNLPPDYSLLRTFGCACWPNLRPYNARKLAFRSKQCAFLGYSTLHKGFKCLDISTGRVYISRDVVFDEQIYPFEKLHPNAGARLRAEINLLPAHLLPLLDHGGGPGELGVISICRTGHAATRSESLGRATRGNRANRVVTRGSLVSVGRHCGTGFTWAIAGGSRHVAGGSRHVCISSCFFHIA

SEQ ID NO: 19660 - protein, 1254 aa, Oryza sativa
  Clone ID: TF_OSC400390j.C1.p57.fg
MGNIEQLNGSNYASWKEKLEITLALLDIDYALHNDPPVEPRPENENYETLKRIYDEVKAKWDISNRKCLMIIKSSIIDAIRGAVPDTQTAREYLAKVEEQFKGSSKVYATTLIKRLVNERYDFTENLREHIMKKCHMVSKLKSMEMEISEGFLVHFIMSSLPQEFSPFTINYNAMKIKWGIDELIAMCVQEEERLKAERVDHANLFKHSEKKKYKKFKKEYLKPKPIQFKEKGQSSNQSQQNKSGGNPYTEEKGKEKDGCYFCGKSGHRQKDCIGFMRWLSKKGTDVISFVDESLNIDYATNSWWIDSGATIHVANSLQGFAMRRTLRRGQRRIRVANGVETEVEAIGDFTLTLHTGFKLQLHDVLYYRLGHISRGGIERLIKENILYPLDFSDADVDHCIDCIKGKYSKQIKKGANRSMGVLEIIHTDICGPFNEKSDRGGEYYGRHTTYGQIPGPFARFLQENGIKAQYSAPGEPQQNGVAERRNRTLMDMVRSMLSHSTLPVKLWMEALKTATHILNRVPSKSVPKTPFELWTGKKPTLNYFHVWGCPAEARVFNPNMGKLDIKIISCHFIGYPDKSKAYRFYCPNQFTKFIETRHAVFLENDIIKGSMTPREVVLEEKRNYIPMPIIEEPVFSTHTHVAPSIERNNDATPAETPATTSSSVSNDENNEDAQQPQIVIDEQNNEPVRRSQRVRKSAIPSDYVTYINEEVNKPMGEEVNEPILDNDPISFKEAMKSKHSSEWLKAMKDEMKSMSTNKVWDLVEIPEGAKTVGCKWVYKTKRDPKGNIERFKARLVAKGFTQREGIDYNETFSPVSTKDSFRIIMALVAHYDLELHQMDVKTAFLNGDLYEDVYMAQPEGFVMKGKEHMGCHLKKSIYGLKQASRQWYLKFDQIIRQFGFKENKKDDCIYTKFKESKFIFLILYVDDILLASNDKNMLLETKKFLASKFEMKDLGEANYVLGIEIYRGRSNGVLGLSQKAYIEKVLKKYNMHNCSASPAPIMKGDKYGKFQCPKNEYEAAQMKSISYASAVGSIMYAQVCTRPDLAFVTGMLGRYQSNPGLEHWKLAKKTLRYLQGTKDLMLTYRKSENLEVVGYSDSDLAGCVDDKKSTSGYIFTLARGAISWKSSKQRVTTSSTMQAEYVACYEATGQAIWLKNFIPGLRVVDSISKPLKLYCDNKPAVYYASSNKSSASAKYIDIKYHVVKEMIQDQTISIEYMNTKLMLADPLTKGLPPVVFKEHVAGIGLVEKPSILE

SEQ ID NO: 19661 - protein, 1184 aa, Oryza sativa
  unsure (1)..(1184): unsure at all Xaa locations
  Clone ID: TF_OSC400596j.C1.p9.np
MGTPGDQASYASQIAGIIGNIEQLNGSNYAPWKEKLEITLALLDIDYALHNDPLVEPRPENENYDTLKRRYDEVKAKWDISNRKCLMIIKSSIIDAIRGAVPHTXIAREYLAKVEEEFKGSSKVYATTLIKRLVNERYDFTGNLREHIMKKCHMASKLKSMEMEISEGFLVHFIMSSLPQEFSPFTINYNAMKIKWGIDELIAMCVQEEERLKAARVDHANLFKHSEKKKYKKFKKEYLKPKPIQFKEIGQSLNQSEQNKSGGNLYTEEKGKEKDGCYFCGKSGHRQKDCIGFMRWLSKKGFAMRRTLRRGERRIRVANGVETEVKAIGDFTLTLHTGFKLQLYDILYVPSMKRNLVLVSRLDNGGYYCTFGNNRCIIMHDNKEVGLADEQLYQIFMCDATYNVSSNANVSTKRKYNDNETSSKLWHYRLGHISRGRIEHLIKENILYPLDFSDADVDHCIDCIKGKYSKQIKKGANRSMGVLKIIHTDICGPFNEKSVDGFVSFITFTDDYSRYGYIYPIKERSEALDKFKIFKAEVENQHDRKIKIFTKFIETRHVVFLENDIIKGSMTPREVVLEEKRNYVPMHIIEEPVFSTHTHVAPSIERNNDATPTEAPATTSSSVSNDENNEDAQQPQIVIDEQNNEPVRRSQRVRKSAIPSDYVTYMNEEVNELMSEEVNEPILDNDPISFKEAMKSEHSSEWLKAMKDEMKSMSTNKVWDLVEIPEGAKTVGCKWVYKTKRDPKRNIERFKARLVAKGFTQREGIDYNETFSPVSTKDSFRIIMALVAYYDLELHQMDVKTAFLNGDLYKDVYMAQPEGFVMKEKEHMGCHLKKSIYGLKQESRQWYLKFDHIIRQFGFKENKKDDCIYAKFKEKFLVSKFEMKDLGEATYVLGIEIYRDRSNGVLGLSXKAYIEKVLKKYNMHNCLASPAPIMKGDKYGKFQCPKNEYEAAQMKSIPYASAVGSIMYAQVCTRPDLAFVTEMLGRYQSNPGLEHWKLAKKTLCYLQGTKDLMLTYRKSENLEVVGYLDSDLAGCVDDKKSTSGYIFTLAGGAISWKSSKQRVTASSTMQAEYVACYEATRQAIWLKNFILGLRVVDSISKPLKLYCDNKPAVYYASSNKSASAKYIDIKYHVVKEMIQDQTISVEYMNTKLMLADPLTKGLPPVVFKEHVASMGLVEKPLILE

SEQ ID NO: 19662 - protein, 1225 aa, Oryza sativa
  Clone ID: TF_OSC401051j.C1.p47.fg
MGTPGDQASYASQISGIMGNIEQLNGSNYASWKEKLEITLAMLDIDYALHNDPPVEPRPENENYETLKRIYDEVKAKWDISNRKCLMIIKSSIIDAIRVAVPDTQTAREYLAKIEEQFKGSSKVYATTLIKRLVNERYDFSGNLREHIMKKCHMASKLKSMEMEISEGFLVHFIMSSLPQEFSPFTINYNAMKIKWGIDELIAMCVQEEERLKAERVDHANLFKHSEKKKYKKFKKEYLKPKPIQFKEKGQSSSQSQQNKSGGNPYTEEKEKEKDGCYFCGKSGHRQKDCIGFMRWLSKKGTDVISFVDESLNIDYATNSWWIDSGATIHVANSLQGFAMRRTLRRGERRIRVANGVETEVEAIGDFTLTLHTGFKLQLHDVLYVPSMKRNLVSVSRLDNGGYYCTFGNNRCIIMHDNKEVGLAVGREQLYQISVCDATYNVDSSSNANISTKRKHNDNKTFSKLWHYRLGHISRGRIERLIKENILYPLDFSDADVVHCIDCIKGKYSKQIKKGANRSMGVLEIIHTDICGPFNEKSVDGFDSFITFTNDYSRYGYIYPIKERSEALDKFKIFKVEVENQHDRKIKIFTKFIETRHAVFLENDIIKGSMTPREVVLEEKRNYVPMPIIEEPVFSTHTHVAPSIERNNDATPAEAPATTSSSVSNGENNEDAQQPQIVIDEQNNEPVRRSQRVRKSAIPSDYVIYMNEEVNEPMIEEVNEPILDNDPISFKEAMKSEHSSEWLKAMKDEMKSMSTNKVWDLVEIPKGAKTVGCKWVYKTKRDPKGNIERFKAGLVAKGFTQREGIDYNETFSPVSTKDSFRIIMALVAHYDLELHQMDVKTAFLNGDLYEDVYMAQPEGFVMKRKEHMGCHLKKSIYGLKQASRQWYLKFDQIIRQFGFKANKKDDCVYAKFKEKILASKFEMKDLGEATYVLGIEIYRDRSNGVLGLSQKAYIEKVLKKYNMHNCSASPAPIMKGDKYGKFQCPKNEYEAAQMKSIPYASAIRSIMYAQVCTRPDLAFVTGMLGRYQSNPGLEHWKLAKKTLRYLQGTKDLMLTYRKSENLEVVGYSDSDLAGCVDDKKSTSGYIFTLAKGAVSWKSSKQRVTASSTMQAEYVACYEATGQAIWLKNFIPGLRVVDSISKPLKLYCDNKPAVYYTSSNKSSASAKYIDIKYHVVKEMIQDQTISVEYMNTKLMLADPLTKGLPPIVFKEHVAGMGLVEKPLILE

SEQ ID NO: 19663 - protein, 627 aa, Oryza sativa
  Clone ID: TF_OSC405418j.C1.p1.fg
MAAATASSPATAAAANSDDEDNYEEYIPVAKRRAMEADRLRRLRLSKPAPPSSSAAEAASDLPPPPPPPPNQPSAGGGGGGLEASAKPSLLVKATQLKRAAPEVTHTEQLIMQEKEMIEHLSDRKTLMSVRELAKGITYSDPLKTGWKPPLRLRRMPRAKADELRRKWHILVDGDDVPPPARDFRDLRLPEPMLRKLREKGIVQPTPIQVQGLPVVLSGRDMIGIAFTGSGKTLVFVLPLIMVALQEEMMMPIVPGEGPFGMIICPSRELAKQTYDVIEQFLVPLKEAGYPEIRPLLCIGGVDMRAQLDVVKKGVHIVVATPGRLKDLLAKKKMNLDNCRYLTLDEADRLVDLGFEDDIREVFDHFKAQRQTLLFSATMPKKIQNFAKSALVKPVIVNVGRAGAANLDVIQEVEYVKEDARIIYLLECLQKTPPPVLVFCENKADVDYIHEYLLLKGVEAVAIHGGKDQEERENAIEFFKNGKKDVLVATDVASKGLDFPDIQHVINYDMPAEIENYVHRIGRTGRCGKTGIATTFINKNQTETTLLDLKHLLKEAKQRIPPVLAELNDPLEDEETMAKESGVKGCAYCGGLGHRVTDCPKLEHQKSMAIAGSRRDYYGGGGYRGEI

SEQ ID NO: 19664 - protein, 1098 aa, Oryza sativa
  Clone ID: TF_OSC416746j.C1.p19.fg
MGTPGDQASYASQIARIMGNIEQLNGSNYASWKEKLEITLALLDIDYALHNDPPVEPRPENENYETLKGRYDEVKAKWYISNRKCLMIIKSSIIDAIRGAVPDTQTAREYLAKVEEQFKGSSKVYATTLIKRLVNERYDFTGNLREHIMKKCHMASKLKSMEMEISEGFLVHFIMSSLPQEFSPFTINYNAMKIKWGIDELIAMCVQEEERLKAERVDHANLFKHSEKKRYKKFKKEYLKPKPIQFKEKGQSSNQSQQNKSGGNPYTEEKGKEKDGCYFCGKSGHRQKDCIGFMRWLSKKDVDHCIDCIKGKYSKQIKKGANRSMGVLEIIHTDICGPFNEKSVDGFDSFITFTDDYSRYGYIYPIKEISEALDKFKIFKAEVENQHDRKIKIVRSDRGGEYYGRHTTYGQIPGPFARFLHESGIKAQYSAPGEPQQNGVAERRNRTLMDMGCPAEARVFNPNMGKLDLKTISCHFIGYPDKSKAYRFYCPNQFTKFIETRHAVFLENDIIKGSMTPREVVLEEKRNYVPMPIIKEPVFSTHTHVAPSIERNNDATPAEAPATTSSSVSNDENNEDAQQPQIVIDEQNNEPVRKSQRVRKSAIPSDYVTCMNEDVNEPMSEEVNEPILDNDPISFKEAMKSEHSSEWLKAMKDEMKSMSTNKVWDLVEIPEAAKTVGCKWVYKTKRDPKGNIERFKARLVAKGFTQREGIDYNETFSPVSTKDSFRIIMALVAHYDLELHQMDVKTAFLNGDLYEDVYMAQPEGFVMKGKEDMGCHLKKSIYGLKQASRQWYLKFDQIIRQFGFKENKKDDCIYTKFKESKFIFLILYVDDILLASNDKNMLLETKKFLASKFEMKDLGEATYVLGIEIYRDRSNGVLGLSQKAYIEKVLKKYNMHNCSASPAPIMKCDKYEKFQCPKNEYEAAQMKSIPYASAIGSIMYAQVCARPDLAFVTGMLGRYQSNPGGAVSWKSSKQRVTASSTMQAEYVACYEATGHAIWLKNFIPGLRVVDSISKPLKLYCDNKPAVYYSSSNKSSASAKYIDIKYHVVKEMIQDQTISVEYMNTKLMLADPLTKGLPPAVFKEHVAGMGLVEKPSILE

SEQ ID NO: 19665 - protein, 1296 aa, Oryza sativa
  Clone ID: TF_OSC421895j.C1.p14.fg
MGTPGDKASYASQIAGIIGNIEQLNGSNYASWKEKLEITLAQLDIDYALHNDPPVEPIPENENYETLKRRYDEVKAKWDISNRKCLMIIKSSIIDAIRGAVPDTQTAREYLAKVEEQFKGSSKVYATTLIKRLVNERYDFTGNLREHIMKKYHMASKLKSMEMEISKGFLVHFIMSSLPQEFSPFTINYNAMKIKWGIDELIAMCVQEEERLKAERVDHANLFKHSEKKRYKKFKKEYLKPKPIQFKEKGQSSNQSQQNKSGGNPYTEEKGKEKDGCYFCGKSGHRQKDCIGFMRWLSKKGTDVISFVDESLNIDYATNSWWIDSGATIHVANSLQGFAMRRTLRRGERRIRVANGVETEVEAIGDFTLTLHTGFKLQLHDVLYVPSMKRNLVSVSRLDNGGYYCTFGNNRCIIMHDNKEVGLAVGWEQLYQISVCDATYNVDSSSNANVSTKRKHNDNETSSKLWHYRLGHISKGRIERLIKENILYPLDFSDADVDHCIDCIKGKYSKQIKKGANRSMGVLEIIHTDICGPFNEKSVDGFDSFITFTDDYSRYGYIYPIKERSEALDKFKIFKAEVENQHDRKIKIVRSDRGGEYYGRHTTYGQIPGPFARFLQESGIKAQYSAPGEPQQNGVAERRNRTLMDMVRSMLSHSTLPVKLWMEALKTATHILNRVPSKSVPKTPFELWTGKKPTLNYFHVWGCPAEAQVFNPNMGKLDLKTISCHFIGYPDKSKAYRFYCPNQFTKFIETRHAVFLENDIIKGSMTPREVVLEEKRNYVPMPIIEEPVFSTHTHVAPSIERNNDATPAEAPATTSSSVSNDENNEDAQQPQIMIDEQNNEPVRRSQRVRKSAIPSDYVTYMNEEVNEPMSEEVNEPILDNDPISFKEAMKSEHSSEWLKAMKDEMKSMSTNKVWDLVEIPEGAKTVGCKWVYKTKRDPKGNIERFKSRLVAKGFTQREGIDYNETFSPVSTKDSFRIIMALVAHYDLELHQMDVKTAFLNGKEHMGCHLKKSIYGLKQASRQWYLKFDQIIRQFGFKENKKDDCIYTKFKESKFIFLILYVDDILLASNDKNMLLETKKFLASKFEMKDLGEATYVLGIEIYRDRSNGVLGLSQKAYIEKVLKKYNMHNCSASPAPIMKGDKYGKFQCPKNEYEAALMKSIPYASAVGSIMYAQVCTRPDLAFVTGMLGRYQSNPGLEHWKLAKKTLRYLQGTKDLMLTYRKSENLEVVGYSDSDLAGCVDDKKSTSGYIFTLARGAVSWKSSKQRVTTSSTMQAEYVACYEATGQAIWLKNFIPG

SEQ ID NO: 19666 - protein, 1407 aa, Oryza sativa
  Clone ID: TF_OSC900317j.C1.p15.fg
MGTPGDQASYASQISGIMGNIEQLNGSNYASWKEKLEITLALLDIDYALHNDPPVEPRPENENYETLKRIYDEVKAKWDISNRKCLMIIKSSIIDAIRGVVPDTQTAREYLAKIEEQFKGSSKVYATTLIKRLVNERYDFTGNLREHIMKKCHMASKLKSMEMEISEGFLVHFIMSSLPQEFSSFTINYNAMKIKWGIDELIAMCVQEEERLKAERVDHANLFKHSEKKKYKKFKKEYLKHKPIQFKEKGQSSSQSQQNKSGGNPYTEEKGKEKDGCYFCGKSGHRQKDCIGFMRWLSKKGTDIISFVDESLNIDYATNSWWIDSGATFHVANSLQGFAMRRTLKRGERRIRVANGVETEVEAIGDFTLTLHTGFKLQLHDVLYVPSMKRNLVSVSRLDNDGYYCTFGNNRCIIMHDNKEVGLAVGWEQLYQISVCDATYNVDSSSNANISTKQKHNDNETSSKLWHYRLGHISRGRIERLIKENILYPLDFSDADIDHCIDCIKGKYSKQIKKGANRSMGILEIIHTDICGPFNEKSVDGFDSFITFTDDYSRYGYIYPIKERSEALDKFKIFKAEVENQHDRKIKIVRSDRGGEYYGRHTTYGQIPGPFARFLQESGIKAQYSAPGEPQQNGVAERRNRTLMDMVRSMLSHSTLPVKLWMEALKTATHILNRIPSKSVPKTPFELWTGKKPTLNYFHVWGCPAEARVFNPNMGKLDLKTISCHFIGYPDKSKAYRFYCPNQFTKFIETRHAVFLENDIIKGSMTPREVVLEEKRNYVPMPIIKEPVFSTHTHVTPSIERHNDATPAEAPATTSSSISNDENNEDAQQPQIVIDEQNNEPVRRSQRVRKSAIPSDYITYMNEEVNEPMSEEVNEPILDNDPISFKEAMKGEHSSEWLKAMKDEMKSMSTNKVWDLVEIPEGAKTVGCKWVYKTKRDPKGNIKRFKVRLVAKGFTQREGIDYNETFSPVSTKDSFRIIMALVAHYDLELHQMDVKTAFLNGDLYEDVYMAQPEGFVMKGKEHMGCYLKKSIYGLKQASRQWYLKFDQIIRQFGFKENKKDDCIYAKFKESKFIFLILYVDDILLASNNRNMLLETKKFLASKFEMKDLGEATYVLGIEIYRDRSNGVLGLSQKAYIEKVLKKYNMHNCSASPAPIMKGDKYGKFQCPKNEYEAAQMKSIPYASAVGSIMYAQVCTRPDLAFVTGMLGRYQSNPSLEHWKLAKKTLRYLQGTKDLMLTYRKSENLEVIGYSDSDLAGCVDDKKSTSGYIFTLARGAVSWKSSKQKVTASSTMQAEYVACYEATGQAIWLKNFIPGLRVVDSISKPLKLYCDNKPAVYYASSNKSSASAKYIDIKYHVVKEMIQDQTISVEYMNTKLMLADPLTKDLPPAVFKEHVAGMGLVEKPLILE

SEQ ID NO: 19667 - protein, 1313 aa, Oryza sativa
  Clone ID: TF_OSC400615j.C1.p16.fg
MASSSMAAAISNPLFGLQISEKLTKQNHPLWAAQILTTLRGAQLEEHIVSTTAAPAAEIEKEDGDKDKKTKIVIPNPEYKTWFVQDQQVLGFIFSSLSREVLQQVAGARTAAQAWNMIDDMFSCKSKAGTINVLLALTTTQKGPMSISEYIAKMRSLADEMAAAGKPLDEEELVAYIINGLDSEFDAAVEGPMATARIAPVSISHVYSQLLSYENRIRIRQAYLTTSANAANRGGGRGGRGSSTGNRGGGRGGFGRGGHGRGAPSGASQGRGRGNDTRPVCQVCHKRGHVASDCWHRYDDSYVPDEKLGGAATYAYGVDTNWYVDTGATNHITGQLDKLTTKERYKGTDQIHTASGEGMSIKHVGHAIVPTPSRPLHLKNVLHVPEAAKNLVSVHKLVADNYAFLEIHGKYFLIKDKATRRTILEGPCRRGLYPLPARLSLRQAFVATPSFERWHGRLGHLSKPIVLRILSQNKLPCLSNSVNESVCDACQQAKCHQLPFPRSTSVSNNPLELIHSDVWGPASESVGAKKYYVSFIDDYSKFVWIYFLKHKSEVFQKFHEFQKLVERQFDRKILSMQTDWGGEYLKLHTFFNEIGISHHVSCPHTHQQNGAVERKHRHIVEVGLSLLAHASMPLKFWDEAFLATTYFINRLPSKVIKFDTPLERISQKCEFRYTGGIWPGTWSKWRLGGRIRLRFSVGPGAAAAAGLRICDAGGVGAAALGHPTSARATSPAASPTAAPPSPARAVASSSGGAQQSHQPGSSAPSESAQLSEVMRPKTRLQSGIRKEKIYTDGTVRYSCFTSSGEPQTLHEALGDKNWKEAMDSEYQALMKNKTWHLVPSKKGQNIIDCKWVYKVKRKADGSLDRYKARLVAKGFKQRYGIDYEDTFSPVVKAATIRTILSIAISRGWTLRQLDVQNAFLHGVLEEDVFMRQPPGYEQKDGYVCKLDKALYGLKQAPRAWYSRLSTKLHELGFKSSKSDTSLFFYSKGDVTMFMLVYVDDIIVASSSIDATNALLKNLNQEFALKDLGRLHYFLGIEVKEVNDGIVLTQEKYAMDVLKRVNMSDCKAVNTPLSISEKLSAHEGNPLGPEDSTRYRSLVGALQYLTLTRPDLSFSVNKVCQYLHAPTTKHWAAAKRILRYLKHTVKLGLKISKSNSLLVSAFSDADWAGCLDDRRSTGGFAVFIGPNLVSWSARKQATVSRSITEAEYKALANATAEIMWIQTLLHELGIQVPKIAKVWCDNIGAKYMTANPVFHARTKHIEVDYHFVRERVARKLLQVEYISTKDQVADGFTKTLSVRQLEMFRNNLNLTGSD

SEQ ID NO: 19668 - protein, 1031 aa, Oryza sativa
  Clone ID: TF_OSC400622j.C1.p17.fg
MASFSMAAAISNPLFGLQISEKLTKQNHPLWAAQILTTLRGAQLEEHIVSTTAAPAAEIEKEDGDKDKKTKIVIPNPEYKTWFVQDQQVLGFIFSSLSREVLQQVAGARTAAQAWNMIDDMFSCKSKAGTINVLLALTTTQKGPMSISEYIAKMRSLADEMAATGKPLDEEELVAYIINGLDSEFDAAVEGLMATARIAPVSISHVYSQLLSYENRIRIRQAYLTTSANAANRGGGRGGRGSSTGNRGGRRGGFGRGGRGRGAPSGASQGRGRGNDTRPVCQVCHKRGHVASDCWHRYDDSYVPDEKLGGAATYAYGVDTNWYVDTGATDHITGQLDKLTTKERYKGTDQIHTASGEGMSIKHVGHAIVPTPSRPLHLKNVLHVPEAAKNLVSVHKLVADNYAFLEIHGKYFLIKDKATRRTILEGPCRRGLYPLPARLSLRQAFVATPSFERISQKCEFRYTGGIWPGGAQQSHQPGSSAPSESAQLSEVMRPKTRLQSGIRKEKIYTDGTVRYSCFTSSGEPQTLHEALGDKNWKEAMDSEYQALMKNKTWHRVPSKKGQNIIDCKWVYKVKRKADGSLDRYKARLVAKGFKQRYGIDYEDTFRPVVKAATIRTILSIAISRGWTLRQLDVQNAFLHGVLEEDVFMRQPPGYEQKDGYVCKLDKALYGLKQAPRAWYSRLSTKLHELGFKSSKSDTSLFFYSKGDVTIFMLVYVDDIIVASSSIVATNALLKNLNQEFALKDLGRLHYFLGIEVKEVNDGIVLTQEKYAMDVLKRVNMSDCKAVNTPLSISEKLSAHEGNPLGPEDSTRYRSLVGALQYLTLTRPDLSFSVNKVCQYLHAATTKHWVAAKRILRYLKHTVKLGLKISKSNSLLVSAFSDADWAGCLDDRRSTGGFAVFIGPNLVSWSARKQATVSRSSTEAEYKALANATAEIMWIQTLLHELGIQVPKIAKVWCDNIGAKYMTANPVFHARTKHIEVDYHFVRERVARKLLQVEYISTKDQVADGFTKTLSVRQLEMFRNNLNLTGSD

SEQ ID NO: 19669 - protein, 499 aa, Oryza sativa
  Clone ID: TF_OSC401245j.C1.p3.gm
GGGRGGFGRGGHGRGAPSGASQGRGRGNDTRPVCQVCHKRGHVASDCWHRYDDSYVPDEKLGGAATYAYGVDTNWYVDTGATDHITGQLDKLTTKERYKGTDQIHTASGEGTSIKHVGHAIVPTPSHPLHLKNVLHVPEAAKNLVSVHKLVADNYAFLEIHGKYFLIKDKATRRTILEGPCRRGLYPLPARSSLRQAFVATPSFVRVYVSRDVTFDEQVFPFANLHPNAGARLRAEISLLPPTLINEKTSDQGGEEHHDHLFNISMPNATDISCAESPRNVNSDIPGAFGRVHGANGDLAGESASDSASVQAQLQRQASGSATQGESEQQRSGIQPARATSPAASPTAAPPSPARAVASSSGGAQQSHQPGSSAPSESAQLSENAFLHGVLEEDVFMRQPPGYEQKDGYVCKLDKALYGLKQAPRACKGDVAMFMLVYVDDIIVASSSIDATNALLKNLNQEFALKDLGRLHYFLGIEVKEIGQDVWMIGILLGVLLFL

SEQ ID NO: 19670 - protein, 988 aa, Oryza sativa
  Clone ID: TF_OSC403212j.C1.p1.fg
MASSSMAAAIPNPLFGLQISEKLTKQNHPLWAAQILTTLRGAQLEEHIVSTTAAPAAEIEKEDGDKDKKTKIVIPNPEYKTWFVQDQQVLGFIFSSLSREVLQQVAGARTAAQAWNMIDDMFSCKSKAGTINVLLALTTTQKGPMSISEYIAKMRSLADEMAAAGKPLDEEELVAYIINGLDSEFDAAVEGLMATARIAPVSISHVYSQLLSYENRIRIRQAYLTTSANAANRGGGRGGRGSSTGNRGGGRGGFGRGGRGRGAPSGASQGRGRGNDTRPVCQVCHKRGHVASDCWHRYDDSYVPDEKLGGAATYATLDKLTTKERYKGTDQIHTASGEGMSIKHVGHAIVPTPSRPLHLKNVLHVPEAAKNLVSVHKLVADNYAFLEIHGKYFLIKDKATRRTILEGPCRRGLYPLPARSSLRQAFVATPSFVRWHGRLGHPSKPIVLRILSQNKLPCLSNSVNESVCDACQQAKCHQLPFPRSTSVSNNPLELIHSDVWGPASESVGAKKYYVSFIDDYSKFVWIYFLKHKSEVFQKFHEFQKLVEWQFDRKILSMQTDWGGEYLKLHTFFNEIGISHHVSCPHTHQQNGAVERKHRHIVEVGLSLLAHASMPLKFWDEDFLAATYLINRLPNIPGAFGPVHGANGDLAGESASDSSSVQAQLQRQASGSATQGESEQQRSGIQPARATLPAASPTAAPPSPARAVASSSGGAQQSHQPGSSAPSESAQLSEVMRPKTRLQSGIRKEKIYTDGTVRYSCFTSSGEPQTLHEALGDKNWKEAMDSEYQALMKNKTWHLVPSKKGQNIIDCKWVYKVKQKADGSLDRYKARLVAKGFKQRYGIDYEDTFSPVVKAATIRTILSIAISRGWTLRQLDVQNAFLHGVLEEDVFMRQPPGYEQKDGYVCKLDKALYGLKQAPRAWYSRLSTKLHELGFKSSKSDTSLFFYKKLSAHEGNPLGPEDSTRYRSLVGALQYLTLTRPDLSFSVNK

SEQ ID NO: 19671 - protein, 961 aa, Oryza sativa
  Clone ID: TF_OSC416267j.C1.p3.np
MASSSSAVVISNPLFGIQILEKFTKQNHSLWSAQILTTLRGAQLEGYITGTAEAPAAECEKEDGDKKVKTTISNPEYIKWFTQDQQVLGFLFSSLSREVLQQVAGAKTAAQAWSMINDMFTCKSKAGAINVLLALTTTQKGPISISEYIAKMRSLGDEMAGAGKPLDDEELIAYIINGLNSDFDATVEGLMATARIAPLSISHVYSQLLSYENRIRIRQAYLTTSANAANRGGRGGRGGNRGGRSSAPHGGRGGGRGNTGGANPGRGRGNDTRPVCQVCHKRGHVASDCWHRYDENYGPDEKLGGAATYAYGVDTNWYVDTRATDHITGQLDKLTTREKYKGTDLIHTVSGEGAKKYYVSFIDDYNKFVWIYFLKHKYEVFQKFHKFQKLFERQFDRKILAMQTDWGGEYVNNLHKGFKCLDVSSGRVYVSHDVTFDEQVFPFATLHPNAGARLRAEISLLPSNLMNNTLDQGGEEQYDQMFNIHVPNATDDACIAVESYDRNSAENCNGNERSGECGCYAQPGARSAGGFGGRIPLGRGLAAALSCASDAFADGRPVRSIPLGRGLAAALSCASDAFADGRPVRSWHVACRQLSPLAQQHHHVPRAGRAAVPSTWIICANGGRTTGYSCFTSSGEPYSCFTSSGEPQTLDEALGDKHWKEAMDSEYHAVMKNKTWHLVPPKRGLNVIDCKWVYKIKRKADGSLDRYKARLVAKGFKQRYGIDYEDTFSPIVKAATIRTILSIAVSRGWTLRQLDVQNAFFHGILEEEFYMRQLPGYEQDDIIIASSSNSATDTLLKNLNQEFALKDLGELHYFLGIELSAHEGTPLGPVDSTRYRNLVGALQYLTLTRPDLSFSVNKVCQYLHAPTTEHWAVAKRILRYLKHTVKLGLKISKSNSLLVSAFSDADWAGCLDDRLSTGGFAVFIGPNLVSWSARKQATVSSSSTEAEYKALANATAKIMWI

SEQ ID NO: 19672 - protein, 1007 aa, Oryza sativa
  Clone ID: TF_OSC900055j.C1.p8.gm
MHIPAGVVALKKREFRALNQGSRSVTEYLHDFNRLARYAPEDVRTDEERQEKFLEGLNDELSYALMSTDFRDFQQLVDKAIRQEDKYNRMEQKKRRAAQFKAQQGSNQRLRLVVGPQAPPYPQGGSSSVVRPQRQFYNNNTGNRGNDNRNMVARHVATPVQNQPVRKEQGSKPGVCLNCGDPGHYDDKCPKPRRVKNVPAPNNSNAPAPKARVNHVAAAEAQSAPDVVLANELAEVKRQVDDLLQKGYIRPCTSPWGAPVIFVEKKDHTQRMCVDYRALNEVTIKNKYPLPRIDDLFDQLEGATVFSKIDLRSGYHQLRIREEDIPKTAFTTRYGLFECTVMSFGLTNAPAFFMNLMNKVFMEYLDKFVVVFIDDILIYSKTKEEHEEHLRLALEKLREHQLYAKFSKCEFWLSEVKFLGHVISSGGVAVDPSNVESVLSWKQPKTVSEIRSFLGLAGYYRRFIENFSKIARPMTRLLQKEVKYKWTEDYYDMEIHYHPGKANVVADALRRKSYCNMSEGRRLPWELCQEFEKLNLGIVSNGFVAALEAKPTLFDQVREAQVNDPDILEIKKNMRRGKAIGFVEDEQGTVWLGERICVPDNKELKDTIMKEAHETLYSIHPGSTKMYQDLKQQFWWASMRREIAEYVALCDVCQRVKAEHQKPAGLLQPLKIPEWKWEEIGMDFITGLPRTSAGHDSIWIVVDRLTKVAHFIPVKTTYTGNKLAELYMARVLKKCLRVPTEEADPDRIELQEDLTYAEKPVRILEVRTEVRKLGRISFVAAGRRSSLPTVSSNHPADRPSSGEVANPSRPVMDDVMLTRAAVPVPLLPLPCAVLAAPPLHRCSLRRYCHCCAAALPRRLPPCCAGRFALPRHATTPLSRCAVRCLVAPLLHAAAMSRTTIALSPLPPCRCVSPCHSHAAAAVCRRSATTPLAAKRNRAAALASPLPCRTTKLCRHLAEPCCSLALLAGSAEPLLPLGSRLAESRLSRCRCRVSKHDFGNIKGVAHKT

SEQ ID NO: 19673 - protein, 1339 aa, Oryza sativa
  Clone ID: TF_OSC401126j.C1.p15.fg
MASKENRSEAMVSGADGINQGENLDPIGEGLDDHHGNLDQGLSSAMVLFKKKLTDGEEEDDDVLDVDLGEEVEEMKSKWLIIARFYSGQRERLGSLGDNRFLVEFACEADYNRVVYGGPWKHKGDALLVVPYDGLARPSEICIESLPLWLRIYDLPEIMMTTGFARSLGGKIGEVLEVGGAIHDFLRVKVAFPLSSPLKPLLRIWIKDKGVMSFPVKYENVPFFCFSCGRIGHAERECPEVGSSSAQVRFGKELRASPLKRKLQSFAPSSISTPKAAKVLNFSGAQREKVLTASSSSKASVLSNPKLNSGGATMFLVGEKADQEEKAASVEAEASLYPLPKGITAALEEGVSQMKMQLDDGELNLAARGPCSRERVSMSSDYGLSGEETPQHSAGIVSGVVNQDVKSPGGQSKKKQWVPTRETDRAVKAKSLSIGRDIGKPRKITVRLSADAVEARNCMQIREQLPWWALTASPTRNNECSSLELVRLVRMYSPRLVFLSATRQDQERVQGLRWRLGLKNCLALKGEGSGGGVALIWDETLSVHLLSMSCRSDHCPILLRVEREKYRPVKCFRYEIMWEREDSLGEAIKLAWEQEGTALNLGEWSVRVFGSVSQEIKEIKAKVEELSSLDPINHDGEIRKLYARLDELLYREEMMWLQRSRVSWLKEGDRNTKFFHRQAAWRAKKNKINCLKDEDSRYVENKGDMEKLTRDFFQKLYARDEGVDPGELVDLFDVRVDATEGLSTILNHEVVAGRLEELKVCRRAPGVSHLLFADDSLLFVKACPQQVESATFESNYLGLPTLEGRMTADKFKTIKERLIKRLNSWAEKFMSSGAKDILIKFVAQAIPTYVMGVFKLSVSSCEAYTKLVRDFWWGDEEDKRKVHWTAWDNLVLPKCMGGLGFRDVRIFNQALLGRQAWRLIQFPESLCARILKAKYFPNCDLIDAVFPADTSQTWKGIEHGPQLLKEGLIWRIADGKRVKFWKDRWIPRESSFRVSGMKSRCRLRWASQFIIPEGNCWDEQLIRRVCHPFDADEMLKIKLPQFPTDDFLAWHFEKYGMYTVRSGYRAALMKQINTDCVSFSSANSDWLLILLDRLSPEERAKLLLVLWSSWFLRNDSLFGSGSSTVHGSVLFLQSLWESISTTKVNPVTDIKGKGPQMGTKSATTVARSSPSDLVRWEAPPQGWAKINVDGAFVQQIGEAGTGIVIRDHVGDVLLTSWNGIRSCQSPEEAEAQACRDGLRLAADWIQMPVILESDCANVVASLTSGAKNRSPLWQVFQEIKSILPLLPAFKFNRINRGANEVAHCLSQLARRLKQSSVWRICAPECVKESLAKDCIPPNL

SEQ ID NO: 19674 - protein, 1393 aa, Oryza sativa
  Clone ID: TF_OSC401339j.C1.p46.fg
MAGTSSSSNTSTGGYSLMGCIKDIPTLKGDNYAEWKRKLDLAFILGEVDWVLTTPCPIEPAELVRGENESDADWQKRQRDNAPLVMSYDIEQKKWSLANKKCLAVVKNTIEPTILGSIPECDAVSEYLERIKSQFTGSSKTYATQLIKQLVTERYHGGGVRDHILRMSNMASKLKPMDLGITDDFLVHLVMASLPKQFDNFIVNYNISPEKWNFEKLIANCVQEEERIKESNGGSINYVKDKKKNHKSPTSKGKQSQHLPQQQQFAVEKDQCLHCKKTGHYKKDCSDFLKMIMAMKGENIITFVNESHYVGYSRSTWWIDSGATIHACNCLKAFRSTRTTQRRESTIRVANGVEEKVEAVGDLPLELANGFILLLRDVFYVPSLQRNLISVSKLDFDGYDCRFGSGKCELWHNNACIGLAVLRDELYLLSLSENVNVVSSLTKENKKRKRTPDVSSKLWHCRLGHISRGRIERLVKNEILPPLEFSDLEQCIECIKGKFVKSIKKGAKRSAGILEIIHTDICGPFPVKSVDGYDSFITFTDDYSRYGYIYPIKERSEALDKFKIFKAEVENQHDIKIKVVRSDRGGEYYGRHTPYGQVPGPFARFLLENGIVAQYSTPGEPQQNGVAERRNRTLMDMVRSMMSYSTLPLGLWMEALKTAIHILNRVPSKSVPKTPYELWTGRVPSLTHLRVWGSPTEAKVFNPNIGKLDPKTVSCHFIGYPERSKGYRFYCPNSYTKFVETRHAVFLEDEMIRGSSVVREIDLEERRVSVPAPSTQEPFFSLPADVVPAMPVIEVPAPVVTPPVATMNESEEPVIQDSTEMVATPEEELQQPQIDNVPVQETHQEPQVQDVPNVQAPRRSERVRRSAIRDDYKVYNIEESHMEDDPTSYEEAMRSARSSEWLEAMKDEMKSMKLNDVWDLEEIPKGAKTVGCKWVYKTKYDSRGNIEKFKARLVAKGFTQREGIDYNETFSPVSCKDSFRIIMALVAHYDLELHQMDVKTAFLNGDLEEKVYMAQPKGFVMKGNENMGCRLKRSIYGLKQASRQWYLKFDGTIKKFGFQENVEDNCIYSKFKNGRFIFLILYVDDILLASSDVSLLQETKKFLSSNFDMKDLGEASYVLGIEIHRDRTKKVLKKFNMYRCSATPAPIMKGEKYGASQCPRNQYELNEMKTKPYASAVGSLQCAQVCTRPDLAFVTGLLGRFQSNPGLEHWKLVKKVLRYLQGTKGLMLSYRRSESLQIVGYSDSDFAKDNTKSTSGYVFTLAGGAISWKSSKQTITAGSTMYAEFIACYEATGQVNWLKKFIPGLKVVDSIEKPLKLYCDNEPAVMYAHNNQSSGVAKHIDIKYYVVKDKVRDQTISLEHIKTERMLADPLTKGLPPNVFKEHVAGMGLREAL

SEQ ID NO: 19675 - protein, 990 aa, Oryza sativa
  Clone ID: TF_OSC401835j.C1.p5.gm
MVKTRNGSRVSNDASGSEEQISGARASDASNSSSSPPPKNPTIAQQQQQQNLRFGPPPPQSKLLDFLRVKPPTFSSTTNPIEANDWLHAIEKKLNLLQCNDQEKVALATHQLQGPAFVWWDNYMVTGPAGTEREFRSLQQGTRTVIEYLHEFNRLARYAPEDVRTDAERLEKFLSGLDDELTNQLISRDYEDFQKLGNSQKSRFMTGHQGGPSTMIIRQHRPYHPVQPAQPTQPEQPKRFGEKPELCFNCNELGHMVGSCPKPRRSGLKFVQARVNHASAEVAQSAPEVILGTFPINSTPAVILFDSGVTHSFISKRFAGAHGLSLVKLKIPMRVYTPRGGMTRTHYCPSVIVEIQGLIFPANLILLESKDFDVILGMDWLTRHIGVIDCASRTIKLTNAKGEVVTFQSLVPQKQGISLNQSTGEEQEEAVEKTTKKLEDIPIVREYPEVFPDDLTTIPPKRDIEFRIDLVPRTAPIHKRPYRMGANELADVKKQVDEQLQKGYICLSTSPWGAPVIFVEKKDKTKRMCVDYRALNEVTIKNKYPLPRIYDLFDQFKGATVFSKIDLRSGYHQLRIREEDIPKTAFITWYGLFKCIVMSFGLTNAPAFFMNLMNKVFIEFLDKFVVVFTDDILIYSKSEEEHEQHLRLVLEKLKEHQLYAKFSKCDFWLKKVQFLGHVVSAQGVAVDPANVESVTKWTPPRTVSQIRSFLGLAGYYSRFIENFSKIAMPMTQLLKKEEKFIWSAECNRSFEELKRRLVSAPVLILPDQTKDFQVYCDASRQGLGCNYPTHDLELAAVVHALKIWRHYLIGNRCEDYDMGIHYHPGKANVVADALSRKSYCNVAWIEELCCEKLIKLSMPFILAVPKCTKTSNKSSGGGEVAYQLELPSSMLGIHNVFHVSQLKKCLRVPEEQTSPYYIEIQEDLTYVEKPTRILETSVPHLLVVSYLRQLEPEPQPPAPPPFPPIRAPTPPAPRAHVAALSPRLLPPARA

SEQ ID NO: 19676 - protein, 310 aa, Oryza sativa
  Clone ID: TF_OSC27006j.C1.p1.fg
MADKFSTKPHVFNGVDFPYCVTSKNGNEIWNALRNFHQRTSNIKELRKDIFKKDYIKLEKKSEEALDDYLARFNKILSNLRSVDSSYDVNYSQFEVSRHFLNGLDMSIWEMKVTSIQESVDMFCLTLDSLYTKLKTHEMNILSQKVDSKSSALVSSLDLGASSSNSVSLYSINALSDDQLESFEEEDLALAINKLSRAMNNVRLKKRGGRIRCFECGELDHIRSHCPKLGRDKKDDNGVKTKDNKPVTTFKGRRSKEALKKVLNQVYAAFEPASNGDIKSDEDKDKEEYISDFCFMAHGESESEIEDNEF

SEQ ID NO: 19677 - protein, 1278 aa, Oryza sativa
  unsure (1)..(1278): unsure at all Xaa locations
  Clone ID: TF_OSC400675j.C1.p35.np
MPWTGCMPLGKSWTPSNAMMRRKLSSQPINQGPASLWWDHFQATQPEGQPITWARFTAAFRRTHVPAGVMALKKREFWELKQGNRSVMEHLHEFNNLARYAPEDVREDEEKQEKFLAGMDPELSVRLVSGDYPDFQRLVDKSIRLEAKHKELESHKRRLANFRNQQGANQRIRYTNPYPRILLTAAAAATSPRATTSICGTRPIVAATAESAREPCTPSPAPAVQPGQGRRDVQGQQRLCFNCFEPRHFADKCPKPRSQQGQAPPRPNNGGKDATRGRVNHITAENVLTTPDVIVGMFFIHSIPATILFDSGASHSFISVQFVGRNQLGVERRNSLLITTPGGAMTAKYYSPVVPIEIQGIPFPLDLILLDTKDLDVILKMNWLTQFQGVVDCARRTVTVYQKPDQPVVFFAHPTPTGSSVLHQLGLSEIPVVSEFGMPPKREIEFRIDLAPGTTPLYKRPYRMAANELAKVKKQLEELKEKGYIRPSTSPWGAPVTFVEKKDKTKRMCVDYRALNEVTIKNKYPLPQIDDLFDQLKGATVFSKIDLRSGYHQLRIREEDIPKTAFTTRYGLYEFTVMSFGLTNAPAFFMNLMNKVFMEYLDKFVVVFIDDILVYSQSEEDHQQHLRLVLXKLREHXLYAKLSKCEFWLSEVKFLGHVISAKGVAVDPETVTAVTDLKQPKSLLKLLKKEEKFVWSPQCERAFQTLKERLVSSLVLILPDTRKDFLVYCDASRQGLGCVLMQEGHVVAYASRQLRPHEGNYPTHDLELTAVVHALKIWRRYLIGNHCEIYTDHKSLKYIFTQPDLNLRLRRWLELIKDYDVGIHYHPSKANVVADALSRKGHCSTLCVRGIPPELNQQLEALNLSVVSHGFLAALEAKPTLLDQIREAQKNYPDMHGILKNMKQGKAAGFMEDEHGTLWNGNTKMYLDMKEKYWWVSMKREITEFVALCEVCQHVKAEHQRPAGLLQPLQVPEWKWDEIGMDFITGLPKTQGGYDSIWVVVDRLTKVARFIPVKTTYGGNKLDELYFARITWDKSLPYAEFSYNNSYRASIQMAPYEALYGRKCRTPLLWDQVGESQVFGTDILREAEAKVRTIRDNLKVAQSRQKSYADNRRRDLEFAVHDFVYLQVTPLQGVHRFQTKGKLAPRYVGPFRIIARRREVAYQLELPASLGNVHDVFHVLQLKKCLRVPSEQADSVQIEVREDLTYVEKPVKILDTMECRTWNRVIRFCKVLWSNHAKEEATWQPIPTSSSVLLNLRVEIPFKGVGLSRPKTTLKYNL

SEQ ID NO: 19678 - protein, 1050 aa, Oryza sativa
  Clone ID: TF_OSC400676j.C1.p11.gm
MVKTRNDPRDSNDASGSEEQTDGAHTSGASSSSPSPPPENPMVTQMMTMMMQQMQQHYHQMLQQAQQNQQFGPPPSHLSKLLDFLRIKPPTFSSTTNPMEANDRLRAIEKKLNLLQCNDQEKVAFSTHQLQGPASACLTVHGGPGAPGLTPADAVGPTRQPHQRARAADGRAPRGSRSVRPKAATAARPAGGGAPAPPMVAGGGHRHGGAAAERREGKGETRRRSTAHPRSTATTKRRPERRKAAARLGSTGTAALQRSTSETERWTRSARMRRSRRRRRRGGRWSGATTAADRSSAATAERESDGASSILARRKGGERRKRMEEVRGGVVLGRDKFRALQQGTMSVTEYMHEFNRLARYAPEDVRTDAEKQERFLFGLDDELTNQLISGVYDDFEKLVDKAIRQEEQRNKMDRKRKAAQISFPQGNNQKPRFMTGQLGEPSTLIVRQHRPYHSSNFNNDYNSGCHGSSKQHNHNSTPPPLMAPTQSDPPAMSAQSEQLKKESAGKPRPCFNCGKHGHFAGKYPKPKRAGPRFVQACVNHASAEEAQAAPEVVLGTFPVNSFPATVLFDSGASHSFISKRIAGTHGLSVVELKILMRVHTPGNDMNTTHYCPSVTIEIKRSPFLSNLILLESKDLDVILGMDWLTRHKGVIDCASRTITLTNDKGEKITFRSPVPQKSVASLNQATIEDQTEIAEKNPKKLEDIPIVQEYPEVFLEDLTTMPPKREIEFRIDLAPGTAAIYKRSYRMAANELAEVKKQVDEQLQKGYIQPSISPWGAPVIFVEKKDKTKRMCVDYHALNEVTIKNKYPLPRIDDLFDQLKGAKVFSKIDLRSGYHQLRIREEDIPKTAFTTRYGLFECTVMSFGLTNAPAFFMNLMNKVFMEFLDKFVVVFIDDILIYSKSEEEHEQHLRLVLEKLKEHQLYAKFSKCDFWLSEVKFLGHVITAQGVAVDPSNVEPMTQLLKKDEKFKWSVECNQSFEELKKKLVSAPVLILPDQTKDFQVYCDASRQGLGLVHALKIWRHYLIGNRCEVYTDHKSLKYIFTQPDLNIRQ

SEQ ID NO: 19679 - protein, 1249 aa, Oryza sativa
  Clone ID: TF_OSC409253j.C1.p1.fg
MSVTEYMHEFNRLARYAPEDVRTDAEKQERFLFGLDDELTNQLISGVYDDFEKLVDKAIRQEEQRNKMDRKRKAAQISFPQGNNQKPRFMTGQLGEPSTLIVRQHRPYHSSNFNNDYNSGCHGSSKQHNHNSTPPPLMAPTQSDPPAMSAQSEQLKKESAGKPRPCFNCGKHGHFAGKYPKPKRAGPRFVQACVNHASAEEAQAAPEVVLGTFPVNSFPATVLFDSGASHSFISKRIAGTHGLSVVELKILMRVHTPGNDMNTTHYCPSVTIEIKRSPFLSNLILLESKDLDVILGMDWLTRHKGVIDCASRTITLTNDKGEKITFRSPVPQKSVASLNQATIEDQTEIAEKNPKKLEDIPIVQEYPEVFLEDLTTMPPKREIEFRIDLAPGTAAIYKRSYRMAANELAEVKKQVDEQLQKGYIQPSISPWGAPVIFVEKKDKTKRMCVDYHALNEVTIKNKYPLPRIDDLFDQLKGAKVFSKIDLRSGYHQLRIREEDIPKTAFTTRYGLFECTVMSFGLTNAPAFFMNLMNKVFMEFLDKFVVVFIDDILIYSKSEEEHEQHLRLVLEKLKEHQLYAKFSKCDFWLSEVKFLGHVITAQGVAVDPSNVESVTKWTPPKTVSQIRSFLGLAGYYRRFIENFSKIARPMTQLLKKDEKFKWSVECNQSFEELKKKLVSAPVLILPDQTKDFQVYCDASRQGLGCVLMQEGRVVAYASRQLRPHESNYPTHDLELAAVVHALKIWRHYLIGNRCEVYTDHKSLKWLELIKDYDIGIHYHAGKANVVADAFSRKSHCNTVYTEGMCDKLQQDLEHLNLGIVEHGYVAALEARPTLVDQVRDAQVNDPEIAELKKNMRIGKARDFHEDGHGTIWLGERLCVPDDKELKDLILTEAHQTQYSIHPGSTKMYQDLKEKFWWASMRREIAEFVALCDVCQRVKAEHQRPAGLLQPLQIPEWKWEEIGMDFITGLPRTSSRHDSIWVVVDRLTKVAHFIPVHTTYTGKRLAELYLARIMCLHGVPKKIVSDRGSQFTSKFWQKLQEELGTHLNFSIAYHPQTNGQTERVNQILEDMLRACALDFGGAWDKSLPYAEFSYNNSYQASLQMAPFEALSGWKCRTSLFWDQTGERQLFGTEVLTEAEEKVRTIRERLRIAQSRQKSYADNRRRELIFEAGDYVYLRITPLRGVHRFQTKGKLAPRFVGPYRILERRGEVAYHLELPSNMAGIHDVFHVSQLKKCLRVPEEQASSEHIDI

SEQ ID NO: 19680 - protein, 671 aa, Oryza sativa
  Clone ID: TF_OSC412908j.C1.p19.fg
MANKTVREFVALSADNVAIGPQINMGDVDFDPKSSLIMMAQASPFCSKPNEDANAYLQQFLEICNTYTMKGVSPYAVRLRLFPFSLLGEAKLWFYANRPTINTWDKCSTAFLSKFFLMGKTNALRGRISSFQHTRDESIPEAWEQLQEYVAACPHHGMDDWLILQNFYNGLTPMSRDHLDAAAGGAFFSKTRGIHTVKETEILVAKLDLFMKRLDDHEKRPQGTIKALDSHITCEDCGSMGHSGNDCPETREEVMYMGNNNNNEYRPQGGQGWNQPLPYYQGATLVPTNESGRIPGQPESSVENVKVITMRGRKSTRDPPYPNPAGTSSITKEAPYSNSADEKVQPEKTMPQEYRDTRLLPFPQRNKKPSVDEQFARFVEVIQKIHINVPLLDAMQVPTYARYLNDILNNKRPFPTTEVVKLTEHCSNVILHKFLEKKKDPGCPTITCSIGTQQFDQALCDLGASVSVMPKDVFDKLNFTVLAATPMRLQLADSSVRYPAGIAEDVPVKIRDFFFLVDFVVLDMDTEKETPLILGRPFLSTAEDNNDMGMGSIRFRINGKQEKFEFQPRTKQCSMVRINYGPNQQNIQMVEVEPPKTDSLVKFMRNFLEKETTFPRNRYWKTPVKSSTPAKKLEQLAQRKPSPSPKPKRVWKEKPKTPTPSPPETGGKSAN

SEQ ID NO: 19681 - protein, 1121 aa, Oryza sativa
  Clone ID: TF_OSC6630j.C1.p3.fg
MAASGSVSCRLEDVTLHEFNNLARYAPEDVREDEEKQEKFLAGMDPELSVRLVSGDYPDFQRLSQQQQNQQGNRAPRPLAPAVQPGQGRRDVQGQQRLCFNCFEPRHFADKCPKPRSQQGQAPPRPNNGGKDATRGRVNHITAENVLTTPDVIVGAMTAKYYSPVVPIEIQGIPFPLDLILLDTKDLDVILKMNWLTQFQGVVDCARRTVTVYQKPDQPVVFFAHPTPTGSSVLHQLGLSEIPVVSEFGMPPKREIEFRIDLAPGTTPLYKRPYRMAANELAKVKKQLEELKEKGYIRPSTSPWGAPVTFVEKKDKTKRMCVDYRALNEVTIKNKYPLPQIDDLFDQLKGATVFSKIDLRSGYHQLRIREEDIPKTAFTTRYGLYEFTVMSFGLTNAPAFFMNLMNKVFMEYLDKFVVVFIDDILVYSQSEEDHQQHLRLLSKCEFWLSEVKFLGHVISAKGVAVDPETVTAVTDLKQPKSVTQVRSFLGLAGYYRRFIKNFSKISRPMTQLLKKEEKFVWSPQCERAFQTLKESYDPMKATILPMILELTAVVHALKIWRRYLIGNHCEIYTDHKSLKYIFTQPDLNLRLRRWLELIKDYDVGIHYHPSKANVVADALSRKGHCSTLCVRGIPPELNQQLEALNLSVVSHGFLAALEAKPTLLDQIREAQKNYPDMHGILKNMKQGKAAGFMEDEHGTLWNGNRVCVPDNKEFKQLILQGAHESPYSIHPGSTKMYLDMKEKYWWVSMKREITEFVALCEVCQHVKAEHQRPAGLLQPLQVPEWKWDEIGMDFITGLPKTQGGYDSIWVVVDRLTKVARFIPVKTTYGGNKLDELYFARIVSLHGVPKKIVSDRGSQFTSHFWKKLQEELGTRLNFSTTYHPQADGQTERLNQVLEDMLRACVLDFGKTWDKSLPYAEFSYNNSYRASIQMAPYEALYGRKCRTPLLWDQVGESQVFGTDILREAEAKVRTIRDNLKVAQSRQKSYADNRRRDLEFAVHDFVYLQVTPLQGVHRFQTKGKLAPRYVGPFRIIARRREVAYQLELPASLGNVHDVFHVLQLKKCLRVPSEQADSVQIEVREDLTYVEKPVKILDTMECRTWNRVIRFCKVLWSNHAKEEAT

SEQ ID NO: 19682 - protein, 1299 aa, Oryza sativa
  Clone ID: TF_OSC7844j.C1.p2.fg
MAATEERPGPKAAAGAARVDGVDGVRRVGDGNGEVDEVGEDAANPKKAAPRVVLGRDKFRALQQGTMSVTEYMHEFNRLARYAPEDVRTDAEKQERFLFGLDDELTNQLISGVYDDFEKLVDKAIRQEEQRNKMDRKRKAAQISFPQGNNQKPRFMTGQLGEPSTLIVRQHRPYHSSNFNNDYNSGCHGSSKQHNHNSTPPPLMAPTQSDPPAMSAQSEQLKKESAGKPRPCFNCGKHGHFAGKYPKPKRAGPRFVQACVNHASAEEAQAAPEVVLGTFPVNSFPATVLFDSGASHSFISKRIAGTHGLSVVELKILMRVHTPGNDMNTTHYCPSVTIEIKRSPFLSNLILLESKDLDVILGMDWLTRHKGVIDCASRTITLTNDKGEKITFRSPVPQKSVASLNQATIEDQTEIAEKNPKKLEDIPIVQEYPEVFLEDLTTMPPKREIEFRIDLAPGTAAIYKRSYRMAANELAEVKKQVDEQLQKGYIQPSISPWGAPVIFVEKKDKTKRMCVDYHALNEVTIKNKYPLPRIDDLFDQLKGAKVFSKIDLRSGYHQLRIREEDIPKTAFTTRYGLFECTVMSFGLTNAPAFFMNLMNKVFMEFLDKFVVVFIDDILIYSKSEEEHEQHLRLVLEKLKEHQLYAKFSKCDFWLSEVKFLGHVITAQGVAVDPSNVESVTKWTPPKTVSQIRSFLGLAGYYRRFIENFSKIARPMTQLLKKDEKFKWSVECNQSFEELKKKLVSAPVLILPDQTKDFQEGRVVAYASRQLRPHESNYPTHDLELAAVVHALKIWRHYLIGNRCEVYTDHKSLKWLELIKDYDIGIHYHAGKANVVADAFSRKSHCNTVYTEGMCDKLQQDLEHLNLGIVEHGYVAALEARPTLVDQVRDAQVNDPEIAELKKNMRIGKARDFHEDGHGTIWLGERLCVPDDKELKDLILTEAHQTQYSIHPGSTKMYQDLKEKFWWASMRREIAEFVALCDVCQRVKAEHQRPAGLLQPLQIPEWKWEEIGMDFITGLPRTSSRHDSIWVVVDRLTKVAHFIPVHTTYTGKRLAELYLARIMCLHGVPKKIVSDRGSQFTSKFWQKLQEELGTHLNFSIAYHPQTNGQTERVNQILEDMLRACALDFGGAWDKSLPYAEFSYNNSYQASLQMAPFEALSGWKCRTSLFWDQTGERQLFGTEVLTEAEEKVRTIRERLRIAQSRQKSYADNRRRELIFEAGDYVYLRITPLRGVHRFQTKGKLAPRFVGPYRILERRGEVAYHLELPSNMAGIHDVFHVSQLKKCLRVPEEQASSEHIDI

SEQ ID NO: 19683 - protein, 685 aa, Oryza sativa
  unsure (1)..(685): unsure at all Xaa locations
  Clone ID: TF_OSC24811j.C1.p2.np
GQTGGIAAVRPAGTRRSDRRRQESAVGVFGGSTDRSTSVRPTFIRQSDRLNYFGQTAIHRFRGVFVMATPARFSTKPHVFDGTDFTHWCSRMQSYIMAKDYDIWRKVSHAYVIPEVINTAAEKTAFEQNCKARNIFLSGISRSHYDRVAHLETAHEIWNALKNFHQGTNNIKELRRDLFKKEYIKFEMKHGEALDDYLSRFNKILSDLRSVDSSYDVNYPQSEISCHFLNGLDMSIWEMKVTSIQESVNMSTLTLDSLYTKLKTHEMNILSRKVDSKSSALIEEEDLALVANRIAXAMNNARNRKRGGPNRCFECGSIDHLRSHCPKLGRGKREGKDGEKTNNNKPNNYKSKGSNQGRKMENLRKAFQQVCAAFEPLSDVDGESGDDDKGKNVSDVCFMARGESDTEYEDNEVSAFEEAINILSAKNKKCEKMYKKQEFIIKSLKSEIDRLKSLIPNDDDCENCVGARSGEILIKPDTNKTVFKSAGIMSTMSASSSKSNVVHAKPPVSACVAKSSSSNNVSKQREKYTCSFCGKDGHIVDFCFRLAHKQKKEREIAFAKSKKPVRPQWVPRSDWRPVRPAEQPRSTGHKSKKPVRPQWVPRSDWRPVRPAEQPRSTGHRSDRRYRGGQTGPRSDRHCTSALVARKENVWIVDSGCSWHMTGDKDWFSSLKKASKTESIVFADAS

SEQ ID NO: 19684 - protein, 901 aa, Oryza sativa
  Clone ID: TF_OSC400261j.C1.p3.fg
MTGFDLPENFQENPEVFFRSVKPRVVPPQKTLPTKKPAVPAPPTFKTMADKTLREFAAPSSENVATGPQLNMGDVDFDLKSSLITMAQASPFCGKPNEDANAHMQWFLEICSTYTVKGVSPDVVRLRLFPFSLLGKAKQWFYANRAVINTWDKCSIVFLSKFFPMGKTNALRGRISSFQQTRDESIPEAWERLQELDEHEKKPQGTVKALDSHVTCEVCGNTGHSGNDCPKTHEEVMYMGNNNNNNNGYHPQGAKTTDALNKKMAANDKILENINVKLDGFASAFQNQLSFNKMIETQLAQLAALVLANETGRIPGQPKPSIENVKVITTRGGHPQQQATTTNNRGGQADGGMQQRDPPQTPGEEEGSEGSEKFDLALCDLGASVSVMPKDVFDKLNFTVLTPTPMRLQLADSSVHYLAGIAEDVPVKIRDCFIPVDFVVLDIDTGKETPLILGRPFLSTAEANIDVGTGSIRFRINGKEEKFEFQPRTEQCSMFRIKMRSRYWKTPVKPKTPAKKEEKLAQKKPPPIPRTKKSLTQASHQPVANPPCVFELLYPNESEQMNLQAYHMLKDREFGHTRAYDPELLRKTGDLRPIRGDELIIMFAKVRKTKVAPVKYMIRQWLESIKYNAPVECTSLITRIANGHGVITTDQIEYIFTVHPYVDETYLMQGHILKHGADGSLIYFFPCTNEIPLPNAGYHLYNCQELTIPLQTIEESRAGTSYRETRNKPRQKHEESSSSTPMQMYEADWEPTGDAPGWTQAPRHNTGGMPCLIPTKLHILNLRVGINKVTLGKVKQCLAGIRCKEIPTRTVGRRRRRHEENLHARLGDEVGRRGNLIYAGSDDQSRQRAKTQQLRSADEAARWEIPRCGRKKQRLATGSQTQRSEGAACRRPPLSSSLTRA

SEQ ID NO: 19685 - protein, 1453 aa, Oryza sativa
  Clone ID: TF_OSC400993j.C1.p54.gm
MVKTRNDPHDSNDASGSEEQTDGAHVSGASGSRSSPPPENPTVTQMMTMMMQQMQQHYHQMLQQAQQNQQFGPPPSHVSKLLDFLRIQPPTFSSTTNPMEANDWLRAIEKKLNLLQCNDQEKVAFATHQLQGPASAWWDNYVATRLDATEVTWAEFCQSFRKAQIPEGIMAQQKREFRALQQGTMSVTEYLHEFNRLARYAPEDVRTDAEKQEKFLFGLDDELTNQLISGVYEDFEKLVDKAIRQEEQRNKMDRKRKAAQISFPQGNNQKPRLMTGQLGGPSTLIVCQHRPYHPSNFDNDYNGGSHNNKQPKKGAVGKPGPCFNCGKHGHFVGKCPKLNRTGPRFIQARANHVSAEEAQAAPEVVLGTFPVNSYPATVLFDSGASHSFISKRFAGTHGLSVVELKIPMKVHTPGNDMRTAHYCPSVTIEIKRSPFLSNLILLESKDLDVILGMDWLTRNKGVIDCASRTITLTNDKGEKITFRSPASQKSVASLNQAAIEGQTETVEKSPRKLEDIPIVQEYPEVFPEDLTTMPPKRKIEFRIDLAPGTAPIYKRPYRMAANELAEVKKQVDEQLQKGYIRPSTSPWGAPVIFVEKKDKTKRMCVDYRALNEVTIKNKYPLPRIDDLFDQLKGAKVFSKIDLRSGYHQLRIREEDIPKTAFTTRYGLFECTVMSFGLTNAPAFFMNLMNKVFMEFLDKFVVVFIDDILIYSKSEEEHEQHLRLVLEKLKEHQLYAKFSKCDFWLSEVKFLGHVISAQGVAVDPSNVESVTKWTPPKTVSQIRSFLGLAGYYRRFIENFSKIARPMTQLLKKDEKFKWSAECNQSFEELKKKLVSAPVLILPDQTKDFQVYCDASRQGLGLVHALKIWRHYLIGNRCEVYTDHKSLKYIFTQPDLNLRQRRWLELIKDYDMGIHYHPGKANVVADALSRKSYCNAVCTEGMCDKLQQDLEHLNLGIVEHGYVAALEARPTLVDQVRAAQVNDPEIAELKKNMRVGKARDFHEDENGTIWLGERLCVPDDKELKDLILTEAHQTQYSIHPGSTKMYQDLKEKFWWGPPVGPFFHLPLPLPKPAAAETATDAAGSPPHPAIGAAASAIPRSTSSAVLPSNSIAGARISSHSELKSFPVEDVSKRLVSSLPSRIACGMESPAAGVNLEILVREFLGVTRRARPRAWRGSEEAVPAAGRHGTARTMTSGRASMRFEELAVGKIMDPNFPYQSPSFTLGDFDPNYMSGFDGGDSFGRIFRNRERKCFDTHRLEEIENLRQILSARSSGGTGHLKRHAESCAKKQGIQLRQQQLMLNPDGDHIDAVRQAIAWLTASNPRIAAWKRFCIAAGSSPAETPSYPHYSDAIHHEAQDFNVLGWWNDHKITYPVLSKLARDVLTVPVSTVSSESAFSLCGRIIEDRRTTLRSDHVEMLLSVKDWELARQHAQYTADNQELAAHFEQLYLDPDQPQ

SEQ ID NO: 19686 - protein, 1139 aa, Oryza sativa
  Clone ID: TF_OSC401472j.C1.p6.fg
MQHEIICGCICKRNNDERIMKVIGEVNKFENETVQGDKACRFSKCYGRMWERIRDKSKVESKSIISNYTGVYRCINARSCAWSLGRDDKHRFTISSVCGTPIGLAFSARSTGQCTIGNQRRHGACTMLDLPHVINSIASDHSDVAQFVAGDMMDFNLKADAVLLKSVLHDWSDEDCIKILKCCKEAIIPSKDAGGKIIIIDVVVGSSSEAICQGTQHLVDLNISVLTPGKERDEEEWFKMFTKYKISPVLGFRSIIKITVEVVLEIIDFQVCRDRSDRAVVAGDSMPRESICGDGPGVGLVREVIKLSSTLRVLRCVFHRVRRSDRRLNDGPTGDKRWSDRRYTGGQTGGGDSKRQLILEVKPEIESRSDRRQPGGQTGASTSVRPRSIDFEARNILLSGISRSDYDRVAHLQTAHEIWIALRNFHQGTNNIKELRRDLFKKEYIKFEMKLGEALDDYLSRFNKILSDLRSVDSSYDANYPQSEISRHFLNGFDMSIWEMKVTSIQESVNMSTLTLDSLYTKLKTHEMNILSRKGDSKYSALVSSTTSLDVDASSSKSSVLALFNAMFDDQLEQFEEDLVLLSNKFSRAMNNVRNRKRGGPNRCFKCGALDHLRSHCPKLGRGKKEDDVRVKEDDLNKKKNMKEKEKKKHCMQWLIQELIKVFDEPEDEDESKGKQVVDLAFIARNASSGVDESDDDNEEKLSYDQLEYAAYKFAKKLQTCSIVLDEKDHTIEILNAEIARLKSLIPNANNCQSCEVLFSEINALRDVNSISCKKLEFEIEKSKRLESSFALGFALHARVVDELILTKNVLEKYKVAFCASSLVNVSCANKAKQNNGALISQYCSKCGLNELKLKDALERVNHMEEIVKQDEVFSCSTCRKQKGLLDACKNCVVLTQEVSYLKSSLERFSDGKKNLNMILDQSKVSTHNRGLGFDSYDHHTRHPPTVLGVARRGFNSRSTVRPTLSSRSDRPAVKPQVNGRSDQLPGQVISQSQRRSDQPRGKLSHNSNQTFVKRQENKKYEKNEYRILGNSLDDNDVFDREVIKLSSTLRVLRFVFHRVLRSNRRPNGGPTGDKRRSDWRHTGGQTGGGDSKWQLISEVGPEIESRSDRRQLGGYTGASTSVLILGNVWQIAILLILR

SEQ ID NO: 19687 - protein, 563 aa, Oryza sativa
  Clone ID: TF_OSC405120j.C1.p12.fg
MANKTLREFAAPSADNVAIGPQVNIGDLDFDLKSSLITMAQASPFCGKPNEDVNAHLQQFLEICSTYTIKGVSPDAVRLRLFPFSLLGRAKQWFYAYRAANFYNGLTPMSRDHLDAVAGGAFFSKTVQGAVDLVEKMVSNMGWSEERLQTRQRGMHTVKETELHAAKLDLLMKCLDDHEKQPQGTVKALDSHVTCEVCGNTGHSGNDCPKTREEAMYMGNNNGYRPQGGQGWNQPRPYYQGGNNNETQLAQLASLVPANETGRIPRQTDSSVENVKAITTRGGTNGISKEAPSNDSTDKEVQREKTVPQEYCDTRLLPFPQRSRKPNPEDPHQRAIVGRYASANICPLSQRHTQQRETTPNNGGGQADGAMQQRNTPQAPGEEDLGCPTINCSIGAQQFEQALCDLGASVSVMPKDVFDKLNFTVLALRRMRLQLADSSVRYLAGIAEDLPVKIQDFFILVDFVVLDMDTEKETPLILGHPFLSTARANIDVGTGSIRFHINGKEEKFEFQPRTEQCSMVRIKYGPNLQNIQVVEVEPPKTDSLVKFMQNFLEKETTMPRNRY

SEQ ID NO: 19688 - protein, 1499 aa, Oryza sativa
  Clone ID: TF_OSC900356j.C1.p3.fg
MATPARFSTKPHVFDGTDFTHWCSRMQSYIMAKDYDIWRKVSHAYVIPEVINTAAEKTAFEQNCKARNIFLSGISRSHYDRVAHLETAHEIWNALKNFHQGTNNIKELRRDLFKKEYIKFEMKHGEALDDYLSRFNKILSDLRSVDSSYDVNYPQSEISCHFLNGLDMSIWEMKVTSIQESVNMNRKRGGPNRCFECGSIDHLRSHCPKLGRGKREGKDGEKTNNNKPNNYKSKGSNQGRKMENLRKAFQQVCAAFEPLSDVDGESGDDDKGKNVSDVCFMARGESDTEYEDNEVSAFEEAINILSAKNKKCEKMYKKQEFIIKSLKSEIDRLKSLIPNDDDCENCEVLMNEISKIRDVNAAHDLKNRPSLACSFALHTRTLDELFLTKKLLQKYQIAFYASLMFNMISAKKLKQHHDVLDCSTCNLNNMKLKDALGHVEYMEDVVKNNEVLSCPKCRKSKGVMVDCENCVNLEKEVSYLKNSLLRFSDGVGARSGEILIKPDTNKTVFKSAGIMSTMSASSSKSNVVHAKPPVSACVAKSSSSNNVSKQREKYTCSFCGKDGHIVDFCFRLAHKQKKEREIAFAKSKWQKSGFPSKKPVRPQWVPRSDWRPVRPAEQPRSDRAPVRPAVQRRSDRPPALVARKENVWIVDSGCSWHMTGDKDWFSSLKKASKTESIVFADASTSVVVATGMVKDEAFQHFRGLFLRLELEFPGLRRIRSDNGGEFKNASFEQFCNERGLEHEFSSPCVPQQNGVVERKNRVLVEMARTMLDEYKTPRKFWAEAINIACYISNRVFLRSKLGKTSYELRFGHQPKVSHLRVFGCKCFVLKSGNLDKFEARPTDGLFLGYPAHTRGYRVLILGTNKIVETCEVSFDDASPGTRPDISGTLSQVQGEDGRIFEDESDYDDNDEVGSAGQTGRQASQTAGTPPVRPAHEERSDRPGSSGSGTVDADQDGPPENSTSNSTDTERGSTSEVAAPLHIQRRHPPEQIIGNIGERTTRSKVTAHDVCANSAFVASFEPKDVSHALTDESCINAMHEELENFERNKVWTLVEPPSGHNVIGTKWVFKNKQNEDGLIVRNKARLVAKGFTQVEGLDFDETFAPVSRIEAIRLLLAFAASKGFKLYQMDVKSAFLNGFIQEEVYVKQPPGFENPDFPNHVFKLSKALYGLKQAPRAWYDRLKNFLLAKGFTMGNVDKMLFVLKHGDNQLFVQIYVDDIIFGCSTHALVVDFAETMRREFEMSMMGELSYFLGLQIKQTPQGTFVHQTKYTKDLLRRFKMENCKSISIPIGSTAVLDPDEDGEAVDQKEYRSMIGSLLYLTASRPDIQFVVCLCARFQASPRASHRQAVKRIMRYLNHTLEFGIWYSTSSSICLSGYSDADFGGCRIDRKSTSGTCHFLGTSLIAWSSRKQSSVAQSTAESEYVAAASCCSQILWLLSTLKDYGLTFEKVPLFCDNTSAINIAKNPVQHSRTKHIDIRFHFLRNHVEKGDIELQFLDTKL

SEQ ID NO: 19689 - protein, 1240 aa, Oryza sativa
  Clone ID: TF_OSC11344j.C1.p8.fg
MANKTLREFAAPSADNVAIGPQVNIGDVDFDLKSSLITIAQANPFCGEPNEGSNADLQQFLEICSTYNIKGVNPDTVRLRLFPFSLLGRAKQWFYVMRTSTPTIHPHFHNYNFMLLVHLVLAGSRLLAGTNTLVVGLIVHPSRFTTTSGVGVTIAKAQHPRIVVVGSPTSLHPIDLSLSSKDRDTLEHIRWYQSPSCSFFFDSLHSPPIAPPVRLTLDRDSATKASIHLLQRFVQVRRLPSPPVWHDENWLVRDRTQGLEEDVCITNEKLGHVERTQIDSNTKLTTLEASVATVNTSLDGIVWRLDEMARASHHGSEMDDHDYVGDSEDDADQRRHRFNRRGVAHRRPRREVRNNDDSFGKIKFTIPAFDGKYDPDAYLSWELVVDQKFACHDVPEDKRVRAATSEFTDFASVWWCEYRRTHINALPPTWDDLKQIMRARFVPSYYARDMLNKLQQLKHGGTSVEEYYQALQMGRTPWTARSGAAPTDRSSVSTSTSAPSNSNSNKAWPTPSTARSRASEVAEKPTKSASSVASTGRTRDVQCHRCKGFRHMQRDCPSKHVLVVKADGEYSSASDFDEDTLTLLVANNIASEDEKHIGADVADQYESLIVQRVLSAQMGKAEQNQRHNLFQTKCVVHKRSWCTIIDGATGTKNLGILYDTNAEGSSQYWNEEEGNEDPNQYLNEEGNVESDAEGNEEGNDEEESTGSHPSAGQKRAHGQRGAAKKIEGRHIVTEVDEDGRPSALAEAAKNFVHHSSWVVRDNVPVSTVYWRRTRARRDNDSFVPDSEKEMLWTTMLETFTLPAGTKNIVKQWTLKKIAEQFQSFKGDLYKKYILKGLTPNFDVFQKLRDHWDEFVAYKTGQQGQAMMARNKENAAKKKYHHHLGSGGYSVAMPKWEEMEASLIERGIEPATAKWPDRSKFWYYAHGGTLKPVDGSLVFSDQIRDAASRLTDAVEASSQGTFRPDREKEELSLALQIPEHPGRTRGKGVIPWKIGFKEDIHTYRSRMRSKRDTEAKIADLEYRVSSYELSMQEKMARKVASGMAIPTDPSGTYHCRPIPAGYSRVEVELVEAAYKDLELDYPGGDGETHLRDTRHAIILWCKRYIILPGRQAASHAPSPLAPPSPPAPSPPVPPPRPPAPSPPAPLPPPPPPPPPCLPAPPKTRSRQAPPPARTRATKKAKVDATKNKEPPYDCSQEELDAYVAGEVKRQLEPRSPEKKIPIDPSVKNYFKGMSATNKEAL

SEQ ID NO: 19690 - protein, 130 aa, Oryza sativa
  Clone ID: TF_OSC900326j.C1.p16.gm
MASCATPSITFFFNSSYSSLKSLVAIPLFGKLGLQLIAREQQLLLPFLTMTLVYEASLAGQCRCKEREQQLLLTRAEWKAKFEERKSNEAYGSNAKKYHSRFDKSKIDCRKCGKFGHFTNECEESKKKVM

SEQ ID NO: 19691 - protein, 467 aa, Oryza sativa
  Clone ID: TF_OSC400718j.C1.p26.fg
MVRIGTMFREEHRSSAVRIPCEKVTRVRILGGQLRSTVGTGTKLREKLRSKWSRIPGDEVEYKMAHGGWTPCVRDLRNGFYEVRGLDWEEQQWLGWMAGRVGPGGQETECELAKDRRQGGDLTGGVRAVRPAATGLRRDFHRFEARNILLSGISRSDFDRASHFQTAHEIWNALKNFHQETSNIKELRRDLFKKEYIKFEMKPGEALDDYLSRFNKILSDLRSVDSAYDKNYSQSEVSRHFLNGLDMSIWEMKFTSIQESVDMSTLILDSLYTKLKTHEMNILSRKIDSNSSALVSSSTSLDVGASSSNSTVLALINAMSDEYRKRGGPNRCFECGSTDHFRSRCPKLGRGKKEDDGRVLENEVDKKKITKEKKKNCMQWLIQELIRTFDESEDEDESKGKQVVDLAFIARNASSDVDESDSNSEEKLSYDQLEYAAFKFAKKLQTCSNMLDEKDHTIEILNAELID

SEQ ID NO: 19692 - protein, 1033 aa, Oryza sativa
  Clone ID: TF_OSC414570j.C1.p19.fg
MTNVRYRKRGGPNRCFECGSTDHFRSRCPKLGRARREDNGDEKTNDKKPKGTFKGRKIKETLNKAFDQVYAAFKPLSDVDGDSRDEDKGKNISSVCFMACGESDSGCEDNELKQPHDVLDCSTCTLNKIKLKDVLGRVEYMEDVVKNNEVLSCPKYRKSKGVMVDCENCANLEKEVSYLKSSLQRFYEDWLINKKGERNCFYKIKVAKIWFSLEETGLTAVGPAVRPATERRSDWLRSDRRTEASTSACVYALVARKENVWIVDSGCSRHMTGDKNWFSSLKKASKTESIIFGDASTSVVLAKGLVKKTGSKVFDSCGDSVLNISRYGRVFKADFDNHVSPAITCLVAKFDKDVMFWHRRLGHVGFDHLTRLSGLDLVRGLPKLKKDLDLVCTPCRHAKMVASSHAPIVFVMVDALGQLLHMDIVDPARVQSVGGKWYVLVIVDDFSSYSWVFFMATKDEAFQHFRGLFLRLDLEFPGSLKRIRSDNGGEFKNASFEQFCNERGLEHEFSSPRVPQQNGVFERKNHVLVEMARTMLDEYHTPRKFWAEAANTACYISNRVFLRSKLGKTSYELRFGCQPKVSHFACFWCKCFVLKSGNLDKFEARSIDIMFLGYPTHSHGYHVLILETNKIVETCEVSFDEASPGTRLDITGTLSQVQGEDSCIFEDDSDDDDDKVGSAGQTGRQAGQTASTPPGRPPQDERSNRPGSSGSGSVDADRDCPPEATTSTSTGTERETTLEVAATLHIQRRHPPEQIIGNLSERTTRSKITTHDVCANSAFVASFEPKDVSHALIDESWINAMHEELENFKRNKVWTLVESPSGHNIIGTKWVFKNKQNEDGLIVRNKARLVAQGFTQVEGLDFGETFDPVARIEAIRLLLAFAASKGFKLYQMDVKSDFLNGFIQEEIYVEDIIFSCSTHALVVEFAETVPKEFEMSMMASPGASHRQAVKRIMRKQSSVAQSIAESEYVAAANCCSQILWLISTLKDYDLTFEKVPLFCDNTSAINIAKNPVQHSRTKHIDIRFHFLRDHIEK

SEQ ID NO: 19693 - protein, 214 aa, Oryza sativa
  Clone ID: TF_OSC15262j.C1.p2.np
RGRRGTRRCDVGEGGGAAGRRADEEEGEAGAETTAFRRNSGEEEFGSKAYTRCGEIGHVASMCLTLCTHYEEDHPPGECPTRKVTCFLCEGTNHVPKDCQLSVLLTKTAEIQRTILRLSRQLVSSNNNIDDIIHSTNAPLAPPNSAINHGNNTYSTNHSLHRQPQQRIVVDGRSCVSPRPTPGQAKGNRPPEGDTKQKTVIRFNQQSEGSFSCE

SEQ ID NO: 19694 - protein, 1366 aa, Oryza sativa
  Clone ID: TF_OSC413084j.C1.p4.gm
MTRRSANTGDGNQPEGSNHNHQGNPPPPPPPPPPPLPDTNAILTQILAQQANMMTAFLHHLQNPPQLNAPPPPPQHSKLAEFLRIRPPTFSSSNNPVDALDWLHAVGKKLDTVQCSDEEKVIFAAHQLQGPASLWWDHFQATQPEGQPITWARFTAAFRRTHVPAGVVALKKREFRELKQGNRFVMEYLHEFNNLARYAPEDVREDEEKQEKFLAGMDPELSVRLVSGDYPDFQRLVDKSIRLEAKHKELESHKRRLANFRNQRGANQRVRYTNPYPGGSSSQQQQQQQQPRSAPRPQFVVRVPQPQQQQNQQGTRAPRPPTPTMQPGQGRRDAQGPQRLCFNCFKPGHFADKYPKPRRQQGQAPPRPNNGGKDVIRGRVNHVTAEDVLTTPDVIVELHQIELSEIPIVREFGDVFPEELPGMPPKREIEFRIDLAPGTTPLYKRPYRMAANELAEVKKQLEELKEKGYIRPSTSPWGAPVIFVEKKDKTKRMCVDYRALNEVTIKNKYPLPRIDDLFDQLKGATVFSKIDLRSGYHQLRIREEDIPKTAFTTRYGLYEFTVMSFGLTNAPAFFMNLMNKVFMEYLDKFVMVFIDDILIYSQSEEDHQHHLRLVLGKLREHQLYAKLSKCEFWLSEVEFLGHVISAKGVAVDPETVTAVTDWKQPKTVTQVRSFLGLAGYYRRFIENFSKIARPMTQLLKKEEKFVWSPQCEKAFQTLKEKLVSSPVLILPDTHKDFMVYCDASRQGLGCVLMQDGHVVAYASRQLRPHEGNYPTHDLELAAVVHALKIWRHYLIGNRYEIYTDHKSLKYIFTQSDLNLRQRRWLELIKDYDVGIHYHPGKANVVADALSRKSHCNTLNVRGIPPELNQQMEALNLSIVGRGFLATLEAKPTLLDQIREAQKNDPDLHGLLKNMKQGKAAGFTEDEHGTLWNGNRVCVPDNRELKQLILQEAHESPYSIHPGSTKMYLDLKEKYWWVSMKREIAEFVALCDVCQRVKAEHQRPAGLLQPLQVPEWKWDEIGMDFITGLPKTQGGYDSIWVVVDRLTKTDGQTERLNQILEDMLRACVLDFGKTWDKSLPYAEFSYNNSYQASIQMAPYEALYGRKCRTPLLWDQVGESQVFGTDILREAEAKVRTIRDNLKVAQSRQKSYADNRRRDLEFAVDDFVYLRVTPLRGVHRFQTKGKLAPRYVGPFRIVARRGEVAYQLELPASLGNVHDVFHVSQLKKCLRVPSEQADSEQIEVREDLTYVERPVKILDTMERRTRNRVIRFCKVQWSNHAEEEATWEREDELKAAHPDLFASPPPSSPRTSSRFGIASFGFAAFSPTLSTPPFRPPTAGAPPSSSTRAAPPPLSASVAVPVIAVDPG

SEQ ID NO: 19695 - protein, 485 aa, Oryza sativa
  unsure (1)..(485): unsure at all Xaa locations
  Clone ID: TF_OSC900380j.C1.p25.np
DLRHRISEPTHPPQFRTQQGGQQKPSFSSGQHSGPTTMIVCQHRPYQPGNFGXNSSGSNNGGNQNNRNPAPRPLMAQSQASXPTQQKKEAGGKPLICFNCNEPVHFADKCPKPKRNGPKIVQARVNHISTEEAQAAPEVVLGTFPVNLFPATVLFDSSATHSFISKKFVGVHGLRKVELSAPMKVNTPGNSTRLVSFCPSMMIEIQGSPFLANLILLECKDLDVILGMDWLSRHKGVIDCASCTVTLVDEKGEVVIIQFPMTQKKGVVLNQMEGEKQDEVEKDVQKLENIPVVCEYPEVFPEDLTTMPPKRDIEFRIDLVPGTAPIYKRPYRMAAKEMAEVKKQVDEQLXKEYIRPSTSPWAPVIFVEKKDKTKRMCADYRALNEVTIKNKYPLPRIDDLFDQLKGATVFSKIDLRSGYHQLRIREXDIPKTAFTTCYGLFECTVMSFGLTNAPVFFMNLMNNVFMEYLDKFVVIFIDDILVYSK

SEQ ID NO: 19696 - protein, 716 aa, Oryza sativa
  Clone ID: TF_OSC22997j.C1.p2.fg
MHTVKETELLAAKLDLLMKRLDDHEKRPQGTVKALESHVTCEVCGGTGHSGNECPETCEEVMYMGKNNWYRPQGAKTTDALSKKLAANDKILENINVNLDGFASAFQNQLSFNKMIETQLAQLASLVPANESRRIPGQPDSSIENVKAITTRGVIQKIHINVPLLDAMQVPTYARYLKDILNNKRPLPTTEVAKLTEHCSNIILHKLPEKKKDPGCPTITCSIGAQQIDQALCDLGASVSVMPKDIFDKLNFTSVRYPAGITEDLPDKIQDFFIPVDFVVLDMDTGKKTPLILGRPFLSTAGANIDVGTGSIRFHINGKEEEFEFQPRTEQCSMVRIKYGPNPQNIQVVELEPPKTDSLVKFMQNFLEKETTMNRNRYWRMPVKSPIPAKKLEQPAQKKPSTAPKSNKVNCMRRRLSRLFKGSGSPSSHHGESSTRSSADVSMEDADAPRQLLSDTDLDLVSDRERQAYYMRSDREYAHTREYSPELLKKIEIEDDIFFRFFRKEFTLTWKGLSTLLGFHDSCKIDLQKGISGFEKNRFWEDIFGAPICKKPRTNDIHNPTLRLMHKWIAMTLFPRSDLRPIRGDELIIMFAMIYEAGWAPTGDAPGWTQALRYSMDSQLGQAPVRTGGMRLMTSTGETINLPDQVDLGEITRRMDTLDVQTGEIQYNLTEHIAQTQEWQQSADAQFTNINNMMQQQHDDLQAYFRFQGFNPYQGP

SEQ ID NO: 19697 - protein, 1804 aa, Oryza sativa
  Clone ID: TF_OSC13173j.C1.p9.fg
MAPSPSLSPDTHPRHRRFRSSPEHLVGVFQASLASPTLETFPIPVPRHNPPLSAQTPSPKSPFSTHPDPPETIQISGIDSSTAASICLSPRLDSRFVTLRPQDPSKSSTLQDLPATAPLGALRLYSEVLAAPAPIPLAASSKSQQELSPPKIRSLAGRLNFPAAQPCSSVTERLNPVNLTDPDVGSQGAAPKDLRILKSGRKVQMPAQILSAVQHPRGSLDVSGSEWQEVKANRWRRSPAHSPDSTNQFQLQLSRARFLKHMEGKCFRCLRSDHRVIECREPLRCWFCMGIGHCASSCLKRKSFKSTATSQPLPQTSVESFPPLAPIRFPPKLLPRSALSSPSSMDDLSARPSQEPVVISATGEIERLRQKFSARSIVAWQVGHQGSNVDPNVFADDVHSAFRIRRSDIQITKFHPEDFFITCSSQNDRDAILRQPRLATKSGRVYLFCPWEEGLHGVPARFRYRARVCIEGIPMHARTEETAAKIIGRKCSINYVEEYSRRQNYNRTFDIWIWTDAPKFIPRSSTFSITNADEEGLPTDISLLDLEPHHNPPPDEPKEGWTYDILVHIDTLEDLHSKVARAYDWQYGAETDEGSLIPKEVQMMKTKTESSAPRGSVGAVPFGAVSVDGRKVVAVSVEEINKFTTKTRADASMFERPPLAAAAPTVLARQVQYDRPRLSRRGTRSPRIQSSPQVPSPCKSAIPRRSGSPDEGANALATLFSPSSSLVVQPEPVIFSQGQVAVLELLEKHLDPMLHEATIQHSLYSPDTSSPRIASPVFIPSSTQLGSGAADGVLGAAKNLQEFAASLSTPIQPAILPTPDVSSRRPCRNKVTLHSPQRHSERLARKRRFGTKIEHFAQEILAKNFGFLNDQTRFDENIEKLYVQHFKKPISPASMKIITTLVEKGGCEGIHLKTAKKKAAVVPICLLVFIMSQHNVHLFNWNVRGLNAQAKQDVVKAFVHKVGASIVCLQETKLATVTDRNILSILGQNFVQSYAFLPASGTRGGIILACNANLFSLSEAVQGQFSLSATITMFEEGLQWSITVVYSPQLEADKIAFLAEIEAMSSFMKPAWLLIGDFNLIYKVSDKNNDRLNRRMMQRFKGLIDKIEVKELHLPGRRFTWAGAGQNPTQTKIDRAFVIPDWDIMFSNASLQPLSSSTSDHAALFLIGNEMRGKPPNSRFEAFWLKIPGFLEVVEDSWNRPLLAANPLAILYIKLKRLARDLKRWNRQNVGDIKLQLAVANEVVFQLDVAQETRPLSDDECVLRSNLKARILGLAVLNKIQIRQRSRLTWLKEGDVNSKFFHIKENSRRRKNFIQTLQTQNGIAVSAQEKADTLFRFFSDRLGTPSQRQSCLNWATLNFPSFDLDDQEDDITEEELKHPVFSVPSEKAPGPDGYIGAFFKHAWEIIKEDLLLAAKSFMALNTNQLKKLNTAYICLLPKKRRSGWTKLLANRLAPRLNELVSQNQSAFVRKRAIHDNFLFVQNLVHILHRNHKEALFLKVHITKAFDTVGWPYLLEVLQRKVDFLPLIEKIGSRLPGWKGRYFTSEGRRILVQSVLSAMPTFHLSALQAPKWVIKRIDRFHRSFLWKGEDPSKTNPGSSLVNWSTVCKPKFLGGLGILELEKFPRALRLRWLWFKWKEENKPWIGMDIPCDNCDMRLFQAATTISLGNGEKTAFWQDKWLQSSCPKDIAPMCFNLAKRKQRSVKTELTNNSWLLSFRNITSIEEINEVVQLGENSHGSKPPAPQPPAPPLALQLDLQFVWRSPLKTPTIFSMGVLSSGKFGARYVNGKISKEPNLQMTLQLGGST

SEQ ID NO: 19698 - protein, 778 aa, Oryza sativa
  Clone ID: TF_OSC400773j.C1.p74.fg
MESERPDASAEDRRLEDLRKREERCCSYRSQEIAQKKKHFDELAAREEIQSYVMQLFICLGMANFRVYYGDGEIISNKMGVDLSNFSQCTLYHPNRDNLRMPEVWYWLTCSFSLDPQVYSVNVSLLWSRSATDIQWQLKEVTGSQSWKNWLQGCRRRGYEMAMLVQACPRRARPNSSFGQSDMQGEACAQSSAFHVEVSRHNEDNISIDMQSLHIEQVEQTVVAMPSTVQQDGSGEADEGEEINAIVDEIERVDRNAREDEANLAWEEDEEEDDEEYEVQPVPASWNREDLGYIRENELHDSIWFYGDGPINKGAMFSTKSAFQDAVKSWSFKMQRQFKVLKSSPTVYTVLCETEGCNFRVHGHVPKYESYRLVSREGTTAVETGEWYTISYHKAWRAKQKATEKRYGSFEVAYDTLPQILDILKQRNHGTYVAVQDRDSMRPPNFHVMERAFFSFGACIHAFQWSRPVLCVHGTFLTRKYRGSILIAVGADASNHIIPVAFAFVESENYDSWLWFLQHVKWGVVQSRSNVCIIHDRNAGLLKAIKELKEDENGAYYWPDLHSRWCMRHMGANFFKQFHSKRLMQMFKRLCMQNQRQKFEDLWRQLDEATSAHVKSKKDSKKNDQPAPEALEPMDGLITSNGLDSTAYVSPFYLKDRVLQAWSADILGYRAHENLIRTGGDDTVWVPDLHLLKGGKGRRQTRRLRNDMDESEAGGPIRRCETCLQYGHRTRDCTNNNDGTSSTAQQGQQTWESSRATRARRTRRGTGSSRNTPEGTTL

SEQ ID NO: 19699 - protein, 1737 aa, Oryza sativa
  Clone ID: TF_OSC900041j.C1.p11.fg
MAPSPSLSPDTHPRHRRFRSSPEHLVGVFQASLASPTLETFPIPVPRHNPPLSAQTPSPKSPFSTHPDPPETIQISGIDSSTAASICLSPRLDSRFVTLRPQDPSKSSTLQDLPATAPLGALRLYSEVLAAPAPIPLAASSKSQQELSPPKIRSLAGRLNFPAAQPCSSVTERLNPVNLTDPDVGSQGAAPKDLRILKSGRKVQMPAQILSAVQHPRGSLDVSGSEWQEVKANRWRRSPAHSPDSTNQFQLQLSRARFLKHMEGKCFRCLRSDHRVIECREPLRCWFCMGIGHCASSCLKRKSFKSTATSQPLPQTSVESFPPLAPIRFPPKLLPRSALSSPSSMDDLSARPSQEPVVISATGEIERLRQKFSARSIVAWQVGHQGSNVDPNVFADDVHSAFRIRRSDIQITKFHPEDFFITCSSQNDRDAILRQPRLATKSGRVYLFCPWEEGLHGVPARFRYRARVCIEGIPMHARTEETAAKIIGRKCSINYVEEYSRRQNYNRTFDIWIWTDAPKFIPRSSTFSITNADEEGLPTDISLLDLEPHHNPPPDEPKEGWTYDILVHIDTLEDLHSKVARAYDWQYGAETDEGSLIPKEVQMMKTKTESSAPRGSVGAVPFGAVSVDGRKVVAVSVEEINKFTTKTRADASMFERPPLAAAAPTVLARQGQVAVLELLEKHLDPMLHEATIQHSLYSPDTSSPRIASPVFIPSSTQLGSGAADGVLGAAKNLQEFAASLSTPIQPAILPTPDVSSRRPCRNKVTLHSPQRHSERLARKRRFGTKIEHFAQEILAKNFGFLNDQTRFDENIEKLYVQHFKKPISPASMKIITTLVEKGGCEGIHLKTAKKKAAVVPICLLVFIMSQHNVHLFNWNVRGLNAQAKQDVVKAFVHKVGASIVCLQETKLATVTDRNILSILGQNFVQSYAFLPASGTRGGIILACNANLFSLSEAVQGQFSLSATITMFEEGLQWSITVVYSPQLEADKIAFLAEIEAMSSFMKPAWLLIGDFNLIYKVSDKNNDRLNRRMMQRFKGLIDKIEVKELHLPGRRFTWAGAGQNPTQTKIDRAFVIPDWDIMFSNASLQPLSSSTSDHAALFLIGNEMRGKPPNSRFEAFWLKIPGFLEVVEDSWNRPLLAANPLAILYIKLKRLARDLKRWNRQNVGDIKLQLAVANEVVFQLDVAQETRPLSDDECVLRSNLKARILGLAVLNKIQIRQRSRLTWLKEGDVNSKFFHIKENSRRRKNFIQTLQTQNGIAVSAQEKADTLFRFFSDRLGTPSQRQSCLNWATLNFPSFDLDDQEDDITEEELKHPVFSVPSEKAPGPDGYIGAFFKHAWEIIKEDLLLAAKSFMALNTNQLKKLNTAYICLLPKKRRSGWTKLLANRLAPRLNELVSQNQSAFVRKRAIHDNFLFVQNLVHILHRNHKEALFLKVHITKAFDTVGWPYLLEVLQRKVDFLPLIEKIGSRLPGWKGRYFTSEGRRILVQSVLSAMPTFHLSALQAPKWVIKRIDRFHRSFLWKGEDPSKTNPGSSLVNWSTVCKPKFLGGLGILELEKFPRALRLRWLWFKWKEENKPWIGMDIPCDNCDMRLFQAATTISLGNGEKTAFWQDKWLQSSCPKDIAPMCFNLAKRKQRSVKTELTNNSWLLSFRNITSIEEINEVVQLGENSHGSKPPAPQPPAPPLALQLDLQFVWRSPLKTPTIFSMGVLSSGKFGARYVNGKISKEPNLQMTLQLGGST

SEQ ID NO: 19700 - protein, 259 aa, Oryza sativa
  unsure (1)..(259): unsure at all Xaa locations
  Clone ID: TF_OSC6545j.C1.p1.np
GPMSISEFIAKMRSFDYEMTGQGKLLDEELIAYIINGFDSDFDSSVIGLMPATRIAPLLISHVYSQLLSYENRISIRQTYLRISANAANRGGRGGRGGNRGGAPPAGRSAGRGGAVGANTGRGRGKDTHPVCRACHKGGHIASDCWHRYDEKYVSDEKLGDAATYAYGVDTNWYVDTGATDHITGQLDKRDYMEKYKGTDQIHTASGEGMNIXHIGHTIVPTPSSPLPLKNIIHGPQASKNLVSVHTLIGCRNDRSHFP

SEQ ID NO: 19701 - protein, 322 aa, Oryza sativa
  Clone ID: TF_OSC900148j.C1.p4.fg
MAKQWFYANRATVNTWDKCSTAFLSKFFPMGKTNALRGRISSFQQTRDESIPEAWERPQEYVAVCPHHGMDDCLILQSFYNGLTSSSRDHLDAAAVGAFFSKTVRAAVNLTEKMVSNMGWSEERLQTRQCGMHTVKETEMLAAKLDLLMKRIDDQEKAKPLVAFKALDSHLTCEVCGNTGHSGNDCPETREEAMFMGNNGYRPQGGQGWNQPRPYYQGGNNGNNNNNGNFNQPSLKDLVFAQAKTTDAINKKTALNDKVLENINVKLEVFASAFQNQLSFNKMIKTQLAQLAALGFYLALASLAHYVWWSHSSVSHSLAVVS

SEQ ID NO: 19702 - protein, 1404 aa, Oryza sativa
  unsure (1)..(1404): unsure at all Xaa locations
  Clone ID: TF_OSC900399j.C1.p1.np
MADHPPNHRGEGMDDFVAELARMTLVVGYPNAPEYSTVPPLSGEFPHRVRLEVHGYVGTCLANMVVEASGGTADHACQEAAYLMMARLRERHNYIFCNTAYRFHPRRASGDDISTFCPTAGENDTTLGHMCAVMRGMDKMHSDDGKLMRIIALKDEIARLKKENAQLKGLPIPGGVRIRNMPRKSTTAPVRIQLAPRNPPPPAAPAAPPVLPAVPAARAALAPVPAPAPVSAPASALSFAPASAVRGPASGNGGWLPATPSGSRNHISSSSSGSELPDSRSSSEGPGLFLQMVYTRNGSRTAGEGSNGEECTDGVHPNSDSSNGPLPLPENPALAQVMAHQTQMMAAMMQQMHQRMQQQAEQQQQQFGPPPPQSKLPEFLRVRPPTFSSTTNPMEANDWLHAIEKKLNLLQCNDQEKVAFATHQLQGPASAWWDNHMATRPPGTEVTWAEFCRSFRKAQVPDGVVAQKKREFRALHQGNRTVTEYLHEFNHLARYAPEDVRTDAEKQEKFLAGLDDELTNQLISGDYADFEKLVDKAIHQEDQRNKMDRKRKAAQFQSNQGSHQRPRFTPGQQGGPTTMIVRQHRPFNSSGFHQGASGSQNHQGGQPNRNAAPRPPMAPAQSAPSTQAKKETGTKPGSCYNXGEHGHFANKCPKPRRPGPRFVQARVNHASAEEAQAAPEVVLGTFPVNSIPATVLFDSGATHSFISRKFVGIHGLIREELSTPMQVHTPGNSSTSVQFSPSITIEIQRSPFLANLILLESKDLDVILRMDWLTKFKGVIDCVNRTVTLTNEKGETMVYKSPVSPKQGISLNXHEVENPVATDEKSSRKLEDIPVVCKYPEVFPEDLTTMPPKREIEFRIDLAPGTAPIYKRPYRMAANELAEVKKQVDEQLQKGYIRTSTSPWGAPIIFVEKKDKTKRMCVDYRALNKVTIKNKYPLPRIDDLFDQLKGAKVFSTIDLRSGYHQLRIREEDIPKTAFTTRYGLYECTVMSFGHTNAPAFFMNLMNKVFMEFLDKFVVVFIDDILIYSKSEEEHEQHLRLVLEKLKEHQLYAKFSKCDFWLSEVKFLGHVITAQGVAVDLSNVESVTKWTPPKTVSQIRSFLGLAGYYRRFIENFYRIARPMTQLLKKDEKFKWTAECDQSFEELKKKLVSALVLILPDQTKDFQVYCDASRHGLGCVLMQEGRVVAYASRQLRPHEGNYPTHDLELAAVVHALKIWRHYLIGNRCKVYTDHKSQKYIFTQPNLNLRQQRWLELIKDYDMSIHYHPGKANVVADALSRKSYCNALCTEGMCKELQQELERLNMGIVEHGFGAALEARPTHVDQVRAAQVNDPEIAELKKNMRVGKARDFLEDEHGTIWMGERLCVPDDRELKDLILTETHQTKYSIHPGSTKIYQDLNEKFWWA

SEQ ID NO: 19703 - protein, 1021 aa, Oryza sativa
  Clone ID: TF_OSC5516j.C1.p6.fg
MASSSSSAGSPFSGQAVAEKLTRTNFLLWKAQILPVIRGARMEGYLTGATQAPLAVIDAKDGEATVKASKPAFEMWITADQQVLGFLLSTLSKEILTQVISMESAAQVWKAITEMLSSQSRARALNTRLALATTLKGDLSVSDYISKMKVLADEMAFAGKPLDDEELISYVLAGLDDDYEPVVSSLVGKSEVVSLAECYSQLLSFKSRQKLRHAAAHQASSVNAARRGGGKGGGYTPFNRGGRSGGNNNGRRSNNGGGRGGRGNNNGDRGGKPHPVCHLCGKTGHVVADCWYRYDENFVPENKIAAAASYGVDTNWYVDTGATDHITGELDKLTTREKYNGKDQIYTASGAGMDIKHIGHSVICTPTRNIYLKNILHVPKAKKNLLFAHRLALDNHAFVEVHSRFFAIKDQAKSHQLPYPKSFSVFSHPLELVFSDVWGPAPDSVGGRKYYVSFIDDFSKFTWIYLLKKKSEVLQKFSEFQQLVERLFNRKIIAMQSDWGGEYEKLNAIFTKIGITHHVSCPYAHQQNGSAERKHRHIVEVGLSLLAHASMPLKFWDEAFLTATYLINRTPSKVIQYSTPLERLLNQKPNYSSLRTFGCACWPNLRPYNNRKLQFRSKQCVFLGYSNIHKGFKCLDVATGRVYISRDVVFDENIFPFSQLHSNAGARLRSEILLLPSTLLNPEIASRGMQVNDHMSNAPSGESNIISEHAPEQEAGGSNINAPTDTHDTEDPGAGGSTGFDENTAGSDGPDGSDGFDGSAAGSDPGDGSTEVGSSSSSAVGSPSTGNGGSSGASVNPGPGSASATEPARHGGATGDETHTNQIIPEQVHQPSRPTTRLQRGIRKEKVYTDGTVRGWCLRQFDVQNAFLHGVLEEEVYMRQPPGYEDKTSATQGAAEALLKDLKQEFALKDLGDLHYFLGIEVNKINRSSSTLVSAFSDADWAGSVDDRRSTGATYLSVNPVFHARTKHIEVDYHFVRERVARKQLEIKFISSGDQVADGFTKPISVQQLRDFRNNLNLDKL

SEQ ID NO: 19704 - protein, 523 aa, Oryza sativa
  Clone ID: TF_OSC900304j.C1.p1.fg
MHTVKETELLAAKLDLLMKRLDDHKKRPQGTVKALDSHIKCEVCGVTGHSGNDCPETREEAMPLCDHGASVSVMSKDVFDKLNFTVLAPTPMRLQLADSSVRYPVGIVEDVPVKIRDFFIAFDFVVLDMDTRKETPLILGSPFLSTAGANIDVGTGSIRFHINGKEAPWSESSTGQTRRTFKRSKWSHPRRIACMRRRLSHLFKGSGSPSSRHDESSTRSSADASMEDADAPRQLLSDADLDLVSDRERQAYYMLSDREYAHTREYSPELLKKIGMDVKFRSIWKAVGWQRFAMKGISRFEKNRFWEDISGAPICKKSRTNDIHNPTLRLMHKWIALTLFPRSDLRPIRRDELIIMFAMVRKIKISPVKCMIRQWLESIKFSALVECTSLITRYTRQVGHQLGMHPEGPKLHAITSESQPGQAPVRTGGMRLMTSTGRDNQPPRSSGVPPSPSEWRSSSSRWDLGEITRRMDTLDMQTGEIQYNLTEHTAQTQEWQQSADAQFPNINNMMQQQHDDLQAYFRF

SEQ ID NO: 19705 - protein, 1421 aa, Oryza sativa
  Clone ID: TF_OSC101455j.C1.p16.gm
MSNEVNHVGKAPMFNGTNYSTWKIKISTHLKAMSFHIWSIVDVDFAITGTPLTEIDHRNLQLNAQAMNALFNSLSQEEFDRVSNLETAYEIWNKLAEIHEGTSEYKDAKLHFLKIQYETFSMLPHERAWGNYTDLEVAQKMLRALSEKYETLVTMLINSDMSRMTSTSLLGKINTNDMYKLKKKEMEEASPSKKCIALQAEVEDKSKSKVNEVNEDLEEEMGHFASKCPSKDDDGDKSSKKKSGGYKLMKKLKKEGKKIEAFIGEWDSNEECSASSGSEEEGGDDASSKKKKMIVVAIKEAPSLFAPLYLMAKGSSKVTSLSDSESDDDCDDVSYDELVSMFEELHAYSEKEIVKFKALKKDHASLEVLYEELKTSHERLTISHEKLKEAHDNLLSTTQHGAHIDVGISCDLLDDSATCHITHVASSSISTSCDYLMDMPSPCSSSSSCVSICDASLVVENNELKEQVAKLNKSLERCFKGNNTLDKIMSEQRCILNKEGLGFIPKKDKKPSHHATRFVKRNGKYCSKCREVGHLVSDCPGGYASNSKAYRVYNKNKGIVEETADVQFDETNGSQEGHENLDDVGDEGLMRAMKNMSIGDVKPIEVEDKPSTSTQEEPSTSASSSQAQVEVEEEKAQDPPMPPRIHTALSKDHPIDQVLGDISKDEALCDPDWMNAMHEELNNFARNKLWTLVERPRDHNVIGTKWIFRNKQDENGLMVRNKARLVAQGFTQVEGLDFGETFAPVARLEAIRILLAFASCFDIKLFQMDVKSAFLNGEIAELVFVEQPPGFEDPKNPNHVYKLSKALYGLKQAPRAWYERLRDFLLSKDFKIRKVDTTLFTKIIGDDFFVCQIYVDDIIFGSTNEVFCKEFGDMMSREFEMSMIGELSFFLGLQIKQLKDGTFVSQTKYIKDLLKRFGLEDAKPIKTPMATNGHLDLDEGAMPPRTRHGRRAPTPDPVSENEESSGDEYVQSDEDNMENVEGDEMEVSDDGDDNESANGEDDEASDDGSPLDSSIQFVLNLRNAQQYTILRHHDQFRRPNDCNDPRFHTRFQKSVYVQVYANKAFAEHKWISWRHIGETPEFENLQEMFRTIGIDRIVTMKQPFDEDLIRQFYATVWVSGDCDAMKWMSGTLRCSINRREFKELLHIRFNNGDDLHDEHTHNLFPIDHFSQFYEEGGRHTYGKVAGLRALPSVINRIVRATILPRYGNNDDIRGVAWHVIDAIMDGRRFDVINLMMKEIAISKGTIGQGIYYAPYIMSPPPPQGYDPSTLFHPQYAYFGMQPNDFFNPVLGAINTLSESIQRLSTGHEALREDVRGLRTDVGNLNTSTGLLEAEMMLLGMADTEPTEPLPPPRQLVEELPGDLSEKIVEEARRRFVSGLEFTTFGVKEELPRVIEAWVVLSVGRLPPCPPLDEGGVRWLRS

SEQ ID NO: 19706 - protein, 968 aa, Oryza sativa
  unsure (1)..(968): unsure at all Xaa locations
  Clone ID: TF_OSC1518j.C1.p2.np
RTRTGQRRRDPYHPRRGEGTTTMNGRGRRPGMTETKGEGTTSQNSGGNATVAGGDALPEVSMGNRGQAGAEEAAATLEKAPARPTGARARRXGRLEGGRHXGKRRRRRRGGAATGRAREGAKTRERSEGPSYHGRSGSRKGRRRAHPNSITPTLARVRQPEESYTSNQAVTHSRLIKDAITGNNLISSWFGMVNSXFGDRTVQPMPRFKPEYLFGVEGFVQELHTMSFAIGFGTAPLYAQIPHDRDEEKCRVKVTMNSNSEDIPSVMFEAGGGNYIHACQEVARMAIGELRDRYSDQLADTEYRYHPRQPQGSDRGSYLETVGIENDATTRHLVEMLXAMDETRAETVLAAQDREDQNRGKICKLEDKVDHLEKELAALKGEAPPQKARVRLTARKRALFVPRYQLAPKVRVVEKEVTPALADPPVVNVSNDDKEESKRTHSKIEWGATQDDGDEPNEPSILRCPEDLDNGNGPNIINNNNNGENPTLAQVLAQQAQLMNMMMQQLQNQQNQGNNHAPPQNKLAEFLRVRPPTFSSTTNPVEAGDWLDAIEKKLDLLQCTDQEKVSFASHQLHGPASEWWDHFRLNRTIAEPITWLDFTAAFRKMHIPSGVVSLKKKEFRSLIQGSRTVTEYLHEINRQARYAPEDVRTDEERQERFLEGLNDELSYPLMTGDYHDFQKLVDKAIHQEDKYNRMEQKKCRIAHFKAQQGNSQRPHLTLGPQSMSQGGSSSVVRPQRQFFNNNTGNNIRNQAPRLVAALTQQQPAKREQGSKPGVCFNCGEPGHYSDKRPKPRRVKVVPAQSNSTAPASKARVNHVAAAEAQGAPDVILGTFLVNSVPATVLFDSGATHSFLSMSFAGNHGMEVEDLRRPLMVSTPSNQALSLQHSPSVRIEIQGVPFLANLILLEAKDLDVILGMDWLARYKGVIDCANRKVILTSNDGRVVTVHALSSESLRSSLNQMTLEEIPIVQ

SEQ ID NO: 19707 - protein, 1523 aa, Oryza sativa
  unsure (1)..(1523): unsure at all Xaa locations
  Clone ID: TF_OSC1661j.C1.p1.np
MEIRNGSRDSNNVSGSEEPINGARANGASDYSLSPPPENPTIAQVLNNQTQMMTMMMQQMQQQYHQVLQQVQQQAQQQQQNLQFGPPPPQSKLLEFLRVKPPIFSSTTNPIEAHDWLHAIEKKLNLLQCNEQEKVAFAIHQLQGPASIWWDNYMVTRPAGAEVTWTEFCHSFNKAQVPEGIVAQKKREFRSLQQGTRTVIEYLHELNRLARYAPEDVRTDAERQEKFLSGLDDELTNQLISRDYEDFEKLVDKAIRQEEHYNEINRKRKAAQFRTPQGKSQKPRFTMGHQGGPSTMIIRQYRPYHPGSFNKTHHSGSHNNSEQHRLKPTPSPLMIPAQPALPAQPEQPKKFGEKPELCFNCNEPGHTVGRCPKPRRAGPKFVQARVNHASAEEAQSAPEVILGTFPVDSTPAKILFDSGATHSFISKRFAGAHGLSLVKLKIPMRVHTPGGGMTTTHYCPSVTVEIQGMIFPANLILLESKDLDVILGMDWLTRHRGVIDCASRTIKLTNAKGEVVTFQSQVPRKLGISLNQAAGEEQEVAVEKTTKKLEDIPIVREYPEVFPDDLTTMPPKRDIEFRIDLVPGTAPIHKRPYRMGASELAEVKKQVDEQLQKGYIRPSTSPWGAPVIFVEKKDKTKRMCVDYRALNEVTIKNKYPLPRIDDLFDQLKGATVFSKIDLRSGYHQLRIREEDIPKTAFITRYGLFECTVMSFGLTNAPAFFMNLMNKVFMEFLDKFVVVFIDDILIYSKSEEEHEQHLRLVLEKLKEHQLYAKFSKCDFWLKEVQFLGHIVNAQGVAVDPANVESVTKWTPPRTVTHVRSFLGLAGYYRRFIENFSKIAKPMTQLLKKEEKFIWSAECNRSFEELKRRLVSAPVLILPDQTKGFQIYCDASRQGLGCVLMQDGKVVSYASRQLRPHEGNYPTHDLELAAVVHALKIWRHYLIGNRCEVYTDHKSLKYIFTQPDLNLRQRRWLELIKDYDMGIHYHPGKANVVADALSRKSYCNVAWVEQLCCEVQRGLEHLNLGIVEHGFVVALEAQPTLVEQVRIAQASDPEIAELKKNMRVGKARGFVEDEQGTIWMGERLCVPENKELKDLILIEAHQTQYSIHPGSTKMYQDLKEKFWWVSMRREIAEFVALYDVCQRVKAEHQRPAGLLQPLQIPEWKWEEIGMDFITGLPRTSSGHDSIWVVVDRLTKVAHFIPVHTTYSGKKLAXLYLARIMCLHGVPKKIVSDRGSQFTSKFWQKLQEGLGTRLNFSTAYHPQTDGQTERVNQMLEDMLRACALDFGGAWDKSLPYAXFSYNNSYQASLQMAPFEALYGRRCRTPLFWDQTGERQLFGTEVLNEAEEKVRAVRERLRIAQSRQKSYADNRRRELAFETGDYVYLRVTPLRGVHRFQTKGKLAPRFVGPYRILERRGEVAYQLELPSNMLGIHNVFHVSQLKKCLRVPEEQASPDHIEIQEDLTYVEKPTRVLKTSERRTRNKIRFCKVQWSHHSEEEATWEREDELKATHPHLFASSSESRGRDSV

SEQ ID NO: 19708 - protein, 1422 aa, Oryza sativa
  Clone ID: TF_OSC1661j.C1.p2.fg
MAIKDRFTGNPGRLTVLTTSGSGFVACGLVSGRYHVSVMEIRNGSRDSNNVSGSEEPINGARANGASDYSLSPPPENPTIAQVLNNQTQMMTMMMQQMQQQYHQVLQQVQQQAQQQQQNLQFGPPPPQSKLLEFLRVKPPIFSSTTNPIEAHDWLHAIEKKLNLLQCNEQEKVAFAIHQLQGPASIWWDNYMVTRPAGAEVTWTEFCHSFNKAQVPEGIVAQKKREFRSLQQGTRTVIEYLHELNRLARYAPEDVRTDAERQEKFLSGLDDELTNQLISRDYEDFEKLVDKAIRQEEHYNEINRKRKAAQFRTPQGKSQKPRFTMGHQGGPSTMIIRQYRPYHPGSFNKTHHSGSHNNSEQHRLKPTPSPLMIPAQPALPAQPEQPKKFGEKPELCFNCNEPGHTVGRCPKPRRAGPKFVQARVNHASAEEAQSAPEVILGTFPVDSTPAKILFDSGATHSFISKRFAGAHGLSLVKLKIPMRVHTPGGGMTTTHYCPSVTVEIQGMIFPANLILLESKDLDVILGMDWLTRHRGVIDCASRTIKLTNAKGEVVTFQSQVPRKLGISLNQAAGEEQEVAVEKTTKKLEDIPIVREYPEVFPDDLTTMPPKRDIEFRIDLVPGTAPIHKRPYRMGASELAEVKKQVDEQLQKGYIRPSTSPWGAPVIFVEKKDKTKRMCVDYRALNEVTIKNKYPLPRIDDLFDQLKGATVFSKIDLRSGYHQLRIREEDIPKTAFITRYGLFECTVMSFGLTNAPAFFMNLMNKVFMEFLDKFVVVFIDDILIYSKSEEEHEQHLRLVLEKLKEHQLYAKFSKCDFWLKEVQFLGHIVNAQGVAVDPANVESVTKWTPPRTVTHVRSFLGLAGYYRRFIENFSKIAKPMTQLLKKEEKFIWSAECNRSFEELKRRLVSAPVLILPDQTKGFQIYCDASRQGLGCVLMQDGKVVSYASRQLRPHEGNYPTHDLELAAVVHALKIWRHYLIGNRCEVYTDHKSLKYIFTQPDLNLRQRRWLELIKDYDMGIHYHPGKANVVADALSRKSYCNVAWVEQLCCEVQRGLEHLNLGIVEHGFVVALEAQPTLVEQVRIAQASDPEIAELKKNMRVGKARGFVEDEQGTIWMGERLCVPENKELKDLILIEAHQTQYSIHPGSTKMYQDLKEKFWWVSMRREIAEFVALYDVCQRVKAEHQRPAGLLQPLQIPEWKWEEIGMDFITGLPRTSSGHDSIWVVVDRLTKVAHFIPFSYNNSYQASLQMAPFEALYGRRCRTPLFWDQTGERQLFGTEVLNEAEEKVRAVRERLRIAQSRQKSYADNRRRELAFETGDYVYLRVTPLRGVHRFQTKGKLAPRFVGPYRILERRGEVAYQLELPSNMLGIHNVFHVSQLKKCLRVPEEQASPDHIEIQEDLTYVEKPTRVLKTSERRTRNKV

SEQ ID NO: 19709 - protein, 211 aa, Oryza sativa
  Clone ID: TF_OSC400196j.C1.p1.fg
MDQMALATIVQAVPEAMVMVISEKEMAREAWDALKQMNMGEERVKKARVQTLKRVLDDSFSRHESGGDHRRGEALAFRSRQVPIPHKHHRAVGDVSEMTVTETIGCLRAFEVSSKGRRRENAGEEQLLIAGAEQRLTRAEWEAIVAEEKKSYEASGSVTKKFRSKFDKSKIECCRCGKFGHFADECDEPRKMTKAVAQLAIADADDEPTLL

SEQ ID NO: 19710 - protein, 725 aa, Oryza sativa
  Clone ID: TF_OSC400872j.C1.p5.fg
MSGTSSDEPTLENLAHKLKGMENWYEELMRNSKSYKESTDKHLKTLSESLVKVVDQIEKMNQSHKQLTENIQNMNIGHENIVRRIGLLEAAGEEGAGATAHRHQRYDNEDEEQSVADDEEEDESVRNRRQRRVRDKDDPLSKFEPSVYLDWELAVEQKFSCYDFPDNKKVKAASSEFTSFASLWWNDICGRGLRPRTWDDMKRTMRSRFVPFYYARDILNKLQLLRQGPNSVETYYQEMMITLSRCDLQETEDARISMFYGGLKREIRDILEYKEYNTMNRLFHFACKAEREVQGRNKHRSSFAGATSTRQSTPRQSTTAVRPASSTPPTSTPSHAQETSKNASVQTPAKSETSVVSTGRTRDTTCHRSHGIGHIARDCPNRRALFVNADGEYTSASDCDDEYALATTNHAGGQDNDDIEKVHLHPESLDQYPSLIVKLALSAKEKCEEQNQRHNLFQSKVLVKGHTVKMIIDSGSCNNLASEEMVKKLGLTTHPHPHPYHIQWFNTCGKMKEYEDVFHDEIPPRMANGRESAHNQEDGIESRTTPIQEGEDDEDITSSDTLITSHAPMIIPSPSPVQPPEIALTSNGPSTFMPTPIWCSLVCIAGMINRASRLWERPCAHAYRINARRGSGVGWIYTGWGEPTGSATAGFRTQRPLTISPPDPMVADRSRAHCSRYHLPLEEVERRGGENRKWKIGVAERIRRGMGERIQRYFTEERVDAGLVG

SEQ ID NO: 19711 - protein, 1021 aa, Oryza sativa
  Clone ID: TF_OSC900139j.C1.p6.fg
MASSSSAATISNPMFGLQISEKLTKHNHSLWSAQILTTLRGAQLDGHLSGTTEAPAAEIEKEEGDKKIKIMVSNPAYKAWFAQDLQVLGFLFSSLTREILQQVAGATTAAQAWSMIGDMFSTKSKAGSINVLLALTMTQKSPMTISEYIAKMRSLADEMAAAGEPLDDEELVAYIINGLDSDFDAVVEGIMATERIAPPSVSHVYSQVLSYENRMKIRQAYVTTSANAANCGGRGGRNSGGNRGRGGFGRGGRGGGRGNPAGNNQGRGRGNDSRPLCQVCHKRGHVASDCWHRYDDSYVPDEKLGDNYGFLEIHGKYFLIKDKATRRIILEDVWEPASTSLGAKKYYVSFIDDYSKFVWIYFLKHKSEVFQKFHEFQKLVERQFDRKILAMQTDWGGPPEIAATDALGTLDGVPGAHEELSESTQDSAPAAVSGLPTDTPGSLSQGEQERSPARTAVRSQPSHQSGGDTSAGSGVLSPAHGDNIVTSDVTAPGSSTSAAPAQQQIPAEVMRPKTRLQSGIRKEKVYTDGTVRYSCFTSSGEPQSLCEALGDKNWKHAMDIPPKKGLNIIDCKWVYKIKRKADGSLDRYKARLVAKGFKQRYGIDYEDTFSLVVKAATIRTILSIAISRGWSLRQLDVQNAFLHGVLEEDVYMKQLLGYEQKDGYVCKLDKALYGLKQAPRAWYSRLSTKLHELGFKSSKSDTSLFFYSKGDITMFMLVYVDDIIVASSSHDATNVLLKNLNREFALKDLGELHYFLGIEVKKVNDGIVLTQEKYAKDVLRRVNMSECKAVNTPLSISEILSAQGGTPLGPEDSTKYRSLVGALQYLTLTRPDLSFSVNKVCQYLHAPTTEYWVAAKRILRYLKHTVKLGLKINWAGCLDDRRSTGGFAVFIGPNLVSWSARKQATVSRSSTEAEYKALANATAKIMWIQTLLLELGVQVPRAAKVRCDNIGAKYLSSNPVFHTRTKHIEVDYHFVRERVARKLLQVEYISTTDQVADGFTKTLAVRQLEMFRNNLNLTCID

SEQ ID NO: 19712 - protein, 1911 aa, Oryza sativa
  Clone ID: TF_OSC900300j.C1.p6.fg
MADKTLREFAAPSVDNVAIGPQINMGDVDFGLKSSLITMAQASPFSGKPNEDPTLICSSSWRSIAQLLQWTHSHVPRSLAAAAGGAFFSKTVRGAVDLIEKMVSNMGWSEERLQTRQRGMHTVKETELLTAKLDLLMKHLDDHDKRPQGTVKALDSHVTCEVCGGTGHSGNNCPEIHEEAKYMGNNNNGYRPQGGQGWNEPRPYYQGGTNGIAKEVPSNDSADKEIQPEKAVPQEYCDTRLLPFPQRSRKPSVDEQFAHFVEVIQKIHINVPLLDAMQVPTYARYLKDILNNKRLLPTTEFGQALYDLGASVSVMPKDVFDKLNFTVLAPTPMRLQLADSSVRYPVRIAEDVPVKIRDFFIPVDFVVLDMDTGKETALILGRPFLSTARANIDVGTGSIRFHINGKEEKFYFQLRTEQFSMVRIKYRPNPQNIQVVEVEPPKTDSLVKFMQNFLEKETTMPRNRYWKTPMDRSSWMYEMRRMQPVFIKEASKFIDQAKAHALRENMTKIFCPCRHCKNQKLLVDPDEILGHIMEYGFTANYKVWTYHGEFADPEDDNEELSFEMNKAENFIIEDMSRERMDVDVSTDSDDFEGGFDLDDMLRHVEPKVLAGRSRGLENWQALEKASKDLLYDETKGCDKDFTVLRSVLELLRLKTKHGWLDTSFNDLMSLLLVLLPKPNFVPSNTYQAKKLICPLSLGVEKIHACKNHCILYRKEYANLESCPMCGTSRYKMGNGPIDSECTDPDSDKGKRGKIPSMVMWYLPIKDRQKRLYSNPTDAELMRWHQESRKIDGMIRHPADARQWKKFDAKHPEFAKDPRNVRFALSIDGMNSFGDLSNSHNTWPVLLTMYNLPTWICQKRKYILLTILIQGPNQPGIDIDIFLEPLMEDMEELSKEGLRLWDEFKREHFNLGKTGCLICLEKTSYKYLTSSLKTVYMRHRRFLPQRHRYRKMARLFDNIVENDTAPEARSGTYVYEITKKIKVVYGKGKKKTVKRKKADGDKDTALPFKKHSIFFRYLDYWKDLEIRHAIDVMHLEKNVFDSTIGTLLDIPSKTKDGLKSHNDLVDLAIRHDLLPVVLPNGKTEIPPACYSLTLEEKKAFCKCLQGVRVPTGFASNIRKLVSMKDLTISGYNAHDCHRLLMVFLPIAIRAVKPVHTKVVITKLCYFFNRISQKMWAFERYMSILKGYVLNRAHPEGSMIEGYTTEEAVECCMDYIKDANAIGIPVHRHEWRLSGRGTVGRKQFFDNEYKMVSAAHNNVLQQLAIDEPFIERHLEEMKACFPGNLLYKDWHVGLQVLSIHGKIPVLRCEWVKDTTGVSVDDYGLTIVDHSKTGHEDDPWVLAERVAQVFYVKDPSDERKTIVISGKQQIVGIDNIEDPNDYNQFDDVPLFTDLPMRIKKVERTIDEANMSWKMSNDKVPSNAPIAPQEGNAPQKSGSNKQPDASSEETWRTPSDPFPMEITQVAPRDDDPYYIPMEQADGKPVEPPIVRSKFSNTCGTLVRTRFPINVKLWETVDDNIKTLLWNELQKYFVYPPGSELISTYDPKEIDKDKEKFMFSAFRNSEKRKKLAHVMSDSQKSVLAAQDEVQSWLSADVPETYEYGKPFLPTYLMNKLPWEMRVIHEWYIKASRKGLGFISVAVPEGAFMSGPNGIFFISFQDLYALYKLDKMDVNLVAVFCLMQFHEADRTGAKVGYVDPTRICKTQHIVELREDCEQLVGKTPKEKEEYVKTLHKRKKLEVATYLAIAMLAHADKDDLMVPYAFTDHYILFLVYPKDQLIISLDPAHYDKETFMEFLTILNLAHKYYRKRGGPVHITSQKQLSVRTGWLCYKQPPGTNLCGYYVCKMLRVNGRYKTTSNRIPKIPYIAQQFNDNTILNMAADLCRFIHRDVCNARGLFYDNQSELAMDDKFKPLRE

SEQ ID NO: 19713 - protein, 1245 aa, Oryza sativa
  Clone ID: TF_OSC401367j.C1.p87.fg
MASSSSSIPFALHGQSVSEKLTKSNFVLWKAQVLATLRGAQMAGFLDGSNKAPEATIVITKDDGKTTEKVANPALAQWVAQEQQVLSYLLSSLSRDVLTQVATLGKATEVWEALKASLRRSLELASSTPAWRSPPPRKGTKLSLNMNPLDEEDLVSYILVGLDFDYNSVVSSVAGRADSISVSELYALLVGFETRLDLLQNNSSPSANTVSRGGRGGGGGGRGQGGNNGGRGGGFRRGRGDGKPKPTCQLCGKIGHVVAKCWKRFDPSFTGEEKVASTAATNNSYSIDTNWYIDSAATDHITSEMEKLAIKDKYHGNDQVHAASGSGMDIDYVGHTAICTPTRDLWLKNILHVLEAYKSLVSAHCFARDNRAFVELHPCFFLVKDQVTRRPLLRGRCESGLYPLPTDKQAHGAIKPSLSRWHSRLGHPSFSIVDRVVSTNNLHVTRDSSRRLKPCKQIGGGEFQRLNSFFNNVGIEHHVACPYAYQQNGSVERNHHHIVEVGLSLLAHASMPLKFWDEAFTTAAYLINRTPTRVLSYETPLQRLFNLPPDYFLLRTFGCACWPNLRPYNTRKLAFRSKQCAFLGYSTMHKGFKCLDIAAGRVYISRDVVFDVQVFPFAQLHSNAGARLQSEIQLLTPNLLPSIMLDHGGAVVHDQPLINNPNPTDSSGESAGQNSGANGENSAANDSESTSINHDFMQNCDLASSGEHYTADDDPNADSADSVSRQVDPEADAAAHGSAASSPPTTPSHVDSDAFGPTMSLQDAGPTPTPATGSPTPTISAVESEATPEAQPIPGPITRAHHGIHKPKKYTDGTVRYACLTDTEEPSSLQEALHDKNWKIAMDKEFAALVHNKTWHLVPPQKGTNVIDCKWVYKIKRKADGIIDRYKARLVAKGFKQRYGIDYEDTFSPVVKATTIRLVLSLAVSQGWSLQQLDVQNAFLHGYLEEDVYMRQPPGYEESKVPHYLCKLDKALYGLKQAPRAWYSRLSKRLQELGFTSSKADTSLFFFNKKGLVMFLLVYADDIIVASSCSQAVTVLLENLEKDFALKDLGELHYFLGIEVKKDGDGLLLSQERYANEILKQVSMTGCKPVSTPLSTVEKLSAHEGEKLGVNDSSQYRSIVVALQYLTLTRPDISFSINKVCQFLQNPFVVHWAAVKRILRYLQGTVKLGLKIEKSPSSVVSAFSDADWAGYLDDRRSTGGFAVFLGSNLISWNARKQATVSRSSTEAEYKALANATAEVMWNSSS

SEQ ID NO: 19714 - protein, 486 aa, Oryza sativa
  unsure (1)..(486): unsure at all Xaa locations
  Clone ID: TF_OSC14790j.C1.p1.np
FSYPISGSVRSQSLXSRSRRSTRQTRAPNRFGFEEEPVQSEIPDQPVNQADEQEAESDHTVASESVNNARGNQPPPMLHQILAMQTQILQGMIQNIIAMQQQHTQERQPHMVQDNGRSKLNDFLTSRPPEFSQTTEPIEGDDWIKDVERRLNLVQCTPYEKTLYAAHQLRGPTADWWDNYCANHTDAGTIVWAEFAXVFRSAHILESIIDLKKEEFANIRQGSSGINEYLSRFNRLARYALEDADTDKKKIRRFLKGMDAKLRVKLLAHDFSMFQQMVDKSLLLEDAEXEMQEXKRRKVISRDSSKRRFVSKKTNSPAQYYQRVFQYSNGFGSTSRSTMSESSQQTTVINSKSLEGSNSVSCPPPPKSKAGVECFICHEMGHYSWYCPQVKSKQVQPTASLPSVPGPKSSKSNSGSVSLTSPPVGQSHLNHVQVETKGKAVPTVMGGCEVVPVTXICLPVLYEKLLWIGNCHQNQPTWQMDDLSGQ

SEQ ID NO: 19715 - protein, 453 aa, Oryza sativa
  Clone ID: TF_OSC401437j.C1.p16.fg
MARRSTRQIRAPNRFGFEEELVQSEIPDQPVNRTDEQEAESDHTVASGSVNDVARGNQPPPVDLHQILAMQTHIIQGMVQNIIAMQQQHTQERQPHMVQDDGKSKLNDFLGSRPPEFSQTNEPIEADDWIKDMERKLNLVQCTPQEKTLYAAHQLRGPAADWWDNYCATHTDASTIVWTEFAGAFRSAHIPESIIDLKKEEFANIKQGSSCINEYLSRFNRLARYAPEDVDTDKKKIRKFLKGMDAKLRVKLLAHDFPTFQQMVDKSLLLEDAEKEMQEYKRRKVMSLEIQAKEDLCRKTNSPAQYYQKASQHSNGSGSTSRSTMSEPGQQATMINSNSHEGSNSVPCPTPSKRRGYKAGVECFICHEMGHYSWYCPQKVKSKRVQPTTGLPNVSRPKSLKAPNSGSISLTSPPIGQSHLNHVQVETNGKVVNLEQVEGAGEEQVPQARAEPQ

SEQ ID NO: 19716 - protein, 687 aa, Oryza sativa
  Clone ID: TF_OSC408741j.C1.p9.gm
MEDAEAPRRLLNDTDLDLVSDRERQAYYILSDRDCRELTIPQQIIEESHAGGAYRETRNMTRNERKSTSSSTPVQMYEAEKGKRPSHRATRFVKSNGKYCSKCREVGHLVNDCPGGCASNSKAYQFYNKNRGIVEETADVQFGETNGTQEGHENLDDVGDEGLMRAMKNMSIGDVKEFDMSLIGELSFFLGLQIKQLKDGTFVSQTKYIKDLLKRFGLEDAKPIKTPMATNGHLALDEEVMASRTRRGRREPTPEPVSENDESSGEEYAQSEEEFVEEVEGAEEEASRDDSGSGGGEDEESDDEGLLDPTIYFSLNLRNAQQYTILHHHNQFRRPNDCANPQFHTRYQKAVYEQVYANKAFADHKWISWRHISETPEFVDLQGMFKAVGIDRIVTLKQPYDEDLIRHFYATVWVSSDCDAMKWMSGTIQCSINRREFKELLHIHFNNGDDLHDEHTHNPFPIDHYAQFYEEGGRHTYEKVAGLRIIPSGQPHSESHPSPKEIAISKGTIGQEIYYAPYIMRLIQSKLGEVGDNLREHKEYKLRRQLSTPRAPQMHQHIFDQGASSSAAPPHPHGFVDPNAFFNPQYAYFGMQPNDYFNPVLRAINTLSESIQRLSTRHEAMHEDPDQAGLTGAQGRSDRRQLGGLAGPPEAGMSSLWAGSRLTHPLTNGACGGFVIEQWSWARLNGE

SEQ ID NO: 19717 - protein, 2023 aa, Oryza sativa
  unsure (1)..(2023): unsure at all Xaa locations
  Clone ID: TF_OSC34301j.C1.p1.np
LTAADLPRRFPSSGRSLPLPTLFKPSPHLLRPVPPLAALPPRRIRARDVLSLRRRRRAPVHHRRRPGPPPTSAPPPSASPHPRRPRSPLCFGRRXPERRRPRRPEPRHRLPPLRPPPPSPPSPRGEPWTVASFPFPPLSRPPLRSIYGRSRRPSGRGRAASRRPRRRGRPRARRVAAAWSPAISRPRPQVRLTCGAHGAGRASPGAPGPPWTHLGHIRISLRASVAKHYRFHMSSGTNDGYTSCGPTNDGYTSCGPVVEMSWHRAGVLLLGAQSCLPVRGVPAVGGVGSMYTSDQSIICSNSRALGYGQAEQCTQMAGSINHRGLDLTGFVLELRGMCVVLGYPHGVDYQGKQLSKQEGDDAEPHAAWEVTAVILTGSPERTSLAVTAGGDSFSAACQNAALLTIGTLHQRYPDELQHSPYRYHPRRGGARDYATFRDASSEDDATIMHLARIVEAYDVARIDFHQMVRRGLVENNMKILELRQENLQLKKDLDAGEAQLCQLKIAXGEVCRPKRCRVCRSLKITARKSTSRPELVRQSLAWTCFVETPRDEPAPLVSQDEGASGVGSTEDALLLTFHGETRRSAATGEGSHPEGSNYNNHGSPPPPPHPPPPPPPDTNSILTQILAQQANMMAAFLHHIQNPPQHNAPPPPPPPQHSKLAEFLRIRPPTFSSSNNPVDALDWLHAVGKKLDTVQCNDEEKVIFAAHQLQGPASLWWDHFXATQPEGQPITWARFTAAFRRTHVPAGVMTLKKREFRELKQGNCSVMEYLHEFNNLARYAPEDVREDEEKQEKFLAGMDPELSVHMVSGDYPDFQRLADKSIRLEAKHKELESHKRRLANFRNQQGANQRIRYTNPYPGGSSSQQQQQPRSALRPQFVVRVPQPQQQQSQQGTRAPRPPTPAVQPGQGRRDVHGQQRLCFNYFEPGHFADKCPKPRRQQGQAPPRPNNGGKDVIRGRVNHVTAEDMLTTPGVIVGTFLIHSIPATILFDSGASHSFISVPFVGRNQLGVERLRNPLLITTPGGVMTAKYYSPAVPIEIQGILFPSDLILLDTKNLDVILGMKWLAQFQGVVDCARRTVTLYRGPEQPVVFFAPPTSASSSELHQIGLSEIPIVREFGDVFPEELLGMPPKREIEFRIDLAPGTTPLYKRPYRMAANELAEVKKXLEELKEKGYIRPSTSPXSAPVIFVEKKDKTKRMCVDYRALNEVTIKNKYPLPRIDDLFDQLKGATVFSKIDLRSGYHQLRIREEDIPKTAFTSRYGLYEFTVMSFGLTNAPAFFMNLMDKVFMENLDKFVVVFIDDILMYSQSEEDHQQHLRLVLGKLREHQLYAKLSKCEFWLSEVKFLGHVISAKGVAVDPETVTAVTNWKQPKTVTQVRSFLSMAGYYRRFIENFSKIARPVTQLLKKEEKFVWSPQCEKAFQTLKEKLVSSPVLILPDTRKDFLVYCDASRRGLGCVLMQEGHVVAYASRQLRPHEGNYPTHDLELSAVVHALKIWRHYLIVNRCEIYIDHKSLKYILTQSDLNLRXRRWLELIKDYDVGIHYHPSKANVVADALSRKSHCNTLGVRGIPPKLNQQMEALNLSIVGRGFLATLEAKPTLLDQIHEAQKNDPDMRGLLKNMKQGKATGFTEDEHGTQWNGNRHVKAEHQRPAGLLQPLQVPEWKWDEIGMDFITGLPKTQGGYDSMWVVVDRLTKVARFIPMKTTYGGNKLAELYFARIVSLHGVPKKIVSDQGSQFTSHFWKKLQEELGTRLNFSTAYHPQTDGQTERLNQILEDMLHACVLDFGKTWGKSLPYAEFSYNNSYQASIQMAPYEALYGRKCRTPLLWDQVGESQVFGTDILREAEAKVRTIRDNLKVAQSRQKSYADNRRRNLEFAVDDFVYLRVTPLRGVHRFQIKGKLATRFVGPFRIIARRGEVAYQLELPASLGNVQDVFHVSQLKKCLRVPSEQADSEXIEVREDLTYVERLVKILDTMERRTRNRVIRFCKVQWSNHAEEEATWEREDELKAVHPDLFAGSSESRGXDSV

SEQ ID NO: 19718 - protein, 1634 aa, Oryza sativa
  Clone ID: TF_OSC400231j.C1.p31.fg
MTTLAPCAKHYTPKGLTTLLQTNPNNRHTIPKTLKWDEITLPEKWVLSQAVEPKSMDQSEVESLIETLDGDVEITFASKQKAFLQSRPSVSLDSRPRTKPQNVVYATYEDNSDEPSISDFDINVIELDVGFVIALEEEEFEIDKELLRREIRLPKNRAKTKRYLEEVDESFRMKIREVWHNEMREQRRNIFFFDWYENSQIIHFEEFFKRKNMIKKEQKSEAEDLTVIKKVSTEWETASGNKVDSVHPPFESIQLSHNGGKACPLKSISKNTYGETAKVEHIGHLVEQQNYANISLRSLGQQTDRIETILMEGYKTGRPEVKINIPSNSQSSSSQSVSPMFVPTIDPNIKFGKQKAFGPAISEELVNELALKLNNLKVNKNINEISDNEKYDIVNKIFKPSTLTSTTRNYYPRPTYADLQFEEMPQIQNMTYYNGKEIVEWNLDGFTEYQIFTLCHQMIMYANACIANGNKEREAANMIVIGFSGQLKGWWNNYLNETQRQEILCAVKRDDQGRPLPDRDGNGNPTGNISDALATLIYNIIYHFAGNYHDIYEKNREQLINLKCKTMSDFRWYKDTFLSKLYTLPEPNQDFWKEKYISGLPPLFAEKVRNSLRKEGGGSINYHYLDIGKITQKIQLVGAELCNDLKIKDQLKKQRILGKREMGDFCYQFGFQDPYVYRKRKTHSKPMTKPNDKSKMSFQATKRKPKRIYNKNIRTQDTESKETICYKCGLKGHIANRCFKSKVKKEIQALLDSESEDVKEKLEAILNNIDNDLSSDEEKNAEINCCQDSGCSCCEPDNSEEESDENILVLTSLEEFVLDTFETIQDPEEKRRVLEKFLSRVKTDKDKLKKDIQKSKFLSIDEVFKRLDEQKKKNEQPDLISLFEDQKIMKQDLEEIRKRLYMLESKEGFHMEEKDEPIQEDDHVVGTIQKYMKQKWYTEVMYRFIDGSYFQHITLIDSGADVSCIREGIIPHKYFYKAAHRIRGADGRLLTVEYQIPEIYICISEVCIKTSFLLVKNLKQDVILGTPFLSLIRPFLVTNEDIQFKIMDKQVSLRFSSNTDEILDQLIQTKREQVVNTIYLHDNSFPSYLPKSMDLPGKTSWEDRYLLKATKDFEYICREMASQKSEWLTNMSSWRLPQLPRGHGERFNHNFRVTELQQGLLNLLWQTKNKKEKAHALNGLAYYFKNFVPSDQKITEKRAKIQDIPHHEEMLLDYREEKSRDGQDKLPMEVEQSMATDKNTKVFSDKILISTDPASSMVAFHININNLLQSFPHNKPSSSTKRHDTIPQTPYILHNHPNSFLPQYILRTQPKAPCRSCAYKDSCQKKLKSQNPMSTTYENLQPRLSFKTEQTLSCFGQDILDLVWHKFKERQMKIFLGLQDYFFDLLEGRERNPAIRVIIYMLPLLRLDDQAISDPSYRFLVLKAEINLQRFRNLPTYNHEEISLQTIIDHGLVNSIYATLDQILQSDLGNAVKDICRRLGHGRYRIIFSSIPPKFTPPVRPAIHYIYIMNRQFNFQEDGPSKLSDEEEEIYTTIANHENWRLFSEAAEIEEAITTDYEYQLVFQNKITRIFISKFYNQSYEYFKGAGHIIKPDFGNECSKKSYYRSLAQWFQKTEPSEIDTVQSAPMIINEDNE

SEQ ID NO: 19719 - protein, 1204 aa, Oryza sativa
  Clone ID: TF_OSC401054j.C1.p45.fg
MDNKIFKPSTLTSTTRNYYPRPTYADLQFEEMPQIQNMTYYNGKEIVEWNLDGFTEYQIFTLCHQMIMYANACIANGNKEREAANMIVIGFSGQLKGWWNNYLNETQRQEILCAVKRDDQGRPLPDRDGNGNPTGNISDALATLIYNIIYHFAGNYHDIYEKNREQLINLKCKTMSDFRWYKDTFLSKLYTLPEPNQDFWKEKYISGLPPLFAEKVRNSLRKEGGGSINYHYLDIGKITQKIQLVGVELCNDLKIKDQLKKQRILGKREMGDFCYQFGFQDPYVYRKRKTHSKPMTKPNDKSKMSFQATKRKPKRIYNKNIRTQDTESKETICYKCGLKGHIANRCFKSKVKKEIQALLDSESEDVKEKLEAILNNIDNDSSSDEEKNAEINCCQDSGCSCYEPDNSEEESDENILVLTSLEEFVLDTFETIQDPEEKRRVLEKFLSRVKTDKDKLKKDIQKSKFLSIDEVFKRLDEQKKKNEKPDLISLFEDQRIMKQDLEEIRKRLYRLESKEGFHMEEKDEPIQEDDQVVGTIQKYMKQKWYTEVMYRFIDGSYFQHITLIDSGADVNCIREVCIKTSFLLVKNLKQDVILGTPFLSLIRPFLVTNEDIQFKIMGKQVSLRFSSNTDEILDQLVQSKREQVVNTIYLHDNSFPSYLPKSMDLPGKTSWEDRYLLKATKDFEYICREMASQKSEWLTNMSSWRLPQLPRGHGERFNHNFRITELQQGLLNLLWQTKNKKEKAHALNGLAYYFKNFVPSDQKITEKRAKIQDIPHHEERLLDYREEKSRDGQDKLPMEVEQSMATDKNTKVFSDKILISTDPASSMVAFHININNLLQSFPHNKPSSSTKRHDTIPQTPYILHNHPNSFLPQYILRTQPKAPCRSCAYKDSYKKKLKSQNPMSTTYENLQPRLSFKTEQTLSCFGQDILDLVWQKFKERQMKIFLGLQDYFFDLLEGRERNPAIRVIIYMLPLLRLDDQAISDPSYRFLVLKAEINLQRFRNLPTYNHEEISLQTIIDHGLVNSIYATLDQILQSDLGNAVKDVCRRLGHGRYRIIFSSIPPKFTPPVRPAIHYIYIMNGQFNFQEDGPSKLSDEEEEIYTTIANHENWRLFSEAAEIEEAITTDYEYQLVFQNKITRIFISKFYNQSYEYFKGAGRIIKPDFGNECSKKSYYRSLAQWFQKTEPSEIDTVQSAPMIINEDNE

SEQ ID NO: 19720 - protein, 1529 aa, Oryza sativa
  Clone ID: TF_OSC401341j.C1.p21.fg
MAQGRCPAARGSVLPTCPGGPAVGGIGSVLLSMARMGWKLCHVFRLFTVVMAGSINRRGLDLTGFVLELRGMCVVLGYPHGVDYQCRQLPEQEGDDAERHAAWEVTAVILTGSPERTSLAVTAGGDSFSAACQNAALLAIGTLHQRYPDELQHSPYRYHPRRGGARDYAIFRDASSEDDATIMHLARMVEAYDAARIDFHQMVRRGMVKNNMKILELRQENLQLKKDLDAVEAQLHQLKIAQGEMVTTRRSANTGDGNQPKGSNHNNHGSPPPPPPPPPPPPPDTNAILTQILAQQANMMAAFLHHIQNPPQHNAPPPPPQHSKLAEFLRIRPPTFSSSNNPVDALDWLHAVGKKLDTVQCSDEEKVIFAAHQLQGPASLWWDHFQATQPEGQPITWARFTAAFRRTHVPAGVMALKKREFRELKQGNRFVMEYLHEFNNLAQYAPEDVREDEEKQEKFLAGMDPELSVRLVSGDYQDFQRLVDKSIRLEAKHKELESHKRRLASFRNQQGANQRVRYTNPYPGGSSSQQQQQQQQPRSAPRPQFVVRVPQPQQQQSQQGTRAPRPPTPAVQPGQGRRDAPGPQRLCFNYFEPGHFADKCPKPRRQQGQAPPRPNNGGKDVNRGRVNHVTAEDVLTTPDVIVGTFLIHSIPATILFDSGASHSFISVPFVGRNQLGVERLRNPLIITTPGGVMTAKYYSPAVPIEIQGIPFPSDLILLDTKNLDVILGMNWLAQFQGVVDCARRTVTLYRGPEQPVVFFAPPTSVGSSELHQIGLSEIPIVREFGDVFPEELPGMPPKREIEFRIDLAPGTTPQYKRPYRMAANELAEVKKQLEELKEKGYIRPSTSPWGAPVIFVEKKDKTKRMCVDYRALNEVTIKNKYPLPRIDDMFDQLKAATVFSKIDLRSGYHQLRIREEDIPKTAFTTRYGLYEFTVMSFGLTNAPAFFMNLMNKVFMEYLDKFVVVFIDDILVYSQSEEEHQHHLSLVLGKLREHQLYAKLSKCEFWLSEVKFLGHVISAKGVAVDPETVTAVTDWKQPKTVTQIRSFLGLVGYYRRFIENFSKIARPMTQLLKKEEKFVWSPQCEKAFQTLKEKLVSSQVLILPDTRKDFMVYCDASRQGLGCVLMQEGHVVAYASRQLRPHEGNYPTHDLELAAVVHALKIWRHYLIGNRCEIYTDHKSLKYIFTQSDLNLRQRRWLELIKDYDVGIHYNPGKANVVADALSRKSHCNTLDVRGIPPELNQQMEALILSIVGRGFLATLEAKPTLLDQIREAQKNDPDMRGLLKNMKQGKAAGFTEDEHGTLWNGNRVCVPDDKELKQLILQEAHESPYSIHPGSTKMYLDLKEKYWWVSMKREIAELVALCDVCQRVKAEHQRPAGLLQPLQVPEWKWDEIGMDFITGLPKTQGGYDSIWVVVDRLTKVARFIHVKTTYGGNKLAELYFARIKCLRVPPEQADSEQIEVREDLTYVERPVRILDTMERRTRNRVIRFCKVQWSNHAEEEATWEREDELKAAHPNLFGSSSESRGRDSV

SEQ ID NO: 19721 - protein, 1851 aa, Oryza sativa
  unsure (1)..(1851): unsure at all Xaa locations
  Clone ID: TF_OSC401344j.C1.p2.np
MAAGSSAPVSPSSGRPLSPPTLYPSPSSPPPFPPLTALSPRRNRARAVALSLRRRRRAPVCHRRRPGPPPTSAPPPSASPHPRRPRPPLRFGRRPPEHRRPRPPEPRRRLPPLRSPFPSSPSTRGEPWTAASFPPFPPLSRPPLRRAYGRRRRPXGRGRAASRLRRRGRLRACLAAAAWGPAVSRPRPXVRLTRGTHGAGRCEPGAPGPPWTHLGHIRTGLRASVAKHYRFHMSSGTNTNEGYTSCGPVVEMSWHRAGVLLLGAQSCLPVPGPAVGGIGSYTSDQSITYSNSRALGYGQAEQCTQMAGSINRRGLDLTGFVLELRGMCVVLGYPHGVDYQGRQLPEQEGDDAERHAAWEVTAVILTGSPERTSLAVTAGGDSFSAACQNAALLAIGTLHQRYPDELQHSPYRYHPRRGGARDYAIFRDASSEDDATIMHLARMVEAYDAARIDFHQMVRRGMVKNNMKILELRQENLQLKKDLDAVEAQLHQLKIAQGEVCRPKRRRVYRSQKITARKSTSRPELVRQSLAXTSFVETPRAEPAPVVPQEGEASGVGSTEDALLLTFHGETRRSANTGDGNQPKGSNHNNHGSPPPPPPPPPPPPPDTNAILTQILAQQANMMAAFLHHIQNPPQHNAPPPPPQHSKLAEFLRIRPPTFSSSNNPVDALDWLHAVGKKLDTVQCSDEEKVIFAAHQLQGPASLWWDHFQATQPEGQPITWARFTAAFRRTHVPAGVMALKKREFRELKQGNRFVMEYLHEFNNLAQYAPEDVREDEEKQEKFLAGMDPELSVRLVSGDYQDFQRLVDKSIRLEAKHKELESHKRRLASFRNQQGANQRVRYTNPYPGGSSSQQQQQQQQPRSAPRPQFVVRVPQPQQQQSQQGTRAPRPPTPAVQPGQGRRDAPGPQRLCFNYFEPGHFADKCPKPRRQQGQAPPRPNNGGKDVNRGRVNHVTAEDVLTTPDVIVGTFLIHSIPATILFDSGASHSFISVPFVGRNQLGVERLRNPLIITTPGGVMTAKYYSPAVPIEIQGIPFPSDLILLDTKNLDVILGMNWLAQFQGVVDCARRTVTLYRGPEQPVVFFAPPTSVGSSELHQIGLSEIPIVREFGDVFPEELPGMPPKREIEFRIDLAPGTTPQYKRPYRMAANELAEVKKQLEELKEKGYIRPSTSPWGAPVIFVEKKDKTKRMCVDYRALNEVTIKNKYPLPRIDDMFDQLKAATVFSKIDLRSGYHQLRIREEDIPKTAFTTRYGLYEFTVMSFGLTNAPAFFMNLMNKVFMEYLDKFVVVFIDDILVYSQSEEEHQHHLSLVLGKLREHQLYAKLSKCEFWLSEVKFLGHVISAKGVAVDPETVTAVTDWKQPKTVTQIRSFLGLVGYYRRFIENFSKIARPMTQLLKKEEKFVWSPQCEKAFQTLKEKLVSSQVLILPDTRKDFMVYCDASRQGLGCVLMQEGHVVAYASRQLRPHEGNYPTHDLELAAVVHALKIWRHYLIGNRCEIYTDHKSLKYIFTQSDLNLRQRRWLELIKDYDVGIHYNPGKANVVADALSRKSHCNTLDVRGIPPELNQQMEALILSIVGRGFLATLEAKPTLLDQIREAQKNDPDMRGLLKNMKQGKAAGFTEDEHGTLWNGNRRVKAEHQRPAGLLQPLQVPEWKWDEIGMDFITGLPKTQGGYDSIWVVVDRLTKVARFIHVKTTYGGNKLAELYFARIVSLHGVPKKIVSDRGSQFTSHFWKKLQEELGTGEVAYQLELPASLGNVHDVFHVSQLKKCLRVPPEQADSEQIEVREDLTYVERPVRILDTMERRTRNRVIRFCKVQWSNHAEEEATWEREDELKAAHPNLFGSSSESRGRDSV

SEQ ID NO: 19722 - protein, 1387 aa, Oryza sativa
  Clone ID: TF_OSC401549j.C1.p15.fg
MRAQPPNGLQSKGPGDGLYKRQPKALLALARKQRRPINPKRSFAEVVRAGEMAGGGGRYGGGRGTGSGGDGQDGDGRGGVFNPGRGEAATGNGSGGASGRGHQGRGGDSNRGPDGQFAVNLNAATASGTDVPRGESRVDIVTAEAGTSSKASKGRCFRCKEKSHAVSECTKILCDICEAPEHTALSCPLLLAPKPTASMCGWGVDGGGFFMIPTPTTGAVKPREHNKTAIIRVENGHISVDNLIIELRRLVPVRFQWDVKETAPDTYMVQFPSVIELDRLRRVGSVPSFDFNVNLVIDKWEQEIEAKFVLKKTWFKVYGVSYEIRDFLSLHAVGSVIGQTTTVDMIYLRKNGVVRMQVAVDELADLPPSVYVVVRNHGYEIFFEPELPEVDGKGKKKIDDIDQDGERKNGGDHDVHMEDRDPKRQKNGSDGSLRMEIGGLAPAKLPSTRTNNMVLDNEAFSPSPSSDTPATTTELEAFASYSSVVLETPMSQLGAQGTGNSESTKEAVGEVVYSDEVSTQLAKLATTKVLSTEVAVQLAGTDEVVTNGKEQQQEPVSMAQELQHVSASFLSPVEHVLDCNVQSELLPKNSQLAGDGRVTSTKNLMAVLATNEDQLSASSAATSKAQDAAQAVGARSPTRRRPRRPVDPIPTRQSERQKAMANADAPVANRAELLKKVHNLETLTGVSLGKNDLEIKESINQIKISEVDRFATLYSSAVASTSNVDKSNDELLKLSSLQHLCSDWLEEAESNDDESMDSQAIPQMRKISTKVKHKVVKNDLAKLLRDEELYWYQRSKTNHLLQGDSNTKYYHLIDNGKHRKQMIFQLEQEDTIITGEGNLKEYITNYYKGLFGPPDHNHVSMIEGWTDDIPQVSDLENDILTAEFSEKEVKEAIFQMDHNSSLGPDGFPAEFYQVFWEIVKNDLMALFREFHKGTLSLYNLNFGIIALLPKKADANQIQQYRPICLLNVSFKIFTKVDTNRITTVAHKVIRPTQTAFLPDRNIMEGVVILHETVHELHTKKMDGIIFKIDFEKAYDKVKWQFLQQTLRMKGFSQSWCNWISNWVEGGTVSVKVNDNVGKNFRTRKGLRQGDPMSPILFNIVADMLAILIEKVKVDGQIRGVIPHLVDDGLSILQYADDTIIFLEHDFEQAKNMKAILCVFEHLSGLKINFHKSEIFCFGGAKEMEDQYRQLFGCNSGSFPFKYLGIPIHYRKLRNFDWKCVEDRFQRKLSAWKGKNSSYGGRLVLLNLVLSSLPMFMLSFFEIPRGVLQRLDYYRSSFFWSSDSQKKKYKLTKWDYICRPKDQGGLGVLNLDIMNRCLLSKWLFKLLNGDGLWQNLLRNKYLKGYLHVFQLAPLLVYDAFTGTTGYYAQWCYTLGNSSQGTFISFWMA

SEQ ID NO: 19723 - protein, 959 aa, Oryza sativa
  unsure (1)..(959): unsure at all Xaa locations
  Clone ID: TF_OSC409046j.C1.p3.np
MACSEDNDEEGAFHSPRTKGIIKYFTRQVKXHKEGLDADLQVTNEKNGQLESTQIATNIKLTGLETSIACINTSLAALVRHFDDLNARGNGRRNEDGIEDEYADTKQDDRDALDRXQLRNNHRGMGGHRQRKVRNNDDVFFSKIKFKIPPIDGKYDPDAYLSWEIVVDQKFAWHDFPENSKVTSXFTDFSSVWXIEHGKKNPNNMPQTWDAFKRVMRAXSAPYFACDLLNRLQQLRQGVKSIGEYYQELQMGMLRCNLEETEDAAMARFLGGLNGEIYDIVDYKDYTNMTRLFHLACKAEREAGKSTLXXAGTTSPAGRTPSSSSTPTPSRAAPPPSSNKPRGPPASSTTKAVXLAASASSIASTGKTRDVQCHHCKGFGHMQRDYPSKHVLVVKNDGEYLSTSDFDEDTLALLAADHANNEEPPEEHIRANDAEHYENLIVQRVLSAQMEKAEQNHXHTLQTMYVIKERSCCMIIDGGNCHNASSEMVEKLAHSTKPHPHPXYIQWLNNSGKAKVTKLVRVNFAIGNYHDVVECDVVPMQACRGEIGSGWVGSHPSILTHILQSESGQIRIVSNTDTNSDNIWHKYEMDLYKHIYAIGYECLFGYLVKKTSLYIPIYSXRDYIRPLVSYNQRASNVILRREMNHRHPSLTVLCEVTSSCLALTNEVGGGGVETRGMQHELMSHDGFSGLPTAGALATGAVAMAETRRGVQATEDRRHERCGASMDAAAAATTVRSGRSCVAMLPMCSVHAWVRLPGWWLVGHLGLVAGSIVFSKVDLRSRCHQIHMKLGDEWKTAFKTKFRXYEWLVMPFGLTNAPSTFIRLTNEVLRAFIGKFVVVYFDDLLIYNKSMGEHLHHLRDVFNTLRDARLFGNLEKCTFCTDRVSLLVYVVTLQGIEVDQAKVEAIQECPVPITITQVRSFLGLARSYHCFVKDFSTIVAPLNELTKKNVATIWNXNTAN

SEQ ID NO: 19724 - protein, 1416 aa, Oryza sativa
  Clone ID: TF_OSC419191j.C1.p2.fg
MTTLAPCAKHYTPKGLTTLLQTNPNNRCTTPKTLKWDEITLPEKWVLSQAVEPKSMDQSEVESLIETPDGDVEITFASKQKAFLQSRPSVSLDSRPRTKPQNVVYATYEDNSDEPSISDFDINVIELDVGFVIAIEEDEFEIDKDLLKKELRLQKNRPKMKRYFERVDEPFRLKIRELWHKEMREQRKNIFFFDWNESSQVRHFEEFFKEKNMMKKEQKSEAEDLTVIKKVSTEWETTSGNKVDSVHPPFESIQLSHNGGKACPLKSISKNTYGETAKVEHIGHLVEQQNYANISLRSLGQQTDRIETILMEGYKTGRPEVKINIPSNSQSSSSQSVSPMFVPTIDPNIKLGKQKAFGSAISEELVSELALKLNNLKVNKNINEISDNEKYDMVNKIFKPSTLTSTTRNYYPRPTYADLQFEEMPQIQNMTYYNGKEIVEWNLDGFTEYQIFTLCHQMIMYANDCIANGNKEKYISGLPPLFAEKVRNSLRKEGGGSINYHYLDIGKITQKIQLVGAELCNDLKIKDQLKKQRILGKREMGDFCYQFGFQDPYVHRKRKTHSKPMTKSNDKSKMSFQATKRKPKRIYNKNIRTKDTESKETICYKCGLKGHIANRCFKSKVKKEIQALLDSESEDVKEKLEAILNNIDNDSSSDEEKNAEINCCQDSGCSCYEPDNSEEESDENILVLTSLEEFVLDTFETIQDPEEKRRVLEKFLSRVKTDKDKLKKDIQKSKFLSIDEVFKRLDEQKKKNEKPDLISLFEEQKIMKQDLEEIRKRLYMLELKEGFHMEEKDEPIQEDDQHITLIDSGADVNCIREGIIPHKYFRKAAHRIRGADGGLLTVEYQIPDTYICISEVCIKTSFLIVKNLKQDVILGTPFLSLIRPFLVTNEDIQFEIMGKQVSLRFSSNIDEILDQLVQTKREQIVNTIYLHDNSFPSYLPKSMDLTGKTSWEDRYLLKATKNFEYICKEMASQKSEWFTNMSSWRLPQLPRGHEERFNHNFRVTELQQGLLNLLWQTKNKKEKAHALNGLAYYFKNFVTSDQKITEKRAKLQDIPHHEERLLDYREEKSRDGQDKLPMEVEQSMATDKNTKPKAPCRSCAYKDSCQKKLKSQNPMSSTYENLQPRLSFKTEQTLSCFGQDIFNLVWQKFKERQMKIFLGLQDYFFDLLEGRERNPAIRVIIYMLPLLRLDDQAISDPSYRFLVLKAEINLQRFWNLPTYNHEEISLQTIIDHGLVNSIYATLDQILQSDLGSAVKDVYRRLGHGRYRIIFSSIPPKFTPPVRPAIHYIYIMNGQFNFQEDGTSKLSDEEEEIYTTIANHENWRLFSEAAEIEEAITTDYEYQPVFQNKITRIFISKYYNQSYEYFKGAGRIIKPDFENECSKKSYYRSLAQWFQKTEPSEIDTVQSAPIIINEDNE

SEQ ID NO: 19725 - protein, 1275 aa, Oryza sativa
  Clone ID: TF_OSC421500j.C1.p1.fg
MSIKNASSISFEDIEKSISNWKIPKVNIKEIYHVEREINSIRAKHQYHYLHFGLIQVAIRSLTRKGLNVSVLACLRDCRNKRFKDSLLGMVEASLSNGPVYFNTFPDFSVSLSDTNIHKVLTLNLQTSGYDLEPGSENISVTYRVYYKAMTTLAPCAKHYTPKGLTTLLQTNPNNRHTIPKTLKWDEITLPEKWVLSQAVEPKSMDQSEVESLIETPDGDVEITFASKQKAFLQSRPSVSLDSRPRTKPQNVVYATYEDNSDEPSISDFDINVIELDVGFVIAIEEDEFEIDKDLLKRELRLQKNRPKMKRYFERVDEPFRLKIRELWHKEMREQRKNIFFFDWYESSQVRHFEEFFKRKNMIKKEQKSEAEDLTVIKKVSTEWETASGNKVDSVHPPFESVQLSHNGGKACPLKSISKNTYGETAKVEHIGHLVEQQNYANISLRSLGQQTNRIETILMEGYKTGRPEKYDMVNKIFKPSTLTSTTRNYYPRPTYADLQFEEMPQIQNMIYYNGKEIVEWNLDGFTEYQIFTLCHQMIMYANACIANGNKEREAANMIVIGFSGQLKGWWNNYLNETQRQEILCAVKRDDQGRPLPDRDGNGNPTGNISDALATLIYNIIYHFAGNYHDIYEKNREQLINLKCKTMSDFRWYKDTFLSKLYTLPEPNQDFWKEKYISGLPPLFAEKVRNSLRKEGGGSINYHYLDIGKITQKIQLVGAELCNDLKIKDQLKKQRILGKREMGDFCYQFGFQDPYVHRKRKTHSKPMTKPNDKSKMSFQATKRKPKRIYNKNIRTQDTESKETICYKCGLKGHIANRCFKSKVKKEIQALLDSESEDVKEKLEAILNNIDNDSSSDEEKNAEINCCQDSGCSCCEPDNSEEESDENILVLTSLEEFVLDTFETIQDPEEKRRVLEKFLSRVKTDKDKLKKDIQKSKFLSIDEVFKRLDEQKKKNEQPDLISLFEDQKIMKQDLEEIRKRLYMLESKEGFHMEEKDEPIQEDDHVVGTIQKYMKQKWYTEVMYRFIDGSYFQHITLIDSGADVNCIREGIIPHKYFYKAAHRIRGADGGLLTVEYQIPEIYICITEVCIKTSFLLVKNLKQDVILGTPFLSLIRPFLVTNEDIQFKIMGKQVSLRFSSNTDEILDQLVQTKREQVVNTIYLHDNSFPSYLPKSMDLPGKTSWEDRYLLKATKDLEYICREMASQKSEWLTNMSSWRLPQLPRGHGERFNHNFRITELQQGLLNLLWQTKNKKEKAHALNGLAYYFKNFVPTDQKIT

SEQ ID NO: 19726 - protein, 1349 aa, Oryza sativa
  unsure (1)..(1349): unsure at all Xaa locations
  Clone ID: TF_OSC4434j.C1.p1.np
YNRSPCSAPPFPPLAAHSPRRNRARAVAPSLRRRRRAPVRRRRRPGPPPASASPPSASPRPRRPRPLLRFARRPPERRRPRRPEPRRRLPPLRSSFPPPSSSRGEPWTAPFASPFPPLSRGPLRRAVGRRRRPSGRGCAASRRPCRRGRLRARPAAARWGPAISRPRPRVRLTRGTHGAGRASPRAPGPPWTHLGHIRISLRASVAKHYRFHMSSGTNDGYTSCGPTNDGYTSCGPVVEMSWHRAGVLLLGAQSCLPVRGVPAVGGVGSMYTSDQSIICSNSRALGYGQAEQCTQMAGSINHRGLDLTGFVLELRGMCVVLGYPPGVDYQARPLPEQEGDDAEPHAAWEVTAVILTGSPERTSLAVTAGGDSFPAACQNAALLAIGTLHQRYPDELQHSPYRYHPRCGGARDFATFRDASSEDDATIVHLARMVEAYDAARIDFHQMVRRGMVENNMKILELRQENLQLKKDLDAGEAQLCQLKIAXGEVCRPKRCRVCRSLKITARKSTSRPELVRQSLAWTCFVETPRDEPAPLVSQDEGASGVGSTEDALLLTFHGETRRSAATGEGSHPEGSNYNNHGSPPPPPHPPPPPPPDTNSILTQILAQQANMMAAFLHHIQNPPQHNAPPPPPPPQHSKLAEFLRIRPPTFSSSNNPVDALDWLHAVGKKLDTVQCNDEEKVIFAAHQLQGPASLWWDHFXATQPEGQPITWARFTAAFRRTHVPAGVMTLKKREFRELKQGNCSVMEYLHEFNNLARYAPEDVREDEEKQEKFLAGMDPELSVHMVSGDYPDFQRLADKSIRLEAKHKELESHKRRLANFRNQQGANQRIRYTNPYPGGSSSQQQQQPRSALRPQFVVRVPQPQQQQSQQGTRAPRPPTPAVQPGQGRRDVHGQQRLCFNYFEPGHFADKCPKPRRQQGQAPPRPNNGGKDVIRGRVNHVTAEDMLTTPGVIVGTFLIHSIPATILFDSGASHSFISVPFVGRNQLGVERLRNPLLITTPGGVMTAKYYSPAVPIEIQGILFPSDLILLDTKNLDVILGMKWLAQFQGVVDCARRTVTLYRGPEQPVVFFAPPTSVSSSELHQIGLSEIPIVREFGDVFPEELLGMPPKREIEFRIDLAPGTTPLYKRPYRMAANELAEVKKXLEELKEKGYIRPSTSPXSAPVIFVEKKDKTKRMCVDYRALNEVTIKNKYPLPRIDDLFDQLKGATVFSKIDLRSGYHQLRIREEDIPKTAFTSRYGLYEFTVMSFGLTNAPAFFMNLMDKVFMENLDKFVVVFIDDILMYSQSEEDHQQHLRLVLGKLREHQLYAKLSKCEFWLSEVKFLGHVISAKGVAVDPETVTAVTNWKQP

SEQ ID NO: 19727 - protein, 1156 aa, Oryza sativa
  Clone ID: TF_OSC900176j.C1.p7.fg
MVTTRRSAATGEGSHPEGSNYNNHGSPPPPPHPPPPPPPDTNSILTQILAQQANMMAAFLHHIQNPPQHNAPPPPPPPQHSKLAEFLRIRPPTFSSSNNPVDALDWLHAVGKKLDTVQCNDEEKATQPEGQPITWARFTAAFRRTHVPAGVMTLKKREFRELKQGNCSVMEYLHEFNNLARYAPEDVREDEEKQEKFLAGMDPELSVHMQQQQPRSALRPQFVVRVPQPQQQQSQQGTRAPRPPTPAVQPGQGRRDVHGQQRLCFNYFEPGHFADKCPKPRRQQGQAPPRPNNGGKDVIRGRVNHVTAEDMLTTPGVIVGTFLIHSIPATILFDSGASHSFISVPFVGRNQLGVERLRNPLLITTPGGVMTAKYYSPAVPIEIQGILFPSDLILLDTKNLDVILGMKWLAQFQGVVDCARRTVTLYRGPEQPVVFFAPPTSASSSELHQIGLSEIPIVREFGDVFPEELLGMPPKREIEFRIDLAPGTTPLYKRPYRMAANELAEKKDKTKRMCVDYRALNEVTIKNKYPLPRIDDLFDQLKGATVFSKIDLRSGYHQLRIREEDIPKTAFTSRYGLYEFTVMSFGLTNAPAFFMNLMDKVFMENLDKFVVVFIDDILMYSQSEEDHQQHLRLVLGKLREHQLYAKLSKCEFWLSEVKFLGHVISAKGVAVDPETVTAVTNWKQPKTVTQVRSFLSMAGYYRRFIENFSKIARPVTQLLKKEEKFVWSPQCEKAFQTLKEKLVSSPVLILPDTRKDFLVYCDASRRGLGCVLMQEGHVVAYASRQLRPHEGNYPTHDLELSAVRRWLELIKDYDVGIHYHPSKANVVADALSRKSHCNTLGVRGIPPKLNQQMEALNLSIVGRGFLATLEAKPTLLDQIHEAQKNDPDMRGLLKNMKQGKATGFTEDEHGTQWNGNRVCVPDDRELKTVDTSGSSRKSLFHPSWQYEDVLRLERKILHVKAEHQRPAGLLQPLQVPEWKWDEIGMDFITGLPKTQGGYDSMWVVVDRLTKVARFIPMKTTYGGNKLAELYFARIVSLHGVPKKIVSDQGSQFTSHFWKKLQEELGTRLNFSTAYHPQTDGQTERLNQILEDMLHACVLDFGKTWGKSLPYAEFSYNNSYQASIQMAPYEARCMAANAGHRYCGTKLGKAKCSGPIY

SEQ ID NO: 19728 - protein, 714 aa, Oryza sativa
  Clone ID: TF_OSC401120j.C1.p11.fg
MANKTLREFAAPSTDNVANWPQINMGDVDFDLKSSLITMVQACPFCAKPNEDANAHLQQFLGICSTYTIKGVSPDAVRLRLFPFSLLGRAKQWFYANRATVNTWDKCSTAFLSKFFPMGKTNALRGRISSFQQTRDESIPEAWEQLQEYVAACPHHGMDDWLILQNFYNGLTPMSRDHLDAAAGGAFFSKTVQGAVDLIEKMVSNMSWSKERLQTRQRGMHTVKETELLAAKLDLLMKRFDDHEKRPQGTVKALDSHITCEVCGGIDHSKNDCPETREEAMHMGNNGYLPRGGQGWNQPRPYYQEAKTTDALSKKLAANDKNLENMNVKLDGFASAFQNQLSFNKMIETQLAQFASLVHANETGRIPGQPDFSIENVKVITTRGGTTGITKEAPSSDSADKEVQPEKTVPQKPLVDEQSAHFVDVIRKIHINVPLLDAMQVPTYTRYLKDILNNKRPLPTTEMVKLTEQCSNVILYKLPEKKKDPGCPTITCSIGAQQLDQALCDLGASVSVMPKDVFDKLNFTVLAPTPMCLQLADSSVRYLTGIPEDVPVKIRDFFIQVDFVVLDMDTGKETPLILGCPFLSTAGANIDVGTGSIRFHINRKEEKFEVQLRTEQCSMVRIKYGPNSQNIQVVEVEPPKTDSLVKFMQNFLEKETTMPRNHYWRTPVKPPIPAKLEQPAQRKPSFAPKQRKVWKEKPKMPAPSPTETGRKSAN

SEQ ID NO: 19729 - protein, 607 aa, Oryza sativa
  Clone ID: TF_OSC401845j.C1.p8.fg
MASKTLHEFAAPTADNVAVGPQVNIGDVDFNLKSSLVTLAQASPFCGKPNEDANAHLQQFLEICSMYTIKGVSPDAVRLRLFPFSLLGRAKQWFYANRAAINTWDKCSTAFLSKFFPMGKTNTLCGRISSFQQTRDESIPEAWERLQEYVAACPHHGMDDWMILQNFYNGVTPMSRDHLDAAAGGAFFSKTMVSNMGWSVERLQTRQRGMHTVKETELLATKLDLLMKRLDDHEKRPQGTVKALDSHVTCEVCGGTGHSGNDCRKHMRRRCTWATTTGPIHKEVRGGTNHAHIFKEEITKSLQMKLGGFWGNPRGGKSTCDPLYPNPAGTNGMSKGTPSNDSADKEIQPEKTVPQGYCDTWLLPFPQRSRKPSVDEQFAHFVAVIQKIHINVPLLDAMQVPTYACCLKDILNNKRPLPTAEVVKLTEHCSNVILHKLPEKKKDPGCPTITCSIGAQQFDQAFCDLGASVSVMPKDVFDKLNFTVLAPTPMRLQAADSSVRYPAGIVEDVPVKIRDFFIPVDFVVLDMDTGKETPLILGRPFLSTTGANIDVGTGSIRFHINRKEENFEFQPRTEQCSMVRIKYGPNPQNIQVVEVEPPKTDSLVRFM

SEQ ID NO: 19730 - protein, 1443 aa, Oryza sativa
  unsure (1)..(1443): unsure at all Xaa locations
  Clone ID: TF_OSC400003j.C1.p3.np
PAGGAAMGGWRARAAAKRRRAGRATPSSSCSAPSSEASGRRSRXGAAVERRRASATTGGRVTGGGRSGRGLVLRRVVKEVGGSANYPILTKTNYSDWSLLMRVMLQARGLWEAVETGDVDQEDRMALEAVLKAVPADLLPVLAVKETAKDAWDAIKTMRVGVDRVRKSKAQELRKQFDANEFKEGESVEFSVRLSGLVNNLAVLGFQLEESKVCEKFLHVVPDHLEQIALSIETRLNAEERRPKKKSGDEGGKLYLIEEQWAARAKERQSGEGSLGKKAGNNRRRRGGRKKSKAAADGERGARDTHDQGRDKCKNCGCLGHXAKDCRQKKQVAAHIAHGEEEDDEPALLGSCIELAPPPSSPPPAGLLDLDEPKVFAPLHRQEHVDTGVWHLDTGGTNHMPGVRDIFAELDTAVRGKVRFGNGSVVAIEGQGKIIFECRNGEHRALTGVYYIPKLNANLVSLGQLDENGCNVRIFHGVCTIRDTARQLLARVQRTRNQLYLIKITVARPMCLSARTQEAAWLWHARFGHLYFDALRRLARQDMVRGLPQIDQVEQLCDCCVITKQRRSPFPWRSLFCAEDRLELVHGDLCGPISPATPGGKKHFLLLVDDASRYMWLALLQNKREAAVAIKRFQARSEAESGCRLKLLRTDNGGEFTSAEFAAHCAESGVKRQLTAPYSPQQNRVVERRNQTILGMAQSLLKAKSVPACYWGEAVTTAVFLLNRAPTKCLDNKTPYEAWFGRKPAVGHLRTFGCLAYVKDVRPHVTKLQDRNKPTVFLYVEGSKAYKLFDPKSGRVQVTRDVVFDEGASWDWDATDGMHSPPSSDFSVEYIVTQEGTCGVVHADAGHTETWRGCARRAVTDGLTANARSPRFVSPPQDGDDNLDADADDCPPRYRSIDGILGAYTPGLATRDLADGELYLLAAEEPTTFGEAEHHQEWRRAMLQEISSIEDNKTWRLVDLPPGHRAIGLKWVYKIKKDARGMITKHKARLVAKGYMQQPGVDFNEVFAPVARLESVRMLLARAAQVGWPVHHMDVKSAFLNGELTEEVYVKQPPGFIVDGREHQVLRLDKALYGLRQAPRVWNAKLDASLLSLGFRRNDCEHAVYGRGSGDSRLLVGVYVDDLIITGNVAMEIDRFKAEMMSLFKMSDLGPLSFYLGIEVEQVADGIRLSQKSYAQRILERAGMQGCNSCLTPMEPRLKLTKASTAAPVDATQYRSIVGCLWYLVHTRPDLAFSVGYVSHFMEAPTTEHDAAVKRILRYVAGTVDFGCYYKRMETPPELVGYCDADMAGDVDTRKSTSGVVFFLGANPVSWQSIKQKVVALSSCEAEYIAATTAACXGIWLAQLLGEIKQEEPESFKLLVDNKSAIALSKNPVFHDRSKHIATRYHFIRECVEDGRAQVEFIGIDGQIADILTKALGRVRFQELRARISVVEVSSRCQAXGEN

SEQ ID NO: 19731 - protein, 1281 aa, Oryza sativa
  Clone ID: TF_OSC400044j.C1.p102.fg
MATPARFSTKPHVFDGTDFSHWCSRMQSYIMTEDYDIWRKVSYPYVIPEAINTAAEKTAFEQNCKARNILLSGISRSDYDRVAHFRTAHEIWNALSNFYQGTNNIKELRRDIFKKEYIKFEMKPGEALDDYLLVISIQESVDMSTLTLDSLYIKLKTHEMNVLSRKVDSKSSALVSSSSSLDADASSSKSSFLAVFNATSDDQLEQIEEEDLALVANRIARAMNNARNRKRGGPNRCFECGSIDHLRSYCPKLGRGKREDKDGEKTNNNKPKGSSQGRKLENLRKAFQQVCAAFEPLSDRDGESGDDDKGKNISDVCFMARGESDTEYEDNELKQPHDVLDCSTCNLNKLKLRDALGRVEYMEDVVKNNEVLSCPKCRKSKGVMVDSENCANLEKEISYLKSSLLRFYDGKKNLNMILDQSKVLVLEVAFVARKENVWIMDSGCSRHMTGDKNWFSSLKKASKTESIIFGDASTSVVLAIGLVKVKEKFELKNVALVENLKYNLLSVSQIVDENFEVHFKKTGSKVFDSCGDSVLNISRYGRVFKADFENPVSPVITCLVAKFDKDVMFWHRRLGHVGFDHLTRLSGLDLVRGLPKLKKDLDLVCTPCRHAKMIAFSHAPIVSVMTDAPGQLLHMDTVGPAGVQSVGGKWYVLVIVDDFSRYSWVFFMATKDEAFQHFRGLFLRFELEFPDESDDNDDDEVGSAGQTGRQAGPTAGTPPDRPAHEERSNWPGSSGSGTVDADRDGPPEITTSTSTNTEHGSTSEVAAPLHIQRRHPPEQIIGNIGERTTRSKVMTHDVCANSAFVASFEPKDVSHALIDESWINAMHEELENFERNKVWTLVEPPSGHNIIGTKWVFKNKQNEDGLIVRNKARLIAQGFTQNEGLDFDETFAPVARIEAIRLLLAFAASKGFKLYQMDVKIAFLNGFIQEEVYVKQPPGFENPDFPNHVLKLSKALYGLKQTPRVWYDRLKNFLLAKGFTMGKVDNTLFVLKHGDNQLFVQIYVDDIIFGCSTHALVVDFAETMCREFEMSMMGELSYFLGLQIKQTPQGTFVHQTKYTKDLLRRFKMENCKPISTPIGSTAVLDPDEDGEAVDQKEYRRMIGSLLYLTASRPDIQFAVYLCARFQASPRASHRQAVKRIMRYLNHTLEFGIWYSTSSSICLSGYSDADFGGCRIDRKSTSGTCHFLGTSLIARSSRKQFSVAQSTAESEYVAAASCCSQILWLLSILKDYGLTFEKVPLFCDNTSAINIAKNPVQHSRTKHIDIRFHFLRDHVEKGDVEL

SEQ ID NO: 19732 - protein, 1273 aa, Oryza sativa
  unsure (1)..(1273): unsure at all Xaa locations
  Clone ID: TF_OSC25045j.C1.p5.np
MAGFADALRPDKFTGVHFKRWQIRVTLWLTAMKCFWVSTGKPEGILTVDQQKQFEEATTLFVGCILSVVGDRLVEVYMHMTDAKELWDALNTKFGATVASNDLYIMEQFHDYKMADNRSVVEQAHEIQTMANELELLKCVLPDKFVAGCIIAKVPPSWKSFGTALKHKKQEYSVEGLIASLDVEEKAREKDAASKGDGGRSSANVVHKAQNKSKGKYKAQLVCGQPGHLARKCPQRKGIKAPVGQTSKSANATIGNTGDGSGYGNLPTVFSVNQSTNWWVDTGANVHVCADISLFSSYQVARGSTVLMGNGSHASVHGVGTVDLKFTSGKNVQHVPSIDRNLVSGSRLNRDRFKLVFESNKVVMSKHGYFIGKGYECGGLFRFSLSDFCNKSVNHICGSVDDEANVWHSRLCHINFGLMSRFSSMYLIPKFSIVKGSKCHSCMQSKQSRKPHKAAEERNLAPLELLHSDLCEMNGVLTKGGKXYFMTLIDDATRFCYVYLLKTKDEALDYFKIYNAEVENQLDRKIKRLRSDRGGEFFSNEFDLFCEKHGIIHERTPSYSLESNGIAERKNRTLTDLVNAMLDTTGLPKAWWGEALLTSNHVLNRVPNRNKDRTPYEIWIGRKPSLSYLRTWECLAKVNVPITKKRKLGPKTVDCFLGYAHHSIAYRFLIIKSEVPDMHVGTIMESRDATFFESFFPMKDTHSSSSQPSEVIPNSITPPEQTEHTHEHVTEEDVSEAPRRSKRQRTAKSFGDDFTVYLVDDTPKSISEAYASPDADNXKEVVCSEMDSIIANGTWEVTERPYGCKPVGCKWVFKKKLRPDGTIEKYKARLVAKGYIQKEGEDFFETYSPVARLTTIRVLLFLAASHGLLVHQMDVKTAFLNGELDDEIYMDQPDGFVVEGQEGKVCKLLKSLYGLKQAPKQWHEKFDKTLTSAGFAVNEADKCVYYRHGGGEGVILCLYVVDILIFGTNLVTNEVKSFLSXNFDMKDLGVADVIXNIKLIRGENGITLLQSHYVEKILNRFCYIDSKPSPTPYDPSLLIRKNKKIARNQLEYSQIIGSLMYLASATRPDISFAVSKLSRFTTNPEDDHWRALERVMCYLKGTMESGLHYTGYPAVLEGYSDSNXISDVDEIKATSGYVFTLGGGAVSWRSCKQTILTRSTMEAELTALDTATVEAEWLRDLLMDLPIVEKPVPAILMNCDNQTVIVKVNSSKDNMKSSRHVKRRLKSVRKLRNSGVITLDYIQTARNLADPFTKGLSRNVIDNASKEMGLRPM

SEQ ID NO: 19733 - protein, 1056 aa, Oryza sativa
  Clone ID: TF_OSC29329j.C1.p1.fg
MAGSINRRGLDLTGFVLELRGMCVVLGYPHGVDYQGRQLPEQEGDDAELHAAWEVTAVILTGSPERTSLTVTAGGDSFFAACQNAALLAIGTLHQRYPDELQHSPYRYHPRRGGARDYATFRDASSEDDTTIMHLARMVEAYDAARIDFHQMVRRGMVENNMKILELRQENLQLKKDLDAVEAQLHQLKIAQGEVCRPKRRRVCRSQKITTRKSTSRPELVRQSLAWTCFVETPRAEPAPVVPQEGEASGVGSTEDALLLTFRPGPSQRRNANTGDGNQPEGSNHNNHGSPPLPPPPPPPPPPDTNAILTQILAQQANMMAAFLHHIQHPPQHNAPPPPPQHSKLAEFLRIRPPTFSSSNNPVDALDWLHAVGKKLDTVQCSDEEKVIFAAHQLQGPASLWWDHFQATLPEGQPITWARFTAAFRRTHVPAGVMALKKREFRELKQGNRFVMEYLHEFNNLARYAPEDVREDEEKQEKFLAGMDPELSVRLVSGDYPDFQRLVDKSIRLEAKHKELESHKRRLASFRNQQGANQRVRYTNPYPGGSSSQQQQPRSAPRPQFVVRVPQPQQQQSQQGTCAPRPPTPAAQLGQGRRDVQGPQRLCFNCFEPGHFADKYPKPRRQQGQAPPRSNNGGKDVIRGRVNHVTAEDVLTTPDVIVGTFLIHSIPATILFDSGASNSFISVPFVGRNQLGVERLRNPLLITTPGGVMTANRLCRLDRAPAGRAVASSSVAATSSTPACPPFRAVTIGGALPPSPFSFLLAGHLQPHLPPRPCTLRPRRHLSRRRSRLLFPGFASVSRGNHRRRVLAGVQWRRHHFSASGRLCRVPGAPADVAVSSVDVAVPSSLPARPRRRPNFAGTPSSPRRPLLPPRRLATPLHHHLHQHRSGVFHAVPSSAQPLLPAIIVSSSSPIVLVVDVPSVARLVVSRRRLRRRHRSGVFLAVLVPVQPLPAVLVASSPVPVVVVVVVLSSFPVIVAFVPPSSRSRPSSASVKQAAAAPSSSSSSAPRRQASCRPRLAFAQGSPPKPSPRRSSPLCPSVSAAPVRRCRSHASSRGGL

SEQ ID NO: 19734 - protein, 1859 aa, Oryza sativa
  unsure (1)..(1859): unsure at all Xaa locations
  Clone ID: TF_OSC401672j.C1.p1.np
MDEVGGQWTSRANEGYTSCGPVVEMSWHRAGVLLLGAQSCLPVPGVPAVGGVGSLYTSDQSIIYPNSRALGYGQAEQCTQMAGSINRRGLDLTGFVLELRGMCVVLGYLHGVDYQGKQLPEXEGDDAEPHAAWEVTAVILTGSPERTSLAVTAGGDSFSAACQNAALLTIGTLHQRYPDELQHSPYHYRPRRGGARDYATFRDASSEDDATIMHLARMVEAYDAARIDFHQMVRRGLVENNMKILELRQENLQLKKDLDAVEAQLCQLKIAQGEVCRPKRRRVCRSLKITARKSTSRPELVRQSLAWTCFVETPRAGPAPLVPQEEGASSVGHGGCVVAHLPPWPVTEVDEQLVGLRMVTTRRSATTGDGNQPEGSNHNNHGSPPPPPPPPPPPPPDTNSILTQIFAQQANMMAAFLHHIQNPSQHNAPPPPPPPQHSKLAEFLRIRPPTFSSSNNPVDALDWLHAVGKKLDTVQCNDEEKVIFAAHQLQGPASLWWDHFQATQLEGQPITWARFTAAFQRTHVPAEVMALQKREFRELKQGNCSVIEYLHEFNNLARYAPEDVREDEEKQEKFLAGMDPELSVRLVSGDYPNFQRLVDKSIRLEAKHKELESQKRRLANFRNQQGANQRIRYTNPYPGGSSSQQQQQQQQPRSAPQPQFVVRVPQPQQQQSQQGTHAPRSPTSAVQPGQGRRNVQGQQRLCFNCFEPGHFADKYPKPRRQQGQAPPRPNNGGKDVIRGRVNHVTAEDVLTTPDVIVGTFLIHSIPATILFDSGASHSFISVPFVGRNQLGVERLRNPLLITTPGGVMTAKYYSPAVPIEIQGIPFPSDLILLDTKNLDVILGMNXLAQFQGVMDCARRTVTLYRGPEQPVVFFAPPTSVGSSELHQIGLSKIPIVSEFGDVFPEELPGMPPKREIKFRIDLAPGTTPLYKRPYRMAANELAEVKKLLEELKEKGYIRPSTSPXGAPVIFVEKKDKTKRMCVDYRALNEVTIKNKYPLPRIDDLFDQLKGATVFSKIDLRSGYHQLLIREEDIPKAAFTTRYGLYEFTVMSFGLTNAPAFFMNLVNKVFMEYLDKFVVVFIDDILVYSQSELRLVLGKLREHQLYAKLSKCEFWLSEVKFLGHVISAKGVAVDPKTVTAVTDWKRPKTVTQVRSFLGLAGYYRRFIENFSKIARPMTXLLKKEEKFVWSPQCEKAFQTLKEKLVSSPVLILPDTRKDFLVYCDASRQGLGCVLMQEGHVVAYATRQLRPHEGNYPTHDLELAAVVHALKIWRHYLIGNCCEICTDHKSLKYIFTQSDLNLRQRRWLELIKDYDVGIHYHPGKANVVADALSRKSHCNTLGVRGIPPELNQQMDALNLSIVGRGFLATLEAKPTLLDRIREAQKNDPDMHGILKNMKQCKAAGFIEDEHGTLWNGNRVCVPDDKELKHLILQEAHESPYSIHPSSTKMYLDLKGKYWWVSMKREIAEFMALCDVCQCVKAEHQRPAGLLQPLQVPEWKWDEIGMDFITGLPKTQGGYDSIWVVVDRLTKVARFIPVKTTYGGNKLAELYFARIVSLHGVPKKIVSDRGNQFTSHFWKKLQEELGTRLNFSTAYHPQTDGQTERLNKILEDMLRACVLDFGKTWDKSLPYAEFSYNNSYQASIQMAPYEALYGRKCWTPLLWDQVGESQVFGTDNLREAEAKVRTIRENLKLAQSRXKSYADNRRRDLEFAVDDFVYLRVTPLRGVRRFQTKGKLAPRFVGPFRIIARRGEVAYQLELPASLGNVHDVFHVSQLKKCLRVPSEQADSEQIEVREDLTYVERPVKILDTMERRTKNRVIRFCKVQWSNHAKEEATWEREDELKSAHPDLFASSSESRGRDSV

SEQ ID NO: 19735 - protein, 2008 aa, Oryza sativa
  unsure (1)..(2008): unsure at all Xaa locations
  Clone ID: TF_OSC405120j.C1.p28.np
MEPESAAPVSFSSGRPLSLPTLYKPSPHLLRPFPPLAALPPRRNRARAVALSLRRHRRAPVRRRRRPGPPPTSAPPPSASPHSRRPRPPLRFGRHPPERRRPHRPEPRRRLPSLRSPFPSSPSTRGEPWTAASFPPFPPLSRPPLRRAYGRRRRPXGRGRATSRLRRRGRLRVHRAAAAWGLAASRPRPXVRLTRGTHGAGRARPGAPGSPWTHHGHIRTGLRASVAKHYRFHMSSGXGLVWAQSGYKQKYTEQCTQVSVFILKTCLTTNVERLAMVGLGRAGTQGRVASSVXIIVGLGLRQCLXMAGSINRRGLDLTGFVLELRGMCVVLGYPHGVDYQGRQLPEQEGDDAELHAAWEVTAVILTGSPERTSLTVTAGGDSFFAACQNAALLAIGTLHQRYPDELQHSPYRYHPRRGGARDYATFRDASSEDDTTIMHLARMVEAYDAARIDFHQMVRRGMVENNMKILELRQENLQLKKDLDAVEAQLHQLKIAQGEVCRPKRRRVCRSQKITTRKSTSRPELVRQSLAWTCFVETPRAEPAPVVPQEGEASGVGSTEDALLLTFHGETRRNANTGDGNQPEGSNHNNHGSPPLPPPPPPPPPPDTNAILTQILAQQANMMAAFLHHIQHPPQHNAPPPPPQHSKLAEFLRIRPPTFSSSNNPVDALDWLHAVGKKLDTVQCSDEEKVIFAAHQLQGPASLWWDHFQATLPEGQPITWARFTAAFRRTHVPAGVMALKKREFRELKQGNRFVMEYLHEFNNLARYAPEDVREDEEKQEKFLAGMDPELSVRLVSGDYPDFQRLVDKSIRLEAKHKELESHKRRLASFRNQQGANQRVRYTNPYPGGSSSQQQQPRSAPRPQFVVRVPQPQQQQSQQGTCAPRPPTPAAQLGQGRRDVQGPQRLCFNCFEPGHFADKYPKPRRQQGQAPPRSNNGGKDVIRGRVNHVTAEDVLTTPDVIVGTFLIHSIPATILFDSGASNSFISVPFVGRNQLGVERLRNPLLITTPGGVMTAKYYSPAVPIEIQGIPFSDLILLDTKNLDVILGMNWLAQFQGVVDCARRTVTLYRGPEQPVVFFAPPTSVSSSELHQIGQSKIPIVREFGDVFPEELPGMPPKREIEFRIDLAPGTTPLYKRPYRMAANELAEVKKXLEELKEKGYIRPSTSPWGAPVIFVEKKDKTKRMCVDYRAFNEVTIKNKYPLPRIDDLFDQLKGATVFSKIDLRSGYHQLRIREANILKTAFTTRYGLYEFTVISFGLTNAPAFFMNLMNKVFMEYLDKFVVVFIDDILVYSQSEEDHQHHLRLVLGKLREHQLYAKLSKCEFWLSEVKFLGHVISAKXVAVDPETVTAVTDWKQPKTVTQIRSFLGLAGYYWRFIENFSKIARPMTQLLKKEEKFVWSPQCEKAFQTLKEKLVSSPVLILPDTRKDFMVYCDASRQGLGCVLMQEGHVVAYASRQLRPHEGNYPTHDLELAAMVHALKIWRHYLIGNRCEIYTDHKSLKYIFTQSDLNLRQRRWLELIKDYDVGIHYHPGKANVVADALSRKSHCNTLEVRGIPPKLNQQIKALNLSIVSRGFLATLEAKPTLLDQIREAQKNDPDMRGLLKNMKQGKAAGFTEDEHGTLWNGNRRVKAEHQRPAGLLQPLQVPEWKWDEIGMDFITGLPKTQGGYDSIWVVVDRLTKVARFIPVKTTYGGNKLAELYFARIVSLHGVPNKIVSDRGSQFTSHFWKKLQEELGTRLNFSTAYHPQTDGQTERLNQILEDMLRACVLDFGKTWDKSLPYAEFSYNNSYQASIQMAPYEALYGRKCRTPLLWDQVGESQVFGTDILREAEAKVRTIRDNLKVAQSRQKSYADNRRRNLEFAVDDFVYLRVKPLRGVHRFQTKGKLAPRFVGPFRIIARRGEVAYQLELPASLGNVHDVFHVSQLKKCLRVPSEQADSEQIEVREDLTYVERPVKILDTMERSRNRVIRFCKVQWSNHAEEEATWEREDELKAAHPDLFASSSESRGRDSV

SEQ ID NO: 19736 - protein, 1348 aa, Oryza sativa
  unsure (1)..(1348): unsure at all Xaa locations
  Clone ID: TF_OSC414257j.C1.p1.np
MEPESAAPVSFSSGRPLSLPTLYKPSPHLLRPFPPLAALPPRRNRARAVALSLRRHRRAPVRRRRRPGPPPTSAPPPSASPHSRRPRPPLRFGRHPPERRRPHRPEPRRRLPSLRSPFPSSPSTRGEPWTAASFPPFPPLSRPPLRRAYGRRRRPXGRGRATSRLRRRGRLRVHRAAAAWGLAASRPRPXVRLTRGTHGAGRARPGAPGSPWTHHGHIRTGLRASVAKHYRFHMSSGXGLVWAQSGYKQKYTEQCTQVSVFILKTCLTTNVERLAMVGLGRAGTQGRVASSVXIIVGLGLRQCLXMAGSINRRGLDLTGFVLELRGMCVVLGYPHGVDYQGRQLPEQEGDDAELHAAWEVTAVILTGSPERTSLTVTAGGDSFFAACQNAALLAIGTLHQRYPDELQHSPYRYHPRRGGARDYATFRDASSEDDTTIMHLARMVEAYDAARIDFHQMVRRGMVENNMKILELRQENLQLKKDLDAVEAQLHQLKIAQGEVCRPKRRRVCRSQKITTRKSTSRPELVRQSLAWTCFVETPRAEPAPVVPQEGEASGVGSTEDALLLTFHGETRRNANTGDGNQPEGSNHNNHGSPPLPPPPPPPPPPDTNAILTQILAQQANMMAAFLHHIQHPPQHNAPPPPPQHSKLAEFLRIRPPTFSSSNNPVDALDWLHAVGKKLDTVQCSDEEKVIFAAHQLQGPASLWWDHFQATLPEGQPITWARFTAAFRRTHVPAGVMALKKREFRELKQGNRFVMEYLHEFNNLARYAPEDVREDEEKQEKFLAGMDPELSVRLVSGDYPDFQRLVDKSIRLEAKHKELESHKRRLASFRNQQGANQRVRYTNPYPGGSSSQQQQPRSAPRPQFVVRVPQPQQQQSQQGTCAPRPPTPAAQLGQGRRDVQGPQRLCFNCFEPGHFADKYPKPRRQQGQAPPRSNNGGKDVIRGRVNHVTAEDVLTTPDVIVGTFLIHSIPATILFDSGASNSFISVPFVGRNQLGVERLRNPLLITTPGGVMTAKYYSPAVPIEIQGIPFSDLILLDTKNLDVILGMNWLAQFQGVVDCARRTVTLYRGPEQPVVFFAPPTSVSSSELHQIGQSKIPIVREFGDVFPEELPGMPPKREIEFRIDLAPGTTPLYKRPYRMAANELAEVKKXLEELKEKGYIRPSTSPWGAPVIFVEKKDKTKRMCVDYRAFNEVTIKNKYPLPRIDDLFDQLKGATVFSKIDLRSGYHQLRIREANILKTAFTTRYGLYEFTVISFGLTNAPAFFMNLMNKVFMEYLDKFVVVFIDDILVYSQSEEDHQHHLRLVLGKLREHQLYAKLSKCEFWLSEVKFLGHVISAKXVAVDPETVTA

SEQ ID NO: 19737 - protein, 545 aa, Oryza sativa
  Clone ID: TF_OSC418607j.C1.p24.fg
MNNLNRTLAELHGMLKTAEESIKKNSNHVMVMHKRKPNNKKSGQKRKLNSDEITSTSNSKTKVQKTGPAKDAECFFYKETGHWKRNCKKYLEQLKQKQQDGKSSTSVYNINAKRQLPNDLNPTFIWHCRLGHINEKRMKKLHRDGLLHSFDFESFETCESCLLGKMTKAPFTGQSERASELLGLVHTDVCGPMSSTARGGFGYFITFTDDFSRYGYVYLMRHKSESFEKFKKFQNEETKGYYFYNREEGKVFVARHGVFLEKEFISRKDSGSMLWKHRFHEGPKGYGVHLRDDDEPTTYVEAMVGPDSEKWLGAMKSEIESMHVNQVWNLVDPPDGVKAIECKWVFKKKTDVDGNVHIYKARLVAKGFRQIQGVDYDETFSPFAMLKSIRIVLAIAAYFNYEIWQMDVKTTFLNGNLDEDVYMTQPKGFVDPQSAKKICKLQKSIYGLKQASRSWNIRFDEVVKALRFVKNEEEPCVYKKISGSALVFLILYVDDILLIGNDILMLESVKTSLKNRFSMKDLGEAAYILGIRIYRDRSKRLIGLS

SEQ ID NO: 19738 - protein, 431 aa, Oryza sativa
  Clone ID: TF_OSC900047j.C1.p16.fg
MHCPRLPAGMKSVVTFWSTLQFHIKKRFLENERFLENESELPLFPCMHHVQYKGISNPITRMVSIALNKLPPRIKNDMIMVAPAPSSFNLRSILEKEKLTGTNFMDWYRNLRIVLRQEHKEFVLTESFPANLPNNALAAQRREHEKRCNDYLDISCLMLATMSPELQRQYEALDAHTIITGLRNMFEDQARAERFNTSKSLFACRLAEGNPVSPHVIKIIGYTESLDKLGFPLSRELATDLILQSLPPSFEPFIMNFNMNNLNRTLAELHGMLKTAEESIKKNSNHVMVMHKRKPNNKKSGQKRKLNSDEITSTSNSKTKVQKTGPAKDAECFFYKETGHWKRNCKKYLEQLKQKQQDGKSSTSGINVIEINLATSFTDSWVFDTGSVAHICKSLQGLKSRSLARGEVDIRVGNGARVAAVAVGTMPLSLP

SEQ ID NO: 19739 - protein, 467 aa, Oryza sativa
  unsure (1)..(467): unsure at all Xaa locations
  Clone ID: TF_OSC27895j.C1.p2.np
ALHTFYLYYYGCAHIPIGIMAQKRMEFLNLKQRNCVADYMQQFTYLSRYALDDVNTETKKVEAFFNGMQDSLKFHLSGFKFATLHELVDDAIQKEETRTNLEESRKRYQKQQGGSPKGYPRQDVDKMSVXTYRDQHPPPPRAFPRQVQPPCYIFGGNLKXYCPRNNVVCYNCDQIGHTRPNCPWNPSEAAKAQATGRVRVVRAPQPAQQNHGGAHGGQPGRQINXGAAHGGQPGRQINXGAPRDRVNHVNIXEAEEATDVIIGKFQVNLELAFLLFDPRATHSFVSESFILKSHLPLSTLEVPRVIYAPGTKSLVSSICLGVRLXIMSFLVDLLLLNMSGLDIILGMDXLSKYRGKLDCAKKVVEIVGADGQNVEYKSNSKMNEFKKRVVNVAIAKGVVPIVNEYLEVFPDDLLGMPPDREVEFSIELKPGTKPVAKAPYRMSAREHDGLKRQKDELENYGSEFESD

SEQ ID NO: 19740 - protein, 1307 aa, Oryza sativa
  Clone ID: TF_OSC24701j.C1.p4.fg
MTEPPSSKAEVEPAIVIPITLNDFEGEDRKSMEEYIKELTQEALMRASTRTRQDATFEDKFDEFLRFKVGPLLADFVGKNKASTTASQAPIDQTNSRTDGVAHTAGPTGPDGRPNGRSDRVLPRRSDRDLGQSDRASGCRSDRALDRTFDPPVSSAATNPQVPPHVPNAYNDVGRGYPPDTRQVQYNHIAPQTQPIRPPNPPPNQHRPDNMEEIIGGIIRDKFGIETRNLAKVYQKPYPDYYDNMPFPRNYRVPKFTKFSGEDGRTTWEHESRVKDNKKIVRPYEKKPNVNVIDYPEASDSEDEGDHDMYVAEWSWTNKNKPFVCSNLMPTPRKDRQSEVKYSFDVAKYDKIFDYLLQEKQIRLPKGHIIPSQEELKRRAYCKWHDSHSHSTNDCNVFRRQVQLAIDEGRLKFTDGSKMKLDHDPFPVNTINFNDKKVLIRPEQAESTKGKGVIIGEPRPKIIVPKNPEVCVCKENKSEASTSKAPRKTKVTLDMLLEKYEKQGSERARNKGKIQRSPPRERFGHSPRRSHSPPYHHSQDIPWGPYPMPPPGYPYPYYMPWGATPPMFNHMPPMQFNQGWGGPRRPIHERLSSPNNGRFYGKNRANEESASGWSDRWSTSGLTRLQRRFDRRFAKGDVRASSSSTRPNRGHYLPPGTEPKPRRMPKYLTATQRRRLQCLRAQEIREKKAEEQRDKRFNELRPPPVWRRKTIEKEEPVVVEKKEEQSIAKDESSPKEDMDINKVCMLPMEFCAMDEAEVAQFSLGPKDVVFEKPDESNRHMKPLYLKCHTDGKPVSRMLVDGGAAVNLMPYSLFKKLGREDDELKKTNMILNGFNGEPTEAKGIFSAELTVGNKTLPTAFFIVDVQEANLEWLQKRVQEYRSTKNDIGETIEDFDEVEKLGQGFTSADPLEEVDIVDGTKPRPTFVNKNMRADYKVNIIELLTEYVDCFAWEYHEMPGLSRELVEHRLPIKPGFRPYKQPPRRFNPLLYDRVKEEIDRLLKAGFIGPCRYAEWVSCIVLVEKKGSATAIVLLAWRYIKPSTRERAAAWEDQSSTIIVLFPAPSSSCYYRLLFATYIGKLCRLFFATVAHTPSRASVPTPSGYDYFRSLFFRERSSGSMPTLLLSIPGTKCSTAFLSKFFPMGKTNALRGRISSFQQTRDESIPEAWERLQEYVAACPHLGMDDWLILQNFYYGLTPMSHDHLDAAAGGAFFSKTVQGAVDLIEKMVSNMGWREERLQTRQRGMLLAAKLDLLMKRLDDHEKRPQGTLKALDTHATCEVCGNTGHSGNDCPETREEAMYMGNNNNGYHP

SEQ ID NO: 19741 - protein, 485 aa, Oryza sativa
  Clone ID: TF_OSC401095j.C1.p8.fg
MKPGEALDDYLSRFNKILSDLRSVDSSYDANYPQSKISRHFLNGLDMSIWEMKVTSIQESVNMSTLTLDSLYTKLKTHEMNILSRKGDSKSSASVLSSTSLDVGASSSKSSVLALFNAMSDDQLEQFKEEDLVLLSNKFSRAMKNVRNRKRGEPNRCFECGAIDHLRSYCPKLGRGKKEDDDKVKEDDINKKKNTKEKKKHCMQWLIQEIIAAFDESEGEDESKGKQIVDLAFIARNASCDVDESEDDNEEKLSYNQLEYAAYRFAKKVQTCSIVLDEKDNTIEILNAEIDRLKSSIRDDDNCQSCEVLFSEINALRDVNSVNCKKLEFEIEKSKRLAHKHKKESEIAFAKRRWQKSGFNSRTTVRPTLISRSDRLAVRPQLNRRLDRLPGPVRAQAQRRSDRPRGDFARNSNRTFVKQKEIIVEVVLEIINFQEMNRVCCFVGTGDSMPRESICDGPGVGLVVRRCPWWSDIMRDTKARVDAHG

SEQ ID NO: 19742 - protein, 287 aa, Oryza sativa
  Clone ID: TF_OSC403480j.C1.p1.fg
MVLLGVADTEPTEPYSVRPRRWRSDRAKKCIALQAEVEDKSKGKVNEVNEDLEEEIALLARRFNDLLGRRKERGRGSNSNRSRNRRPNKTLSNLRCFECGEKGHFVSKCPFKDDDGDKSSKKKSGGYKLMKKLKKECKKIEAFIGEWDSNEESSASSGSEEEGGDDASSKKKKMTVVAIKEAPSLFAPLCLMAKGSSKVTSLSDSESDDDCDDVSYDELVSMFEELHAYSEKEIVKFKALKKDHASLEVLYEELKTSYERLTISHEKLACLQVDSRGSPGTELEFAL

SEQ ID NO: 19743 - protein, 726 aa, Oryza sativa
  Clone ID: TF_OSC900207j.C1.p16.fg
MVMPAPPRGWDFSPGDAVREEVRLRFRSPVHFSLKFSPMHYRLAVDLLRANFRLTNSSVALALRAAIGGSPADLNVQHLLDRSFSFDVFSKQVGLWIYRLRSFSCDDFSLRFYLWRNGGPNWQWEFESWSRDCAEEWALVPSKKRSVHKSSKVQKDKSYAQAVQQRDVSVKFVFQCLKALLQERRSVFTRLQGLKVPIAGETLATKTVEPITKDDPISLRYLNSNFLPSCVRCLDKGHIASNCSGPVRCHSCLEAGHMSCFCATRPTKAHQPVGKFPKLSSEDNLVWRSKSSPAKKTAVSPHIPSSPRNTVQSNPQNFPSLAMADLNPTPQCFLRQAQVVHQGGNLRVPRVDLTIPQHPPRRHEDVCITIVEPAIPEHEWDHHRALISDYIFEVHMYEVRTAYRHPSTVGMFQLRSVMHRDALVNSPPAAYDGMHTVELVKHDQGQNWRACHFNREGWFLLLDFPLDFVDRHHINLALDRDQMLGRVFVRAKYRDLDSVPRKIVLQEPLGNGGGDGDFANIPPEDDLPPAGPQPGPNDDNADDPDDGNIWQLGHPGNQGGGGVWDDLVQQQQAAEAEIEDAWGQDHPMGQVEENSGQLIILPNQEEQELNLIDQEQQVQLFLARLKDIADREGPKHPSFYPMAGLLEKIDHLCKAKEIMQAAQIPSPTSLPFSSPFMTLVLLKRKAMFDHAPPVVKRAHSSWALLSSPSDDGHSDQEILDVAPLQA

SEQ ID NO: 19744 - protein, 1511 aa, Oryza sativa
  Clone ID: TF_OSC407447j.C1.p1.fg
MATPVRFSTKPHVFDGTDFSHWCSRMQSYIMAEDYDIWRKVSHPYVIPEAINTAAEKTAFEQNCKARNILLSGISRSDYDRVAHLQTAHEIWNALSNFHQGTNNIKELRRDIFKKEYIKFEMKPGEALDDYLSRFNKILSDLRSVDSSYDANYPQSEISRHFLNGLNMSIWKMKVTSIQEFVDMSTLTLDSLYTKLKTHEMNVLSRKVDSKSTALVSSTSSLDVDASSSKPSFLAVFNATSDDQLEQIEEEDLALFANHIARAMNNARNRKRGGPNRCFECGSIDHLRSHCPNLRRGKREDKDVERTSNNKPNNNKPQGSSQARKFKENLRRAFDQVYAAFEPSSDVDGESGDDGKGKNISGVCFMARGESDIEYEDHEVSAFEEAINILSAKNMKCEKMYRKQEFIIESLKSEIDRLKSLIPNDDDCSNCEVLMNEISKIRDINAAHDLKNRSSLACSFALHTRTLDELFLTKKLLQKYQIAFHASLMFNMISAKKFKQPHDVLDCLTYCENCANLEKEVSYLKNSLQRFSDGKKNLNMILNQSKVLVLEVVLVARKENVWIVDSGCSRHMTGDKNWFSSLKKASKTESIIFGDASTSAVLATGLVKVNEKFELKNVALVENLKYNLFSVSQIVDEEFEVHFKKTGSKVFDSRGDSVLNISRYGRVFKADFENPVSPVITCLVAKFDKDVMFWHRRLGHVGFDHLTRLSGLDLVRGLPKLKKDLDLVCTPCRHAKMVSTSHAPIVSMMTDAPGQLLHKDTIGPARVQSVGGKWYVFVIVDDFSIYSCVFFMATKDEAFQHFRGLFLRLNLEFPGSLKRIRSDNGGEFKNASFEQFCNERGLEHEFSSPRVPQQNGVVERKNRVLAEMTRTMLDEYKTPRKFWAEAINTAFYISNRVFLRSKLGKTSYELRFGHQPKVSHLRVFGCKCFVLKSGNLDKFEARSTDGLFLGYPAHTRGYRVLILGTNNIVETCEVSFDEASPGTRPEIAGTLSQVQGEDGRIFEDESDYDDDDEDVWSDRPGSSAEGSVDADRDGPPEITTSTSTDTEHGSTSEVTAPLHIQRRHPPEQIIGNIGERTTRSKVTTHDVCTNSAFVASFEPKDVSHALTDESWINAMHEELENFERNKVWTLVEPPSGHNIIGTKWVFKNKQNEDGLIVRNKARLIAQGFTQVEGLDFDETFAPVARIEAIRLLLAFAASKGFKLYQMDVKSAFLNGFIQEEVYVKQPPGFENPYFPNHVFKLSKALYGLKQAPRAWYDRLKNFLLAKGFTMGKVDKTLFVLKHGDNQLFVQIYVDDIIFGCSTHALVVDFAETMSREFEMSMMGELSYFLGLQIKQTPQGTFVHQTKYTKDLLRRFKMENSKPISTPIGSTAALDPDEDGEAVDQKEYRSMIGFLLYLTASRPDIQFAVCLCACFQASPRASHRQAVKRIMRYLNHTLEFGIWYSTSSSICLSGYFDADFGGCRIDRKSTSGTCHFPGTSLIAWSSRKQSSVAQSTAESEYVAAAICCSQIL

SEQ ID NO: 19745 - protein, 695 aa, Oryza sativa
  Clone ID: TF_OSC32096j.C1.p1.fg
MEEKYSAKPFVFDGHNFVIWKARMEAYLQSQGHNVWNKVKSPYTVPDDADITPANMAQVDFNYRARNAIIGGISSGEFNRVQHHKSAHDMWTALCNFHEGNNDIQLVRQNQFHKEYQRFEMHPGESIDSYFKRFGEIISKLRSVGKEFSDNDNARHLLNCLDYGVWEMKVTSITESAPLSDLTMDKLYSKLKTHEMDVFHRKGLKHSMALVADPSGSTSSNDSAFVYGGFSLAALHSVTEEQLEKIPEDDLALFARKFSRAYKNVRDRKRGKTNEPFVCFECGEPNHKRVNCPKLKKKSDKTTKKPEGQGRKGKKDLMKKAIHKVLAALEEVQLSDIDSDDDDQEKGDKDFSGMCCLANNEDFINLCLMALEDKDDSSEHPEVCLDDIPSLDGSLCDDSCSDNDSVDDELSKERMAHLMIEISDKYRSSKYKIEKLKSENDGMALEIARLRSMIPEEDTCSTCASYLSEINLLKDKLKSCALGAGNPSSASAACSTCYEMKVDMGLLEMELKELKEKFVHDRIGRCENCPILTSDNDELRQQVAMLRTKNDLLESFATKEPIHSSCANCAILETELKDAKTVIDSIKSIDSCSSCISLKVDLESAKKENSYLQQSLERFAQGKKKLNMILDQSKVSINNQGIGYDFAESLRIGTHEILGVTDGMIELAQKPITFKSAGFIGNTSSSTPKTSEPKM

SEQ ID NO: 19746 - protein, 2145 aa, Oryza sativa
  Clone ID: TF_OSC400300j.C1.p25.fg
MEEKYSAKPFVFDGHNFVIWKARMEAYLQSQGHNVWNKVKSPYTVPDDADITPANMAQVDFNYRARNAIIGGISSGEFNRVQHHKSAHDMWTALCNFHEGNNDIQLVRQNQFHKEYQRFEMHPGESIDSYFKRFGEIISKLRSVGKEFSDNDNARHLLNCLDYGVWEMKVTSITESAPLSDLTMDKLYSKLKTHEMDVFHRKGLKHSMALVADPSGSTSSNDSAFVYGGFSLAALHSVTEEQLEKIPEDDLALFARKFSRAYKNVRDRKRGKTNEPFVCFECGEPNHKRVNCPKLKKKSDKTTKKPEGQGRKGKKDLMKKAIHKVLAALEEVQLSDIDSDDDDQEKGDKDFSGMCCLANNEDFINLCLMALEDKDDSSEHPEVCLDDIPSLDGSLCDDSCSDNDSVDDELSKERMAHLMIEISDKYRSSKYKIEKLKSENDGMALEIARLRSMIPEEDTCSTCASYLSEINLLKDKLKSCALGAGNPSSASAACSTCYEMKVDMGLLEMELKELKEKFVHDRIGRCENCPILTSDNDELRQQVAMLRTKNDLLESFATKEPIHSSCANCAILETELKDAKTVIDSIKSIDSCSSCISLKVDLESAKKENSYLQQSLERFAQGKKKLNMILDQSKVSINNQGIGYDFAESLRIGTHEILGVTDGMIELAQKPITFKSAGFIGNTSSSTPKTSEPKMVPMTSKSKPVELPRPKNPKQVEHKQNQRQTKPVEKTKYECTYCGKAGHLDFGVGRSNSWLVDSGCSRHMTGEAKWFTSLTRASSDETITFGDASSGRVMAKGTIKVNDKFMLKDVALVSKLKYNLLSVSQLCDENLEVRFKKDRSRVLDASESPVFDISRVGRVFFANFDSSAPGPSRCLIASENRDLFFWHRRLGHIGFDHLSRISGMDLIRGLPKLKVPKDLVCAPCRHGKMTSSSHKPVTMVMTDGPGQLLHMDTVGPARVQSVGGKWYVLVVVDDFSRYSWVYFLESKEETFGFFQSLARSLALEFPGALRAIRSDNGSEFKNSAFESFCDSSGVEHQFSSPYVPQQNGVVERKNRTLVEMARTMLDEFTTPRKFWTEAISAACFISNRVFLRTILHKTPYELRFGRRPKVSHLRVFGCKCFVLKSGNLDKFESRSLDGIFLGYATHSRAYRVYVLSTNKIVETCEVTFDEASPGARPEISGVPDESIFVDEDSDDDDDDSIPPPLDSTPPVQETGSPSTTSPSGDAPTTSSSAAEEIDGGTSGPTAPRHIQNRHPPDSMIGGLGERVTRNRSYELVNSAFVASFEPKNVCHALSDENWVNAMHEELENFERNKVWSLVEPPLGFNVIGTKWVFKNKLGEDGSIVRNKARLVAQGFTQVEGLDFEETFAPVARLEAIRILLAFAASKGFKLFQMDVKSAFLNGVIEEEVYVKQPPGFENPKFPNHVFKLEKALYGLKQAPRAWYERLKTFLLQNGFEMGAVDKTLFTLHSGIDFLLVQIYVDDIIFGGSSHALVAQFSDVMSREFEMSMMGELTFFLGLQIKQTKEGIFVHQTKYSKELLKKFDMADCKPIATPMATTSSLGPDEDGEEVDQREYRSMIGSLLYLTASRPDIHFSVCLCARFQASPRTSHRQAVKRMFRYIKSTLEYGIWYSCSSALSVRAFSDADFAGCKIDRKSTSGTCHFLGTSLVSWSSRKQSSVAQSTAEAEYVAAASACSQVLWMISTLKDYGLSFSGVPLLCDNTSAINIAKNPVQHSRTKHIEIRYHFLRDNVEKGTIVLEFVESEKQLADIFTKPLDRSRFEFLRSELGVIGVDLGQRRIGTRLREELRSKAIKDAGEAKPIQPFHVAQDGEWLGSAGLHRPSSDGPRRRPMAHGLRRSGFSNSRDSMFELARNNKEVHLNINGISDLFPGESHIGISVADATDYTKTVQISREICQMMKGYMIYTVSSTVHLFGVHAILLLWNFDLPSFLTLVIAAFNYCCGQCKIEHKSLMDTDEEIRAALFLQMSIVNQAVALFAYSDDCCHIRCPGPVVTFAFIFTQMVATRKAVGGDLDFAIAKGVGWLKAGLIWLYNFVLLFVPVDLSDMEACKDDWRKIVDEAFSHPTYNSALNSGGDSSYNKAATNFSMRASSCKRMQLYPLSCHSGMYDLVGWEAIQLDASTGVCLAA

SEQ ID NO: 19747 - protein, 2257 aa, Oryza sativa
  Clone ID: TF_OSC401249j.C1.p19.fg
MEEKYSAKPFVFDGHNFVIWKARMEAYLQSQGHNVWNKVKSPYTVPDDADITPANMAQVDFNYRARNAIIGGISSGEFNRVQHHKSAHDMWTALCNFHEGNNDIQLVRQNQFHKEYQRFEMHPGESIDSYFKRFGEIISKLRSVGKEFSDNDNARHLLNCLDYGVWEMKVTSITESAPLSDLTMDKLYSKLKTHEMDVFHRKGLKHSMALVADPSGSTSSNDSAFVYGGFSLAALHSVTEEQLEKIPEDDLALFARKFSRAYKNVRDRKRGKTNEPFVCFECGEPNHKRVNCPKLKKKSDKTTKKPEGQGRKGKKDLMKKAIHKVLAALEEVQLSDIDSDDDDQEKGDKDFSGMCCLANNEDFINLCLMALEDKDDSSEHPEVCLDDIPSLDGSLCDDSCSDNDSVDDELSKERMAHLMIEISDKYRSSKYKIEKLKSENDGMALEIARLRSMIPEEDTCSTCASYLSEINLLKDKLKSCALGAGNPSSASAACSTCYEMKVDMGLLEMELKELKEKFVHDRIGRCENCPILTSDNDELRQQVAMLRTKNDLLESFATKEPIHSSCANCAILETELKDAKTVIDSIKSIDSCSSCISLKVDLESAKKENSYLQQSLERFAQGKKKLNMILDQSKVSINNQGIGYDFAESLRIGTHEILGVTDGMIELAQKPITFKSAGFIGNTSSSTPKTSEPKMVPMTSKSKPVELPRPKNPKQVEHKQNQRQTKPVEKTKYECTYCGKAGHLDFGVGRSNSWLVDSGCSRHMTGEAKWFTSLTRASSDETITFGDASSGRVMAKGTIKVNDKFMLKDVALVSKLKYNLLSVSQLCDENLEVRFKKDRSRVLDASESPVFDISRVGRVFFANFDSSAPGPSRCLIASENRDLFFWHRRLGHIGFDHLSRISGMDLIRGLPKLKVPKDLVCAPCRHGKMTSSSHKPVTMVMTDGPGQLLHMDTVGPARVQSVGGKWYVLVVVDDFSRYSWVYFLESKEETFGFFQSLARSLALEFPGALRAIRSDNGSEFKNSAFESFCDSSGVEHQFSSPYVPQQNGVVERKNRTLVEMARTMLDEFTTPRKFWTEAISAACFISNRVFLRTILHKTPYELRFGRRPKVSHLRVFGCKCFVLKSGNLDKFESRSLDGIFLGYATHSRAYRVYVLSTNKIVETCEVTFDEASPGARPEISGVPDESIFVDEDSDDDDDDSIPPPLDSTPPVQETGSPSTTSPSGDAPTTSSSAAEEIDGGTSGPTAPRHIQNRHPPDSMIGGLGERVTRNRSYELVNSAFVASFEPKNVCHALSDENWVNAMHEELENFERNKVWSLVEPPLGFNVIGTKWVFKNKLGEDGSIVRNKARLVAQGFTQVEGLDFEETFAPVARLEAIRILLAFAASKGFKLFQMDVKSAFLNGVIEEEVYVKQPPGFENPKFPNHVFKLEKALYGLKQAPRAWYERLKTFLLQNGFEMGAVDKTLFTLHSGIDFLLVQIYVDDIIFGGSSHALVAQFSDVMSREFEMSMMGELTFFLGLQIKQTKEGIFVHQTKYSKELLKKFDMADCKPIATPMATTSSLGPDEDGEEVDQREYRSMIGSLLYLTASRPDIHFSVCLCARFQASPRTSHRQAVKRMFRYIKSTLEYGIWYSCSSALSVRAFSDADFAGCKIDRKSTSGTCHFLGTSLVSWSSRKQSSVAQSTAEAEYVAAASACSQVLWMISTLKDYGLSFSGVPLLCDNTSAINIAKNPVQHSRTKHIEIRYHFLRDNVEKGTIVLEFVESEKQLADIFTKPLDRSRFEFLRSELGVIGVDLGQRRIGTRLREELRSKAIKDAGEAKPIQPFHVAQDGEWLGSAGLHRPSSDGPRRRPMAHGLRRCRQLACARTRAEKPYAATPVSRDSIGGGCRSAGPTRDFASARGSGSAGRVAASGWLGAGERALRKRRRNAHDAAGQRGKFGFVKTESTRIHQQEDHALPVHFMTVLQLPKWAVKDIERKCRGFLWKGQEKVNGGHCLVSWRKLCMPIEKGGLGVMDLDLFGQALRLKWHAKSLEQKGRPWTLVGSLSAAALCEFFQLWDEVRNTTLQNGDDSIRWKVSPDGQFSASATYNFFFTTKEDCPVGDLLWHSRAPSRVRFFMWLALKGKCLTADNLAKRNWPHEDHCVLCQREEEDCQHLFADCSFTSAVWGLIRSRVNFNFPIPTEENCPLMCWWLQPRARCRQLANRTVYTSAAQITVIRRGSITYGICQQSYLGVVMLDATRADQTNNKNRLQDTQHVHTYE

SEQ ID NO: 19748 - protein, 1637 aa, Oryza sativa
  Clone ID: TF_OSC412801j.C1.p4.fg
MAQVDFNYRARNAIIGGISSGEFNRVQHHKSAHDMWTALCNFHEGNNDIQLVRQNQFHKEYQRFEMHSGESIDSYFKRFGEIISKLRSVGKEFSDNDNARHLLNCLDYGVWEMKVTSITESAPLSDLTMDKLYSKLKTHEMDVFHRKGLKHSMALVADPSGSTSSNDSAFVYGGFSLAALHSVTEEQLEKIPEDDLALFARKFSRAYKNVRDKKRGKTNEPFVCFECGEPNHKRVNCPKLKKKSDKTTKKPEGQGRKGKKDLMKKAIHKVLAALEEVQLSDIDSDDDDQEKGDKDFSGMCCLANNEDFINLCLMALEDKDDSSEHPEVCLDDIPSLDGSLCDDSCSDNDSVDDELSKERMAHLMIEISDKYRSSKYKIEKLKSENDGMALEIARLRSMIPEEDTCSTCASYLSEINLLKDKLKSCALGARNPSSASAACSTCYEMKVDMGLLEMELKELKEKFVHDRIERFAQGKKKLNMILDQSKVSINNQGIGYDFAESLRIGTHEILGVTDGMIELAQKPITFKSAGFIGNTSSSTPKTSEPKMVSALERLEKSDKNVLGLEELLESLRGSSDFGVGRSNSWLVDSGCSRHMTGEAKWFTSLTRASGDETITFGDASSGRMMAKGTIKVNDKFMLKDVALVSKLKYNLLSVSQLCDENLEVRFKKDRSRVLDASESPVFDISRVGRVFFANFDSSAPGPSRCLIATENRDLFFWHRRLGHIGFDHLSRISGMDLIRGLPKLKVPKDLVCAPCRHGKMTSSSHKPVTMVMTDGPGQLLHMDTVGPARVQSVGGKWYVLVVVDDFSRYSWVYFLESKEETFGFFQSLARSLALEFPGALRAIRSDNGSEFKNSAFESFCDSSGVEHQFSSPYVPQQNGVVERKNRTLVEMARTMLDEFTTPRKFWTEAISAACFISNRVFLRTILHKTPYELRFGRRPKVSHLRVFGCKCFVLKSGNLDKFESRSLDGIFLGYATHSRAYRVYVLSTNKIVETCEVTFDEASPGARPEISGVPDESIFVDVDSDDDDDDSIPPPLDSTPPVQETGSPSTTSPSGDAPTTSSSAAEEIDGGTLGPTAPRHIQNRHPPDSMIGGLGERVTRNRSYELVNSAFVASFEPKNVCHALSDENWVNAMHEELENFERNKVWSLVEPPLGFNVIGTKWVFKNKLGEDGSIVRNKARLVAQGFTQVEGLDFEETFAPVARLEAIRILLAFAASKGFKLFQMDVKSAFLNGVIEEEVYVKQPPGFENPKFSNHVFKLEKALYGLKQAPRAWYERLKTFLLQNGFEMGAVDKTLFTLHSGIDFLLVQIYVDDIIFGGSSHALVAQFSDVMSREFEMSMMGELTFFLGLQIKQTKEGIFVHQTKYSKELLKKFDMADCKPIATPMATTSSLGPDEDDEEVDQREYRSMIGSLLYLTASRPDIHFSVCLCARFQASPRTSHRQAVKRIFRYIKSTLEYGIWYSCSSALSVRAFSDADFAGCKIDRKSTSSTCHFLGTSLVSWSSRKQSSVAQSTAEAEYVAAASACSQVLWMISTLKDYGLSFSGVPLLCDNTSAINIAKNPVQHSRTKHIEIRYHFLRDNVEKGTIVLEFVESEKQLADIFTKPLDRSRFEFLRTFICLSSLCDHVMLFKRVETCLN

SEQ ID NO: 19749 - protein, 605 aa, Oryza sativa
  Clone ID: TF_OSC7033j.C1.p1.fg
MALVADPSGSTSSNDSAFVYGGFSLAALHSVTEEQLEKIPEDDLALFARKFSRAYKNVRDRKRGKTNEPFVCFECGEPNHKRVNCPKLKKKSDKTIKKPEGQGRKGKKDLMKKAIHKVLAALEEVQLSDIDSDDDDQEKGDKDFSGMCCLANNEDFINLCLMALEDKDDSSEHPEVCLDDIPSLDGSLCDDSCSDNDSVDDELSKERMAHLMIEISDKYRSSKYKIEKLKSENDGMALEIARLRSMIPEEDTCSTCASYLSEINLLKDKLKSCALGAGNPSSASAACSTCYEMKVDMGLLEMELKELKEKFVHDRIGRCENCPILTSDNDELRQQVAMLRTKNDLLESFATKEPIHSSCANCAILETELKDAKTVIDSIKSIDSCSSCISLKVDLESAKKENSYLQQSLERFAQGKKKLNMILDQSKVSINNQGIGYDFAESLRIGTHEILGVTDGMIELAQKPITFKSAGFIGNTSSSTPKTSEPKMVPMTSKSKPVELPRPKNPKQVEHKQNQRQTKPVEKTKYECTYCGKAGHLDFGVGRSNSWLVDSGCSRHMTGEAKWFTSLTRASSDETITFGDASSGRVMAKGTIKVNDKFMLKDVAL

SEQ ID NO: 19750 - protein, 221 aa, Oryza sativa
  Clone ID: TF_OSC19190j.C1.p1.np
RFNKILSDLRSVDSSYDVNYTQSEISRHFLNGFDMSIWEMKVTSIQESVDMSTLTLDSLYTKLKTHEMSILSRKVDFKSSALVSSSTSLDVDSSSSVSAIALCNAMSDEYRKRGGPNLCFECYRKRGGPNLCFECGGTDHFRSRCPKLGRARREDNGDEKTNDNKPKGTVKGRKIKETLKKAFDQVYAVFEPLSDRDGESGDEDKGKNISGVCFMARGAAG

SEQ ID NO: 19751 - protein, 154 aa, Oryza sativa
  Clone ID: TF_OSC23526j.C1.p1.fg
MAVTRPPLGRRLPRDSGGPGCAVPVEAGRKEEEEQKQRGRRHPRLNRPPSRSRAYQDILILGDTLLRREDHVVVSYPMKRRKKPCFVCGLFGHNSKQCMQVDCFGVFYEARSNTRINRMKIINAVSKSVPQPHKVDLNSPNRIIIVQIEKCNGP

SEQ ID NO: 19752 - protein, 1662 aa, Oryza sativa
  Clone ID: TF_OSC400151j.C1.p49.fg
MASHEDPRDRHRDEGGATTDEEPIEDLGGASEEEDDEDAIVVDFDEAKKHIDTQYVAIGKFFSRRTFSAKGLFEAMQKAWGLRQGMEYKRLHDNRFLLEFQSAGDFRFATGGGPWIYQGDAFLITEYDGKSRPSDVKLNSLPVWVRIYDLPLSMMTETMGKLIGARLGEVRKVAVDDQGRAWDDFMRVRAEHPVDKPLTCWLKLKDKESSSVVQRYDVKYERIPRFCFYCGHIGHMERECDLPSDKQTVRFGLNLRASPYKQFEHRSWALPGKVDNNAKRNLWFPGENQSKPAPAGSQNKDGPSGKEDRKKNSPEENAPVKENFANRDEIEAEIPTVQEELKGLNARNPGKSREDGEVRKLAEQWEHMGKTQEDQPTFHAASQQAKEGQIRSETAGETWVSSKDSINQYEQLDEGAGNGREEVDEHVPPLSTIHEDISLINQLRDEELGEGHKENIDDGVKPVLGKRSMDKSLLGPGYDGPSFDVLVGGDKIGAAELCSSAWRRNGEGGDGLALFWDDTVQVDLLSYNFRYIDVLIKDESCPVQWRCTFVYGEPKASERHNMWTLLRRIKSNSTAPWCLVGDFNEAMWQFEHFSDHKRREKQIMDFREVLSHCDVFDLGFTGAPWTFDNKQKGRNNVRVRLDRAVASQSWSSLFPAAEVIHLTVSSSDHSPILLQASRVDRIKKGDRCLRLGAVINLVKLAKILKKQGIDWQSFRWQAGVLVIKTISIYPGSWILLYREEMQWLQRSRISWLKEGDRNTSFFHRKAAWRHKKNKINRLQRSDGTWCDKREEMEDMTSNFFKELYTNDPSVEPEPLLDLVQPRVTSEMNKLLCKEFSDDEISNALFQMGPLKAPGPDGFPARFFQKNWDVLKRDIIAAVKLFFEQRRMPQGVNDTAIVLIPKKKEPKDLKDYRPISLCNVIYKVIAKCLVNRMRPLLQDVIVPAQSAFIPGQMFTDNALIAFECFHAINRCKSVESQFCAYKLDLTKAYDRVDWRYLEGALLKVGFCSQWVQLLMTCVTSVSYAVRFNGSMLESFKPTRGLRQGDPLSPYLFLFVADGLSTALSEAERSGRLQPLKVCRRAPGISHLLFADDSLLFFKSNMEQTNVVKSALTLYEQSTGQLLSPAKCSLMFGKHCGDALQSDIRSLLQVQHTSFEDKYLGLPTPMGRLKAGRHQSLKERFEKRLTDWNEKYLSMGGKEVLIKSVLQAIPTYVMSVFKLPAGLCEEYMQLIRKFWDLKLFNQALLAWQAWRLIQFPNSLCAQILKAKYYPNGDLCDTTFLVDSSETWKGVVHGLELLKQGLIWWIGSGSKVRIWRDNWIPREHTLRVLGKTVRLRIKWVSDLMVPHQQIWNEELVRRIFYPPDAEEILRIQLPHSPEEDFIAWHYDKVGMFTVFSAYKLALQAQIRADEEVAQCSNGDGDRKLWKNIWNVQVPQKIRIFAWRVSRDCLATQHNKHRRQIVQKPNCEICGAEVEDAFHATVACTKAAALRAEMRQNRWLPGEQEFSQLGPDWLLHLINRADDQTRALIFLLLWNSRGEVLLSSWKFLRRCVSAEEAELLACYEGLKLAAEWIPMPVMLEYDCATAIARLLSTTEERSRWSFLLRAARSVIGLIKEVRLMHCNRECNRVAHELAQIAIRSGQSAVWRNNAPNCVMQCLQHDCNPVT

SEQ ID NO: 19753 - protein, 1319 aa, Oryza sativa
  Clone ID: TF_OSC403264j.C1.p7.fg
MSASPSVAASSSSGQEQGSLKVYGRRHDSHRRRLTLAPIPSPNLIATMAATTSAPDSPAQVHHNGSTALAGMEVIGLKTHDSQSGESDLSLIQGFWDEIGFPTPASRWWEQKSPIVSGVTPTAPPITEDDQWTRVSSKQKTKSTECHRRGWVMRPWKRPPVFPRFGGNHAGGSGTGGSGGRWHGGAGQSQCNSNRWFPQGNNAGGHHRRDHDDLPCPDQQDQKPKPRGKGMAAQGQQTEKLDQTTDGGQPHPTVQATKAKKPRPPHCHQCKTSGHIAQVCKADIDCYVCNKKESHLAVKCPLLKLPKPTCSLFGFGKTEFGFIQISDFGMNVQEASLVPTALVSIRGGSLTPEIVQTELAHRIRPDWKWEAVLHAENSFLVAFPSIEELKRMDDVEFRLKNHGVSMTIIEWKTTDELIPAYELDEVWVHVSGVPSPWHHYLAFWALGCVIGATQEVDMLTYRRTGVIRVKEDHENSSKDGSHDQAHKRAKNSASPTISKEQKSDVTAMQLVLTPFGNCRPPPPPRLVIANGIAYTIVHTKSGATVVGEVITAAEKVDEIYLSQPVDSPTPDQPCLLPPELERWSLLSSQPAAAAKITGEASLAATTAALSLAVPQMATPTSTDVNRSKDQLSKTSSTPRCRSVRSNVENMDGIAAGDDDSLLKAMKRKALRNLDDSFVGREKNPNLLQKEKSERLVPKIQKPLNLFPHERGVSDHTPLLLDTGEAAFTGNIKQFKLELGWFLRDDFYDRVLEIWNKLVKGRNAVQRWNNKMSALRRHLRGWAAHTSGVFKQKKANLQNTIDSLDIAVEVRLLSDQERILLDQSRDSLASLLREEEIKWKKRIFFLDQDEGKIEGVEALKTYITSFYRKLFGPPEENSFSLDESIIGDMAQVSQAENDFLTAPFSEEEVKEAIFAMEHNKAPGLDGFPAEFYQKFWDVIKHDLMNLFNEFHTGSLPIFGLNFGVLTLVPKVKEANQIQQYRPICLLNVSYKIFTKVATNRISSVANHLVNPTQTVFMRGRNILDGVVIIHETVHELHRKKLSGVIFKIDFEKTYDKVKWPFLLQTLRMKDKKGLRQGDPLSPILFNFIADMLATLINRAKTQGQIDGVIPHLIDGGLSILQYADDTVLFVNHDLEKAQNMKSVLLAFEQLSGLKINFHKSELYCFGEALDYSDQYNQLFGCQVGNFPFRYLGILIHYRKLRNAEWKEVVERFEKKLSSWKGKLLSLGGRLTLINSGMDIRRNTGLLSGTLFVVPKNNGGLGIHDLEIKNKVLISYHLSYPVATYLGYPPPTGIAGYYYGGISTFGPGGTGVFYPGAWVAI

SEQ ID NO: 19754 - protein, 1222 aa, Oryza sativa
  Clone ID: TF_OSC419806j.C1.p3.fg
MARTTAGGVEQGIGYGVAELAAEAGGRARGGRRGGVGRVGDGGRSHGGWRGGAEWSGVGRTGDEAGGRGGIDVGHLYAEIIGLLDKIMAAPAASNFNLRSIIEKEKLTGTNFMDWEHEKRCNDYLDISCLMLATMSPKLQRQYEALDAHTIITGLRNMSEDQARAERSNTSKSLFACRLAEGNPVSPHVIKMIGYTESLDKLGFPLNRELVTDLILQSLPPSFEPFIMNFNMNNLNRTLAELHGMLKTAEESIKKNSNHVMVMHKRKPNNKKSGQKRKLNSDEITSTSNSKTKVQKTGPAKDAECFFCKETGHWKRNYKKYLEQLKQKQQDGKSSTSGINVIEINLATSSTDSWVFDTESVAHICKSLQGLKRSRSLARGEVDIRVGNGARVAAVAVGTMPLSLPSGIVLELNNCYCIRALCKNVISASCLQAEGYGFRSVDNGCSVYYNDIFYFHVPMMNGLYIVNLDGCSVYNINAKRQCPNYLNPTFIWHCRLGHINEKRMEKLHRDGLLHSFDFESFKTYESCLLGKMTKGPFTGQSERASELLGLVHTDVCGPMSSTARGGFGYFITFTDDFSKYGYVYLMRHKSESFEKFKEFQNEVQNHLGKTIKYLRSDRGGEYLSLEFGNHRKECGIVPQLTPPGTPQWNAVSERRNRTLLDMVRSMMSQTNLPLSFSGYALETTAFTLNWVPSKSVDKTPYEIWTGNRPSLSFLKIWGYEINASLWGYPKETKGYYFYNREEGKVFVARHGVFLEKEFISRKDSGSMVRLEEIQKTPENASTSIQPQQAEQDVVQQVEQVVVEPVVEAPASRRPERIRRTPARYTLLTIGQRDILLLDNDEPTTYEEAMKKTDVDGNVHIYKARLVAKGFRQIQGVDYDETFLPVAMLKSIRIVLAIAAYFDYEIWQMDVKTAFLNGNLDEDVYMTQPKGFVDPQSAKKICKLQKSIYGLKQASRSWNIRFDEVVKALGFVKNEEVPCVYKKISGSALVFLILYVDDILLIGNDIPMLESVNISLKNSFSMKDLGEAAYILGIRIYRDGSKRLIGLSESTYIDKVLKMFNMQDSKKGFLPMSHGINLNKNQCLQTTNEQNKMSVIPYASAIGSIMYAMLCTRPDVSYVLSATSRYQSDPSESHWIAVKNILKYLRRTKDMFLVYGGQEELVVNGYTDASFQTDKDDFRSQSGFVFCLNGSAVSWKSSKQDTAANSTTEAEYIAASKAAKEAV

SEQ ID NO: 19755 - protein, 849 aa, Oryza sativa
  Clone ID: TF_OSC900099j.C1.p2.fg
MASSSSAVSNPLFGFQISEKLGEQNHALWSAQIERKKGEKGDKVMVVTNPAYQEWFATDQQVLGFLFSSLSCDVLTQVATSKTARDAWRAIESMFMSQTRARSLNIKLSLCTTQKDDEYEPAISGLVTRVEPVTVAELYSILLNYENRGSNNQQRVDNRPVCQVCYKMGHVASECWHCFDDSYVPDERHVAAATHAAYGVDTNWYLDTGATDHITGELDKLAVRERYKGNNQIHAANGAVFDKFHEFQNLVERLFDRKIIAVQTDWGDWYIPSHFLSLCLMNLMKKTQEKLMPQGETYALEIEPPTSSAPTRPHTRLSSGIWKEKKGRNVNDCKWVYKIKRKADGTLDRYKGRLVAKGFKQRYGIDYEDTFSPVVKAVTIRTVLSIVVSRGWSLRQLDVQNAFLHGVLEEEVYMRQPPGYEKSSLPNYVCKLDKALYGLKQAPRAWYSRLSTKLQELGFKASKADTSLFFYSKGGVTMFLLIHVDDIIVASYVPSAVPALLQDLGKEFALKDLGELHYFLGIEVKKMTNGILLSQEKYATYVIRKVGMNDCKPVTTPLSTSEKLSVNEGSLLGPNDATQHRSVVGALQYLTLTRPDISFPVNKTLLKESEIQAPAAAKILCDNIGAKYMSSNLVVHVSTKHIEVDYHFVRERVARKLLEIEYISTKDQIADGFTKALAILLVKVASQRLYRSPKIFIFWDGGSIRTLKDCGLCCETPEDRVFARGHCKKVAWWQTSVRRPAEEQGAAALERGREMADAMASTFLSSSNAGVPTSDHDQATFFLSRKSSRMMKEVSHVCPWWQHGRCHERARAIEPLELVGVAECTARRLVEEVGLLAGGAVPDADATYS

SEQ ID NO: 19756 - protein, 586 aa, Oryza sativa
  Clone ID: TF_OSC900367j.C1.p13.fg
MAVTRPPLGRRLPRDSGGPGCAVPVEAGRKEEEEQKQRGRRHPRLNRPPSRSRAYQDILILGDTLLRREDHVVVSYPMKRRKKPCFVCGLFGHNSKQCMQVDCFGVFYEARSNTRINRMKIINAVSKSVPQPHKVDLNSPNRIIIVQIEKFMTTSFHNIICMVGVIESSSLQAKNMLDRPNVATSVPRCYTDLGLRRRPNNLDDAAPPSPPTRALAAKRLDHPRLLSLCGRPSLAREMERETEESERNGIEFLLPRPVRDFMMAGAANDEWRGVLFHCFDSAGALEYSMANAGSRFSFATEVCAKLMNGARYAVADPPLDSEDHKEFENIVVSDAVIILDLIFDVVHDDAVLNVMMINNGADATGWRFYTDDDLTRTPENNVQSLVLPNGIALPTFEINGGIRFRRRVVLPPVLMEEDGVIYHFLQYKFLPNVRATVRASILSGLAHGEALEELAIDARAQHFAAIAGPEGHDLDPEQWAALLLPEPADGGEGHLDGEAAVGGEGQLDGEAAVEVGEEVLEVAVEVGDEVVLPALYGFVDDDEYRSTEDDDYVPDEEESHSSDDDFVPDESDDDYVPHHEGYESSD

SEQ ID NO: 19757 - protein, 424 aa, Oryza sativa
  Clone ID: TF_OSC24698j.C1.p2.fg
MARTTANATASMARLGAAASGDQSSGGGGGEEGDGARVIESMGGLSEMGKKRKGMAVQLVSMRDNFIGSGSQQFHGSTQHNSMSFPCQPFEDQPQSKVMANQTQTVEELLRQMRRRYQIYQMQQMQRQCQEPRQGHQPQMQVQVPTRNLNQSQSQEFPISAPKTPVKMLSRSPKITSANSPSDQRKISATCYDCGEQGHYPNSGANRTVKWKMDNGRTMFITSSEFTPEDVARIPKRQRGRNTFRGARQLTRHLIKYGPPRPEDDESGERFSADDDDDDDDDDDDDDDATLNSFMERGLEFKACTRCGIVGHTASLCLPTCRCGEYTHYSDACPLRKVTCFLCEGTDHVPKDCQLNAVIAKTKKEQGTTVQPIRQPMAVDNNSHNPSALPPTPAPVETNHGRSNVTKDVHKSLLVPVSAVNVHN

SEQ ID NO: 19758 - protein, 386 aa, Oryza sativa
  Clone ID: TF_OSC900368j.C1.p18.fg
MAPQPTCQTCVRNYLGSKEDPALSENPNQLAEQVTNQVAKTDNTVPGPNKEVATRNQHSSMDIYQILANQTQMLQEIAQNLASIQQQLLLPQPKVNPDKSKNEAAEIQGTQSVEGTDTHKEKNKEFLNVMITGMKTPLQANNCPNLQNSINKSVSRENSMIKEGSCHKRKTLPSEVDMQDVPQCQTMQSCQNLPKSPTLKSKKIRHVPGFICFICHKIGHYMRHCPQKPYMDAPLQANMSTSRMPFYPQGSPNSPNVNAVRSTFPDDKRAKASCDMCQDIQEKKEMQEYKRCKVMSLEIQAKEDLCRKTNSPAQYYQKASQHSTSSGSTSRSTMSEPGQQATMINSNSHEGSNSVPCPTPSKRRGYKAGVECFICHEMGHYSWCCP

SEQ ID NO: 19759 - protein, 1624 aa, Oryza sativa
  Clone ID: TF_OSC900114j.C1.p4.np
IPSFESPFLPEKSLKSSKASRQPGLEWYIPGLEIELSRGGCSEWLGLCNRMPRYKPEYLGVEGFVQELRTMSFVGFGTAPFYAQIPHDRHEKCRVKVTLNSNSEDISVMFKAGGRNYIHACQVARIAIGELRDRYSDLADTEYRYHPRQPQGSRGSYLETEGIENDATRHLVEMLWAMDESRAEVLAAQDREDRNRGKICLEDKVDRLEKELAVLGEAPPQKARIRLTARKALFVPRYQLAPKMVNTSNGNGPSNNNNGENPTAQVLAQQTQLMNMMMQLQNQQNQGNNHAPPQKLAEFLRVRPPVFSSTNPVEAGDWLHAIEKKDLLQCTDQEKVSFASHLHGPASEWWDHFRLNRTAEPITWLEFTAAFRTHIPSGVVSLKKKEFRLTQGSRSVTEYLHEFNLARYAPEDVRNDEERQKFLEGLNDELSYPLMGDYHDFQKLVDKAIRQEKYNRMEQKKRRIAQKTQQGNNQKPRLTLGPSMPQGGSSSVVRPQRQFNNNAGNNIRNQAPHVAAPAQQQPAKREQGSPVVCFNCGDPGHYANKPKPRRVKVVPVQSNSVPASKARVNHVAAAEAQAPDVILGTFLVNLVPTVLFDSGATHSFLSMFAGNHGMEVEDLRRPLVSTPSNQALSLQRSPSRIEIQGVPFLANLILLSKDLDVILGMDWLARKGVIDCANRKVTLTSNGRVVTVHALSSESLRRLNQITLEEISIVREYDVFPYDLPGMPPKRDIFRIDLVPGTTPIHKRYRMAANELAEVKRQVDLLQKGYIRPSSSPWGAVIFVEKKDHTQRMCVYRALNDVTIKNKYPLPIDDLFDQLKGATVFSKDLRSGYHQLRIKEEDPKTAFTTRYGLFECTVSFGLTNAPAFFMNLMNVFMEYLDKFVAVFIDILIYSRTKEEHEEHLRALEKLREHQLYAKFSKEFWLSEVKFLGHVISGGVAVDPSNVESVTNWQPKTVSEIRSFLGLAGYRRFIENFSKIAKPMRLLQKDVKYKWSEECESFQELKSRLISAPILLPDPKKGFQVYCDASKGLGCLLMQDGKVVAYARQLRPHEKNYPTHDLEAVVVHALKIWRHYLFTRTEVYTDHKSLKYIFQPDLNMRQRRWLELIDYDIGIHYHPGKANVVDALSRKGYCNATEGRQPLELCKEFERLNLGIVRGFVAALEAKPTLIDQREAQINDPDIQEIKKMRRGKAIGFLEDEHGTWLGERICVPDNKDLKAILKEAHDTLYSIHPGTKMYQDLKERFWWASMREIAEYVAVCDVCQRKAEHQKPAGLLQALKIEWKWEEIGMDFITGLRTSSGHDSIWVIVDRLKVAHFIPVKTTYSGSLAELYMARIVCLHGVPKKVSDRGSQFTSNFWKLQEEMGSKLNFSTAYHRTDGQTERVNQILEDMRACALDFDGSWDKNLYAEFSYNNSYQASLQMPYEALYGRKCRTPLLWQTGERQVFGTDILREEEKVKIIQERLRVAQSHKSYADNRRRDLSFENYVYLRVTPLRGVHRFTKGKLAPRFVGPYKIVKRGEVAYQLELPQSLAVHNVFHVSQLKKCLRPTEEANLEQIEVQEDLYVEKPIRILETDERRRNRVIRFCKVQWSNHSEESTWEREDELKSAHPLFASSSESRGRDSV

SEQ ID NO: 19760 - protein, 410 aa, Oryza sativa
  Clone ID: TF_OSC417493j.C1.p3.np
MDEVGCRWTFSRANEGYTSCGPVVEMSMAEGWCPAARGSVLPACPGIPAVGGIGSVLLSKARMGWKLCHVFRPYTVVVDCLTTKMWNGWPGLAWDELGPRSGCQFGLNHRRPWVKAVLDGQVSEEEDIVSCLSKLQKAVGSVSAAKEAVKPAVKQDKRLRSVKVLSLVSNLSLPFVFPLSLSKSLQQMADNEKGNKVRSQDIGTLSSRVNEAPDTSCVTLVQHLINQNRLLIEILQQHQTPILNLSQIQPQVQLEAVQALTPQVSMPPASRRTHGDVPHVDPKEASNICFMCDEQGHYARERPQQKRKTPMRTEDEVRKMIITSTEWPPPGMTRRQRRNTFRGAPQLTEHLLANGGRVSDSEDSDQVSSDDEDEECKACSRCGEIGHCRDTCGSTVVLCNEDDERERLDG

SEQ ID NO: 19761 - protein, 1282 aa, Oryza sativa
  Clone ID: TF_OSC10615j.C1.p9.fg
MAGFADALRPDKFTGVHFKRWQIRVTLWLTAIKCFWVSTGKPEGVLTAEQQKQFEEATTLFVGCILSVLGDRLVEVYMHMTDAKELWDALNTKFGATDASNDLYIMEQFHDYKMADNRSVVEQAHEIQTMAKELELLKCVLPDKFVAGCIIAKLPPSWRSFGTALKHKRQEYSVEGLIASLDVEEKAREKDAASKGDGGQSSANVVHKAQNKSKGKYKAQQTTNFKKQKKNNNNPNQDERICFVCGQVGHLARKCPQRKGMKAPAGQTSKSANVTIGNTGDGSGYGNLPTVFSVNQSTNWWVDTGANVARGSTVLMGNGSHASVHGVGTVDLKFTSGKIVQLKNVQHVPSIDRNLVSGSRLTRDGFKLVFESNKVVVSKHGYFIGKATRKPHKAAEERNLAPLELLHSYLCEMNGVLTKGGKRYFMTFIDDATRFCYVYLLKMKDEALDYFKIYKAEVENQLDRKIKRLRSDRGGKFFSNEFDLFCEEHGIIHERTPPYSPESNGIAERKNRTLTDLVNAMLDTAGLPKAWWGEALLTSNHVLNRVPNRNKDKTPYEIWIGRKTITFLFAHMGVLGESQFKSEVPDMHVGTIMESRDAIFFESFFPMKDTHSGSNQPSEIIPSSITPPEQTEHTHELVSEEDVSEAPRRSKRQRTAKSFGDDFTVYLVDDTPKSISEAYASPDADYWKEAVRSEMDSIVANGTWEVTERPYGCKPVGCKWVFKKKLRPDGTIEKYKARLVAKGYTQKEGEDFFDTYSPVARLTTIRVLLSLAASHGLLVHQMDVKTAFLNGELDEEIYMDQPDGFVVEGQEGKVCKLLKSLYGLKQAPKQWHEKFDKTLTSTGFAVNEADKCVYYRHGGGEGVILCLYVDDILIFGTNLEVINDVKSFLSQNFDMKDLGVADVILNIKLIRGENGITLLQSHYVEKILNRFGYIDSKPSPTPYDPSLLLRKNKRIARNQLEYSQIIGSLMYLASATRPDISFAVSKLSRFTSNPGDDHWRALERVMRYLKGTVELGLHYTGYPAVLEGYSDSNWISGVDEIKATSGYVFTLGGGAVSWRSCKQTILTRSTMEAELTALDTATVEAEWLRDLLMDLPVVEKPVPAILMNCDNQTTCEKTIEVCQEIKKLRSYNVGLHPNSEKPGRSLHEGTITKCDRQCIEGDGFETHSILERTHLCELDCWSQSMKILGESSRKLTKDLGIKSLYVYNLNKNHLILSVHCNDWKAYSCTTMIFSQCARNQKSSAIPSVTVIGRRKAITICISTSSQRPIPLIIEQNDWSMFS

SEQ ID NO: 19762 - protein, 686 aa, Oryza sativa
  Clone ID: TF_OSC14490j.C1.p1.fg
MKSNRGVSFSTKNAASGSKFTSRGSGNRGAFSSSSGGARSSNYGTSSGKDLAAPNERKNAANTSSTSVGSSTKSSGIQCFKCGGRGHVARECPNNRTIVVNDQGEYESTSEEEQEDSEEENNLEKDICEFESGAALVVTQILSVQMSDAENGQRHNLFQTRAKVQDKVVKVIIDGGSCHNLASKEMVEKLGLKLLKHPHPYHVQWLNNSGSIKIAQRVKVPFKIGEYIDTMECDVAPMTVCHMLLGRPWQYDRSSLHCGRTNQYTIKWKGKELILKPMTPQQILAEHLQKSSEVRNESAKEGQKNNLSAPHKSEYEDVFPEETPVGLPPLRGIEHQIDLIPGATLPNRPAYRTNPEETKEIQRQVQALLDKGYVRESLSPCAVPVILVPKKDGSWRMCVDCRAINNITVRYRHPIPRLDDMLDELSGSMIFSKIDLRSGFHQIRMKIGDEWKTAFKTKFGLYEWLVMPFGLTNAPSTFMRLMNHVLRAFIGKFVVVYFDDILIYSKTLEEHVAHIQQVLDVLRKEQLYANLEKCTFCTDQVVFLGFVVSGLGIQVDESKVKAIKDWPTPENVSQVKSFRGLAGFYRRFVRGFSTIAAPLNELTKKGVAFQWGEPQEKAFQELKKRLSEGPLLVLPDFTKTFEVECDASGIGIGGVLMQNGQPVAYFSEKLGDPLESTCRHASLSIL

SEQ ID NO: 19763 - protein, 1403 aa, Oryza sativa
  Clone ID: TF_OSC400860j.C1.p8.fg
MSAPTPRVSRSREPHQRRISRSPPHRRGRRRPGEDRELIPVQCVVKEVGGSANYPLLTKTNYGDWALMMKVMLQARGLWDAVEHGDADFQADRMAMEAILRAMPPEMLASLAVKPSAKEAWDAIKTMRVGVDRVRKSKAQMLQKQYDAMEFKDGETVEEFSLRLNGLVTNLATLGVHLEEGKVVEKFLNSVPDHLSQIALSIETLLDLDELTLEEVTGRLRNAEEKLPAKSSAAGGKLFLTEEQWTARWKEKQAAESSSGKAKSGGGNRRRRGGKKKAEAAAHDGDRAGRDTQEGREPNRDKCRNCGRTGHWAKDCRQPKRPAEAYQALADEDDDEPALLMAHVVDAAPVSASSSSAPPASSPPSQPDKTIELVEPKVFAHLLTEKQTDGGVWHLDTGATNHMTGIREVFAELDLSVRGSVRFGDGSVVGIEGRGKIIFECRNQEHRALTGVYYIPKLNANLISLGQLDENGCDVRIYHGVCTIRDPAAQLLARVQRTRNRLYLIKLTIGQPVCLAAKAQECAWLWHARYGHLHFDALRRLASRDMVRGMPDIDHVEQLCDSCVISKQRRTPFPRRSMFRAEDRLELVHGDLCGPISPATPGGKTHFLLLDDASRYMWITLLGCKSEAADAIKRFQARAEAESKQKLRILRTDNGGEFTSVEFATYCAEQGVSRHFSAPYSPQQNGVVERRNQTILGMARSLLKAKNMPARYWGEAVTTAVFLLNRAPTKSLANMTPYEAWHGKKPAVGYLRTFGCLAYVKDVRPHLPKLSDRSKPMVLIGYADGAKAYKVFDPVSGRVQVSRDVIFDEGAGWDWDAAGAAAVPGGGGCSDFTVEYLTTGTSPSASTSAPSSASSGASAMGDLLGDALTPGFATRDPEEGELHLLAAEEPASFTEAEQRQEWRRAMLDEIASIEENNTWRLVDLPSGHRAIGLKWVFKLKKDAEGRVAKHKARLIAKGYVQQPGIDFEEVFTPVARLESVRLLLAQAAQAGWTVHHMDVKSAFLNGELAEEVYVKQPPGFVKEGREHQVLRLDKALYGLRQAPRAWNSKLEATLLSLGFRRNDCEHAVYVRGNTSARLLVGVYVDDLIITGTKEDEIVRFKGEMKALFKMSDLGLLSFYLGIEVEQVAGSIRLSQAAYARRILERAGMLGCNPSATPMEQRLKLSKTSAAASVNPTWYRGIVGCLRYLVHTRPDIAFSVGYVSRFMEAPTTEHEAAVKRILRYIAGTTEFGCHYHQSSSPVQLVGYSDADMAGDPDTRKSTTGVVFFLGTSPVSWQSVKQKVVALSSCEAEYIAATTAACQGVWLSQLLGEINQEEPDAFKLLIDNKSAIALSKNPVFHERSKHIATRYHYIRERVEDGSVHVEFVGTEGQIADILTKALGRTRFQELRSRIGVADVKFRCKT

SEQ ID NO: 19764 - protein, 1009 aa, Oryza sativa
  Clone ID: TF_OSC401810j.C1.p53.gm
MAGFADALRPDKFTGVHFKRWQIRVTLWLTAIKCFWVSTGKPEGVLTAEQQKQFEEATTLFVGCILSVLGDRLVEVYMHMTDAKELWDALNTKFGATDASNDLYIMEQFHDYKMADNRSVVEQAHEIQTMAKELELLKCVLPDKFVAGCIIAKLPPSWRSFGTALKHKRQEYSVEGLIASLDVEEKAREKDAASKGDGGQSSANVVHKAQNKSKGKYKAQQTTNFKKQKKNNNNPNQDERICFVCGQVGHLARKCPQRKGMKAPAGQTSKSANVTIGNTGDGSGYGNLPTVARGSTVLMGNGSHASVHGVGTVDLKFTSGKIVQLKNVQHVPSIDRNLDTHSGSNQPSEIIPSSITPPEQTEHTHELVSEEDVSEAPRRSKRQRTAKSFGDDFTVYLVDDTPKSISEAYASPDADYWKEAVRSEMDSIVANGTWEVTERPYGCKPVGCKWVFKKKLRPDASHGLLVHQMDVKTAFLNGELDEEIYMDQPDGFVVEGFAVNEADKCVYYRHGGGEGVILCLYVDDILIFGTNLESHYVEKILNRFGYIDSKPSPTPYDPSLLLRKNKRIARNQLEYSQIIGSLMYLASATRPDISFAVSKLSRFTSNPGDDHWRALERVMRYLKGTVELGLHYTGYPAVLEGYSDSNWISGVDEIKATSGYVFTLGGGAVSWRSCKQTILTRSTMEAELTALDTATVEAEWLRDLLMDLPVVEKPVPAILMNCDNQTEIKKLRSYNVGLHPNSEKPGRSLHEGTITKYYSISLAGVHRRSGEQVSGTSAFDVLHREKAAIRDLLLLLQRHAYTAIAAAAVDSHFPQDYLKNITPMPSWLYNQLFDVGACRSHGRPHRRCKVLTGSFLVAEGGERERGSPVLRWPGGGDAGGKAAKGGDARRFQRRRSRRTSRRRRGKEEVGASSVLPLDVDGGASTWQLLLCWVAEEEQHGTATVAARLGGDGKTAATAHKAVGGGGAVAWAPSAPTERRKGGSAGWAGLGRASERRKGEMRPKLKREKV

SEQ ID NO: 19765 - protein, 1059 aa, Oryza sativa
  Clone ID: TF_OSC411095j.C1.p6.gm
MKPENAFVTVQEGTLCLAIVVTTKQQPVPILGNLAQQNIHVGSPPPTAQGAAGQRSIRAAGRRAAGEEDGADGERDEESEDAAAVIVHLHRSRARAVSGVAGGSVSAGAAAGGAGGDSLFPRRRRRPPLRLSLLKRPNRRRLPSPVSSSSPPASGPLRRSNPEVARATAATTGRRTSSPPASCPAGCCREKRTAGAASGSAQPAACDEERQARSGVRAAADDHPPPGSGRGSRRSPPARIWRRWPSPTWIRRWWRRAGGLGRWGVSGSGYRDGDSNYGDHDDDDNDDREEGSDNSFRIKVTLWLTAMKCFWVSTGKPEGVLTAEQLKQFEEATTLFVGCILSVLGDRLVEVYMHMTDAKELWDALNTKFGATDASNDLYIMEQFHDYKMADNRSVVEQAHEIQTMAKELELLKCVLPDKFVAGCIIAKLPPSWRSFGTALKHKRQEYSVKGLIASLDVEEKAREKDAASKGDGAQSSANVVHKAQSKSKGKYKAQQTTNFKKQKKNNNNPNQDEKTCFVCGQLGHLARKCPQRKGMKAPVGQTSKSAKSANVTIGNTGDGSGYGNLPTDARGSTVLMGNGSHASVHGVGTVYLKFTSGKIVQLKNMQHVPSIDRNLVSGSRLTRDGFKLVFESNKVVISKHRYFIGKGYEYGGLFRFSLSDFGNNSVNHISGSVDDEPNVWHSPSHGLLVYQMDVKTTFLNGELDEEIYMDQPDWFVVEGQEGKVCKLLKSLYGLKQAPKQWHEKFDKTLTSAGFAVNEAGKCVYYSHGGGEGVILCQYVDDILIFGTNLEVINESHYVEKILNCFDYIDSKPSPTPYDPSLLLRKNKRIARNQLEYSQIIGSLMYLASATRPDISFAVSKLSRFTSNPGDDHWRALERVMRYLKGTVELGLHYTGYPAVLEGYSDSNWISDVDEIKATSGYIFTLGGGAVSWRSCKQTILMRSTMEAELTALDTATVEAKWLRDLLMDLPIVEKPSILERTHLCELDCWSQSMEIFDYSIPLTSVHLRSGEQVSGTSTFDVLHRKKATIRFLESALRDCSLFIRDGSSSSLLACCVPS

SEQ ID NO: 19766 - protein, 963 aa, Oryza sativa
  Clone ID: TF_OSC416211j.C1.p4.fg
MVVRIGEEVGSGAGKAVAWPGRRRAMRARPWEEVAARPGEEADTRAAREGEDYSIPLAGVHLRSGEQVSGTSAFDVLHREKAAIRKIRLNHYMPIISTIQKPYYRHCDFTMAGFADALRPDKFTGVHFKRWQIRVTLWLTAMKCFWVSTGKPEGVLTAEQQNILGDRLVEVYMHMTDAKELWDALNTKFGATDASNDLYIMEQFHDYKISNNRSVVEQTHEIQTMAKELELLKCVLPDKFVAGCIIAKLHPSWRSFGTTLKHKRQEYSVKGLIASLDVEEKAREKDAASKGDGGQSSANVVHKAQNKSKGKYKAQQTTNLKKQKKNNNNPNQDEKTCFVCGQLGHLARKCPQHKGKKAPVGQTSKSANVTIGNTGDGSGYGNLPTVFSVNQSTNWWVDTGANVHVCADISLFSSYQVARGSTVLMGNGSHTSVYSVGTVDLKFTSGKIVQLKNVQHVPSIDRNLVSGSRLTRDEFKLVFESNKVVVSKHGNFIGKGYECGGLFRFSLSDFCNNSVNHICGSVDDEANVWHSRLCHSNFGLMSRLSSMCLIPKFSIVKGSKCHSCVQSKQPRKPHKAAEERNLAPLEFLHSDLCEMNGVLTKGGKRYFMTLIDDATRFCYVYLLKTKDEALDYFKIYKAEVENLLDRKIKRLRVPNRNKGKTPYEIWIGRKPSLSYLSTWGCLAKVNVPITKKRKLGPKTVDCVFLGYAYHSIAYRFLIVKSEVPDMHVGTIMESRDATFFESFFPMKDTHSSSSQPSEIIPSSITSPEQTEHTHEHVTEEDDSEAPRRSKRQRTAKSFGDDFTVYLVDDTPKSISEAYASPDADYWKEAIRSEMDSIIANGTWEWVFKKKLRPNGTIEKYKARLVAKGYTQKEGEDFFDTYSPIARLTTICVLLSLAASHGLLVHQMDVKTAFLNGELDEEIYMDQPDGFVVEGQEGKALISEDVVLQSILERTHLCELDCWS

SEQ ID NO: 19767 - protein, 1454 aa, Oryza sativa
  Clone ID: TF_OSC420023j.C1.p3.fg
MSAPTPRVSRSREPHQRRISRSPPHRRGRRRPGEDRELIPVQRVVKEVGGSANYPLLTKTNYGDWALMMKVMLQARGLWDAVEHGDADFQADRMAMEAILRAVPPEMLASLAVKPSAKEAWDAIKTMRVGVDRVRKSKAQMLQKQYDAMEFKDGETVEEFSLRLNGLVTNLATLGVHLEEGKVVEKSLNSVPDHLSQIALSIETLLDLDELTLEEVTGRLRNAEEKLPAKSSAAGGKLFLTEEQWTARWKEKQAAESSSGKAKSGGGNRRRRGGKKKAEAAARDGDRAGRDTQEGREPNRDKCRNCGRTGHWAKDCRQPKRPAEAHQALADEDDDEPALLMAHVVDAALVSASSSSAPPASSPPSQPDKTIELVEPKVFAHLLTEKQTDGGVWHLDTGATNHMTGIREVFAELDLSVRGSVRFGDGSVVGIEGRGKIIFECRNQEHRALTGVYYIPKLNANLISLGQLDENGCDVRIYHGVCTIRDPAAQLLARVRRTRNRLYLIKLTIGQPVCLAAKAQECAWLWHARYGHLHFDALRRLASRHMVRGMRDIDHVEQLCDSCVISKQRRTSFPRRSMFRAKDRLELVHGDLCGPISLATPGGKTHFLLLVDDASRYMWITLLGRKSEAADAIKRFQARAEAESKQKLRILRTDNGGEFTSVEFATYCAEQGVSRHFSAPYSPQQNGVVERRNQTILGMAHSLLKAKNMPARYWGEAVTTAVFLLNRAPTKSLANMTPYEAWHGKKPAVSYLRTFGCLAYVKDVRPHLPKLSDCSKPMVLIGYADGAKAYKVFDPVSGRVQVSRDVIFDEGAGWDWDAAGAAAVPGGGGCSDFTVEYLTTATSPSPLTSAPSSASSGASASRAVTPSSASTPATLASASTPATPTFVSPPPGVDENLDAEQDDCPLRYRSMGDLLGNARTPGFATRDPEKGELHLLAAEEPASFTEAEQRQEWRRAMLDEIASIEENNTWRLVDLPSGHRAIGLKWVFKLKKDAEGRVAKHKARLVAKGYVQQPGIDFEEVFALVARLESVRLLLAQAAQAGWTVHHMDVKSAFLNGELAEEVYVKQPPGFVEEGREHQVLRLDKALYGLRQAPRAWNSKLDATLLSLGFRQNDCEHAVYVRGNTSARLLVGVYVDDLIITGTKEDEIVRFKGEMKALFKMSDLGLLSFYLGIEVEQVAGSIRLSQAAYARRILERAGMLGCNPSATPMEQRLKLSKTSAAAPVNPNWYRGIVGCLRYLVHTRPDIAFSVGYVSRFMEAPTTEHEAAVKRILRYIAGTTEFGCHYHQSSSPVQLVGYSDADMAGDPDTRKSTTGVVFFLGTSPVSWQSVKQKVVALSSCEAEYIAATTAACQGVWLSQLLGEVNQEEPDAFKLLIDNKSAIALSKNPVFHERSKHIATRYHYIRERVGDGSVHVEFVRTEGQIADILTKALGRTRFQELRSRIGVADVKFRCKT

SEQ ID NO: 19768 - protein, 1232 aa, Oryza sativa
  Clone ID: TF_OSC6395j.C1.p2.fg
MWGLHKSYPPPLFLFVSVGRELAAVAGASSNSIHSLLLPFPAASLLAAAVHQPASGGDPGVALERRQRRAREGHSGGGGGDRGRRGRLAVGRKKTSHENGRVLATLGPATALSTAALDALSAGHDAPASAVLPPCPRTRKGRLRLATATHVGILSKMAAFGGGFFCTCGGSVEGSGGRASGSGGSDRGLVIHRVVKEAGGAANYPLLTRTNYNDWSLLMKIKLQARCLWGAIDPGGVELHEDRMALDAICSAVPPEMISTLATKASAKEAWDCIRILRVGDDRIRKASAQKVRMEYESLVLRDGETVEDFAMRLTSTVNQLATLGDPEPADKVVEKYLRVARPRFTQLVLSIETLLDISTLSLEEVTGRLKAAEDAMPLPSSSSDNAGKLYLTEEEWLERHNKKEQEAKKNSGSPSNRGKRRGGKGRNGGGAGVGGAKNTNSGAARREDKCRNCGKYGHWAKDCRSKPKRDEQAHVAQDDEPTLLLLTGGVITHACEQEHAPAPSAPTPSSDPIYLEEKKLFAALDDAAKRDPGRWIVDSGASNHMTGCRTAFSDIDTGITGNVRLGDGSVVRIEGRGTVLFSCKNGEHRTLSNTYLIPRLAANIISVGQLDETGFKVEAEDGVMRIWDEQRRLLARIHRNPGRLYVLDVELARPVCLTARIGDEAWKWHARFGHINFTALRKMGREQLVRGLPAVSQVDQLCEACLAGKHRRTPFPQQAQQRSLEPLQLLHGDLCGPISPPTPSDNRSSSKSIGGKTPYELWNGSPPAVHHLRTFGCLAHVKTTTPNVKKLDDRSKPMIFVGYEPGSKAYRCYDPASRRVHISRDVAFDEEAQWRWDGETASELDFTIEYTTVYHPAVVNAPRADSEQPELPTPSATSTSPCTPAATAGTTATSAEFATPPTIAADDLDADHDDAPLRFRRVDEILGPATPPGLAVREFDDELMMASAEEPASLAEAQQQDCWRQAMLDEMKSIEENGTWLLVDPPPRQRPIGLKWVFKTKKDAAGNITKHKARLVAKGYVQRQGIDYDEVFAPVARLESVRLLLAYAASEGWAVHHMDVKSAFLNGELKEEVYVAQPPGFVVDGKEQKVLRLVKALYGLRQAPRAWYTKLDASLLSLGFHRSASEHAVYMRGANARRLVVGVYVDDLVITGGNHSELDQFKKEMRETFQMSDLGLLRYYLGLEVSQTDEGITLSQGAYAKKILEAAGMVGCNPSQTPMEPRLKLTCLSIT

SEQ ID NO: 19769 - protein, 1618 aa, Oryza sativa
  Clone ID: TF_OSC900286j.C1.p13.fg
MWGLHKSYPPPLFLFVSVGRELAAVAGASSNSIHSLLLPFPAASLLAAAVHQPASGGDPGVALERRQRRAREGQSGGGGGDRGRRGRLAVGRKKTSHENGRVLATLGPATALSTAALDALSAGHDAPASAVLPPCPRTRKGRLRLATATHVGILSKMAAFGGGFFCTCGGSVEGGRSSAGEGGGGTTDGRGQHAEPADNGTVGNKPYTMYLGNLTSGIRARFRAWTRDRALEGVFMPRGRTHSPRRRSASPSVHVSGSGGRASGSGGSDRGLVIHRVVKEAGGAANYPLLTRTNYNDWSLLMKIKLQARCLWGAIDPGGVELHEDRMALDAICSAVPPEMISTLATKASAKEAWDCIRILRVGDDRIRKASAQKVRMEYESLVLRDGETVEDFAMRLTSTVNQLATLGDPEPADKVVEKYLRVARPRFTQLVLSIETLLDISTLSLEEVTGRLKAAEDAMPLPSSSSDNAGKLYLTEEEWLERHNKKEQEAKKNSGSPSNRGKRRGGKGRNGGGAGVGGAKNTNSGAARREDKCRNCGKYGHWAKDCRSKPKRDEQAHVAQDDEPTLLLLTGGVITHACEQEHAPAPSAPTPSSDPIYLEEKKLFAALDDAAKRDPGRWIVDSGASNHMTGCRTAFSDIDTGITGNVRLGDGSVVRIEGRGTVLFSCKNGEHRTLSNTYLIPRLAANIISVGQLDETGFKVEAEDGVMRIWDEQRRLLARIHRNPGRLYVLDVELARPVCLTARIGDEAWKWHARFGHINFTALRKMGREQLVRGLPAVSQVDQLCEACLAGKHRRTPFPQQAQQRSLEPLQLLHGDLCGPISPPTPSDNRYFLLLVDDYSCFMWLSLLPSKDGAAAAIKRIQAAAERKSGKKLRALRTDRGESSWSTTSRITAPSWESDARRRRPTRRNKTASWNVATNRWSGRRGACSKPKGCQTTTPNVKKLDDRSKPMIFVGYEPGSKAYRCYDPASRRVHISRDVAFDEEAQWRWDGETASELDFTIEYTTVYHPAVVNAPRADSEQPELPTPSATSTSPCTPAATAGTTATSAEFATPPTIAADDLDADHDDAPLRFRRVDEILGPATPPGLAVREFDDELMMASAEEPASLAEAQQQDCWRQAMLDEMKSIEENGTWLLVDPPPRQRPIGLKWVFKTKKDAAGNITKHKARLVAKGYVQRQGIDYDEVFAPVARLESVRLLLAYAASEGWAVHHMDVKSAFLNGELKEEVYVAQPPGFVVDGKEQKVLRLVKALYGLRQAPRAWYTKLDASLLSLGFHRSASEHAVYMRGANARRLVVGVYVDDLVITGGNHSELDQFKKEMRETFQMSDLGLLRYYLGLEVSQTDEGITLSQGAYAKKILEAAGMVGCNPSQTPMEPRLKLSKLSTSPCVDATDYRKIVGSLRYLVNSRPDLAFSVGYVSRFMEKPTTEHLAAVKRVLRYVAGTINRGCSYRRKKGAVHLVGFSDSDLAGDVDTRKSTTGVFFFLGDNLITWQSQKQKVVALSSCEAEYIAATTAACQGVWLARLLAELKGEEADAVTLNVDNQSAIQLSKNPVFHDRSKHIETRYHYIRECIEEDRVKIEFVSTNDQLADILTKSLGRDRFNELCTRIGLVEVKGTCKV

SEQ ID NO: 19770 - protein, 1286 aa, Oryza sativa
  Clone ID: TF_OSC400275j.C1.p2.fg
MASTGENRGDNINGGNTTTSKSSGGTFSGYIFILPILLDVSLLILFAMAALRYYVNVDAYFILSMLKLYTSSTVTRFTHIANVMFIVLIFWIKICRIITKFPTIQKLDRSFLVVSFAASLKPHAFDGSNYKKWKARALLWLTVMQCFFVSRGKPSEPPLFPEEEAKFEATDCLFRGALISVLADSIVDVYMHMPSGKDMWDALEAKFGVSDVDSELYVMEQFYDYKMVDDCSVVGQAHENQMLAKELENNNCELPDKFVAGGIIAKLPPSWTDFATSLKHKRQEFSVTDLIGSLSVEEKARAQDNRGKKIEGGSSANLVQKKNPHASHNNNKKVKPDVKPKATTNFKKKGKGKAKGDCFVCGKPGHWAKDCPERKDKKSANMVISEGGGTLGYGKFLPTVLSVCHSLDWWVDTGANIHVFADISLFSSYQVGRGSSLLMGNGSLVAVHGVGTVDLKFTSGKIVQLKNVQHVPSIKKNLVSGSLLCRDGFRLVFESNKCVVSKYGTFIGKGYDSGGLFRFSLDDMCNKVVNHVSDDDDESNVWHSQLCHVNFGCMTRLANMSLIPKFTLVKGSKCHTCVQTKQPRKPHKSSEARKLAPLEIVHSNLCEMNGVLTKGGKKYFMTLIDDCTRFCYVYLLKTKDEVLHYFKIYKAEVENQLERKIKRLRSDRGGEYFSNEFTSFCKEYGIIHERTHSYSPQSNGVAERKNRTLTEMVNAMLDTAGLSKEWWGEAILTACHVLNRIPTKHKEVTSFEEWERKKLNLSHLRTWGCLAKRCHIFENEFPMKNAPSTSSQEPILSPEHFVLIEHIDQTLEENSEENNIVATRKSKRQRTAKSFGDDYIVYLVDDTPRTIEEAYSSPDVDYWKEAVRSEMDSIMSNGTWEVIECPYGCKPVGCKWVFKKKLRPDASHGLLVHQMDVKTAFLNGELEEEIYMDQPDGYVLEGQEGMVCKLLKSLYGLKQAPKQWYEKFDNTLTSTGFVVNEADKCVYYRNGGGEGVILCLYVNDILIFGTSLNVIEEVKDFLSKSFEKKDLGVADVILNIKLLRGDEGRITLVQSHYVDKVLSRFGYSDCKAAPTPYDPSVLLRKNRRIARDQLRYSQIIGSLMYLASATRPDISFAVSKLSRFVSNPGDDHWHALERVMRYLKGTMSYGIHYAGYPKVLEGYSDSNWISDADEIKATSGYVFTLGGGAVSWKSCKQIILTRSTMETELTALDTATVEAEWLRELLMDLPVVEKPIPAILMNCDNQTVIIKVNSSKDNMKSSRHVKRRLKSVRKQKNSRVIALDYV

SEQ ID NO: 19771 - protein, 690 aa, Oryza sativa
  Clone ID: TF_OSC400888j.C1.p10.gm
MEDVAEVDLADPNPDILLLRNSVRLRTCTGRRAIKFLFTCAHSASSATAPVLRDYYYCIDAFVNMSTEIGDKEEEDKFEATDYLFREALISVLANNIVDVYMHIPSGKDMWGVLEAKFEAHEIQMLIKELENNHCELPDKFVAGGIIAKLPPSWSDFATSLKHKRQEFSVTDLIGSLGIEEKARAKDNRGKKIEGGSSANLVQKNNPHASHNNNKKVKPDVKPKATTNFKKKGKGKAKGDCFVCGKPGHWAKDCPERKDKKSANMVISEEGGTLGYASHGLLIHQMDVKTAFLNGELEEEIYMDQPDGYVLESQEGMVCKLLKSLYGLKQAPKQWHEKFDNTLTSAGFVVNEADKCVYYRCGGGEGVILCLYVDDILIFGTSLNVIEEVKDFLSKSFEMTDLRVADVILNIKLLRGDEGGITLVQSHYVDKVLSRFGYSDCKAAPTPYDPRTMSYGIHYAGYPKVLEGYSDSNWISDADEIKATSGYVFTLGESFPGSVHLRAQVYGTSRCLRNSVRLRTCTGRRAIKFLGSASSATAPVLRDYYYCIDAFVNMSMEIGDKEVNDINGGNTASKSSGGTFLGEILLSGRKFTWANSMPSPTYKNAASASARAPPSLPRVQPSAAAAPVTAVAPEGHRQVRKVATVLIPSSVSAKDCRSAAAIDDPKTAAASTSLPSSSKPPVSCRVALYA

SEQ ID NO: 19772 - protein, 939 aa, Oryza sativa
  Clone ID: TF_OSC400977j.C1.p5.fg
MSTEIGDKMMNDINGGNTASKSGGGTFSGYTFILPILLDVSLLILFAMAALRYYVNVDAYLILSILKLYTSSTVTRSTHIAIVMFIVLIFWIKICRIVTKFPTIQKLDRSFSVVGFAASLKPHAFDGSNYKRWKARALLWLTVMHCFFVSRGKPSEPPFSPEEEAKFEATDCLFHGALISVLADNIVDVYMHIPSGKDMWDALEAKFGVSDAGSELYVMERFYDYKMVDDRSVVEQAHEIQMLVKELENNNCELPDKFVAGGIIAKLPPSWSDFATPLKHKKQEFSVADLISSLGIEEKARAKDNRGKKIEGGSSANLVQKKNPHASHNNKKKVKPDVKPKATTNFKKKGKGKAKGDCFVCGKPGHWAKDCPERKDKKSANMVISEGEETLGYGKFLPIVLSVCHSPDWWVDTGANIHECADISLFSSYQVGRGSSLLMGNGSLAAVHGVGTVDLKFTSGKIVQLKNVQHVPSIKKNLVSGSLLCRDGFRLVFESNKCVVSKYGMFIGKGYDSGGGKKYFMTLIDDCTRFCYVYLLKTKNEALHYFKIHKAEVENQLVNVPIAKKRKLGPKIVDCVFLGYAIHSMGYRFLIVNSGVPDMRVGTITESRDATFFENEFPMKNAPSTSSQEPILSPEHFVPIEHIDQTLEENPEEDNIVATRKSKRQRTAKSFGDDYIVYLVDDTPRTIEEAYSSPDADYWKEAIRSEMDSMSNGIWEVVERPYGCKPIGCKWVFKKKLRPDASHGLLIHQMDVKTAFLNGELEEEIYMDQPDGYVLKGQEGMVCKLLKSLYGFKQAPKQCHEKFDNTLTFAGFVVNEADKCVYYRYGGGEGVILCLYVDDILIFGTSLNVIEEVKDFLSKSFEMKDLGVANVILNIKLLRGDEGGITLVQSHYVDKVLSRFGYSDCKAAPTPYDPSVLLRKNRRIVRDQLRYSQIIGSLM

SEQ ID NO: 19773 - protein, 495 aa, Oryza sativa
  Clone ID: TF_OSC401614j.C1.p8.gm
MVKQFVSNALVATRRALTEGMVYRTSRYLRNSVRLRTCTGRRAIKFLGSASSATALVLRGYCCCISAVTKMSTEIGDKKMNDINGGNTASKSSNGTFSGVLADNIVDVYMHIPSGKDMWDALEAKFRVSDAGSELYVMEQFYDYKMVDDRSAVEQAHEIQMLVKELENNNCELPDKFVAGGIIAKLPPSWSDFATSLKHKRQEFSVTDLIGSLGIEEKARAKDNRGKKIEGGSSANLVQKKNPHASHNNNKKVKPDVKPKATTNFKKKGKGKAKGDCFVCGKPGHWAKDCPERKDKKSTNMVISEGGGTLGYVVERPYGCKPIGCKWVFKKKLRPDGTIEKYKARLVAKVSHGLLVHQMDVKTAFLNGELEEEIYMDQPDGYVLEGQEGMVCKLLKSLYGLKQAPKQWHEKFDNTLTSAGFVVNEADKCVYYRYGGGEGVILCLYVDDILIFGTSLNVIEEVKDFLSKSFEMMDLGVADVILNIKLLRVTMWTRS

SEQ ID NO: 19774 - protein, 1319 aa, Oryza sativa
  unsure (1)..(1319): unsure at all Xaa locations
  Clone ID: TF_OSC401949j.C1.p16.np
DNTNGGSSASQSSGGTFTGSFSVVDFAATLKPHAFDGSNYKRWKARALLWLTAMQCFYVSRGKRSEPPLSPEEEVKFEASDCLFRGALISVLADNIVDVYMHMPSGKDMWDALEAKFGVFDTGSELYVMEQFYDYKMVDDRSVVEQAHEIQMLAKELENNNCELPDKFVAGGIIAKLPPSWSDFATSLKHKRQEFSVIDLIGSLGVEEKARAKDIWGKKVXGGSSANMVQKKNPHASHNNKKVKHDVKPKATTNFKKKGKGKAKGDCFVCGKPGHWAKDCPEHKDRKSANMVISEGGGTSGYGKILPTVLSVFHSPDWWVDTGANIHVCADIFLFSSYQVGRGSSLLMGNGSLAAVHGVSMVDLKFTSGKTVQLKNVQHVPSIKKNLVSGSLLCREGFKLVFESNKCVVSKYGTFIGKGYDSGGLFRFSLDDMCNNNNVVNHINENDESNVWHSRLCHVNFGCMTRLANMSLNPKFTLVKGSKCHTCVQSKQPRKPHKASEARNAPLELVHSDLCEMNGVLTKGGKKYFMTLIDDCTRFCYVYLLKTKDEALHYFKTYKAEVEKQLKRKIKRLRSDRDGEYFSNEFTSFCEEFGIIHERMPPYSPQSNGVAERKNRTLTEMVNAMLDTTGLSKEWWGETVLTACHVLNKIPMKHKEVTPFEEXERKKLNLSYLRTWGCLAKVNVPIAKKRKLGPNTVDCVFLGYAIHNVGYRFLIVNSGVPDMRVGTIIESRDATFFENEFPMKTPSTSSQETVIPHEHFAPIEHNDQTPEGNLEEDNIVDTRKSKRQRVAKSFGDDYIIXLMDDTPKTIEEAYLSPDADYWKEAIRSEMDSIMSNGTXEVVERPYGCKLVGCKWVFKKKLRLDGTIEKYKARLVAKGYTQKEGDDFFDTYSPVARLTTIRVLLVLAASYGLLVHQMGVKTAFLNGELEEEIYMDQPDGYVLEGQEGMVCKLLKSLYGLKQAPKQWHEKFDTTLTSAGFVVNEADKCVYYRYGEGEGVILCLYVDDILIFGTSLNVIEEVKDFLSKSFEIKDLGEADVILNIKLLRXDEGGITLVQSHYVDKVLSRFGYSDCKPAPTPYDPSVLLRKNRRIARDQLRYSQIIGSLMYLASATRPDISFAVSKLSRFVSNPGDDHWQALERVMRYLKGTMSYGIHYTGYPKVLEGYSDSNWISGADEIKTTSGYVFTLGGGAVSWKSCKQTILTRSTMEAELTTPDTATVEAEWLRELLMDLPVVEKPVPAILMNCDNQTVIIKVNSSKDNMKSSRHIKRRLKSVRKQKNSGVIALDYVQTAKNLADQFTKGLPRNVIDSASREMGLIPT

SEQ ID NO: 19775 - protein, 1045 aa, Oryza sativa
  Clone ID: TF_OSC413551j.C1.p1.fg
MLAKELENNNCELPDKFVAGGIIAKLPPSWTDFATSLKHKRQEFSVTDLIGSLSVEEKARAQDNRGKKIEGGSSANLVQKKNPHASHNNNKKVKPDVKPKATTNFKKKGKGKAKGDCFVCGKPGHWAKDCPERKDKKSANMVISEGGGTLGYGKFLPTVLSVCHSLDWWVDTGANIHVFADISLFSSYQVGRGSSLLMGNGSLVAVHGVGTVDLKFTSGKIVQLKNVQHVPSIKKNLVSGSLLCRDGFRLVFESNKCVVSKYGTFIGKGYDSGGLFRFSLDDMCNKVVNHVSDDDDESNVWHSQLCHVNFGCMTRLANMSLIPKFTLVKGSKCHTCVQTKQPRKPHKSSEARKLAPLEIVHSNLCEMNGVLTKGGKKYFMTLIDDCTRFCYVYLLKTKDEVLHYFKIYKAEVENQLERKIKRLRSDRGGEYFSNEFTSFCKEYGIIHERTHSYSPQSNGVAERKNRTLTEMVNAMLDTAGLSKEWWGEAILTACHVLNRIPTKHKEVTSFEEWERKKLNLSHLRTWGCLAKRCHIFENEFPMKNAPSTSSQEPILSPEHFVLIEHIDQTLEENSEENNIVATRKSKRQRTAKSFGDDYIVYLVDDTPRTIEEAYSSPDVDYWKEAVRSEMDSIMSNGTWEVIECPYGCKPVGCKWVFKKKLRPDASHGLLVHQMDVKTAFLNGELEEEIYMDQPDGYVLEGQEGMVCKLLKSLYGLKQAPKQWYEKFDNTLTSTGFVVNEADKCVYYRNGGGEGVILCLYVNDILIFGTSLNVIEEVKDFLSKSFEKKDLGVADVILNIKLLRGDEGRITLVQSHYVDKVLSRFGYSDCKAAPTPYDPSVLLRKNRRIARDQLRYSQIIGSLMYLASATRPDISFAVSKLSRFVSNPGDDHWHALERVMRYLKGTMSYGIHYAGYPKVLEGYSDSNWISDADEIKATSGYVFTLGGGAVSWKSCKQIILTRSTMETELTALDTATVEAEWLRELLMDLPVVEKPIPAILMNCDNQTVIIKVNSSKDNMKSSRHVKRRLKSVRKQKNSRVIALDYV

SEQ ID NO: 19776 - protein, 1187 aa, Oryza sativa
  Clone ID: TF_OSC421667j.C1.p33.gm
MDTYPFSNVEIDNSGFHVCDLIYSFRPSPRESFPGSVHLRAQVYGTSRCLRNSVRLRTCTGRRAIKFFGSASSATALVLRGYCCCIGAFTKMSTEIGDNKMNDINGGNTASNPAMGRSRGKDMWDALEVKFGVSDAGSELYVMEQFYDYKMVDYRSVVEQAYEIQMLVKELENNNCELPDKFVAGGIIAKLPPSWSDFATSLKHKRQKFSVTDLIGSLGIEEKVRAKDNQGKKIEGGSSANLVQKKNTHASHNNNKKVKPDIKSKATTNFKKKGKGKAKGDCFVCGKPGHWAKDCPERKDKKSANMVISEGGGTLCVGHRFLIVNSGVPDMRVGTITEFRDATFFENEFPVKNAHSTSSQEPILSPEHFMPIEHIDQTLEENPEEDNIVATRKSKRQRTAKSFGDDYIVYLVDDTPRTIEEAYSSPDVTIGKERSGCKWVFKKKLRPDGTIEKYKMDVKTAFLNGELEEEIYMDQPDGYVLEGQEGMVCKLLKSLYGLKQAPKQWHEKFDNTLTSVGFVVKEADKCVYYRYGGGEGVILCLYVDDILIFGNSLNVIEEVKDFLSKSFKMKDLGVADVILNIKLLRGDEGEITLVQSHYVDKVLSRFGYSDCKAAPTPYDPSVLLRKNRRIARDQLRYSQIIGSLMYLASATRPDISFAVSKLSQFVSNPGDDHWHALERVIHYLKGTMSYGIHYAGYPKVLEGYSDSNWISDADKIKATRGYVFTLGGGAVSWKSCKQTILTRSTMEAELTALDTATVEAERLRELLMDLLVVEKPVPAILMNCDNQTVIIKVNSSKDNMKSSRHVKRRLKSVSKQKNSGVIALDYVQTAKNLADQFTKGLPRNAGDQVFGSASSATALVLRGYCCCIGAFTKMSTEIGDKKMNDINGGNTASKSSDGTFSGSSSSNANTLAYMAEGTYKTNLLNLAKDLIANVTKTGSHSAAGATAGTTGPDIVYGAVLCRGDSTNCSSRLQRVLDTASISNNGSTSSESDSQSQSHKSTVTLYDHEFQALLSFSDTDFISSFSNAPACIVSNYLNPAVPQRDADRTRFSELFSELMERISDAMVSSRASYLTGKGKGWFDGQESQPVVYGLAQCMDGMPPERCRSCLGGITDQGKEMVSNGLTEGMVLGVRCSLWYHYQTDGEFFAGEPGVLAFLNMPSSRDESKFGLWATIGSFFLMKQDLNYD

SEQ ID NO: 19777 - protein, 1020 aa, Oryza sativa
  Clone ID: TF_OSC900407j.C1.p4.gm
MDTYPFSNVEIDNSGFHVCDLIYSFRPSPRESFPGSVHLRAQVYGTSRCLRNSVRLRTCTGRRAIKFFGSASSATALVLRGYCCCIGAFTKMSTEIGDNKMNDINGGNTASNPAMGRSRGKDMWDALEVKFGVSDAGSELYVMEQFYDYKMVDYRSVVEQAYEIQMLVKELENNNCELPDKFVAGGIIAKLPPSWSDFATSLKHKRQKFSVTDLIGSLGIEEKVRAKDNQGKKIEGGSSANLVQKKNTHASHNNNKKVKPDIKSKATTNFKKKGKGKAKGDCFVCGKPGHWAKDCPERKDKKSANMVISEGGGTLWPDGTIEKYKMDVKTAFLNGELEEEIYMDQPDGYVLEGQEGMVCKLLKSLYGLKQAPKQWHEKFDNTLTSVGFVVKEADKCVYYRYGGGEGVILCLYVDDILIFGNSLNVIEEVKDFLSKSFKMKDLGVADVILNIKLLRGDEGEITLVQSHYVDKVLSRFGYSDCKAAPTPYDPSVLLRKNRRIARDQLRYSQIIGSLMYLASATRPDISFAVSKLSQFVSNPGDDHWHALERVIHYLKGTMSYGIHYAGYPKVLEGYSDSNWISDADKIKATRGYVFTLGGGAVSWKSCKQTILTRSTMEAELTALDTATVEAERLRELLMDLLAGDQVFGSASSATALVLRGYCCCIGAFTKMSTEIGDKKMNDINGGNTASKSSGGTFSSSSSSNANTLAYMAEGTYKTNLLNLAKDLIANVTKTGSHSAAGATAGTTGPDIVYGAVLCRGDSTNCSSRLQRVLDTASISNNGSTSSESDSQSQSHKSTVTLYDHEFQALLSFSDTDFISSFSNAPACIVSNYLNPAVPQRDADRTRFSELFSELMERISDAMVSSRASYLTGKGKGWFDGQESQPVVYGLAQCMDGMPPERCRSCLGGITDQGKEMVSNGLTEGMVLGVRCSLWYHYQTDGEFFAGEPGVLAFLNMPSSRDAAASPTAALDATVAYRPLGGRFLKIALSEGGENDVADGRSLSGDGRQRNLQGGPLAALR

SEQ ID NO: 19778 - protein, 638 aa, Oryza sativa
  unsure (1)..(638): unsure at all Xaa locations
  Clone ID: TF_OSC412814j.C1.p3.np
PFSKKRFGEEVLGSGLFFPGLFPLSPQSLXQMFNREKGKNVSGYASSNSSFQLNPPLASRELTRAHPWSIPSMLLSPQLPLVGSQDQNQYVFDRAFATQVDELPIPEEDVPFCHDCREQGHYALNCPWVYAKEAPSLGLTVQTSLNQPLRTKSSLQPSVQSREPNEENPLNPGNCFPPSPSYHVGSRTKQAKGKKSKNQRRKAPMRTEEEVRKMTITSTEWPPPGMTKRQRRNTFRGAPQLTEHLLANGGRVSDSEDSDQVSSDDEDQKSPQGFNQNKMERKACSRCGEIGHVASSCATTCVHCEEDHPPDRCPMSRITCFFCQGTDHVPKDCQFSFLLTKRMASQPASSNGEQHQGNTNPRQDYSFSLTSVPGQRNQNEERKCRVREDICCFNCQGMGHFADKWPKPRNIAAGTSVHATPCNQKLAPQRIVIHASRSSPIAPVATAPTPASTLPQGVNAQFQPQPPVDKTAALYLWMFQHSSQKKNQVQDEEPEQDHPPGECPTRKITCFLCEGTNHVPKDCQLSVLLTKTAEIQRTTLRLSHQLVSSNSNIDDIIHSTNAPPAAPDSAINHSNNTFSTNHSLRRQPQQRIVVDGRSCFSPRPTPGRAKGNQPPEGDTKQKTVLRFKQQSDGSFSCE

SEQ ID NO: 19779 - protein, 453 aa, Oryza sativa
  Clone ID: TF_OSC23512j.C1.p3.fg
MADNEKGNKVRSQDIGTSSSRVNEAQDTSCAAVVQHLINQNKLLIEILQQHRMPILNPSQMQPQVQLEAVQALTPQVSAPPTSQKAPHAMPHVDPKEASIICFMCDEQGHYARNCPQQKRKAPMRTEGEVRKMIITSTEWPPPGMTRRQRRNTFRGAPQLTEHLLANGGRVSDSEDSDQVSSEDEDEKSPQGFNQDKMERKACSRCGEIGHVASSCASTCVHCEEDHPPDRCPTSRITCFFCEGTDHVPKDCQFSFLLTKKMANQPAGFNGEKHQGNTNPRQDYSFSLTPVPGQRNQNEKRKCRVREDICCFNCQGMGHFADKCPKPRNIAAGTSVHATPCNQKLAPQRMVIHASRSSPIARVATAPIPMSALPQGVNAQFQPQPPADKTDASICVVPLEAPIQQLRNQVQDEEPELEKGITPKTVPDLHIFANLHEADIPIVLWSLEQTPYP

SEQ ID NO: 19780 - protein, 736 aa, Oryza sativa
  unsure (1)..(736): unsure at all Xaa locations
  Clone ID: TF_OSC400750j.C1.p67.np
SITKPHHALAPPPPRIAPHPAVPARIKERGITPRDSLSRFPRFPLSLSLGSVRIHPVILAGDIYGARDPRAFPSSPAAFSPSRCYIIAPRAPLFRFRRSPLALAVGSVLAPCSSLSAVAADLRLAADVAPVLLPARRHLPRHRRIAVDLVRASVSLADRRSAAVIVIPSRAAVSLRSVRRSRRRRCPGVSRGPPLRFPLPSSLSGAAPPRRWSPAATIGARVRRSRRPCRRGRLRARPRGCQVGPAVSRPRPRVRLTRGTHGADRRQPRAPGPPWTERLTRGPLPWTRANEGYTSCGPMADNEKGNKVRSQDIGTSSSRVNEAPDTSCVAVVQHLINQNQLLIEILQQHRMPILNPSQMQPQVQLEAVQALTPQVSAPPTSQKAPHAMPHVDPKEASIICFMCDEQGHYARNCPQQKRKAPMRTEDEVRKMIITSTEWPPPGMTEHQRRNSFRGAQQLTEHLLANGGRVSDSEDSDQVSSDDEDKIELKACSRCGEIGHKIELKACSRCGEIGHVASSCASTCVHCEEDHPPDRCPTSRITCFFCEGTDHVPKDCQFSFLLTKKMANQPASSNGEKHQGNTNPRQDSSFSLTPVPGXRKQNEKRKCRVREDICCFNCQGMGHFADKCPKPRNVAASTSVHANPRNQKLAPQRIVIHASRSSPITRVATAPIPMSALPQGVNAQFQPQQRIVVDGRSCVSPRPTPGRAKGNQPPEGDTKQKTVIRFNQQSEGSFSCE

SEQ ID NO: 19781 - protein, 575 aa, Oryza sativa
  unsure (1)..(575): unsure at all Xaa locations
  Clone ID: TF_OSC400773j.C1.p15.np
MADNEKGNKVRSQDIGTSSSRVNEAPDTSCVAVVQHLINQNQLLIEILQQHRMPILNPSQMQPQVQLEAVQALTPQVSAPPTSQKAPHAMPHVDPKEASIICFMCDEQGHYARNCPQQKRKAPMRTEDEVRKMIITSTEWPPPGMTEHQRRNSFRGAQQLTEHLLANGGRVSDSEDSDQVSSDDEGAKPPQGFNQNKIELKACSRCGEIGHVASSCASTCVHCEEDHPPDRCPTSRITCFFCEGTDHVPKDCQFSFLLTKKMANQPASSNGEKHQGNTNPRQDSSFSLTPVPGXRKQNEKRKCRVREDICCFNCQGMGHFADKCPKPRNVAASTSVHANPRNQKLAPQRIVIHASRSSPITRVATAPIPMSALPQGVNAQFQPQPPADKTEASICVVPLEVPIQQLRNQVQDEEPEKKGITPKTVPNQGKIDKKGITPKTVPNQGKIDLHITANLHEADIPIVLWSLEQTPYQGVKSSTRYQMLHGVKSASTSYQVDSKEMNYAKLWNXSPIFMPQPSRSQKGSTRDKSGEEKIPSATGDRAKQSRVEKLCYKFVIKTERKKSDKKRRPPNLSSC

SEQ ID NO: 19782 - protein, 543 aa, Oryza sativa
  Clone ID: TF_OSC421503j.C1.p4.fg
MADNEKGNKVRSQDIGTSSSRVNEAPDTSCVAVVQHLINQNKLLIEILQQHRMPILNPSQMQPQVQLEAVQALTPQVSAPPTSQKAPHAMPHVDPKEASIICFMCDEQGHYARNCPQQKRKAPMRTEDEVRKMIITSTEWPPPGMTKHQRRNSFRGAQQLTEHLLANGGRVSGSEDSDQVSSDDEDEKSPQGFNQNKIELKACSRCGEIGHVASSCASTCVHCEEDHPPDRCPTSRITCFFCEGTDHVPKDCQFSFLLTKKMANQPASSNGEKHQGNTNPRQDHRFSLTPVPGQRNRNEKRKCRVREDICCFNCQGMGHFADKCPKPRNIAAGTSVHATPCNQKLAPQRIVIHASRSSPITRVATAPIPMSALPQGVNAQFQPQPPADKTEASICVVPLEVPIQQLRNQVQDEEPELKKGITPKTVPNQGKIDLHITANLHEADIPIVLWSLEQTPYPGNLSEVDSEDMNHEKFWDGSITALPQPSLSQPKGAPWSKSGEEKIPSATGGQAKQFRVVKFCWKFVKTQRKKSDKKRRPPNLSSC

SEQ ID NO: 19783 - protein, 427 aa, Oryza sativa
  Clone ID: TF_OSC900156j.C1.p3.fg
MADNEKGNKVRSQDIGTSSSRVNEAPDTSCVTLVQHLVNQNRLLIEILQQHQTPILNLSQIQPQVQLEAVQALTPQVSAPPTSQKAPHAMPHVDPKEASIICFMCDEQGHYARNCPQQKRKAPMRTEDEVRKMIITSTEWPPPGMTRRQRRNTFRGATQLTEHLLANGGRVSGSEDSDQVSSDDEDEKSPQGFNQNKIELKACSRCGEIGHVASSCASTCVHCEEDHPPDRCPTSRITCFFCEGTDHVPKDCQFSFLLTKKMANQPASSNGEKHQGNTNPRQDYSFSLTPVPGQRNRNEKRKCRVREDICCFNCQGMGHFADKCPKPRNIAASTSVHATPCNQKLAPQRIVIHASRSSPIARVATAPTPASALPQGVNAQFQPQPSVDKTEASIGIVPLDVPAQQPRNQVQDEEPKRKKVIYNGSTC

SEQ ID NO: 19784 - protein, 742 aa, Oryza sativa
  Clone ID: TF_OSC29453j.C1.p1.fg
MADNEKGNKVRSQDIGTSSSRVNEAPDTSCVAVVQHLINQNKLLIEILQQHRMPILNPSRMQPQVQLEAVQALTPQVSAPPTSQKAPHAMPHVDPKEASIICFMCDEQGHYARNCPQQKRKAPMRTEDEVRKMIITSTEWPPPGMTRRQRRNTFRGAPQLTEHLLANGGRVSDSEDSDQVSSDDEDEMERKACSRCGEIGHVASSCATICVHCEEDHPPDRCPTSRITCFFCEGTDHVPKDCQFSFLLTKKMANQPASSNGEKHQGNTNPRQDYSSSLTPVPGQRNRNEKRKCRVREDICCFNCQGMGHFADKCPKPRNIAAGTTVHATPCNQKLAPQRIVIHASRSSPIARVATAPIPMNALPQGVNAQFQPQPPADKTEASICVVPLEVPIQQLRNQVQDEEPECKKVIVCYNCSEEGHYSENCPQPRQNRPPHYRQFTRSRHSNRIVVTGANAVPVRIYLQTVKKIQEDINILEHNSRWLVISRSGIRKRSKVIWQKNNMDAPHLEEALNPSGIDTDSKQCISLKAASQRTSSSPEASAIHIKEYHLLEISRKMIDKKRLAKMFSSMKEVGRKVIDKQKHALHRSRKTPDCNCPATVTLSLSQQDDLGKSVSMKAKSEIFHSVSDATRSEKCKHRLPGDATSWEMIQRERTHQVDNLSEVDSEDMNHEKFWNGSITELPQPSLSQPKGAPWSKSGEEKIPSATGGQAKQFRVVKFCWKFVKTQRKKSDKKRRPPNLSSC

SEQ ID NO: 19785 - protein, 1719 aa, Oryza sativa
  unsure (1)..(1719): unsure at all Xaa locations
  Clone ID: TF_OSC1646j.C1.p1.np
PFTLIFXTLCKLIQKVVLLIGXMSXLPPFTCLXMPRYKPEYLFGVEGFVQELRTMSFVIGFGTAPFYAQIPHDRHEEKCRVKVTLNSNSEDIPSVMFEAGGRNYIHVCQEVARITIGELRDRYSDQLADTEYRYHPRQPQGSDRGSYLETEGIENDATTRHLVEMLWAMDETRAETVLAAQDREDRNRGKICKLEDKVDRLEKELAALKGEAPPQKARIRLTARKRALFVPRYQLAPKFSPVSLLVPCPCQMVLTRSNGNGPNNNNNNNNGENPTLAQVLAQQTQLMNMMMQQLQNQQNQLNQGNNNAPPPQNKLAEFLRVRPPTFSSTTNPVEAGDWLHAIEKKLDLLQCTDQENVSFASHQLHGPASEWXDHFRLNRTTAEPITWLEFTAAFRKTHIPSGVVSLKKKEFRSLTQGSRSVTEYLHEFNRLARYAPEDVRNDEERQEKFLEGLNDELSYPLMTRDYPDFQKLVDKAIRQEDKYNRMEQKKRRIAQFKTQQGNNQRPRLTLGPQSMPQGGSSSVVHPQRQFFNNNAGNNIRNQAPQPAKKEQGSKLVVCFNCGEPGHYADKCPKPRRVKVVPVQSNSTVPASKARVNHVAAAEAQDAPDVILGTFLVNSVPATVLFDSGATHSFLSMSFAGNHGMEVEDLRRPMMVSTPSNQALSLQRSPSVRIEIKGVPFLANLILLESKDLDVILGMDWLARHKGVIDCANRKVTLTSNGGRVVTVHALSSESLRSRLNQITLEEIPIVREYPDVFPDDLPGMPPKRDIEFRIDLVPGTTPIHKRPYRMAANELAEVKRQVDDLLQKGYIRPSSSPWGAPVIFVEKKDHTQRMCVDYRALNDVTIKNKYPLPRIDDLFDQLKGATVFSKIDLRSGYHQLRIKEEDIPKTAFTTRYGLFECTVMSFGLTNASAFFMNLMNKVFMEYLDKFVVVFIDDILIYSRTKEEHEEHLRLALEKLREHQFYAKFSKCEFWLSEVKFLGHIISAGGVAVDPSNVESVTNWKQPKTVSEIRSFLGFTGYYRRFIDNFFKIAKPMTRLLQKDVKYKWSEECEQSFQELKNRLISAPILILPDPKKGFQVYCDASKLGLGCVLMQDGKVVAYASRQIRPHEKNYPTHDLELAAVVHALKIWRHYLFGTRIEVYTDHKSLKYIFTQPDLNMRQRRWLELIKDYDMGIHYHPGKANVVADALSRKGYCNATEGRQLPLELCKEFERLNLGIVSRGFVAVLEAKPTLIDQVREAQINDPDIQEIKKNMRRGKAIGFLEDEQGTVWLGERICVPDNKDLKDAILKEAHDTLYSIHPGSTKMYQDLKERFWWANMKREIAEYVAVCDVCQRVKAEHQKPADLLXPLKIPEWKWEEIGMDFITGLPRTSSGHDSIWVIVDRLTKVAHFIPVKTTYSGSRLAELYMARIVCLHGVPKKIVSDRGSQFTSNFWKKLQEEMGSKLNFSTAYHPQTDGQTERVNQILEDMLRACALDFGGSWDKNLPYAEFSYNNSYQASLQMAPYEALYGRKCRTPLLWDQTGEHQVFGTDILREAEEKVKIIQERLRVAQSRHKSYADNRRRDLSFEEGDYVYLRVTPIRGVHRFHTKGKLAPRFVGPYKIVSRRGEVAYQLELPQSLAGVHNVFHVSQLKKCLRVPTEEANLEQIEVQEDLTYVERPTRILEIDERKTRNXVIRFCKVQWSNHSEEESTWEREDELKSAHPHLFASSSESRGRDSV

SEQ ID NO: 19786 - protein, 319 aa, Oryza sativa
  Clone ID: TF_OSC1664j.C1.p3.gm
MATVCPCARLPTGMSSVYLVVSECVALAPASETTRCCDVCTDGRAIRFLESVRRDYSLFVNIYFTFTNMSNTGDNGNTGYKEKEAPVNINGGNTASNSNGGPFLGVLADNIVDVYMHMPSGKNMWDALEAKFGVSDAGSELYVMEQFYDYKMVDDRSVVEQAHEIQMLAKELENNNCELPDKFVAGGIIAKFPPSWSDFATSLKHKRQEFSVTDLIGSLGVEEKARAKDNRGKNIEGGSSANLVQNKNPHASHNNNKKKVKPDVKPKATTNFKKKGKGKAKGDCFVCGKPGHWAKNCPDRKDKKSANMVISEGGGTSGY

SEQ ID NO: 19787 - protein, 281 aa, Oryza sativa
  Clone ID: TF_OSC19218j.C1.p1.fg
MQCFYVSQGKRSEPPLSPKEEAKFEASDCLFRGALISVLTDNIVDVYMHMPSGKDMWDALEAKFGVSDAVSELYVMEQFYDYKMMLAKEFENNNCELPDKFVAGGIIAKLPPSWSDFATSLKHKRQEFSVTDLIGSLGVEEKARVKDNRGKNIEGGSSANLVQKKNPHASHNNNNKKVKPDVKPKATTNFKKKGKGKAKGDCFVCGKPGHWAKNCPDRKDKKSANMVISEGGGTSGYGRERFLLVDGKRVACGCSWCWYGRSEVYFGKERAACPFNKEESS

SEQ ID NO: 19788 - protein, 583 aa, Oryza sativa
  Clone ID: TF_OSC31861j.C1.p1.fg
ESQADVNPKATTNFKKKGKGKAKGDCFVCGKPGHWAKNCPDRKDKKSANMVISEGGGTSGYGYFLPTVLSVFHSPDWWVDTGANIHVGRGSSLLMGNRSLAAIHVFDIAVYLLKTKDEALHYFKIYKAEVENQLERKIKRLRSDKGGEYFSNEFTSFCEEFGIIHERTPPYSPQSNGVAERMNRTLTKMVNAMLDTAGLSNEWWGEAIFTACHVLNKIPVKHKEVTPFEEWERKKLNLSYLRTWGCLAKVNVPIAKKRKLGPKTIDCVFLGYAIHSVGYRFLIVNSGVPDMRVGTITESRDAIFFENEFPMKNTPSTSSLEPVLPHEHFAPIKHNEQTLEGNPEEDSIVDTRKSKRQRVAKSFGDDYIVYLVDDTPRTIEEAYSSPDADYWKEAVRIVERPYGCKPVGCKWVFKKKLRPDGTIEKYKARLVAKGYTQKEGEDFFDTYSPVARLTTIRVLLALAASHGLLVHQMDVKTVFLNGELEEEIYMDQPDRYVLKGQEGMVCKLLKSLYGLKQAPKQWHEKFDPTLTSAGFVVNEADKCAYYRYGRGEGVILCLYVDDILIFGTSFNVIEEVKDFLGIL

SEQ ID NO: 19789 - protein, 1596 aa, Oryza sativa
  Clone ID: TF_OSC401054j.C1.p17.fg
MAAKSSHVAASPARLPLPRMPRYKPEYLFGVEGFVQELRTMSFVIGFGTAPFYAQIPHDRHEEKCRVKVTLNSNSEDIPSVMFEAGGRNYIHACQEVARIAIGELRDRYSDQLADTEYRYHPRQPQGSDRGSYLETEGIENDATTRHLVDMLWAMDETRAETVLAAQDREDRNRGKICKLEDKVDRLEKELAALKGEAPPQKARVRLTARKRALFVPRYQLAPKVRVVEKEVTPALADPPVVNMVLTRSNGNGPNNNNNNNNNNGENPTLAQVLAQQAQLMNMMMQQLQNQQNQGNNHAPPQNKLAEFLRVRPPTFSSTTNPVEAGDWLHAIEKKLDLLQCTDQEKVSFASHQLHGPASEWWDHFRLNRTTAEPITWLELTAAFRKTHIPSGVVSLKKKEFRSLTQGSRSVTEYLHEFNRLARYAPEDKLVDKAIRQEDKYNRMEQKKRRIAQFKTQQGNNQRPRLTLGPQSMPQGGSSSVVRPQRQIFNNNAGNNISNQAPRPVAVSTQQQPAKREQGSKPVVCFNCGEPGHYADKCPKPRRVKVVPTQSNSTVPVSKASVNHVAAAEAQGAPDVILGTFLVNLVPATVPFDSGATHSFLSMSFAGNHGMEVEDLRRPLMVSTPSNQALSLQRSPSVRIEIQGVPFLANLILLESKDLDVILGMDWLARHKGVIDCANRKVTLTSDDGRVVTVHALSSESLRSSLNQIILKEIPIVRGYPDVFPDDLPGMPPKRDIEFRIDLVPGTTPIHKRPYRMAANELAEVKRQVDDLLQKGYIRPSSSPWGAPVIFVEKKDHTQRMFVDYRALNDVTIKNKYPLPRIDDLFDQLKGATVFSKIDLRSGYHQLRIKEEDIPKTAFTTRYGLFECTVMSFGLTNAPAFFMNLMNKVFMEYLDKFVVVFIDDILIYSRTKEEHEEHLRLALEKLREHQLYAKFSKCEFWLSEVKFLGHVISAGGVAVDPSNVESVTNWKQPKTVSEIRSFLGLAGYYRRFIENFSKIAKPMTRLLQKDVKYKWSEECEQSFQELKNRLISAPILILPDPKKGFQVYCDASKLGLGCVLMQDGKVVAYASRQLRPHEKNYPTHDLELAAVVHALKIWRHYLFALEAKPTLIDQVREAQINDPDIQKIKKNMRRGKAIGFLEDEQGTVWLGERICVLDNKDLKDAILKEAHDTLYSIHPGSTKMYQDLKERFWWASMKREIAEYVAVCDVCQRVKAEHQKPAGLLQPLKIPEWKWEEIGMDFITGLPRTSSGHDSIWVIVDRLTKVAHFIPVKTTYSGSRLAELYMARIVCLHGVRKKIVSDRGSQFTSNFWKKLQEEMGSKLNFSTAYHPQTDGQTERVNQILEDMLRACTLDFGGSWDKNLPYAEFLYNNSYQASLQMAPYEALYGRKCRTPLLWDQTGERQVFGTDILREAEEKVKIIQERLRVAQSRHKSYADNRRRDLSFEEGDYVYLRVTPLRGVHRFHTKGKLAPRFVGPYKIVSRRGEVAYQLELPQSLAGVHNVFHVSQLKKCLRVPTEEANLEQIEVQEDLTYVEKPIRILETNERRTRNRVIRFCKVNWSNHSEEESTWEREDELKSAHPHLFASSSESRGRDSV

SEQ ID NO: 19790 - protein, 1686 aa, Oryza sativa
  Clone ID: TF_OSC401161j.C1.p43.fg
MHARAAEPPPPVVTSSPTSSSPSPIPSFPESPFSQEKSLKSSKASKATPGLEWYIPGLEIGLCSRDGCSEWLGLYNRMPRYKPEYLFGVEGFVQELRTMSFAIGFGTAPFYAQIPHDRHEEKCRVKVTLNSNSEDIPSVMFEAGGRNYIHTCQEVARIAIGELRDRYSDQLADTEYRYHPRQPQGSDRGSYLETEGIENDATTRHLVEMLWAMDETRAETVLAAQDREDRNRGKICKLEDKVDRLEKELAVLKGEAPPQKARVRLTARKRALFVPRYQLVPKVRVVEKEVTPALADPPVVNMVLTRSNGNGPNSNNNNNNEGNPTLAQVLAQQTQLMNMMMQQLQNQQNQGNNHAPPQNKLAEFLRVRPPIFSSTANPVEAGDWLHAIEKKLDLLQCTDQEKVSFASHQLHGPASEWWDHFRLNRITAEPITWLEFTAAFRKTHIPSGVVSLKKKEFRSLTQGSRSVTEYLHEFNRLARYAPEDKLVDKAIRQEDKYNRMEQKKRRIAHFMTQQGNNQRPRLTLGPQSMPQGGSSSVVRPQRQFFNNNAGNNIRNQAPRPVAALTQQQPAKKEQGSKPVVCFNCGEPGHYADKCPKPRRAKVVPAQSNSTAPASKARVNHVAAAETQGAPDVILAPSIRIEIQGVPFLANLILLESKDLDVILGMDWLARHKGVIDCANRKITLTSNDGRVVTVHALSPEFLRSRLNQITLEEIPIVREYPDVFPDDLPGMPPKRDIEFRIDLVPGTTPIHKRPYRMAANELAEVKRQVDDLLQKGYIRPSSSPWGAPVIFVEKKDHTQRMCVDYRALNDMTIKNKYPLPRIDDLFDQLKGATVFSKIDLRSGYHQLRIKEEDIPKTAFTTRYGLFECTVMSFGLTNAPTFFMNLMNKVFMEYLDKFVVVFIDDILIYSRTKEEHIEHLRLALEKLREHQLYAKFSKCEFWLSEVKFLGHVISAGGVAVDPSNVESVTNWKQPKTVSEIRSFLGLAGYYRRFIENFSKIAKPMTRLLQKDVKYKWSEECEQSFQELKNRLISAPILILPDPKKGFQVYCDASKLGLGCVLMQDGKVVAYASRQLRPHEKNYPTHDLELAAVVHALKIWRHYLFGTRTEVYTDHKSLKYIFTQPDLNMRQRRWLELIKDYDMGIHYHPGKANVVADALSRKGYCNATEGRQLPLELCKEFERLNLGIVSTGFVAALEAKPTLIDQVREAQINNPDIQEIKKNMRRGKAIGFLEDEQGTVWLGERICVPDNKDLKDAILKEAHDTLYSIHPGSTKMYQDLKERFWWASMKREIAEYVAVCDVCQRVKAEHQKPAGLLQPLKIPEWKWEEIGMDFITGLPRTSSGHDSIWVIVDRLTKVAHFIPVKTTYSGSRLAELYMARIVCLHGVPKKIVSDRGSQFTSKFWKKLQEEMGSKLNFSTAYHPQTDGQTERVNQILEDMLRACALDFGGSWDKNLPYAEFSYNNSYQASLQMAPYEALYGRKCRTPLLWDQTGERQVFGTDILREAEEKVKIIQERLRVAQSRHKSYADNRRRDLSFDAGDYVYLRVTPLRGVHRFHTKGKLAPRFVGPYKIISRRGEVAYQLELPQSLAGVHNVFHVSQLKKCLRVPTEEANLEHIEVQEDLTYVERPIHILEIDERRTRNRVIRFCKVQWSNHSEEESTWEREDELKSAHPHLIASASESRGRDSV

SEQ ID NO: 19791 - protein, 225 aa, Oryza sativa
  Clone ID: TF_OSC413091j.C1.p1.fg
MEQLYDYKMVDDRSVVEQAHEIQMLAKELENNNCELPDKFVAGGIIAKLPPFWSDFATSLKHKRQEFSVTNLIGSLGVEEKARAKDNRGKNIEGGSSTNLVQKKNPHASHNNNNKKVKPDVKPKATTNFKKKGKGKAKGDCFVCGKPGHWAKNCPDRKDKKSANMVISESGGTSGYGRERFLLVDGKRVACGCSWCWYGRSEVYFGKDRAAEERAACPFNKEESS

SEQ ID NO: 19792 - protein, 2142 aa, Oryza sativa
  Clone ID: TF_OSC414575j.C1.p1.np
KEICWQQQFHSASSCSISCGSSYGTSATSADVCAPRPQTQLVRQVPRAVQAAGDASRNANVTCYNCGKGHYSPSCPYPKTPAPTFGRGRLNHVTAEEATDAPGVVLGTFLVHSIPLTVLFDSGATHSFMSTLKAKQLDLKTEFLSDAMRIQSPGSTMVTKLLCKGVELIIDGVKFKANLILLDTLGLNVILGMDWLTKHEGTIDCAHRTVTLRSTDGQFVGLPLNKPPLQINPLQSLSIPELKSVPIVNEYSDVFPDELPGMPPDRDIEFVIDLIPGTAPIAKRPYRMTSENLMELKKQLNEQLAKGFIRPSSSPWGCPVLFVPKKDGTMRMCVDYRPLNEVTIKNKYPLPRIDDLFDQLTGTRVFSKIDLRLGYFQLKIRPEDIPKTAFTTRYGLFEYTVVSFGLTIAPASFMNMMNKIFMEYLDKFVVVFIDDILIYSKSEEEHAQHLRMVLDKLREHQLYAKFSKCEFWLKEVEFLGHVLSEGGIAVNPRNVQNVLNWKQPQNVPEIRSFLGLAGYYRRFIENFSKIARPLTQLLKKENKFIWSEACETSFHELKRRLTTAPVLVMPDVLKPFNVYCDASHHGLGCVLMQEGKVVAYASRQLRPHEINYPTHDLELAAVVHALKIWRHYLVSNRCEIFTDHKSLKYFFTQPDLNLRQRRWLELIKDYDLGIHYHPGKANVVADALSRKLHHLAVIETINQPSLSSEFQKLNLGLVEDGYVAALALQPTLYSQIKAAQSIDEEVAEIMKEINSKPQSIYTLNSDGMVMLGKRIFVPNNQHLRETILDEAHQTPLSIHPGCTKMYQDIRTQYWWPSLRRDIAAYVAICDVCQRVKAEHQRPAGLLQPLQVPEWKFDEVGMDFITGLPKTPNHVTYGGAHVTYGGAKLAELYLTHIVRLHGVPKVIVSDRGTQFTSRFWKNLHELLGTKLFLSTAFHPQTGGQVERTNQILEDMLRACVLEHNTNWEKCLSFAEFSYNNSFQSSIQMSPFEALYGRNCRTPLYWSEVGERQFFGPAIINEAEKNVTLIRDRLKEAQTRQKSYSDRRRRELSFDVGDHVYLKVSPMRGTQRFQIHGKLAPRYIGPYQIISKRGQVAYQLELPFQLSNIHDVFHVSQLKKCLRTPIEHTSLEDINLKPNLSYQEYPILNSHATRVSTRRARERASSSCPSPPATILNPTGRFEEEALPHILWLMLQHLGYDHPPEYHFFSHERSSSLEHIWLSCVYRDFDEPPLYFQACGWDAPSAMQEAALQAIYYRHYRPGLDGFFHFFPARANQSSANYYPGLEGNMREIDTPGLFLAGLVRAMDRYLAKTMVVMLDRRIEPLGHQGHFDNAIIYGNHEAKTMVVMLDRRIEPLGHQGHFDNAIIYGNHELQPLTETLPPPMGIYHNTAHVLLYFECRMTHTHSMAALTDDANGEGASQPRTGPYSSGRAGGSRRAATAEQHDDEPSLAQLLANQNRLFERMVANSENMGAAMAQQANPPSKLADVQRTHPPHFSSAADPLAADDWLRDIEIKLNLCRCDPVEKATFAAYYLQGAAAAWWETYKTLIPPDEPITWTVFREGFRSAHIPAGLMEIKKKEFLNLKQGNMPFMEFMERFNYLGRYAASDLNTETKKVELCRDRLAPELKHALAAHEITSMKTLVDKALRVESSEKEVVEDRKRKWAAIPRAVQAAGDASRNANVTCYNCGKKGHYSPSCPYPKTKIRTVLTGSTAAASWGGRLNHVTAEEATDAPGVVLGTFLVHSIPLTVLFDSGATHSFMSTLKAKQLDLKTEFLSDAMRIQSPGSTMVTKLLCKGVELIIDGVKFKANLILLDTLGLNVILGMDWLTKHEGTIDCAHRTVTLRSTDGQFVRLTSTSNQPSIQSLSIPELKSVPIVNEYSDVFPDELPGMPPDRDIEFVIDLIPGTAPIAKRPYRMTSENLMELKKQLNEQLAKGFIRPSSSPWGCPVLFVPKKDGTMRMCVDYRPLNEVTIKNKYPLPRIDDLFDQLNKFVVVFIDDILIYSKSEEEHAQHLRMVLDKLREHQLYAKFSKCEFWLKEVEFLGHVLSEGGIAVNPRNVQNVLNWKQPQNVPEIRSFLGLAGYYRRFIENFSKIARPLTQLLKKENKFIWSEACEIHELKRRLNSPSASDADVLKPFNVYCDA

SEQ ID NO: 19793 - protein, 1770 aa, Oryza sativa
  unsure (1)..(1770): unsure at all Xaa locations
  Clone ID: TF_OSC422890j.C1.p3.np
KLSIGDRRQIAVKWAMLKRLDRMDEDDDVGDPVNSGVATEIPTFPESPFSQEKNLKSSKASKATPGLEWYIPGLEIELCSRDGCSEWLVLYNRMPRYKLEYLFGVEGFVQDLRTMSFAIGFGTAPFYAQIPHDRHEEKCRVKVTLNSNSEDIPSVMFEAGGRNYIHACQEVARIAIGEFRDRYSDQLADTEYRYHPRQPQGSDRGSYLETEGIENDATTRHLVEMLWAMDETRAETVLAAQDREDRNRGKICKLEDKVDRLEKELAALKGEAPPQKARIRLTARKRALFVPRYQLVPKMVLTRSNGNGPNNNNNNNGENPPLAQVLAQQAQLMNMMMQQLQNQQNQGNNHAPPQNKLAEFLRVRPPTFSSTTNPVEAGDWLHAIEKKLDLLQCTDQEKVSFASHQLHGPASEWWDHFRLNRTTAEPITWLEFTAAFRKTHIPSGVVSLKKREFRSLTQGSRSVTEYLHXFNRLARYAPEDVRTDEERQEKFLEGLNDELSYPLMTGDYPDFQKLVDKAIRQEDKYNRMEQKKRRIAQFKTQQGNNQRPRLTLGPQSMPQGGSSSVVHPQRQFFNNNAGNNIRNQAPRPVAVLTQQQPAKKEQGSKPVVCFNCGEPGHYADKCPKPRRMKVVPAQSNSTVPASKARVNHVAAAEAQDAPDVILGTFLVNLVPATVLFDSGATHSFLSMSFAGNHGMEVEDLRRPLMVSTPSNQALSMQRSPSVRIEIQGVPFLANLILLESKDLDVILGMDWLARHKGVIDCANRKVTLTSNDGRVVTVHALSSESLRSRLNQITLEEIPVVREYPDVFLDDLPGIPPKRDIEFRIDLVPGTTPIHKRPYRMAANELAEVKRQVDDLLQKGYIRPSSSPWGAPVIFVEKKDHTQRMCVDYRALNDVTIKNKYLLPRIDDLFDQLKGATVFSKIDLRSGYHQLRIKEEDIPKTAFTTRYGLFECTVMSFGLTNAPAFFMNLMNKVFMEYLDKFVVVFIDDILIYSRTKEEHEEHLRLALEKLREHQLYAKFSKCEFWLSEVKFLGHVISAGGVAVDPSNVESVTNWKQPKTVSEIRSFLGLAGYYQRFIENFSKIAKPMTRLLQKDVKYKWSEACEQSFQELKNHLISAPILILPDPKKGFQVYCDASKLGLGCVLMQDGKVVAYASRQLRPHEKNYPTHDLELAAVVHALKIWRHYLFGTRTEVYTDHKSLKYIFTQPDLNMRQRRWLELIKDYDMGIHYHPGKANVVADALSRKGYCNATEGRQLPLELYKEFERLNLGIVSRGFVAALEAKPTLIDQVREAQINDPDIQEIKKNMRRGKAIGFLEDEQGTVWLGERICVPDNKDLKDAILKEAHDTLYSIHPGSTKMYQDLKERFWWASMKREIAEYVAVCDVCQRVKAEHQKLAGLLQPLKIPEWKWEEIGMDFITGLPRTSSGHDSIWVIVDRLTKVAHFIPVKTTYSGSRLAELYMARIVCLHGVPKKIVSDRGSQFTSNFWKKLQEEMGSKLNFSTAYHPQTDGQTERVNQILEDMLRACALDFSGSWDKNLPYAEFSYNNSYQASVQMAPYKALYGRKCRTPLLWDQTGERQVFGTDILREAEEKVKIIQERLRVAQSRHKSYADNRRRDLSFDEGDYVYLRVTPFRGVHRFHTKGKLAPRFVGPYKIISRRGEVAYQLELPQSLAGVHNVFHVSQLKKXLRVPTEEANLEQIEVQEDLTYVEKPIRILEIDERRTRNRVIRFCKVQWSNHSEEESTGEREDELKSAHPHLFAGSSESRGRDSV

SEQ ID NO: 19794 - protein, 719 aa, Oryza sativa
  Clone ID: TF_OSC423199j.C1.p4.gm
ASETTCCCDVCTDGRAIRFLGSATRDYSLFVNIYFTFTNISNTGDNGNTGYKEKEAPVNTNGGNTASNSSGGPFLGVLADNIVDVYMHMPSGKDMWDALEAKFGVSDAGSELYMLAKKLENNNCELPDKFVAGGIIAKLPPSWLDFATSLKHKRQEFSVTDLIGSLGVEEKARAKDNRGKNIEGGSSTNLVQQKNPHASHNNNNNKKVKPDVKPKATTNFKKKGKGKAKGDCFVCGKPGHWAKNCPDRKDKKSANMVISESGGTSGLNVIEEVKDFLSKSFEMKDLGVADVVLNIKLLRGDEGGITLVQSHYVDKVLSRFGYSDCKPAPTPYDSSVLLRKNRRIARDQLRYSQIIGSLMYLASATRPDISFAVSKLSRFVSNPGDDHWQALERVMRYLKGTMSYEIHYTGYPKVLEGYSDSNWISDADEIKATSRYVFTLGGGAVSWKSCKQTILTRSTMEAELTALDTATVEAEWLRELLMDLPVVEKPVPAILMNCDNQIVIIKASETTRCCDVCTDGRAIRFLGSATRDYSLFVNIYFIFTNMSNTGDNGNTGYKEKEAPVNTNGGNTASNSSGGPFLGHAHRLLTPASEAPTTNPHTHPREGGKEGESLPPPSPPANATAGASPHADILRHTRADAGGLLVVVRGGEEAPPPRGSSSSLVRGGGGSWRLAKGACRGRGGGGGGVVVFARRASRAREAPPRRRLRGAFCKYSIEQQ

SEQ ID NO: 19795 - protein, 449 aa, Oryza sativa
  Clone ID: TF_OSC18589j.C1.p1.fg
MDNTGNKGYGNDGSDDSRTQASGNEKSINKTSPELIQIVVNQTNMLATAFQLLQYWNNPAGATNVQVPTVQQQCKLSEFLKTEPPTFAIAVDPMEASDWLRTVEKKLGLIQCTDQERVGFTTHQLVGPASEWWDSYEASRPEGHTITWNEFSSVFKRSHVPARMITLRKREFRYLKQGDLTVTEYLHEFYRLAHYAPEDVETDEDKQEKFLQGLKDELAVQLLLEDYEDFEKLVDKAMQLESEHNRMTNCKRRIVNIPVFPCGNQRQRTEPLQITGSSVAHQELLPQEDGHNADNNISNTNADDTTNNHGSCPIHDHLDQACNVNSIHQDIDDSINEGTQNDNPSNFDSEKDSNGDSNYGTTDANVSKDFQPPIPTPSQNDRSQTDNSVKKTLICYNCKEPGHFSKDCPQPKRNLRHHSGHYARRRQVTRLVVTGANAIPVRPRVNHNP

SEQ ID NO: 19796 - protein, 146 aa, Oryza sativa
  Clone ID: TF_OSC22584j.C1.p1.fg
MAASTSVHATPRNQKLAPQRIVIHASRSSPIARVATAPTPTSALPQGVNAPFQSHPPADETEASICVVPLDVPIQQLINQVQDEEPECKKVIVCYNCSEEGHYSRDCPQPRQNRPPHFRQFTGSKHANRQVVTGANAVPVKPSASQ

SEQ ID NO: 19797 - protein, 1366 aa, Oryza sativa
  unsure (1)..(1366): unsure at all Xaa locations
  Clone ID: TF_OSC401836j.C1.p9.np
LALRVPPPFFLSCLRAQVYRMSRCLRNSIRLRTCTGRRAIKFLGIASNATALVLRGYCCCIGAFTKMSTEIGDKKMNDINGGNTASKSSGGTFSGSFSIVDFAASLKPDAFDGSNYKRWKAHTLLWLTAMHCFFVSLGKPSEAPLSPEEEAKFEASDCLFRGALFSVLADKIVDVYMHMPSGKDMWDSLEAKFGVSDANSERYVMEQFYDYNMVDDRSVVEQAHEIQMLAKELGNNNYELPDKFDLIGSLGVEEKAKAKDNXGKRIEGGFSTNLVQKKNPHASHNNNKKVKPDVKSKATTNFKKKGKGKAKEDCFVCGKPGHWAKDCPERKDKKFANMVISEGGGTLGXGKFLPTVLSVCHSPDWWVDTGANIHVYADISLFSSYXVGRGSSLLMGNGSLAAVHGVGTVDLKFISGKIVQLKNVXHVPSIKKNLVSGSLLCTDGFRLVFESNKCVISKYGTFIGKGYDSGGLFRFSLDDMCNVVNHVSDDDDESNVWHSQLCHVNFGCMTCLANMSLIPKFTLVKGSKXHTXVQSKQPRKPHKASEARNLAPLELVHSDLXEMNGVLTKGGKKYFMTLIEDCTRFCYVYLLKIKDEALHYFKIYKAEVENQLERKIKRLRSDRGGEYFSNEFTSFCEEYGIIYERTPPYSPQSNGVAERKNRTLTEMVNAMLDTAGLSKEWWGEAILTACHVLNIIPTKHKEVTPFEEWERKKLNLSDLRTWGCLSKVNVPIAKKRKLGPKTIDCVFLGYAIHSVGYRFLIVNSGVPDMRVGTITESRDATFFENEFPMKNAPSTSSQEPILSPEHFMPIEHIDQTLEENPEDDSIVATRKSKRQRTAKSFGDDYIVYLVNDTPRTTEEAYPSPNASYWKEAVHSEMDSIMSNGTWEVVEHPYGCKPVGCKWVFQKKLRPDGTIEKYKARLVAKGYTQKEGEDFFDTYSPVARLTTIRVLLALAASDGLLVHQMDVKTAFLNGELEEEIYMDQPDGYVLEGQEGMVXKLLKSLYVLKQAPKQXHEKFDNTLTSAGFVVNKADKCVYYRYGGGEGVILCLYVDDILIFGTSHNVIEEVKDFLSKSFEMKDLGVADVILNIKLLRGDEGGITLVQSHYVDKVLSRFGYSDCKAAPTPYDPSVLLSKNGRIARDQLRYSQIIGSLMYLASATRPDILFAVSKLSRFVSNPGDNHWHALERVMRYLKGTMSYGISSTGYPKVLEGYSDSNWISDADEIKATSGYVFTLGGGVVSWKSCMQTILTRSTMEAELTALDTATVEAEWLRELLMDLPVVEKPVPAILMNCDNQTMIIKVNSSKDNMKSSRHVKRRLKSVRKQKNSGVIALDYVXTAKNLADQFTKGLPRNVIDCASREMGLRPT

SEQ ID NO: 19798 - protein, 284 aa, Oryza sativa
  Clone ID: TF_OSC101188j.C1.p2.gm
MSFPDEEEDEAFLLAVAATEEAALASSDSSKRRRLSMTSSTSSSPTSATPPPAAVPEGPYLAALKGSHSSAWKQQQETLSQARKRPGGSQTLATPGSGSGSGGAQVARGGACFKCGDSCHWARECPQSVPATGGGGGGGAFGGSGGGGGGYGDAGGAVEEKACPCGAGSCLVLTSNTPRNPGRKFYRCPMRGGSSCGYFKWCDEQQLRTAAPLQASTQYHTDVASSGQIPSKRSSSACFKCGQENHWAKDCPNQSSDPYPDKAMSSPLLLWAHGTATDTDSRYL

SEQ ID NO: 19799 - protein, 508 aa, Oryza sativa
  Clone ID: TF_OSC400446j.C1.p28.fg
MADNEKGNKVRSQDIGTSSSRVNEAPDTSCVTLVQHLINQNRLPIEILQQHQTPILNLSQIQPQVQLEAVQALTPQVSMPPASRRTHGDVPHVDSKEASIICFMCDEQGHYARECPQQKRKTPMRTEDEVRMTKRQRRNTFRGAPQLTEHLLANGGRVSDSEDSDQVSSDDEDEMERKACSCCGEIGHVASSCATTCVHCEEDHPPDRCPTSRITCFFCEGTDHVLKDCQFSFLLTKKMANQPASSNGEKHQGNTNPRQDYSFSLTPVPGQRNQNEKRKCRVREDICCFNCQGMGHFADKCPRPRNIAASTSVHATPCNQKLAPQRIVIHASRSSHIARVATAPIPANALPQGVNAQFRPQPPVDKTEASIGIVPLDVPAQQPRNQVQDEEPEPPTILCTYGLSKELSSMEEVVSLPDLLQAEQRAINLRRAIPSRRPSSASNSNQKEASPVNDSNMQSYHIITEPIKDDAVTRTTPAISLQNQNEQPRLWFSVRYLSLRNRKFAAIM

SEQ ID NO: 19800 - protein, 555 aa, Oryza sativa
  Clone ID: TF_OSC400943j.C1.p6.fg
MADNEKGNKVRRQDIGTSSSRVNEAPDTSCVTLVQHLINQNRLLIEILQQHQTPILNLSQIQPQVQLEAVQALTPQVSMPPASRRTHGDVPHVDSKEASIICFMCDEQGHYARECPQQKRKTPMRTEDEVRKMIITSTEWPPPGMTKRQRRNTFRGAPQLTEHLLANGGRVSDSEDSDQVSSDDEEEKSPQGFNQNKMEHKACSRCGEIGHVASSCATTCVHCEEDHPPDRCPTSRITCFFCEGTDHVPKDCQFSFLLTKNMANQPASSNGEKHQGNTNPRQDYSFSLTPVPGQRNQNEKRKCRVREDICCFNCQGMGHFVDKCPKPRNIAASTSVHATPCNQKLVPQRIVIHASRSSPIARVATAPTPASALPQGVNAQFQPQPSIDKTEASIGIVPLDVPAQQPRNQVPDEEPEHKKVIVCYNCEKHEIMNEFDKFIEGSMLRLQVLLSKDLSSMEEVVSLPDLLQAEPRAINLRRAIPSRRPLFASNSTQKEASPVNNSNMQSYHIITEPIKDDAVTRTMPAISLQSQNEQPRLWFSVRYLSLCSRKFAAIM

SEQ ID NO: 19801 - protein, 844 aa, Oryza sativa
  Clone ID: TF_OSC400925j.C1.p17.gm
MSCGGSCNCGSCGCGGGCGKMYPDLAEKITTTTTTATTVLGVAPEKGHFEVMVGKAAESGEAAHGCSCGSSCKTSEEFTPADGDLRSWTRVGSRRRCIRDAVKPTTVARWVVWEIWKEQNQRIFEHKESTTTYLLTKIIEEAKLWMLAGARRLRELLPHLVQKMYPDLAEKNTTTTSVTMVLGVAPEKGHSEPGFELAAGSGEAGHGCSCGSSCNVDMFPFSGRWQKSGCGLVDREVRRLIASRHSGDGDHHLIAGGHSDAGDHLPTSSLMSQLGRTSWRDIVLSRPAVNAVDQRGEEDQAFKKARTVPRWLQGCCFNCLGLGHQKSACPGSTRCYNCWYSGHIARNCPTSRAARAQPATGSKEVATKPAGGEKPRKEVLEALPPRKKGREEGVAAGDGMASFQICAQQPSRVMKEWRTGDANIRPESGRCTISWTPRMVETEAIFEQKVLLATVLGNQPALSPRDLVAVIVDCGILPAHFRVEVTTPEDYLIVFRSAREKDWVLGKSKQVFFQGAPIAFKSWNRRLLASSTRFQFFTKLSLEGLPQHAWDEEAMAQLIRELGGELVELVPPADARVLTMFAWLKNPSAVPTTLEVEIPERAGGGPPCWERMAGSIRIPRAPLHKCTLTYNIIVHIEEIIDPTPLHVPLSTASNDEDDDDVPRQVTFSCWAGRIDGTGPWTSKQGGGRPFGGASGFAGGLPGRTWSTSSVQRVSEMIPTNPGALRDTARDDEHTEHAGSGLHASDRDTIEEHSSGEPGNRMAGRGDDAACNVVPRVLATSTALVAGRDVLATGKDVLATENGVLATGKDVLATGGELCPRQSPLSPLRSKPPAVVIAGPRHSAR

SEQ ID NO: 19802 - protein, 1716 aa, Oryza sativa
  Clone ID: TF_OSC900409j.C1.p9.fg
MSFVISFTLLTIVNDAITGNNLISSWFGMMPRYKPEYLFGVEGFVQELRTMSFVIGFGTAPFYAQIPHDRHEEKCRVKVTLNSNSEDIPSVMFKAGGRNYIHACQEVARIAIGELRDRYSDQLADTEYRYHPRQPQGSDRGSYLETEGIENDATTRHLVEMLWAMDESRAEIVLAAQDREDRNRGKICKLEDKVDRLEKELAVLKGEAPPQKARIRLTARKRALFVPRYQLAPKFPPVSLLVPCPCQMVNTRSNGNGPSNNNNGENPTLAQVLAQQTQLMNMMMQQLQNQQNQGNNHAPPQNKLAEFLRVRPPVFSSTTNPVEAGDWLHAIEKKLDLLQCTDQEKVSFASHQLHGPASEWWDHFRLNRTTAEPITWLEFTAAFRKTHIPSGVVSLKKKEFRSLTQGSRSVTEYLHEFNRLARYAPEDVRNDEERQEKFLEGLNDELSYPLMTGDYHDFQKLVDKAIRQEEKYNRMEQKKRRIAQFKTQQGNNQKPRLTLGPQSMPQGGSSSVVRPQRQFFNNNAGNNIRNQAPHPVAAPAQQQPAKREQGSKPVVCFNCGDPGHYANKCPKPRRVKVVPVQSNSTVPASKARVNHVAAAEAQDAPDVILGTFLVNLVPATVLFDSGATHSFLSMSFAGNHGMEVEDLRRPLMVSTPSNQALSLQRSPSVRIEIQGVPFLANLILLESKDLDVILGMDWLARHKGVIDCANRKVTLTSNDGRVVTVHALSSESLRSRLNQITLEEISIVREYPDVFPYDLPGMPPKRDIEFRIDLVPGTTPIHKRPYRMAANELAEVKRQVDDLLQKGYIRPSSSPWGAPVIFVEKKDHTQRMCVDYRALNDVTIKNKYPLPRIDDLFDQLKGATVFSKIDLRSGYHQLRIKEEDIPKTAFTTRYGLFECTVMSFGLTNAPAFFMNLMNKVFMEYLDKFVAVFIDDILIYSRTKEEHEEHLRLALEKLREHQLYAKFSKCEFWLSEVKFLGHVISAGGVAVDPSNVESVTNWKQPKTVSEIRSFLGLAGYYRRFIENFSKIAKPMTRLLQKDVKYKWSEECEQSFQELKSRLISAPILILPDPKKGFQVYCDASKLGLGCLLMQDGKVVAYASRQLRPHEKNYPTHDLELAVVVHALKIWRHYLFGTRTEVYTDHKSLKYIFTQPDLNMRQRRWLELIKDYDIGIHYHPGKANVVADALSRKGYCNATEGRQLPLELCKEFERLNLGIVSRGFVAALEAKPTLIDQVREAQINDPDIQEIKKNMRRGKAIGFLEDEHGTVWLGERICVPDNKDLKDAILKEAHDTLYSIHPGSTKMYQDLKERFWWASMKREIAEYVAVCDVCQRVKAEHQKPAGLLQPLKIPEWKWEEIGMDFITGLPRTSSGHDSIWVIVDRLTKVAHFIPVKTTYSGSRLAELYMARIVCLHGVPKKIVSDRGSQFTSNFWKKLQEEMGSKLNFSTAYHPQTDGQTERVNQILEDMLRACALDFDGSWDKNLPYAEFSYNNSYQASLQMAPYEALYGRKCRTPLLWDQTGERQVFGTDILREAEEKVKIIQERLRVAQSRHKSYADNRRRDLSFEGDYVYLRVTPLRGVHRFHTKGKLAPRFVGPYKIVSKRGEVAYQLELPQSLAGVHNVFHVSQLKKCLRVPTEEANLEQIEVQEDLTYVEKPIRILETDERRTRNRVIRFCKVQWSNHSEEESTWEREDELKSAHPHLFASSSESRGRDSV

SEQ ID NO: 19803 - protein, 38 aa, Oryza sativa
  Clone ID: TF_OSC405121j.C1.p1.hg
YGGGGGGYPTGGGDEDDGGCYNCGETGHIARECPSKTY

SEQ ID NO: 19804 - protein, 564 aa, Oryza sativa
  unsure (1)..(564): unsure at all Xaa locations
  Clone ID: TF_OSC15730j.C1.p2.np
MDEVVATMDISEANEGYASCGSVIEMSRQMKATRVGARAQSWPACPGIPAVGRVGSVLLFTARMGKGLCHVFYDGSIAMECRVKACLVGWPGLAWDELGPRSGCQFGPNHRRPWVKAVLGGQLCEEEDVVNCLPKLRKTVGSASEAREAVKPDVKQEKKCSSVKVLSLVSDLSLPFVFPLSLSKLQQMADNEKGNKVRSQEMGTSSSRVNEAPDTNCVAVVQHLINQNKLLIEILQQHRMPILNPSQMQPQAQLEAIQALTPQVSAPPTSQKAPHAMSHVDSKEASIIGFMCDEQGHYARNCPQQKRKAPMRTEDEVRKMIITSTEWPPPGMTKRQRRNSFRGAPXLTEHLLANGGRVSDSEDSDQVSSDDEDEKSPQGFNQNKMEHKACSHCGEIGHVASSCATTCFHCKEDHPPGECPMSRITCFLCEGTDHVPKDCQLSFLLTKKMANQHARSNGEKHQGNTNPRQDYSFSLTPVPGQRNQNEKRKYXVRKDICCFNCQEMCHFTDKCPKPRNIATSTSVHATPHNQKLAPQRIVIHASRSIPIARVATAPTPVMWTPIFI

SEQ ID NO: 19805 - protein, 484 aa, Oryza sativa
  Clone ID: TF_OSC402673j.C1.p7.np
MADNEKGNKVRSQDIGTSSSRVNEAPDTSCVTLVQHLINQNRLLIEILQQHQTPILNLSQIQPQVQLEAVQALTPQVSMPPASRRTHGDVPHVDPKEASNICFMCDEQGHYARERPQQKRKTPMRTEDEVRMTRRQRRNTFRGAPQLTEHLMTRRQRRNTFRGAPQLTEHLLANGGRVSDSEDSDQVSSDDEDEMECKACSRCGEISHVASSCATICVHCEEDHPPDRCPTSRITCFFCEGTDHVPKDCQFSFLLTKKMANQPASSNGEKHQGNTNPRQDYSFSLTPVPGQRNQNEKRKCRVREDICCFNCQGMGHFADKCPKPRNIAASTSVHAAPCNQKLAPQRIVIHASQSSPMARVATAPTPASALPQGVNAHFQPQKELSSMEEVVSLPDLLQAKQRAIDLRRAIPSRRPSSASTSNQKEASPVNDSIMQSYHITTEPIKDAVTRTMPAISLQNQNEQPCLWFPVRYLSWCNRKFAAIM

SEQ ID NO: 19806 - protein, 530 aa, Oryza sativa
  Clone ID: TF_OSC18392j.C1.p5.fg
MADNEKGNKVRSQDVGTSSSRVNEAPDTSCVTLVQHLINQNRLLIEILQQHQTPILNLSQIQPQVQLEAVQAPTPQVSMPPASRRTHGDVPHVDSKEASIICFMCDEQGHYARECPQQKRETPMRTEDEVRKMIITSTEWPPPGMTKRQRRNTFRGAPQLTEHLLANGGRVSDSEDSDQVSSDDEDEKSPQGFNQDKMERKACSRCGEIGHVASSCATTCIHCEEDHPPDRCPTSRITCFFCEGTDHVPKDCQFSFLLTKKMANQPASSNGEKHQGHTNPRQDYSFSLTPVPGQRNQNEKRKCRVWEDICCFNCQGMGHFADKCPKPRNIAASTSVHATPCNQKLAPQRIVIHASRSSPIARGATAPTPASALPQGVNAQFQPQPPVDKTEASIGIVPLDVPAQQPRNQVQDEEPEPPTILCTDSLSKELSSMEEVVSLPDLLQAEQRAINLRRAIPSRRPSSASTHNQKEASPVNDSNMQSYHIITELIKDAVTRTMPAISLQNQNEQPYLWFSVRYLSLCNRKFAAIM

SEQ ID NO: 19807 - protein, 797 aa, Oryza sativa
  Clone ID: TF_OSC20764j.C1.p4.fg
MADNEKGNKVRSQDIGTSSSRVNEAPDTSCVTLVQHLINHNRLLIEILQQHQTPILNLSQIQPQVQLEAVQALTPRVSMPPASRRTHGDVPHVDSKEASIICFMCDEQGHYARECPQQKRKTPMRTKDEVRKMIITSTEWPPPGMTKRQRRNTFRGAPQLTEHLLANGGRVSDSEDSDQVSSDDEDEKSPQGFNQNKMERKACSRCGEIGHVASSCATTCVHCEEDHPPDRCPTSRITCFFCEGTDHVPKDCQFSLLLTKKMANQPASSNGEKHQGNTNPRQDYSFSLTPVPGQRNQNEKRKCRVREDICCFNCQGMGHFADKCPKPRDIAASTSVHATPCNQKLAPQRIVIHASRSSPIARVATAPTPASALPQGVNAQFQPQPPVDKTEATFQLLQNWNYPAGATNVQVPTVQQQCKLSEFLKTETPTFAIVVEPMEASDWLRTVEKKLGLIQCTDQERVVFATHQLVGLASEWWDSYEASRPEGHTITWDEFSSVFKRSHVPAGMITLRKREFRYLKQEDLTVTEYLHEFHRLAHYAPEDVENDEDKQEKYLQGLKDEIAVQLLLEEYEDFEKLVDKAIQLESEHNRMKNCKRRIVSIPVFPVVTKDSARSHFRSPDLLLRIKSFRPKKMDTMQTTTLAILMMMIPPPTMLLAPLVTTQIKRAMSTSFTKVSTIVSMMAPKMTTLAIVTLRKTPMVIATMVSLKDSTPKDLIAPEASSTPGAKSTWLRKVESGNLYEVDSEDMNHEKFWNGSIIKLPQPSLSQLKGAPWFKSGEEKIPSATEGQAKQFRVVKFC

SEQ ID NO: 19808 - protein, 416 aa, Oryza sativa
  Clone ID: TF_OSC25016j.C1.p1.fg
MADNEKGNKVRSQDVGTSSSRVNEAPDTSCVTLVQHLINQNRLLIEILQQHQTPILNLSQIQPQVQLEAVQAPTPQVSMPPASRRTHGDVPHVDSKEASIICFMCDEQGHYARECPQQKRETPMRTEDEVRKMIITSTEWPPPGMTKRQRRNTFRGAPQLTEHLLANGGRVSDSEDSDQVSSDDEDEKSPQGFNQDKMERKACSRCGEIGHVASSCATTCIHCEEDHPPDRCPTSRITCFFCEGTDHVPKDCQFSFLLTKKMANQPASSNGEKHQGHTNPPQDYSFSLTPVPGQRNQNEKRKCRVREDICCFNCQGMGHFADKCPKPRNIAASTSVHATPCNQKLAPQRIVIHASRSSPIARGATAPTPASALPQGVNAQFQPQPPVDKTEASIGIVPLDVPAQQPRNQVQDEEPE

SEQ ID NO: 19809 - protein, 467 aa, Oryza sativa
  Clone ID: TF_OSC401512j.C1.p1.fg
MADNEKGNKVRSQDIGTSSSRVNEAPDTSCVTLVQHLINQNRLLIEILQQHQTPILNLSQIQPQVQLEAVQALTPQVSMPPASRKTHGGVPHVDSKEASIICFMCDEQGHYARECPQQKRKTPMRTEDEVRKMIITSTEWPPPGLTKRQRRNTFRGAPQLTEHLLANGGRVSDSEDSDQVSSDDEDEMERKACSRCGEIGHVASSCATTCVHCKEDHPPDRCPTSRITCFFCEGTDHVPKDCQFSFLLTKKMANQPASSNGEKHQGNTNPRQDYSFSLTPVPGQRNQNEKRKCRVREDICCFNCQGMGHFADKCPKPRNVAASTSVHATPYNQKLAPQRIVIHASRSSPIARVATAPTPASALPQGVNAQFQPQPSVDKTEASIGIVPLDVPAQQPRNQVQDEEPERSRLKYHLVTGSIHNTRSEEYLVDKGQKMIDRRYRKRCLLPGKEVGRKVIDKRNRERTHQG

SEQ ID NO: 19810 - protein, 726 aa, Oryza sativa
  Clone ID: TF_OSC405209j.C1.p1.np
KKVNPSCFRLARALAPPPPRIPPLTSVPRAIKRGEIFPVIPSLSPPPHFSLPLSLGFVWKLPPNLAGANGGRIFRARFPLPAALSPSQPYINTPRASLRRFRHSPHSLSAGIELAPSLSLSAVAAELRSAAVLAPDHLPPRRRLLRLRRNLADLVHLSVSVADRRNAAVPVNPSHAAAPLRSSRRSRRRRRPGVSRGPPIRFPLPSPLSGAAPPRRWSPAATIGARARRSRRLCRRGRLRARPAAAMWGPAVSRPHPRVRLTHWTHGAGRCEPGAPGPPWTVRLPRGPLPWTRTNEGYTSCGPMADNEKGNKVRSQDIGTSSSRVNEAPDTSCVTLVQHLINQNRLLIEILQQHQTPILNLSQIQPQVQLEAVQALTPQVSMPPASRRTHGDVPHVDSKEASIICFMCDEQGHYARECPQQKRKTPMRTEDEVRKMIITSTKWPPLGMTKRQRRNTFRGAPQLTEHLLANGGRVSDSEDSDQVSSDDEDEMERKACSRCGEIGHVASSCATTCVHCEEDHPPDRCPTSRITCFFCEGTDHVPKDCQFSFLLTKKMANQPASSNGEKHQGNTNPRQDYSFSLNPVPGQRNQNEKRKCRVREDICCFNCQGMGHFADKCPKPRNVAASTSVHATPCNQKLAPQRIVIHASRSSPIARVATAPTPASALPQGVNAQFQPQQRIVVDGRSCVSPRPTPGRAKGNQPPEGDTKQKTAIRFKQQSEERFSCE

SEQ ID NO: 19811 - protein, 536 aa, Oryza sativa
  Clone ID: TF_OSC411277j.C1.p2.fg
MADNEKGNKVRSQDIGTSSSRVNEAPDTSCVTLVQHLINQNRLLIEILQQHQTPILNLSQIQPQVQLEAVQALTPQVSMPPASRRTHGDVPHVDSKEASIICFMCDEQGHYARECPQQKRKTPMRTEDEVRKMIITSTEWPPPGMTKRQRRNTFRGAPQLTEHLLANGGRVSDSEDSDQVSSDDEDEKSPQGFNQNKMERKACSRCGEIGHVASSCATTCVHCEEDHPPDRCPTSRITCFFCEGTDHVPKDCQFSFLLTKKMANQPASSNGEKHQGNTNPRQDYSFSLTPVPGQRNQNEKRKCRVREDICCFNCQGMGHFADKCPKPRNIAASTSVHATPCNQKLAPQRIVIQASRSSPIARVATAPTPASALPQGVNAQFQPQPPVDKTEASIGIAPLDVPAQQPRNQVQDEEPEPIIPLAPTILCTDSLSKELSSMEEVVSLPDLLQAEPRAINLRRAIPSRRPSSASNSTQKEASPVNDSNMQFYHIITEPIKDDAVTRTTPAISLQNQNEQPRLWFSVRYLSLCNRKFAAIM

SEQ ID NO: 19812 - protein, 545 aa, Oryza sativa
  unsure (1)..(545): unsure at all Xaa locations
  Clone ID: TF_OSC6554j.C1.p2.np
HVCVVYPGFSWDGINTLAFGKRQFSRSRQAVLDGQVSEEEDIVSCLPKLRKTAGSASEVEEAVKPAVKQDKRLRSVKVLSLVSNLSLPFVFPLSLSKPLQQMADNEKGNKVRSQDIGTSSSRVNEAPDTSCVTLVQHLINQNRLLIEILQQHQTPILNLSQIQPQVQLEAVQALTPQVSMPPASRRTQGDVPHVDSKEASIICFMCDEQGHYARECPQQKRKTSMRTEDEVRKMIITSTEWPPPGMTKRQRRNTFRGAPQLTEHLLANGGRVSDSEDSDQVSSDDEDEMDKACSRCGEIGHVASSCATTCIHCEEDHPPDRCPTSRITCFFCEGTDHVPKDCQFSFLLTKKMANQPASSNGEKHQGNTNPRQDFSFSLTPVPGQRNQNEKRKCRVREDICCFNCQGMGHFADKCPKPRNIAASTSVHATPCNQKLAPQRIVIHASRSNPIARVATAPTPASALPQGVNAQFQPXPSVDKTEASIGIVPLDVPAQQPRNQVQDEEPERKKVIVCYNCSTCXSRHANRQVVTGANAVPVKPSASQKQ

SEQ ID NO: 19813 - protein, 456 aa, Oryza sativa
  Clone ID: TF_OSC19734j.C1.p1.np
SSRVNEAPDTSCVTLVQHLINQNRLLIEILQQHQTPILNLSQIQPQVQLEAVQALTPRVSMPPASRRTHGDVPHVDSKEASIICFMCDEQGHYARECPQQKRKTPMRTEDEVRMTKRQRRNTFRGAMTKRQRRNTFRGAPQLTEHLLANGGRVSDSEDSDQVSSDDEDEMERKACSRCGEIGHVASSCAMERKACSRCGEIGHVASSCATTCVHCEEDHPPDRCPTSRITCFFCEGTDHVPKDCQFSLLLTKKMANQPASSNGEKHQGNTNPRQDYSFSLTPVPGQRNQNEKRKCRVREDICCFNCQGMGHFADKYPKPRDIAASTSVHATPCNQKLAPQRIVIHASRSSPIARVATAPTPASALPQGVNAQFQPQPPVDKTEASIGILPLDVPAQQPRNQVQDEEPKPMGMITVQLLLEEYEDFEKLVDKAIQLESEHNRMNVREGLSASQYSHV

SEQ ID NO: 19814 - protein, 658 aa, Oryza sativa
  unsure (1)..(658): unsure at all Xaa locations
  Clone ID: TF_OSC12272j.C1.p5.np
MDEFVATMDISEANEGYVSCGSVIEMSRQMKAARAGVRAQSXPACGIPTVGKVGSVLLFTARMGEGLCHMFTTGSKAMECGVKMCLVGWPWLAWDELGPRSGYQFGLNHRRPLVKAVLDGHLCEEEDAVNCLPKLRKTVGSASEAKEAVKPAVKQEKKIRSVKVLSLVSDLSLPFVFPLSLSKPGQMADNEKGSKVRNQDKGASCSQVNKAPDTSCVVVVQHLINQNKLLIDLLQHHQTPILNPSQMQPQVQFEADQAPTSPDNVPLASQQAHCAMPHVDSKEAIIICLIYDEQGHYARNCPQQKRKAPMRTDDEVRKMTITGTEWPPPGMTKRQIGNFFRGAPQLTQHLLANGGRVSDSEDSDQVSSGDEDEKSPXGFKQNKMEHKACSRCGEIGHVASSCVTTCLHCEKDHPPGECPMSRITCFLCEGTDHVPKDCQFSFLLTKKMANHPASSNKEKHQDHVNPRQEYSFQPNSRVGQRNQNGKSKSRVRQDISCLNCQEMGHFAARCPKLRNIAASMSVHATPHNQKLVPXRIVIHASRSSRIAXVATSALPQGVNAXFQPQPPVDKTEANICVVPLDVPVQQPRNXVLDEELGRKKVIVCYNCSEERHYSRNCPQPKRNPRHHSGRYARRRHDHNIRVTGANAVPVKPSASQXQ

SEQ ID NO: 19815 - protein, 549 aa, Oryza sativa
  unsure (1)..(549): unsure at all Xaa locations
  Clone ID: TF_OSC14650j.C1.p1.np
KRSFGEEVLDGHLCEEEDAVNCLPKLRKTVGSASEAKEAVKPAVKQEKKIRSVKVLSLVSDLSLPFVFPLSLSKPGQMADNEKGSKVRNQDKGASCSQVNKAPDTSCVVVVQHLINQNKLLIDLLQHHQTPILNPSQMQPQVQFEADQAPTSPDNVPLASQQAHCAMPHVDSKEAIIICLIYDEQGHYARNCPQQKRKAPMRTDDEVRKMTITGTEWPPPGMTKRQIGNFFRGAPQLTQHFLANGGRVSDSEDSDQVSSGDEDEKSPXGFKQNKMEHKACSRCGEIGHVASSCVTTCLHCEKDHPPGECPMSRITCFLCEGTDHVPKDCQFSFLLTKKMANHPASSNKEKHQDHVNPRQEYSFQPNSRVGQRNQNGKSKSRVRQDISCLNCQEMGHFAARCPKLRNIAASMSVHATPHNQKLVPXRIVIHASRSSRIAXVATSALPQGVNAXFQPQPPVDKTEANICVVPLDVPVQQPRNXVLDEELGRKKVIVCYNCSEERHYSRNCPQPKRNPRHHSGRYARRRHDHNIRVTGANAVPVKPSASQXQ

SEQ ID NO: 19816 - protein, 323 aa, Oryza sativa
  Clone ID: TF_OSC414256j.C1.p5.fg
MAGKEEGRIFVGGLSFHTDERKLADAFRRFGKVVDAQWFGSFCGSFVNQVILIMLERHTQRHRGFGFVTFSDPEAVDSAIKEMHCQELDGRTISVNKAEPKMNTDDTRYESGGGRGEYRGGRGDGPPPGNCFECGRAGHWARDCPNPGGGRSARYSSSKFSAGGRGDRFSGSDRFGDRYMDDRYDGGYREPVDVRDRYGGGRDRYANDRYPSGGDRYVPDRYGGPDRYQPSSYGRERERSYERDGVRGNGGYDRSGPRGGGSYDRDGPRGGISGGYDRDGPRGGGVDRYGGGGPARYDGGSYRDRSGPYDRPSRGGRFDDRFQ

SEQ ID NO: 19817 - protein, 429 aa, Oryza sativa
  Clone ID: TF_OSC400702j.C1.p17.fg
MAPQPTCQTCVRNYLGSKEDLALSENPNQLAEQVTNQVAKTDNTVPGPNKEPKVNPDKSKDEAAEIQGTQSVEGTDTHKEKNKEFLNVMIIGMKTPLRANNCPNLQNSINKSVSQENSMVKEGSCHKRKTLPSKVDMQDVPQCQTMQSCQNLPKSPTLKSKKIRHVPGLICFICHEIGHYMRHCPQKPYMDALLQANMSTSRMPFYPQGSPNLQNVNAVRPTFPDDKRAKASCDMCQDIQEKKKMQEYKRRKVMSLGIQAKEGLCRKTNSPTQYYQKASQHSNGSGSTSLSTMSEPGQQATMINSNSHEGSNSVPCPTPSKRRGHKAGVECFTCHEMGHYSWDCPQKAKMKCPQKVKSKQVQQTTSLPNVSGPKSSKPPNSGSASLTSPPVGQGRLNHVQVETNGKVVNLEQVERAGEEQVPQARAEPQ

SEQ ID NO: 19818 - protein, 1697 aa, Oryza sativa
  unsure (1)..(1697): unsure at all Xaa locations
  Clone ID: TF_OSC416848j.C1.p3.np
MSNKVNHVGKAPMFNGTNYSWKIKISTHLKAMSFHIWSIVDVGFAITGTPLTEIDHRNLQLNAQAMNALFNSLSQEEFDRVSNLETAYEIWNKLAEIHEGTSEYKDAKLHFLKIQYETFSMLPHENVNDMYGRLNVIVNDLKGLGANYTDLEVAQKMLRALPEKYETLVTMLINSDMSRMTPASLLGKINTNDMYKLKKKEMEEASPSKKCIALQAEVEDKSKSKVNEVNEDLEEEMILLARRFNDLLGRRKERGRGSNSNRRRNRRPNKTLSNLRCFECSEKGHFASKCPSKDDDGDKSSKKKSGGYKLMKKLKKEGKKIEAFIGEWDSNEESSASSGSEEEGGDDASSKKKKMVVVAIKEAPSLFAPICLMAKGSSKVTSLSDSESDDDCDDVSYDELVSMFEELYAYSEKDIVKFKALKKDHASLEVLYEXLKISHERLTISHEKLKEAHDNLLSTTQHGAHIDVGISCDLLDDSATCHIAHVASSSISTSCDDLMYMPSPCSSSSSCVSICDASLVVENNELKEQVAKLNKSLERCFKGKNTLDKILSEQRCILNKEGLGFIPKKGKKPSHHATRFVKRNGKYCYKCREVGHLVSDCPEGKPPKTCMFDSHYMLSKAHDGSIVARYVGSPILGGKKNAIWVPKALVSNLQGLKQVWIILAILVFFLHDKSIVAELFKKFAKRAQNEFSCTLVKIRSDNGSEFKNTNIEDYCDDLGIKHELSATYSPQQNGVVERKNRTLIEMARTMLDEYGVSDSFWAEAINTACHATNRLYLHRLLKKTSYELIVVRKPNVAYFRVFGCKCYIYRKGVRLTKFESRCDEGFLLGYASNSKAYQVYNKNKGDEGLMRAMKNMSIGDVKPIEVDDEPSTSASSSQAQVEVEEEKAQDPPMPPRIHTALSKDHPIDQVLGDISKGVQTRSHVASICEHYSFVSCLEPKHVDEALCDPDWMNAMHEELNNFARNKVLTLVERPRDHNVIGTKWIFRNKQDENGLVVRNKARLVAQGFTQVEGLDFGETFAPVARLEAIRILLAFASCFDIKLFQMDVKSAFLNGEIAXLVFVEQPPGFEDPKNPNHVYKLSKALYGLKQAPRWYERLRDFLLSKDFKIGKVDTTLFTKIIGDDFFVCQIYVDDIIFGFTNEVFCKEFGDMMSREFEMSMIGELSFFLGLQIKQLKDGTFVSQTKYIKDLLKRFGLEDARPIKTPMATNGHLDLDEGGKPVDLKLYRSMIGSLLYLTASRPDIMFSVCMCARFQAVPKECHLVAYPKGAKFKYPKGAKFKLVGYSDSNYVGCKVDRKSTSGSCQMLAMPPRTRHGRRAPTPDPVSENEESSGDEYVQSDEDNMENVEGDEMEVSDDGDDNESGNGEDDEASDDGSPFDSSIQFVLNLRNAQQYAILHHHDQFRRPNDCNDPRFHTRFQKSVYVQVYAKKAFTEHKWISWRHIGETPEFENVQEMFRTVGIDRIVTMKQPFDEDLIRQFYATVWVSGDCDAMKWMSGTLRCSINRREFKELLHIRFNNGDDLHDEHTHNPFPIDHFSQFYEEGGRHTYGKVAGLRALPSVINRIVRATILPRCGNNDDIRGVAWHVIDAIMDGRRFDVINFMMKEITISKGTIGQGIYYAPYIMRLPPPRRLVEELPGDLSEKIVEEARRRFVSGLEFTTFGVKEELPRVIEAWVVLSVGRLPPCPPLDEGDVRWLRG

SEQ ID NO: 19819 - protein, 1041 aa, Oryza sativa
  Clone ID: TF_OSC900333j.C1.p17.fg
MAGFADALRPDKFSGVHFKRWQIRVTLWLTAMKCFWVSTGKPEGVLTAEQQKQFEEATTLFVGCILSVLGDRLVEVYMHMTDAKELWDALNTKFGATDASNDLYIMEQFHDYKMADNRSVVEQAHEIQTMAKELELLKCVLPDKFVAGCIIAKLPPSWRSFGTALKHKRQEYSVEGLIASLDVEEKAQEKDAASKGDGGQSSANVVHKAQNKSKGKYKAQQTTNFKKQKKNNNNPNQDDRTCFVCGQPDHLARKCPQRKGMKAPAEQTSKSANVTIGNTGDGSGYGNLPTVFSVNQSTNWWVDTGANVARGSTVLMGNGSHASVHGVGTVDLKFTSGKIVQLKNGGKRYFMMLIDDATRFCYVYLLKTKDEVLDYFKIYKAEVENQLDRKIKRLRSDRGGEFFSNEFDLFCEEYGIIHERTPPYSPESNGIAERKNRTLTDLVNAMLDTTGLPKAWWGEALLTSNHVLNRVPNRNKDKTPYEIWIGRKPSLSYLRTWGCLTKVNVPITKKRKLGPKTVDCVFLGYAHHSIAYRFLIVKSEVPDMHVGTIMESRDATFFESFFPMKDTHSSSSQPSEIIPSSITPPEQTEHTHKHVTEEDDSEAPRRSKRQRMAKSFGDDFIVYLVDDTPKSISEAYASPDADYWKEAVRSEMDSIIANGTWEVTERPYGCKPVGCKWVFKKKLRPDGTIEKYKARLVAKGYTQKEGEDFFDTYSPVARLTTIRVLLSLAASHGLLVHQMDVKTAFLNGELDEEIYMDQPDGFVVEGQEDKVCKLLKSLYGLKQAPKQWHEKFDRTLTSTGFAVNEADKCVYYRHGGGEGVILCLYVDDILIFGTNLEVINEVKSFLSQKFDMKDLGVADVILNIKLIRGTIELGLHYSGYPAVLEGYSDSNWISDVDEIKATSEYFFTLGGDAVSWRSCKQTILTRSTMEAELMALDTAIVEAEWLRDLLMDLPIVEKPVPAILMNCDNQTVIVKVNSSKDNMKSSRHVKRRLKSVRKLRNSGVITLDYIQTTRNLADPFTKGLSRNVIDNASKEMGLRSM

SEQ ID NO: 19820 - protein, 814 aa, Oryza sativa
  Clone ID: TF_OSC20909j.C1.p1.fg
MGENQGLEQVMGKLVEMLAKKFNEAPTTSSAVVPHTESVQKIELMQNDIKLEGVKNYLSWSRRALLILKTKGLEGYVTGEIKEPENISSVEWKTWSTTNSLVVAWLLTSLIPAIATTVETISSASEMWKTLTNLYSREGNVMLMVETQEKISVLRQGERSVAEYVAELKHLWSDLDHYNPLGLEHPDCIAKMRKWIERRRVIEFLKGLNSEFEGRRNAMFHQTTLPTLDEAIAAMAQEKLKKKVLPSATPSSPSPTYVVAQSKETRECFNCGKMGHLIRDCRAPRKPSYGRGRFGDRGGARGGRGYAVLIQIGYLTRVHLDMSRERETGKKLGIGVRRDGLWYLDRKETSEDVCLALMASTSEEEAKKTDLSSLFIDLDDSTNGHDGHQMKDEILGPKGDEQPKKEKLVVGSIPCPMGGPVAQEQEWRKPHEEKNLQVYTRRTRCPVIQQVEEDNQVEEDVSREQGSLESGGEEEEVREESDLPIAIRKSVRSNAASLDSVQIPKDWREAKQDPRWHQAMLDELEALEKNKTWDLVPFPKGKKIVNYKWVYTVKQNPDGKVERYKARLVAKGYSQTYGIDYDETFAPVAKMSTVRTLISCAANFDWPLHQLDVKNAFLHGDLQEEVYMDVPPGFATSQTKGKVLRLKKSLYGLKQSPRAWFDRFRRAMCAMDYKQCNGDHTVFYHHCGDHITILAVYVDDMIITGNDCLEITRLKRNLSKEFEVKDLGQLRYFLGIEIARSPRGIVISQRKYVLDLLSETGRLGCRPVSTPIDQNHKLCAESGDPVNRERYQRLVGRLIYLCHTRPDITYAVSM

SEQ ID NO: 19821 - protein, 882 aa, Oryza sativa
  Clone ID: TF_OSC1445j.C1.p1.fg
MKLRLMRGTNPIRSAYIAADNRECYNCGQVGHVSYNCPTSRNIGGRGSIRGGHGGTRGGFRGDRGVFGGNRGGRGGDRGGRVGGRGRGRGVPQANAVKEDGKAVTLIGEQVTQWEEWQKNKTNESSNTTTHFGNFANYAQVGEGTQAQALASTYRHPIDWIIDSGASKHVTGLHNTFTSYTPYIHSETIQIADGTSKPIHGIGSVECTSSMNLSSVLHVPSFPVNLLSISSAIDQLKCIVVFDENSCLFQEKGTGRRIGTGVTRDGLWYINHEELGLPAVVGDVEKEISLLHYEGIIHQTTCPGTPPQNGVAERKNRHLLEVARSLMFQMNVPKYLWSEAVMTAAYLINRMPSRILGMKSPAELLLGKREFKVPPKVFGCVCFVRDHRPSVGKLDPHAVKCVFVGYASSQKGYKCWDPIGRRLFVSMDVTFREFEPYYKSKGDLDQFLEEFSTVMEVDSREGERERGDIHEKNVGDKNGEAVVIGSIPCSIDDASKVVEVIEDTQDEDREMVPHEEDGEEGEVVVGTIPCPMEGAERVKQKDVLVYQRRRFDSQGEKRKGLVQSQIEELPHPKCPVPESSQSLSPPASLASLETIGNTSPTLEHVELPLVQRRETRSNAGRPPIRLGFEHLSFMHDIANYITYSHVSPAYKTFIASLQTMPIPKDWKCAKQDPKWKDAMKEELNALVKNKTWELVKLPPEKRAVGCKWVFTVKQTPEGKVDRYKARLVAKGYSQTYGIDYDETFAPVAKMGTVRALVSCAVNFGWPLHQLDVKNAFLHGDLHEEVYMEIPPGFGNSQTVGKVCKLKKSLYGLKQSPRAWFDRFRHAVCDMGYSQCNGDHTVFYKHRGTHITILAVYVDDIVITGDDVEEIRCLKERLGKAFE

SEQ ID NO: 19822 - protein, 468 aa, Oryza sativa
  Clone ID: TF_OSC400358j.C1.p1.fg
MPLEDAHLIWNTLEERYDKSECDEAKLAIEEPLVECSNSSTICKEPQVILSNEQDSLATFTSSPTHVSIKGNEMVSSVNVDTSTSYSACRTNLLKVEVCGKKWPSEEFTSPRCSSSHLDEYSCIMEKSYLEKENLELKAQLVELTSKHVDLQEKYDELLCSHGNLVDSHAMLEVTHEVIIITVKSYVPHVQVDFTCANSCCSQANIFLRTTCDLDYVGKKDKYIDHGFVCNAQPSQDNRESMLKKLEKGSTVACTKFYQEDNKSNNKSKGQDQSKNKASITCFKCKKMGHHVRDCPWKKQKKLSKNEDLAHKFFKSTKEGHFASSCPCKIDDEATLPRKTSRINRRKCYGCIEKGHEIGFCPHKKDDHSNRSSKRQTGNKQVKKQDKSKTQLCYNCRAKGHIGKNCPIGKIPKPNLSFHHNLLRKAKNGTCATRVISSLHASTKAIWVPKSLVTNIHGPNVIWVPKYA

SEQ ID NO: 19823 - protein, 1496 aa, Oryza sativa
  Clone ID: TF_OSC400459j.C1.p7.fg
MSSVVGKEVVDASSLITKGDMKDLLEDLLKMGMIGQRNVAGGSKLKLEVMPSELRLEGSKNYLSWCRRAQLMLRAKGVDHFLQEGCEEPSDKESQAWRTWNTTNLTVMLLKHEEDIVIGNKWMQRRRVIHFLKGLNKEFEDRRAAMFHQATLPTMEEVIFAMVQEMRLKLMRGTNLTRSAYTVADNRECYNCGQVGHVSYNCPTPRNIGGRGLIRGGHGGFGGTRGGFGGDRGGFGGNRGGRGGDWRGRGGGRGRTEVLLRPMQPLRREKGLGGGLGLESGVMGCGTSIMRNWIGWHFWDGVVVMVNLSSFLLLPPNNYLNYPHWLHLSPPLSAWDGVRGVAASATGGTTVPVINPAVSAADPASVVGEKLKAAVLAANPVLAASAMGGGSIGHVGGRRGGRSCVRSGVDSGWGGLFNAIDTILIIGRGAFSIAIMELVMGAMENLIPKLGELLKEEYVMQSGVREKIQSVSRELESIHAALRKIGKVPWEHLDDELRLWAHDLREASYDMEDIIDSFLVRVDGHEASEVHWFKWFLEKMTNQFNKIKASHEIGVAMKEIDEKLQEVATRHARYTIDNIAINPAGPATVDPRLLSMYKTLAELVGIEGPMDELMKMLDIDLPTKKRKIEIDVSVRKPKMVSIFGFGGLGKTTLAKAVYDKLKPSFDSGAFIPVGQNPNIRKVFRDILMDLDKQSYNDLNLKLLDERQLINKLQEFLQKKRCFVVIDDIWDKDSWRLIRCALQDSNHESRVVTTTRIYEVATQVGEVYKMHPLSHDESKKLLYTRIISGEGESLRSTSVEACDKILKKCGGVPLAIIIIASLLANKPREYWSEVYNSIGLEHGYNDDVDNTRRILSLSYYDLPLHLKPCLLYLSIFPEDYYIEKNLLIWKWIAEGFVHEKQAAKLGLFETGEGYFNELINRSMIQPVEHEYSGYMCGCRVHDMVLDLILLLSGEENFVTVVDGSKEHELSWKNARRLALQHWSFEENRNQLANMGVKQTRSLIMTECFDKNMQLPSFQVLRVLEIQKQGRWWNIDGKINLQHVRNLLHLRFLHLDCIDSIPLIEQFRNLRFLQVLHLKESNIQELPESVGLLTKLLSLRVDIDVRVSPGVIEKLTSLQELYLWPYSDDTFQFVKVLGKLRELRVLHAKNLKLDGQGETSALLESLCNLHKIQTLDIDLNLNPNEGVTWDAGFTSPQCLRYLCLVSLRFHRMPEWINWSLLPNLSYLELRVNFLEELDLETLGRLPKLRYLHLFIHCDRIVSIGKIAGAGDACFQELRFLNTPYLYVRFDQHGIMCSKDEKAVMPNVKTLSFCVYVRILKDTDILGFDKLFSFAHLGRSSLQQVQVNIQCRGARAMEVEEAEAALAHAAAIHPNRPTLQIHKFSEGEMLPPHEEPSSFFPKVVVENLNAHERKDDDLRFVLGQMLQRNPCVKKFSVSINCENACLEEVEKAEAAARYAVDFHANRPTLELVKYGEDKMVLSGQHQQVCTPGCLSDSNP

SEQ ID NO: 19824 - protein, 300 aa, Oryza sativa
  Clone ID: TF_OSC401179j.C1.p20.fg
MARVYVGNLDPRVTAREIEDEFRVFGVLRSVWVARKPPGFAFIDFDDRRDAEDAIRDLDGKNGWRVELSTKAGSGRGRDRSGGSDMKCYECGEPGHFARECRLRIGSGGLGSGRRRSRSRSRSPRYRGRSRSRSPRYRRSPSYGRRSYSPRDRSPKRRSYSRSPPPARARSYSRSPPPPRAALFACCGCRNIRGLHMLLDVSTASGCAVVTVLRHFPGSQLFWSSSHILLQHSLYHASRHHCHDHMRYMCTTPTPGTGTPIRRFTWLCAKAVYASTEVTWLHYAAAAIKLPWHLQQKRLQ

SEQ ID NO: 19825 - protein, 1422 aa, Oryza sativa
  unsure (1)..(1422): unsure at all Xaa locations
  Clone ID: TF_OSC401225j.C1.p6.np
KLELMPNELRLEGSKNYLSWCRRAQLMLRAKGVDHFLLESCEEPSDKESQAWRTWNTTNSTVVSWLMNVAPSIGRMIEAIQNAAVVWKTLSNMYSGEGNVMMMVEAQNKVENLKQERRTVKEYASELQQLWANLDHYDPLQLKHEDDIVIGNKWLQRRRVIHFLKGLNKEFEDRRAAMFHQATLPTMEEAISAMVQEEMRLRLMRGNSIRSAYIAADNRECYNCGQVGHVSYNCPTSRNIGGRGSIRGGHGGTRGGFGGDRGGFGGNRGGRGGDRGGRVTNESSNTTTHFGNFANYAQVGEGTQAQALASTXTSYWIIDSGASKHVTGLHNTFTSYTPYIHSETIQIADGTSKPIHGIGSVECTSSMNLSSVLHVPSFPVNILSVSSAIDQLKCIVVFDENSCLFQEKGTGRRIGTGVRRDGLWYINHEELGLAAVVGDVEKEISLLHCQLGHPSFEILSKLYPDLFSRVDKHRLVCDACELGKHTRSTYVGIGLRNCEPFILIHSDVWACPVTSVSGFKWFVTFIDCHTRMTWIYMLKHKSEVLRCFQDFHKLVTTQFDAKVKIIRTDNGTEYINNEFVSYVSDEGIIHQTTCPGTPPQNGVAERKNRHLLEVARSLMFQMNVPKYLWSEAVMTAAYLINRMPSRILGMKSPAELLLGKREFKVPPKVFGCVCFVRDHRPSVGKLDPHAVKCVFVGYASSQKGYKCWDPIERRLFVSMDVTFREFEPYYKSKGDLDQFLEEFSTVMEVDRGERERGDIHEKNVGDKNGEAVVIGSIPCSIDDASKEDREMVPHEEDDREMVPHEEDGEEGEVVVGTIPCPMEGAERVKQKDVLVYQRRRFESGGEKKRVTLEHVELPLAQRRETRSNASRPPIRLGFEHLSSMHDIANYITYSHVSPAYKTFIASLQTVPIPKDWKCAKQDPKWKDAMKEELNALVKNKTWELVKLPPEKRTVGCKWVFTVKQTPEGKVDRYKARLVAKGYSQTYGIDYDEIFAPVAKMGTVRGLVSCAVNFGWPLHQLDVKNAFLHGDLHEEVYMEIPPGFGNSQTVGKVCKLKKSLYGLKQSPRAWFDRFRHAVCDMGYSQCNGDHTIFYKHRGTHITILAVYVDDIVITGDDVEEIRCLKERLGKAFEVKDLGPLRYFLGIEIARSSKGIVLSQRKYVLDLLTDIGMLGCRASTTPIDRNHQLCAQSGDPVDKEAYQRLVGRLIYLCHTRPDISYAVSVVSRYMHDPRTGHLDVVHKILRYLKGTPGKGLWFRKNGHLNVEGYCDADWASSMDDRRSTSGYCVFVGGNLVSWRSKKQAVVARSTAEAEYRAMALSLSEMLWMRSLLTELRVLRSDTVMLHCDNKSAISIANNPVQHDRTKHVEIDRFFIKEKIDSGVIRLEYIKSCEQLADCLTKGLGPSEIQSICNKMGMIDIFCPS

SEQ ID NO: 19826 - protein, 1082 aa, Oryza sativa
  Clone ID: TF_OSC401276j.C1.p5.fg
MSSGVGKEVVDASSVVTKGDMKDLLENLLKMGMIGPKSVAGGFELKLELMPNELRLEWSKNYLSWCRRAQLMLRAKGVDHFLQESCEEPSDKESQAWRMWNTTNSTVVSWLMTSVAPSISRMIETIQNAAIVWKTLSNMYSGEGNVMMMVEAQNKMQRQRVIHFLKGLNKEFEDRRAAMFYQATLPTMEEAISAMVQEEMRLKLMRGTNPTRSAYTVADNRECYNCGQVGHVSYNCPTPRNIGGRGLIRGGYGGFGGTRGGFGGDRGDFGGNHSGRGGRGGDRGGGGRGEQVTQWEEWQKNKINESSNTTTHFGNFANYAQVGEGIQAQALASTYRHPIDWIIDSGASKHFTGLHNTFTSYTPYVHSETIQIADGTSKPIHGIGSVECTSSINLSSDLHVPSFPVNLLSVSSAIDQLKCIVVFDENSHLFQEKGTGRRIGTRVRCDGLWYINHEELGLAAVVGNVEKEISLLHCQLGHPSFEILSKLYLDLFSKVDKHRLVCDACELGKHTRSTYVGIGLRNCEPFILIHSDVWGPCPVTSVSGFKWFVTFIDCHTRMTWIYMLKHNSEVLRCFQDFHKLVTTQFDAKVKIIRTDNGTEYINNEFVSYISDEGIIHQTSTPPQNGVAERKNRHLLEVARSLMFQMNVPKYLWSEAVMTAAYLINRMPSRILGMKSPVELLLGKREFKVPPKVFGCVCFVRDHRPSIGKLDPHAVKCVFVGYASSQKGYKCWDPIGRRLFVSMDVTFREFEPYYKSKGDLDQFLEEFSTVMEVDSREGEIERGDTHRKNVSDKNGETVVVGSIPCSIDNASKEAVEVIGDTQDKDREMVLHEEDGEDGEDEEVVVGTIPCPMERAEKTVPIPKDWKCAKQDPRWKDAMREELNALMKNKTWELVKLPPGKKAVGCKWVFTVKQTPEGKVDRYKARLVAKGYSQTYGIDYDETFAPVAKMGTVRTLVSCAVNFGWPLHQLDVKNAFLHGDLYEEVYMEIPPGFGNSQTVGKICKLKKSLYGLKQFPRAWFERFRCAVCDMGYSQCNGDHTVFYKHRGTYITILAVYVDDIVITGDDVEEIRCLKEWTPKCRRIL

SEQ ID NO: 19827 - protein, 1554 aa, Oryza sativa
  Clone ID: TF_OSC401564j.C1.p7.fg
MSSGEGKEVVDTSLLVTKGDMKGLLEDLLKMGMIGPRNAAGVSEVKLELMPNELRLEGSKNYLSWCRRAQLMLRAKGVDHFLLESCEEPSDKESQAWRTWNTTNSTVVSWLMTLVAPSIGRMIEAIQNAAVVWKTLSNMYSGEGNVMMMVEAQNKVENLKQEGRTVQEYASELQQLWADLDHYDPLLLKHEDDIVIGNKWLQRRRVIHFLKGLNKEFEDRRAAMFHQATLPTMEEAISAMVQEEMRLRLMRGTNPIRSAYIAADNRECYNCGQVGHVSYNCPTSRNIGGRGSIRGGHGGTRGGFGGDRGGFGGNRGGRGGDRGGRVGGRGRGRGVPQANAATEDGKAVTLIGEQVTQWEEWQKNKTNESSNTTTHFGNFANYAQVGEGTQAQALASTYRHPIDWIIDSGASKHVTGLHNTFTSYTPYIHSETIQIADGTSKPIHGIGSVECTSSMNLSSVLHVPSFPVNLLSVSSAIDQLKCIVVFDENSCLFQEKWTGRRIGTGVRRDGLWYINHEELGLAAVVGDVEKEISLLHCQLGHPSFEILSKLYPDLFSRVDKHRLVCDACELGKHTRSTYVGIGLRNCELFILIHSDVWGPCPVTSVSGFKWFVTFIDCHTRMTWIYMLKHKSEVLRCFQDFHKLVTTQFDAKVKIIRTDNGTEYINNEFVSYVSDEGIIHQTTCPGTPPQNGVAERKNRHLLEVARSLMFQMNVPKYLWSEAVMTAAYLINRMPSRILGMKSPAELLLGKREFKVPPKVFGCVCFVRDHRPSVGKLDPHAVKCVFVGYASSQKGYKCWDPIGRRLFVSMDVTFREFEPYYKSKGDLDQFLEEFSTVMEVDSREGERERGDIHEKNVGDKNGEAVVIGSIPCSIDDASKEVVEVIEDTQDEDREMVPHEEDGEEGEVVVGTIPCPMEGAERVKQKDVLVYQRRRFDSQGEKRKGLVQSQIEELPHQKCPVPESSQSLSPPASLASLETIGNTSPTLEHVELPLAQRRETRSNAGRPPIRLGFEHLSSMHDIANYITYSHVSPAYKTFIASLQTVPIPKDWKCAKQDPKWKDAMKEELNALVKNKTWELVKLPPEKRAVGCKWVFTVKQTPEGKVDMYKARLVAKGYSQTYGIDYDETFAPVAKMGTVRALVSCAVNFGWPLHQLDVKNAFLHGDLHEEVYMEIPPGFGNSQTVGKVCKLKKSLYGLKQSPRAWFDRFRHAVCDMGYSQCNGDHTVFYKHRGTHITILAVYVDDIVITGDDVEEIRCLKERLGKAFEVKDLGPLRYFLGIEIARSSKGIVLSQRKYVLDLLTDTGMLGCRASTTPIDRNHQLCAQSGDPVDKEAYQRLVGRLIYLCHTRPDISYAVSVVSRYMHDPRTGHLDVVHKILRYLKGTPGKGLWFRKNGHLNVEGYCDADWASSMDDRRSTSGYCVFVGGNLVSWRSKKQAVVARSTAEAEYRAMALSFSEMLWMRSLLTELRVLRSDTVMLHCDNKSAISIANNPVQHDRTKHVEIDRFFIKEKIDSGVLRLEYIKSCEQLADCLTKGLGPSEIQSVCNKMGMIDIFCSS

SEQ ID NO: 19828 - protein, 1647 aa, Oryza sativa
  Clone ID: TF_OSC415902j.C1.p18.fg
MSSGEGKEVVDTSLLVTKGDMKGLLEDLLKMGMIGPRNAAGVSAVKLELMPNELRLEGSKNYLSWCRRAQLMLRAKGMDHFLLESCEEPSDKESQAWRTWNTTNSTVVSWLMTSVAPSIGRMIEAIQNAAVVWKTLSNMYSGEGNVMMMVEAQNKVENLKQEGRTVQEYASELQQLWADLDHYDLLQLKHEDDIVIGNKWLQRRRVIHFLKGLNKEFEDRRAAMFHQATLPTMEEAISAMVQEEMRLRLMRGTNPIRSAYIAADNRECYNCGQVGHVSYNCPTSRNIGGRGSIRGGHGGTRGGFRGDRGGFGGNRGGRGGDRGGRVGGRGRGRGVPQANAVKEDGKAVTLIGEQVTQWEEWQKNKTNESSNTTTHFGNFANYAQVGEGTQAQALASTYRHPIDWIIDSGASKHVTGLHNTFTSYTPYIHSETIQIADGTSKPIHGIGSVECTSSMNLSSVLHVPSFPVNLLSVSSAIDQLKCIVVFDENSCLFQEKRTGRRIGTGVRRDGLWYINHEELGLAAVVGDVEKEISLLHCQLGHPSFEILSKLYLDLFSRVDKHRLVCDACELGKHTRSTYVGIGLRNCEPLILIHSDVWGPCPVTSVSGFKWFVTFIDCHTRMTWIYMLKHKSEVLRCFQDFHKLVTTQFDAKVKIIRTDNGTEYINNEFVSYVSDEGIIHQTTCPGTPPQNGVAERKNRHLLEVARSLMFQMNVPKYLWSEAVMTAAYLINRMPSRILGMKSPAEQLLGKREFKVPPKVFGCVCFVRDHRPSVGKLDPHAVKCVFVGYASSQKGYKCWDPIGRRLFVSMDVTFREFEPYYKSKGDLDQFLEEFSTVMEVDSREGERERGDIHEKNVGDKNGEAVVIGSIPCSIDDASKVVEVIEDTQDEDREMVPHEEDGEEGEVVVGTIPCPMEGAERVKQKDVLVYQRRRFDSQGEKRKGLVQSQIEELPHPKCPVPESSQSLSPPASLASLETIGNTSPTLEHVELPLAQRRETRSNAGRPPIRLGFEHLSSMHDIANYITYSHVSPAYKTFIASLQTMPIPKDWKCAKQDPKWKDAMKEELNDLVKNKTWELVKLPPEKRAVGCKWVFTVKQTPEGKVDRYKARLVAKGYSQTYGIDYDETFAPVAKMGTVRALVSCAVNFGWPLHQLDVKNAFLHGDLHEEVYMEIPPGFGNSQTVGKVCKLKKSLYGLKQSPRAWFDRFRHAVCDMGYSQCNGDHTVFYKHRGTHITILAVYVDDIVITGDDVEEIRCLKERLGKAFEVKDLGPLRYFLGIEIARSSKGIVLSQRKYVLDLLTDTGMLGCRASTTPIDRNHQLCAQSGDPVDKEAYQRLVGRLIYLCHTRPDISYAVSVVSRYMHDPRTGHLDVVHKILRYLKGTPGKGLWFRKNEHLNVEGYCDADWASSMDDRRSTSGYCVFVGGNLVSWRSKKQAVVARSTAEAEYRAMALSLSEMLWMRSLLTELRVLRSDIVMLHCDNKSAISIANNPVQHDRTKHVEIDRFFIKEKIDSGVLSLEYIKSCEQLADCLTKGQIVYSSGGRIKHTAAVPICGYTDQIEVCAQHLVANRDSYRLKHIAYQIHDMNMCLVVSKCGQEERLSVVSCVCLDEKGIGGQGPPCLADNTEAAELLGWEPHQDVEQHVQREDARI

SEQ ID NO: 19829 - protein, 1713 aa, Oryza sativa
  Clone ID: TF_OSC900306j.C1.p19.fg
MGWGVACHTPPDTRAASGHVAVVLSITWPVTDRFFVIIDDIWDRKSWELIRCAVQDSKLGSRVVVTTRIFEIATHRGEKEKKEMSSVVGKEVVDASSLITKGDMKDLLEDLLKMGMIGQRNVAGGSKLKLEVMPSELRLEGSKNYLSWCRRAQLMLRAKGVDHFLQEGCEEPSDKESQAWRTWNTTNLTVMLLKHEEDIVIGNKWMQRRRVIHFLKGLNKEFEDRRAAMFHQATLPTMEEVIFAMVQEMRLKLMRGTNLTRSAYTVADNRECYNCGQVGHVSYNCPTPRNIGGRGLIRGGHGGFGGTRGGFGGDRGGFGGNRGGRGGDWRGRGGGRGRTEVLLRPMQPLRREKGLGGGLGLESGVMGCGTSIMRNCKFRHWLHLSPPLSAWDGVRGVAASATGGTTVPVINPGRFRGGSSISGGRETEGGRSCSEPSVGGIGNGRGRGAFSIAIMELVMGAMENLIPKLGELLKEEYVMQSGVREKIQSVSRELESIHAALRKIGKVPWEHLDDELRLWAHDLREASYDMEDIIDSFLVRVDGHEASEVHWFKWFLEKMTNQFNKIKASHEIGVAMKEIDEKLQEVATRHARYTIDNIAINPAGPSTVDPRLLSMYKTLAELVGIEGPMDELMKMLDIDLPTKKRKIEIDVSVRKPKMVSIFGFGGLGKTTLAKAVYDKLKPSFDSGAFIPVGQNPNIRKVFRDILMDLDKQSYNDLNLKLLDERQLINKLQEFLQKKRCFVVIDDIWDKDSWRLIRCALQDSNHESRVVTTTRIYEVATQVGEVYKMHPLSHDESKKLLYTRIISGEGESLRSTSVEACDKILKKCGGVPLAIIIIASLLANKPREYWSEVYNSIGLEHGYNDDVDNTRRILSLSYYDLPLHLKPCLLYLSIFPEDYYIEKNLLIWKWIAEGFVHEKQAAKLGLFETGEGYFNELINRSMIQPVEHEYSGYMCGCRVHDMVLDLILLLSGEENFVTVVDGSKEHELSWKNARRLALQHWSFEENRNQLANMGVKQTRSLIMTECFDKNMQLPSFQVLRVLEIQKQGRWWNIDGKINLQHVRNLLHLRFLHLDCIDSIPLIEQFRNLRFLQVLHLKESNIQELPESVGLLTKLLSLRVDIDVRVSPGVIEKLTSLQELYLWPYSDDTFQFVKVLGKLRELRVLHAKNLKLDGQGETSALLESLCNLHKIQTLDIDLNLNPNEGVTWDAGFTSPQCLRYLCLVSLRFHRMPEWINWSLLPNLSYLELRVNFLEELDLETLGRLPKLRYLHLFIHCDRIVSIGKIAGAGDACFQELRFLNTPYLYVRFDQHGIMCSKDEKAVMPNVKTLSFCVYVRILKDTDILGFDKLFSFAHLGRSSLQQVQVNIQCRGARAMEVEEAEAALAHAAAIHPNRPTLQIHKFSEGEMLPPHEEPSSFFPKVVVENLNAHERKDDDLRFVLGQMLQRNPCVKKFSVSINCENACLEEVEKAEAAARYAVDFHANRPTLELVKYGEDKMVLSGQHQQVLKRTKTGFHPAATLEGVRRHGNALRRLERHHCRPGQGRAWFSPVVHRLLIKSCSPLLQLPTLHRQYVNIAAPTPLVGQPPLPPCRPPTRRHRIAGKPLPPPVVPPCAVLASAVTDHTSSCRANFHDHCGTAGSLRCHLHALPCRPPPLPACAGCALPSSAAPARVGRPSSASIAAYMPTSASAATWTLALAASRLSMTKFGNISIGDED

SEQ ID NO: 19830 - protein, 525 aa, Oryza sativa
  Clone ID: TF_OSC900373j.C1.p7.fg
MECRGSRGFGSSMNIKSKSKVGIDQSKGAVFENGSTRDRESHLEVLSGTSWHQGEVEKFHKCCPEVPGTFTRKLLAGFQFKLDAHLIWNTLEERYDKSECDEAKLAIEEPLVECSNSSTICKEPQVILSNEQDSLATFTSSPTHVSIKGNEMVEVCGKKWPSEEFTSPRCSSSHLDEYSCIMEKSYLEKENLELKAQLVELTSKHVDLQEKYDELLCSHGNLVDSHAMLEVTHEVIIITVKSYVPHVQVDFTCANSCCSQANIFLRTTCDLDYVGKKDKYIDHGFVCNAQPSQDNRESMLKKLEKGSTVACTKFYQEDNKSNNKSKGQDQSKNKASITCFKCKKMGHHVRDCPWKKQKKLSKNEDLAHKFFKSTKEGHFASSCPCKIDDEATLPRKTSRINRRKCYGCIEKGHEIGFCPHKKDDHSNRSSKRQTGNKQVKKQDKSKTQLCYNCRAKGHIGKNCPIGKIPKPNLSFHHNLLRKAKNGTCATRVISSLHASTKAIWVPKSLVTNIHGPNVIWVPKYA

SEQ ID NO: 19831 - protein, 943 aa, Oryza sativa
  Clone ID: TF_OSC9929j.C1.p2.fg
MSSGVGKEVVDASSVVTKGDMKDLLENLLKMGMIGPKSVAGGFELKLELMPNELRLEWSKNYLSWCRRAQLMLRAKGVDHFLQESCEEPSDKESQAWRMWNTTNSTVVSWLMTSVAPSISRMIETIQNAAIVWKTLSNMYSGEGNVMMMVEAQNKMQRQRVIHFLKGLIKEFEDRRAAMLYQATLPTMEEAISAMVQEEMRLKLMRGTNPTRSAYTVADNRECYNCGQVGHVSYNCPTPRNIGGRGLIRGGYGGFGGTRGGFGGDRGDFGGNHSGRGGRGGDRGGGGRGRGEEKGTGRRIGTRVRCDGLWYINHEELGLAAVVGNVEKEISLLHCQLGHPSFEILSKLYLDLFSKVDKHRLVCDACELGKHTRSTYVGIGLRNCEPFILIHSDVWGPCPVTSVSGFKWFVTFIDCHTRMTWIYMLKHNSEVLRCFQDFHKLVTTQFDAKVKIIRTDNGTEYINNEFVSYISDEGIIHQTSTPPQNGVAERKNRHLLEVARSLMFQMNVPKYLWSEAVMTAAYLINRMPSRILGMKSPVELLLGKREFKVPPKVFGCVCFVRDHRPSIGKLDPHAVKCVFVGYASSQKGYKCWDPIGRRLFVSMDVTFREFEPYYKSKGDLDQFLEEFSTVMEVDSREGEIERGDTHRKNVSDKNGETVVVGSIPCSIDNASKEAVEVIGDTQDKDREMVLHEEDGEDGEDEEVVVGTIPCPMERAEKTVPIPKDWKCAKQDPRWKDAMREELNALMKNKTWELVKLPPGKKAVGCKWVFTVKQTPEGKVDRYKARLVAKGYSQTYGIDYDETFAPVAKMGTVRTLVSCAVNFGWPLHQLDVKNAFLHGDLYEEVYMEIPPGFGNSQTVGKICKLKKSLYGLKQFPRAWFERFRCAVCDMGYSQCNGDHTVFYKHRGTYITILAVYVDDIVITGDDVEEIRCLKEWTPKCRRIL

SEQ ID NO: 19832 - protein, 126 aa, Oryza sativa
  Clone ID: TF_OSC30459j.C1.p3.gp
GVTCFNCGGKGHYSNKCPQKQKQHGVRSTNAAAMKDKTPNLTGVTCFDCGDRGHFSYTCPQNLLEVMLTAELEPHDDTYERQPKADNGTVPTVLSLNCGEASHCGRNNPMKSLESSSDKINSTAMT

SEQ ID NO: 19833 - protein, 402 aa, Oryza sativa
  Clone ID: TF_OSC23022j.C1.p2.fg
MADNEKGNKVRSQDIGTSSSRVNEAPDTSCVTLVQHLINQNRLLIEILQQHQTPILNLSQIQPQVQLEAVQALTPQVSMPPASRRTHGDVPHVDPKEASNICFMCDEQGHYARERPQQKRKTPMRTEDEVRKMIITSTEWPPPGMTRRQRRNTFRGAPQLTEHLLANGGRVSDSEDSDQVSSDDEDEMERKACSRCGEIGHVASSCATICVHCEEDHPPDRCPTSRITCFFCEGTDHVPKDCQFSFLLTKKMVNQPASSNGEKHQGNTNPRQNYSLSLNPVPGQRNQNEKWKCRVREDICCFNCQGMGHFADKCPRPRNIAASMSVPATPCNQKLAPQRIVIHAARSSPIDRVATAPTPASALPPGVNAQFQPQPSVYKTEASIGIVSLDVPAQQPKKSSIR

SEQ ID NO: 19834 - protein, 850 aa, Oryza sativa
  Clone ID: TF_OSC408350j.C1.p3.fg
MADNEKGNKVRSQDIGTSSSRVNEAPDTSCVTLVQHLINQNRLLIEILQQHQTPILNLSQIQPQVQLEAVQALTPQVSMPPASQKTHGGVPHVDSKEASIICFMCDEQGHYARNCPQQKGKTPMRTEDEVRKMIITSTEWPPPGMTKRQRRNTFRGAPQLTEHLLANGGRVSDSEDSDQVSSDDEDEKSPQGFNQNKMERKACSRCGEIGHVASSCASTCVHCEEDHPPDRCPTSRITCFFCEGTDHVPKDCQFSLLLTKKMANQPASSNGEKHQGNTNPRQDYSFSLTPVPGQRNQNEKRKCRVREDICCFNCQGMGHFADKCPKPRDIAASTPIARVATAPTPASALPQGVNAQFQPQPPVDKTEASIGIVPLDVPAQQPRNQNWNNPAGATNVQVPTVQQQCKLSEFLKTETPTFAIAVEPMEASDWLRTVEKKLGLIQCTDQERVVFATHQLVGLASELWDSYEASRPEGHTITWDEFSLVFKRSHVPAGMITLRKREFRYLKQEDLTVTEYLHEFHRLAHYAPEDVENDEDKQEKYLQGLKDEIAVQLLLEEYEDFEKLNCKRRIVSIPVFPCGNQRQRTEPLQITGSSVAHQEFPPQEDGHNADNNISNTNDDDTTNNHASCPISDHSNQACNVNIIHQGVDDSINDGTQNDNPSNCDSKKDSNGDSNYGTTDANVSKDFQPPIPTPSQNDRPQTDSSAKKTLICYNCKEPGHYSRDCLQPRQSRPPHYRQFTRSRHPNRIVVTGANAVPVSLKDSTPKDLIAPEASSTPGAKSTWLRKVESGNLYEVDSEDMNHEKFWNGSIIKLPQPSLSQLKGAPWFKSGEEKIPSATGGQAKQFRVVKFC

SEQ ID NO: 19835 - protein, 658 aa, Oryza sativa
  unsure (1)..(658): unsure at all Xaa locations
  Clone ID: TF_OSC9374j.C1.p4.np
VKESGSSTNYPVLTKTNYNDWALLMKIKLRARCLWDAVECGPVELHEDRMALDGICSTVPPEMISTLATKASVKEAWDCIKTMRVGDDRIRKASAQRVRTEYERIVFRDGXSVEDFAMRLTSVVNQLATLGDPEPDDKVVEKYLRVARPMFSQLVLSIETLLDISTLSLEEITGRLKAAEDYQPPPSSQNTDGKLYLTEEEWLECHKKEQEAKRSGAGSSGRNKRRGRKGCTGQLGWAPVRAPGRRRRGRVSVATTSSLAHRDDKCRNCGKLGHWAKECRSKPKHEDQAHVAQDEPTLMLLTGGCVETPPATPAPQCVCIELVEKKVFTALDTGGCVETPPATPAPQCVCIELVEKKVFTALDDEADRDRSWIMDSGASNHMTGCRAAFSDLDTSVTGNVRLGDGSIVPIEGRSTVLFTCKNGEHRTLANTYFLPWLAANIVSIGQLHKTGFQVLVEDGIMRVRDEQWRLLTQIPRSPGRLYVLDIKLARPVCLTARPGENAWRWHARFGHINFTALRKMSRETLVRGLPLLMHVDQVCEACLAGKHRRAPFPQRVLSRSNEPLQLLHGDLCSPISPATPSGNRYFLLLVDDYSRFMWIKLLLSKDVAPAAIKQIQAAAESKGKLLCALRTDRGGEFTADHFIVMTESNCISKHYTHQ

SEQ ID NO: 19836 - protein, 437 aa, Oryza sativa
  Clone ID: TF_OSC401000j.C1.p11.fg
MASRDIVHTGGDPPMFDGTNYAQWKIHMISYFTAMSPKIWWIVDVGFSHALDDHAPTSGQDKCLHLDAQATNALFCGLSDDMFNEVCNLKSAHAMWVKLKEKYEVPTLVENGCTQESMSGEDSTSSSDDEELPIPSTSPHCLMTNCKNEVKNDSLDSIIENTCVVDDGGDDDEPSYDDLFNILREATSSCSTSKASVSTSCDDLLDVPCSSSIDENSCSSSSMYIVANLVEENKQLQAQVKDLKEDLDRSYKGKNTLDEILSKQKSTNDKCGLGFHRKENAKKTRHMPRYARKHAYLRNDGKKNVSKNHPHITCFGCHEKGHFASVCANMKDEKCNFKLRQTGKKQDKTTSHRGQNLTCYNCRKKGHIGKNCPIGNTPKPNIIFDDYVLRKNRQGNVFARYVGLPRLAPRRRTIWVPRILVTNIDGPNFVGDQNVPK

SEQ ID NO: 19837 - protein, 543 aa, Oryza sativa
  Clone ID: TF_OSC900175j.C1.p8.fg
MADNEKGNKVRSQDIGTSSSRVNEAPDTSCVAVVQHLINQNKLLIEILQQHRMPILNPSQMQPQVQLEAVQALTPQVSAPPTSQKAPHAMPHVDPKEASIICFMCDEQGHYARNCPQQKRKAPMRTEDEVRKMIITSTEWPPPGMTKHQRRNSFRGAQQLTEHLLANGGRVSGSEDSDQVSSDDEDEKSPQGFNQNKIELKACSRCGEIGHVASSCASTCVHCEEDHPPDRCPTNKITYFFCEGTDHVPKDCQFSFLLTKKMANQPASSNGEKHQGNTNPRQDHRFSLTPVPGQRNRNEKRKCRVREDICCFNCQGMGHFADKCPKPRNIAAGTSVHATPCNQKLAPQRIVIHASRSSPIARVATAPIPMNALPQGVNAQFQPQPPADKTGASICVVPLEVPIQQLRNQVQDEEPELKKGITPKTVPNQGKIDLHITANLHEADIPIVLWSLEQTPYPGNLSEVDSEDMNHEKFWNGSITALPQPSLSQPKGAPWSKSGEEEIPPATGGQAKQFRVVKFCWKFVKTQRKKSDKKRRPPNLSSC

SEQ ID NO: 19838 - protein, 227 aa, Oryza sativa
  Clone ID: TF_OSC101455j.C1.p23.gm
MAGFADALRPDKFSGVHFKRWQIRVTLWLTAMKCFWVSTGKPEGILIADQQKQFEEATTLFVGCILSVLGDRLVEVYMHMTDAKELWDALNTKFGATDASNDLYIMEQFHDYKMTDNRSIVEQAHEIQTMAKELELLNANVVHKAQNKSKGKYKAQQTTNFKKKKKNNNNPNQDERTCFMCGQPGHLARKCPQRKGMKAPAGQTSKSANVTIGNTGDGGGSHGVPSS

SEQ ID NO: 19839 - protein, 1166 aa, Oryza sativa
  Clone ID: TF_OSC3174j.C1.p1.fg
MAGFADTLRPDKFTGVHFKRWQIRVTLWLTAMKCFWVSTRKPEGILTAPQQKQFEEATTLFVGCILSVLGDRLVEEKAREKDAASKGDGGQSSANVVHKAYNKSKGKYKAQQTTNFKKQKKNNNNPNQDERTCFVCGQPGHLAKKCPQRKGMKAPAGQTSKSANVTISNTGDGSGYGNLPTVFSVNQSTNWWVDTGANVAWGSTVLMGNGSHASVHGVGTVDLKFTLGKIMNLVSGSCLTRDGFKLVFESNKVVVSKHGYFIGKDYECGGLFRFSLSDFCNKPVNHICGSVDDEANVWHSRLCHINFGLMSRLSSMRLIPKFSIVKCSKCHSCVQPKQPRKPHKAAEERNLAQLELLHSDLCEMNGVLTKGGKRYFMTLIDDATRFCYVYLLKTKDEALDYFKIYKAEDENQLDRKIKRLRSDRGGEFFSNEFDLFCEEHGIIHERTPPYSPESNGIAEKKNRTLTDLVNAMLDTAGLPKAWWGEALLISNHVLNRVPNRNKDKTPYEIWIGRKPSLSYLRTWGCLAKVNVPITKKRKLGPKTVDRVFLGYAHHSIAYRFLIVKSEVPDMHIGTIMESRDATYFESFFPMKDTYSGSSQPSEIIPSSITPPEQTEHLYEHVTKEDVSEAPRRSKRQRTAKSFGDDFTVYLVDDTPKSISEAYASPDADYWKEVVRSEMDSIIANRTWEVTERPYGCKPVECKWVFKKKFRPDGTIEKYKAQLVAKGYTQKEGEDFFDTYSPIARLTTIRVLLSLAASNGLLVHQMDVKTTFLNRELDEEIYMDQPDGFVVEGQEGKVCKLLKSLYGLKQASKQWHEKFDKTLTSAGFAVNEADKCVHYRHGGGEGVILCLYVDDILIFGTNLEVINEVKSFLSQNFDMKDLGVADVILNIKLIKGENGITLLQSHYMEKILNSFGYIDSKASPTPYDTSLLLRKNKRIARNKLEYSQIIGSLIYLASATRPDISFAVSMVSRFTSNPGDDHWRALERVMRYLKGTMELGLHYSGYPAVLEGYSDSNWISDVDEIKATSGYVFTLGGGAVSWRSCKQTILTRSTMEAELTALDTATIEAEWLRDLLMDLPIVEKPVPAILMNCDNQTVIVKVDSSKDNMKSSRHVKKRLKSVRKLRNSGVITLDYIQTARNLADPFTKGLSRNVIDNASKEMGLSPM

SEQ ID NO: 19840 - protein, 79 aa, Oryza sativa
  Clone ID: TF_OSC34965j.C1.p1.gm
KKNPHASPNNKKVKPDVKPKAAANFKKKGKGKAKGACFVCGKSGHWAKDCPERKDRKSANMVGKRFLLVDGKRVACGCS

SEQ ID NO: 19841 - protein, 434 aa, Oryza sativa
  unsure (1)..(434): unsure at all Xaa locations
  Clone ID: TF_OSC400343j.C1.p1.np
MAPQPICQTCALNYLGSNEDPALSENPNQLAEQVTNQVAKTDDTVPGPNKEVANSGQSDSDKATEIQGLQSVSGQSDSDKATEIQGLQSVEDTDTNKEKNKXFLNVMITGMKTPLRAHDYPNFQNSIDKSLLQEYSTVKEGSGHKRKTSPSEVDMQDVPQCQTMQPCQDIPKYPTLKSKKIRHVPGLICFICHEIGHYMRHCPQKPYMDALLQANMRTSRTPFYPQGSPNSQNVNTVRPTSPDDKRAKASCDMCQDIQEKKEMQEYKKRKVSSVEIQERESSRQKKNPPVQHNQGASQYPNSSGYMPRSTVSESSQHATMINSNSHEGSNSVSCPPPSKRRGYKAGVECFICHEMGHYSWDCLQKVKSKKVQPTTSLPNVSGQKNSKPPNNGSVSLTSPPVEQNRLNQVQEETNGEVMNLKQVEQNAQKERDPQ

SEQ ID NO: 19842 - protein, 2174 aa, Oryza sativa
  Clone ID: TF_OSC11379j.C1.p1.fg
MVNTRTGTGSGSGSGSGSGATNNGGDPTLAQILAQQTQLINLLVQQAQNQQANNQNQNPPPPPQNKLADFLRVRPPTFSSTTNPVEAGDWLHAVEKKLDLIQCTEQEKVSFASHQLHGPAAEWWDHFRQGRAEGELITWQEFTTAFKKTHIPSGVVALKKREFRALNQGSRSVTEYLHDVNRLARYAPEDVRTDEERQEKFLEGLNDELSYALMSTDFRDFQQLVDKAIRQEDKYNRMEQKKRRAAQFKAQQGSNQRPRLVTGPQAPSYPQGGSSSVVRPQRQFYNNNTGNRGNDNRNMVARPAATPAQNQPVRKEQGSKPVICFNCGDPGHYADKCPKPRHVKNAPAPNNSNVLAPKARVNHVAAAEAQNAPDVVLEIEEVLFPSSLILLESKDLDVILGMDWLSRHRGVIDCANRKVTLTSSNWETVSFFVSSPKYHGVNLNQVALQEIPIVQDYPDVFPEDLPAPGLEWYIPGLEIELCSRGGCSEWLGLYNRMPRYKPEYLFGVEGFVQELRTMSFVIGFGTAPFYAQIPHDRHEEKCRVRVTLNSNSEEVPSVMFEAGGRNYIHACQEVARIAIGELRDRYSDQLADTEYRYHPRQPQGSDRGSYLETEGIENDVTTKHLVEMLWAMDESRAETVLAAQDREDRNRGKICKLEDKVDRLEKELAALKGEAPPQKARIRLTARKRALFVPRYQLAPKMVNTRSNGNGPNNPNNNNNGENPTLAQVLAQQTQLMNMMMQQFQNQQNQGNNHAPPQNKLAEFLRVRPPVFSSTTNPVEASDWLHAIEKKLDLLQCTDQEKVSFASHQLHGPASEWWDHFRLNRTTAEPITWLEFTAAFRKTHIPSGVVSLKKKEFRSLSQGSRSVTEYLHEFNRLARYAPEDVRNDEERQEKFLGGLNDELSYPLMVGDYPDFQKLVDKAIRQEDKYNRMEQKKRRIAQFKTQQGNNQKPRLTLGPQPMPQGGSSSVVRPQRQFFNNNAGNNIRNQAPRPVAAPAQQQPAKREQGNKPVVCFNCGDPGHYADKCPKPRRVKVVPAQNNSAVPASKARVNHVAAAEAQDAPDVILGTFLVNSVPATVLFDSGATHSFLSTSFAGNHGMEVEDLRRPLMVSTPSNQALSLQRSPSVRIEIQGVPFLANLILLKSKDLDVILGMDWLARHKGVIDCANRKVTLNSYDGRVVTVHALSSESLRSRLNQITLEEIPIVREYPDVFPDDLPGMPPKRDIEFRIDLVPGTTPIHKRPYRMAANELAEVKRQVDDLLQKGYIRPSSSPWGAPVIFVEKKDHTQRMCVDYRALNDVTIKNKYPLPRIDDLFDQLKGATVFSKIDLRSGYHQLRIKEEDIPKTTFTTRYGLFECTVMSFGLTNAPAFFMNLMNKVFMEYLDKFVVVFIDDILIYSRTKEEHEEHLRLALEKLREHQLYAKFSKCEFWLSEVKFLGHVISAGGVAVDPSNVESVTNWKQPKTVSEIRSFLGLAGYYRRFIENFSKIAKPMTRLLQKDVKYKWSEECEQSFQELKSRLISAPILILPDPKKGFQVHCDASKLGLGCVLMQDGKVVAYASRQLRPHEKNYPTHDIELAAVVHALKIWHHYLFGTRTEVYTDHKSLKYIFTQPDLNMRQRRWLELIKDYDMGIHYHPGKANVVADALSRKGYCNATEGRQLPLELCKEFERLNLGIVDRGFVAALEAKPTLIDQVREAQINDPDIQEIKKNMRRGKAIGFLEDEHGTVWLGERICVPDNKDLKDAILKEAHDTLYSIHPGSTKMYQDLKERFWWASMKREIAEYVAVCDVCQRVKAEHQKPAGLLQPLKIPEWKWEEIGMDFITGLPRTSSGHDSIWVIVDRLTKVAHFIPVKTTYSGSRLAELYMARIVCLHGVPKKIVSDRGSQFTSNFWKKLQEEMGSKLNFSTAYHPQTDGQTERVNQILEDMLRACALDFGGSWDKNLPYAEFSYNNSYQASLQMAPYEALYGRKCRTPLLWDQTGERQVFGTDILREAEEKVKIIQERLRVAQSRHKSYADNRRRDLSFEEGDYVYLRVTPLRGVHRFHTKGKLAPRFVGPYKIVSRRGEVAYQLELPQSLAGVHNVFHVSQLKKCLRVPTEEANIEQIEVQEDLTYVEKPIRILETSERRTRNRVIRFCKVQWSNHSEEESTWEREDELKSAHPHLFASSSESRGRDSV

SEQ ID NO: 19843 - protein, 861 aa, Oryza sativa
  unsure (1)..(861): unsure at all Xaa locations
  Clone ID: TF_OSC400718j.C1.p80.np
RGPRNSARENHDLRDHRRRRRGFRRIPPSPRTIKRGKSLPVIPSLFSPAFPSLSPSGSFGFAPAIFAGASMAPEMAAAVSFPSGLSLSLPALYNRSPCPLLRFRRSPLALPVGIKPAPSSSLSAVAAELRFAAVVAPDLLPLRRRLLRLRRVFVDLVRSFVSPADRRSAAVLVDPNRAAASRRFGAVSVTAVDPGEPRTAASLPSSPLSRPPSAVPMAAAGDHRGAGAPPPVGRAGEAAFGRAPWLPGGARPSAARARGCGXRVGPTAPAGFAXSTCRISLTYIITAKDLDLLRSYPXFLICLSPLFSLSPSPNRNRWLTMRKAIRSEVRTLVPQAPEXMKHQTPVVXHWSNTINQNRLLIEILQQHQTPILNLSQIQPQVQLRQSKHSHHESACRQHPERPMVTCHMLTQKKQARECPQQKRKTPMRTEDARECPQQKRKTPMRTEDEVRKMIITSTEWPPPGMTKRQRRNTFRGAPQLTEHLLANGGRVFDSEDSDQVSSDDEDEMERKACSRCGEIGHVASSCATTCVHCEEDHPPDRCPTSRITCFFCEGTDHVLKDCQFSFLLTKKMANQPASSNGEKHQGNTNPRQDYSFSLTPVPGQRNQNERKCRVREDICCFNCQGMGHFADKCPKPRNIAAGPSVHATPCNQKLAPQRIVIHASRSSPIARVATAPTPASALPQGVNAQFQPQPSVDKTAALYLWMFQHSSQNQVQDEEPEQDHPPGECPTRKVTCFLCEETNHVPKDCQLSVLLTKTAEIQRTTLRLSHQLVSSNSNIDDIIHSTNAPPAPPNSATNHSTNTFSTNHSLHRQPQQRIVVDGRSCFPTPGRAKGNQPQEGDTKQKTVIRFNQQSEGSFSCE

SEQ ID NO: 19844 - protein, 574 aa, Oryza sativa
  Clone ID: TF_OSC30299j.C1.p3.fg
MDISEANEGYASCGSVIEMSRQMKTTRVGLGWLGTSWDPGRVASSVRIIVGLGLRQNKPNIHHNSKRLRSVKVLSLVSNLSLPFVFPLSLSKPLQQMADNEKGNKVRSQDIGTSSSRVNEAPDTSCVTLVQHLINQNRLLIEILQQHQTPILNLSQIQPQVQLEAVQALTPQVSAPPTSQKAPHAMPHVDSKEASIICFMCDEQGHYARNCPQQKRKAPMRTEDEVRKMIITSTEWPPPGMTKCQRRSSFRGAQQLTEHLLANGGRVSGSEDSDQVSSDDEDEKSPQGFNQNKIELKACSRCGEIGHVASSCASACVHGEEDHPPDRCPTSRITCFFCEGTDHVPKDCQFSFLLTKKMANQPASSNGEKHQGSTNPRQDYSFSLTPVPGQRNQNEKRKCRVREDICCFKCQGMGHFADKCPKPRNVAASTSVHATPRNQKLAPQRIVIHASRSSPIARVATAPTPMSALPQGVNAQFQPQPPADKTEVSICVVPLEVPIQQLRNQVQDEEPECKKVIVCYNCSEEGHYSKNCPQPRQNRPPHFRQFTGSNHANHQVVSGANAVPVKPSASQKQP

SEQ ID NO: 19845 - protein, 477 aa, Oryza sativa
  Clone ID: TF_OSC873j.C1.p1.fg
MADNEKGNKVRSQDIGTSSSRVNEAPDTSCVAVVQHLINQNKLLIEILQQHRMPILNPSQIQPQVQLEAVQALTPQVSAPPTSQKAPHAMPHVDPKEASIICFMCDEQGHYARNCPQQKRKAPMRTEDEVRKMIITSTEWPPPGMTKCQRRNSSRGAQQLTEHLLANGGRVSGSEDSDQVSSDDEDEKSPQGFNQNEIELKACSRCGEIGHVASSCASTCVHCEEDHPPDRCPMSRITCFFCEGTDHVPKDCRFSFLLTKKMANQPVSSNGEKHQGNTNPRQDYSFSLTPVPGQRKQNEKRKCRVREDICCFNCQGMGHFADKCPKPRNVAASTSVHANPRNQKLAPQRIVIHASRSSPIARVATAPISMSALPQGVNAQFQPQPPADKTEASICVVPLEVPIQQLRNQVQDEEPECKKVIVCYNCSEEGHYSKNCPQPRQNRPPHYRQFTRSRHSNRIVVTGANAVPVRPRVNQNP

SEQ ID NO: 19846 - protein, 1118 aa, Oryza sativa
  unsure (1)..(1118): unsure at all Xaa locations
  Clone ID: TF_OSC400680j.C1.p16.np
GRALKHKRQEYTVEGLIASLDVEEKARGKDVMSKDDGGQSSANVVHKAQNKNKGKYKPQQTTNFKQKKNNNNPNQDERTCFVCGXPGHLAKKCPQRKGMKAPTGQPSMTIGNTVDGSGYGNLPTVFSVNQSTNWCVDIGANLYVCADISLFSSYQVTRDSTVLMRNGLHASIHGAETVDLKFTSRKIVQLKNVQPVPTINRNLVSGSCLTRDGFKLVLXYNKVVVSKHFIGKGYECGGLFHFSISDFCNKSVNYICGSVDDEANVWHSRLCHINFRLMSQLSSMCFIPKFSIVKGSKCHSCVQSKQPRKPHKAAEERNLAPLELLHSDLREMNGVLTNGGKXYFMMLIDDATRVCYVYLLKMKDEALDYFKMYKTEVENXLDKKIKRLRSDRGGEFYSNEFDLFREKHSIIHERTPPYSPESNGIAERKNRTLTYLLNAMLDTAGLPKAWSGELSVLINSSRIKNHFPNRVKRAWPGAIWDGRKPISKELQGXACLAWSNLGWVTDREILPGCTRVRTKLVAYANHXHANSSRVHTSEVSRMQITNMQELQVNDYLRDNMLLKVTDSGGMEPSSTSWSQAVPPEENKKRLIYESRKHLRDARYLYIVCSDGLLRRCVLVDEGMKIIEKCCAAPYGGHYAFRTHTQIWQSGFFWPSIPSETFCKNLGLSTTLPSVSSPDKWTSRNEQQTNQKYSAKDCQXYGEDMEEQATXCTLGIXDCLXDAHGMSPYQLDGKTCHLPVELEHRAHGNPDLDVMMKKKEKKKKIAMHSPKFQKRKNKWRRRYTKGVIIISIFLCSHKFTIHMHILDQKVCCIFMDPLFDFAVYVEVNSVVESIAFTRDEQRLSVGVLLTVLKLIFDRQYLHIMKXNMVSNLVRVYYXSFPPVLVKYVYAGILRKTSVKRQTAPPRIQDTFTWIGGPISPEVFRALADLSVVVRNTNNDHWRALEXVVYLRDTMDLELHYTGYLAVLERYSDANWISDMDEIKATSGYVFTLGGGAVSLRSCKHTISMRSTMEVDTATVEAEWLRDLLMDMPIVEKPVPAILMNCDNXTVIIKVNSSKDNMKSSGYVKIRLKYVRKLRNSGVITLDYIQIGRNLANPFMKGLSRNMIDNSSNEMGLRPM

SEQ ID NO: 19847 - protein, 343 aa, Oryza sativa
  Clone ID: TF_OSC30459j.C1.p1.fg
MENTQFSRPKAVPYNDSWEIPNSDYILLYLNDKQTGKITCMVCGKEGHYTCECPMKNKEKYVICTLCGKVGHCHLWCCHQNESERRACRRCGEKGHYDNWHHLGCSSCEKHHPLGRCPMGKITCFLCEGNGHVPVQCHLSPMLTAITQNQRESFRATLRQALRETSNTAVTPITLTRELEPYNDKNGGQPKGDNEMVPRVLGFNQGEEGHSALRNPNRCHVPSSDKANVAADKAPNQSLGVTCFNCGGKGHYSNKCPQKQKQHGVRSTNAAAMKDKTPNLTGVTCFDCGDRGHFSYTCPQNLLEVMLTAELEPHDDTYERQPKADNGTVPTVLSLNCGEASHC

SEQ ID NO: 19848 - protein, 415 aa, Oryza sativa
  Clone ID: TF_OSC900137j.C1.p21.fg
MPLEDAHLIWTTLKERCNKSKCDDDIVFMEEPLEECSTSSPNCEEPQVTTFDDQDNHPASTLSSTHDYVEGDELVSKVDDRPIFPMDSNNTDNEIVILHCVVNSCISPSTKYVCEDDMDKCSTSYSTCGTNLLKEEVNEFQWTSEESTSQRCSSSISENYACFMGEDGDSEFDHLSKKDITMVIKLMEAIQKQQACTIKKNEEIMSLTEEHKKLKDFHSSLIMRSKIKSLNLNLTRSLTSKREKQIDHGLVCIAQPSQDNRESMVKKLEEGSTVACTKIHQRDSKSINAYTKGRSQKTIKSSITCFKCKKVGHHIRDCPSKKGNKLSKKEDIPHIKCFKCTEAGHFALRCPCTLDEQCKTSSERQTGNKQTNKQYRSNMGNILVKIVPWVTFLSQVSHLIIIYLGMPKKTFVLLG

SEQ ID NO: 19849 - protein, 637 aa, Oryza sativa
  Clone ID: TF_OSC14742j.C1.p1.fg
MSNEEFDRVSNLETAYEIWNKLAEIHEGPSEYKDAKLHFLKIQYKTFSMLPHESVNDMYGKLNVIVNDLKGLGANYTDLEVAQKMLRALPEKYETLVTMLINSDMSRMTPASLLGKINTNDMYKLKKKEMEEASPSKKCIALQAEVEDKSKSKVNEVNEDLEEEMVLLARRFNDLLGRRKERGRGSNSNRRRNRRPNKTLSNLRCFECGEKGHFASKCPSKDDDGDKSSKKKSGGYKLMKKLKKEGKKIEAFIGEWDSNEESSASSGSEEEGGDDASSKKKKMAVVAIKKAPSLFAPLCLMAKGSSKVTSLSDSESDDDCDDVSYDELVSMFEELHAYSEKEIVKFKALKKDHASLKVLYEELKTSHERLTISHEKFKEAHDNLLSTTQHGAHINVGISCDLLDDSATCHIAHVASSSISTSCDDLMDMPSPCSSSSSCVSICDASLAVENNELKEQVAKLNKSLERCFKGKNTLDKILSEQRCILNKEGLGFIPKKGKKPSHHATRFVKRNGKYCSKCREVGHLVSDCPGGKPPKTCMFDSHYMLTKAHDGSIVARYVGFPILGGKNNAIWMPKALVSNLQGPKQVWVNYRTDGSHWVLDSGCTQHMIGDRAMFTTFEVGGNEQEKVTFGDNSKGK

SEQ ID NO: 19850 - protein, 1753 aa, Oryza sativa
  Clone ID: TF_OSC401487j.C1.p9.fg
MSNEVNHVGKAPMFNGTNYSTWKIKMSTHLKAMSFHIWSIVDVGFAITGTPLTEIDHRNLQLNAQAMNALFNSLSQEEFDRVSNLETAYEIWNKLAEIHEGTSEYKDAKLHFLKIQYETFSMLPHESVNDMYGRLNVIVNDLKGLGANYTDLEVAQKMLRALPEKYETFVTMLINSDMSRMTPASLLGKINTNDMYKLKKKEIEEASPSKKCIALQAEVEDQSKSKVNEVNEDLEEEMVLLARRFNDLLGRRKERGRGSNSNRRKNRRPNKTLSNLRCFECGEKGHFASKCPSKDDDGDKSSKKKSGGYKLMKKLKKEGKKIEAFIGEWDSNEESSASSGSEEEGGDDASSKKKKMAVVAIKEAPSLFAPLCLMAKGSSKVTSLSDSESDDDCDDVSYDELVSMFEELHTYSEKEIVKFKALKKDHASLEVLYEELKTTHERLTISHEKLKEAHDNLLSTTQHGAHIDVDISCDLLDDSATCHIAHVASSSISTSCDNLMDMPSPCSSSSSCVSICDASLVVENNELKEQVSKLNKSLERCFKGKNTLDKILSEQRCILNKEGLGFIPKKGKKPSHHATRFVKRNGKYCSKCREVGHLVSDCPGSKPPKTCMFDSHYMLKKAHDGSIVARYVGSPILGGKKNAIWVPKALVSNLQGPKLVWVNYRTGGSHWVLDSGCTQHMTGDRAMFTTFEVGGNEQEKVTFGDNSKVKIILAILGVFFLHDKSIVAELFKKFAKRAQNEFSCTLVKIRSDNGSEFKNTNIEDYCDDLGIKHELSATYSPQQNGVVERKNRTLIEMARTMLDEYGVSDSFWAEAINTACHAINRLYLHRLLKKTSYELIVGRKPNVAYFRVFGCKCYIYHKGVRLTKFESRCDKGFLLGYASNSKAYRVYNKNKGDEGLMRAMKNMYIGDVKPIEVEDKPSTSTQDEPSTSASSSQAQVEVEDEKAQDPPMPPRIHTALSKDHPIDQVLGDISKGVQTRSRVASICEHYSFVSCLEPKHVDETLCDPDWMNAMHEELNNFARNKVWTLIERPRDHNVIGTKWIFRNKQDENGLVVRNKTRLVAQGFTQVEGLDFGEIFAPMARLEAIRILFAFASCFDIKLFQMDVKSAFLNGEIAELVFVEQPPGFEDPKNPNHVYKLSKALYGLKQAPRAWYERLKDFLLSKDFKIGKVDTTLFTKIIGDDFFVCQIYVDDIIFSSTNEVFCKEFGDMMSREFEMSMIGELSFFLGLQIKQLKDGTFVSQTKYIKDLLKRFGLEDAKPIKTPMATNGHLDLDEGGKLVDLKLYRFMIGSLLYLTASRPDIMFSICMCARFQAAPKECHLVAVKRIYPKGAKFQLVGYSDSDYTGCKVDRKSTSGSCQMLAMPPRTRHGRRAPTPDPVSENEESSGDEYVQSDEDNMENVEGDEMEVSDDGDDNESGNGEDDEASDDGSPLDSSIQFVLNLRNAQQYTIFRHHDQFRRPNDCNDPRFHTRFQKSVYVQVYANKAFAKHKWISWRHIGETPEFENLQEMFRTVGIDRIVTMKQPFDEDLIRQFYATVWVSGDCDAMKWMLGTLRCSINRREFKELLHIRFNNGDDLHDEHTHNPFPIDHFSQFYEEGGRHTYGKVAGLRALPSVINHIVRATILPRCGNNDDIRRVAWHVIDAIMDGRRFDVINLMMKEIAISKGTIGQGIYYALYIMRLPPPRRLVEELPGDLSEKIVEEARRRFVSGLEFTTFGVKEELPRVIEAWVVLSVGQLPPCPSLDEGGVRWLRG

SEQ ID NO: 19851 - protein, 1267 aa, Oryza sativa
  Clone ID: TF_OSC900326j.C1.p11.fg
MEGAEDSGFAITGTPLTEIDHRNLQLNAQAMHALFNSLSQEEFDRVSNLETAYEIWNKLAEIHEGTSEYKDAKLHFLKIQYETFSMLPHESVNDMYGRLNVIVNDLKGLGANYTDLELKKKEMEEASPSEKCIALQAEVEDKGKGKVNEANEDLEEEIALLARRFNDLLGRRKEKGMGSNSNRRRNRRPNKTLSNLRCFECGEKGHFASKCPSKDDDGDKSSKKKSGGYKLMKKLKKEGKKIEAFIGEWDSNEKSSASFGAPLRQHLLVIVSDDDCDDVSYDELVSMFEELHAYSKKEIVKFKALKKDHASLEVLYEELKTSHERLTISHEKLKEAHDNLLSTTQHGALIDVGISCDLLDDSVTCHISHVASSSISTSCDDLVDMPSSSSSSCVSICDASLVVENNELKEQEAKLNKSLERCFKGKNTLDKILSKQWCILNKEGLGFIPKKGKKPSHRATHFVKSNGKYCSKCREVGHLVSDCPGGKPSKTCIFDSHYMLRKAHDGSIVARYVGSPILGGKKNVIWVPKALVSNLQGWVNYRTGGSHWVLDSGCTQHMTDDRAMFTTFEVGGNEQEKVTFGDNSKGKSIVAELFKKFAKRAQNEFNCTLVKIRSDNGSEFKNTNIEDYYDDLGIKHELSATYSPQQNGAVERKNRTLIEMGVRLTKFESQCDEGFLLGYASNSKAYRVYNKNKGIVEETADVQFDENNGSQEGHENLDDVGDEGLMRAMKNMCIGDVKPIEVEDKPSTSTQAQQLCKKQGVDFASCFDIKLFQMDVKSAFLNGEIAEPVFVEQPPGFEDPKNPNHVYKLSKSLYGLKQAPRAWYERLRDFLLSKDFKIGKVDTNLFTKIIGDDFFVCQIYVDDIIFGSTNEVFCKEFGDMMSREFETSMIGELSFFLGLQIKQLKDETFVSQTKYIKDLLKRFGMEDAKPIKTPMATNGHLDLDEGGKPVDLKLYRSMIGSLLYLTASRPDIMFSVCMCARFQAAPKECHLAAVKRILRYLKHSSTIGLWYPKGAKFKLVGYSDLDYAGCKVDRNSTSGSCQMLGRSLVSWSSKKQNSVALSTAEAEYVSAVMPPHTRHGRRAPTPDPVSEPVESSGNEYAQSDEEVEANVEGASEEASGDDVSGSGEDEDEGTDDMHIDPSIQFVVNMRNPSQYTILRYHDQFLRPRDTPDPRFHTAFQKSVYEQVYAGKAFAEHKWISWRDINETLEFEGLQDLFETVGIDQIVTFKQDYNEDLIRQFYATVWVAGDYSEMNCFSSLQHTGILLV

SEQ ID NO: 19852 - protein, 564 aa, Oryza sativa
  Clone ID: TF_OSC13279j.C1.p6.fg
MDISEANEGYASCGSVIEMSRQMKTTRVGLGWLGTSWDPGRVASSVRIIVGLGLRQNKPNIHHNSKRLRSVKVLSLVSNLSLPFVFPLSLSKPLQQMADNEKGNKVRSQDIGTSSSRVNEAPDTSCVTLVQHLINQNRLLIEILQQHQTPMLNLSQIQPQVQLEAVQALTPQVSMPPTSRRTHDDMPHVDPKEASIICFMCDEQVHYARERPQQKRKTPMRTEDEVRKMIITSTEWPPPGMTRRQRRNTFRGAPQLTEHLLANGGRVSDSEDSDQVSSDDEDEMERKACSRCGEIGHVASSCATICVHCEEDHPPDRCPTSRITCFFCEGTDHVPKDCQFSFLLTKKMANQPASSNGEKHQGSTNPRQDYSFSLTPVPGQRNQNEKRKCRVREDICCFNCQGMGHFADKCPKPRNIAAGTSVHATPRNQKLAPQRIVIHASRSSPIARVATAPTPMSALPQGVNAQFQPQPPADKTEVSICVVPLEVPIQQLRNQVQDEEPECKKVIVCYNCSEEGHYSKNCPQPRQNRPPHFRQFTGSNHANHQVVSGANAVPVKPSASQKQP

SEQ ID NO: 19853 - protein, 1407 aa, Oryza sativa
  unsure (1)..(1407): unsure at all Xaa locations
  Clone ID: TF_OSC20836j.C1.p2.np
ISLACFPSLVFFLLRAPVLPLFYLPASDRLRAREIGTSRASGTTPSPEICTGRRVIRFLGSASAAAVAVPGAAAAVPGDGAPGGAATNVNVNEGSSASQSSGGTFSGSFSVVGFAAALKSYAFDGSNYKRWKARTLLWLTAMQCFYVSRGKRSEPPLSPEEEVKFEASDCLFRGALISVLADNIVDVYMHMPSGKDMWDALEAKFGVSDAGSELYVMEQFYDYKMVDDRSVVEQAHEIQMLAKELENNNCELSDKFVSGGIIAKLPPSWSDFATSLKHKRQEFSVSDLIGSLGVEEKARAKDNRGKKVEGGSSANMVQKKNPHASHNNKKVKPDVKPKATTNFKKKGKGKAKGDCFVCGKSGHWAKDCPKRKDRKSANMVISESGGTSAYGKILPIVLSVFHSPDWWVDTGANIHVCADISLFSSYQVGRGSSLLMGNRSLAAVHGVGTVDLKFTSGKTVQLKNVXLVPSIKKNLVSGSLLCREGFRLVFESNKCVVSKYGTFVRKGYDSGGLFRFSLDNMCNNHNFVNHISDNDESNVWHSQLCYVNFSCMTRLFNMSLIPKFTLVKGSKCHTCVQSKQPRKPHKASEARNLAPLELVHSDLYEMNSVLTKGGKKYFMTLIDDCTRFCYVYLLKTKDEALHYFKTYKAEVNQLERKIKRLRSDRGGEYFSNEFASFCKEFGIIHERTPPYSPQSNGVAERKNRTLTEMVNAMLDTAGLSKEWWGEAVLTACHVLNKIPMKHKEVTPFEEWERKKLNLSYLRTWGCLAKVSVPIAKKRKLGPNTVDCVFLGYAIHSVGYRFLIVNSGVPDMRVGTIIESRDATFFENEFPMKHTPSTSSQEIVIPHEHFAPIEHNDQTPEGNPKEDNIVDTRKSKRQRFAKSFGDDYIVYLVDDTPRTIEEAYSSPDADYWKEAVRSEMDSIMSNGTWEVVECPYGCKPEGCKWVFKKKLRPDGTIEKYKARLVAKGHTQKEGGDFFDTYSPVARLTTIRLVLALATSHGLLVHKMDVKTAFLNGELEKKIYMDQPDGYVLEGQEGMVCKLLKSLYGLKKAPKQWHEKFDTTLTSAGFGVSEADKCVYYRYGGGEAVILCLYVDDILIFGNSLNVIEEVKDFLSKGFEMKDLGEANVILNIKLLRGAEGGITLVQSHYVDMVLSRFGYSDCKPALTPYDPSVLLRKNRRIARDQLRYSQIIGTLMYLASATRPDISFAVSKLSRFVSNPGDDHWQALERVMRYLKGTMSYEIHYTGPKVLEGYSDSNWISDADEIKATSGYVFTLGGGVVSCKFCKQTILTRSTMEAELTALDTATVEAEWLRELLMDLLVVQKPVPAILMNCDNQTVIIKVNSSKDNMKSSRHIKRRLKSVRKQKNSGVISLDYVQTAKNLAGXFIKGLPHNVLDSASREMGLIPT

SEQ ID NO: 19854 - protein, 1232 aa, Oryza sativa
  Clone ID: TF_OSC400337j.C1.p8.fg
MSALVAAAASPRAGAAATVPGDGMPGAGAAVNDNVNGGSSASQSSGGTFSGSPHIVHVMIIVLIFWIKICRYMTIFPTIQKPDRSFSVVGFALKPHAFDGSNYKRWKARALLWLTAMQCFYVSRGKRSEPPLSPEEEVKFEASDCLFRGALISILADNIVDVYMHMPSGKDMWDALEAKFGVSDAGSELYVMEQFYDYKMVDDRSVVEQAHEIQMLAKELENNNCELSDKFVAGGIIAKLPPSWSDFATSLKHKRQEFSVSDLIGSLGVEEKARAKDNRHKKVEGGSSANMVQKKNPHASHNNKKVKPDGKPKATTNFKKKGKGKANGDCFVCGKSGHWAKDCPKRKDRKSANMVISKGGETSGYGKLLPTVLSVFHSSDWWVDTGANIHVGRGSSLSMGNGSLAAVHGVGMVDLKLTSGKTVQLKNVQHVLSIKKNLVSGSLLCREGFRLVFESNKCVVSKYGTFVGKGYDRGGLFRFSLDDMCNNHNVVNHISENGSKCHTCVQSKQSRKPHKASEARNLAPLELVHFDLKALHYFKTYKAEVENQLERKIKRLRSDRGGEYFSNEFASFCEEFGIIHERTPLYSPQSNGVAERKNRTLTEMVNAMLDTTGLSKEWWGEAVLTACHVLNKILMKHKDVTPFEEWERKKLNLSYLRTWGCLAKVSVPIAKKRKLGPNTVDCVFIGCAIHSVGYRFLIVNSGVPDMRVGTIIESRDATFFENEFPMKHTPRTSSQETVIPHEHFAPIEHNDQTPEGNPEEDNIVDTRKSKRQRVAKSFGDDYIVYLVDDTPRTIEEAYSSPDAYYWKEAVRSEMDSIMSNASHGLLVHQMDVKTAFLNGELEEEIYMDQPDEYVLEGQEGMGCKLLKSLYGLKQAPKQWHEKFDTTLISVGFVVNEADKCVYYRYGGGEGVILCLYVDDILIFGTSLNVIEEVKDFLSKSFEMKDLGVADVIINIKLLRGDEGGITLVQSHYVDKVLSRFGYSDCMPAPTPYDPSVLLRKNRRIARDQLRYSQIIGSLMYLASATRPDISFAVSKLSRFVSNPGDDHWQALERVMRYLKGTMSYGIHYTRYPKLLEGYSDSNWISDADEIKAASEYVFTLGGGVVSWKSCKQTILTRSTMEAELTALDTATVEAECLRELLMDLPMVEKPVPAILMNYDNQTMIIKVNSSKDNMKSSRHIKRRLKSVRKHKNSGVIAFDYVQTARNLADQFTKGLPRNVIDSASREMGLIPT

SEQ ID NO: 19855 - protein, 1342 aa, Oryza sativa
  Clone ID: TF_OSC400572j.C1.p23.fg
MSNTGDKEKETPVNTNGGNTASNSSGGLFLGYNLITLFQLEVLLLMFIAMSTLCHYVIVDAYSTLSMLMLITFTTITGSNPIVNIMFIILLFWIKICRIMTKFPTIQKPDRSFSVVGFAAALKPHAFDGSNYKRWKARALLWLTAMQCFYVSRGKRSEPPLSPEEEAKFEASDCLFRGALISVLADNIVDVYMHMPSGKDMWDALEAKFGVSDAGSELYVMEQFYDYKMVDDRSVVEQAHEIQMLAKELENNNCELPDKFVAGGIIAKLPPSWSDFATSLKHKRQEFSVPDLIGSLGVEEKARAKDVRGKKVEGGSSANMVQKKNPHASHNNKKVKPDVKPKAATNFKKKSKGKAKGDCFVCGKSGHWAKDCPKRKDRKSANMIISEGGGTSGYGKILPTVLSVFHSPDWWVDTGANIHVGRGSSLLMGNGSLAAVHGVGTVDLKFTSGKTVQLKNVQHVPSIKKNLVSGSLLCREGFRLVFESNKCVVSKYGTFVGKGYDSGGLFRFSLNDMCNNHNAVNHISENDESNVWHSRLCHVNFGCMTRLANMSLIPKFTLVKGSKCHTCVQSKQPRKPHKASEARNLAPLELVHSDLCEMNGVLTKGGKKYFMTLIDDCTRFCYVYLLKTKDEALHFFKIYKAEVENQLERKIKRLRSDRGGEYFSNEFASFCEEFGIIHEMTPPYSPQSNGVAERKNRTLTEMVNAMLDTAGLSKEWWGEAVLTACHVLNKIPMKHKEVTPFEEWERKKLNLSYLRTWGCLAKVNVPIAKKRKLGPKTVDCVFLGYAIHSVGYRFLIVNSGVPDMHVGIILESRDATFFENEFPMKYTPITSSKETVMPHEHFAPIEHNDQTPEENPEEDNIVDTRKSKRQRVAKSFGDDYIVYLVDDTPRTIEEAYSSPDADYWKEAVRSEMDSIMSNGTWEVVERPYGCKPVGCKWVFKKKLRPDGTIEKYKARLVAKGYTQKEGEDFFDTYSPVARLTTIRQAPKQWHEKFDTTLTSAGFVVNEADKCVYYRYGGGEGVILCLYVDDILIFGTSLNVIEEVKDYLSKSFEMKDLGEADVILNIKLQRGDEGGITLVQSHYVDKVLSRFGYSDCKPAPTPYDPSVLLRKNRRIARDQLRYSQIIGSLMYLASATRPDISFAVSKLSRFVSNPGDDHWQALERVMRYLKGTMSYGIHYTGYPKVLEGYSDSNWISDADEIKATSGYVFTLGGGAVSWKSCKQTILTRSTMEAELTALDTATVEAEWLRELLMDLPVVEKPVPAILMNCDNQTVIIKVNSSKDNMKSSRHIKRRLKSVRKQKNSGVIALDYVQTARNLADQFTKGLPRNVIDSASREMGLIPT

SEQ ID NO: 19856 - protein, 1246 aa, Oryza sativa
  Clone ID: TF_OSC401435j.C1.p29.fg
MERRPPIRPDWQANKRQAMEQGGGDWGIRDVREEEGLRRPLPNQPRVNPNVKPQGRQAAEMERGAGTMKIKCFKCGREGHHQANYTNPPLCYSCHNTGHIASHCPLISAKRCVKLCGFGIPGQGFYSLQVEISDAEVARAPVRGILTVIQGEASVSKVLAELKHLFVGLTWDWKIKQLNAKEFLKKFPSYEVRSQISTCKSFDFETSQIKASVVETGITEEAVDELVAVWVKIYGIPKMARSEDYIKSIVELVGEFEAVEVASIRRDGPVRVRVACKDPRELYFSIHLYINKVGYMIRWEPKGYLPYENRQNPPDDDDKDDKDDEGLEDDMNLDDEFKNHDISRGRPLKGEGSQHESRAGAFSAPPTYKGKVSSEQGGSIKMIASKKTSLLKHPDLFESCTSLVIWGDKKQEMIAEQESQELEAPELSQNETRPEFSTLLEFDEDLERCQIPTDSDIERLREEEDREEEDSFQEVSNRKKGKAKRTEPAVTSRMSLRHRELAVVPIPKRAKILTQRKNLEQPDSVELKKIDVAANIDLGSNPVEIDNNIETLKAKELVQAKLAELNWKNQLEKQKPQAGDVSVPAKVIESEDVSSIKELETDLRVEKDGISPEPNKRETHAGAFFLSNVIKLNYDNSCWEIMVIYGPVDNNLKQAFLDELNWHILYRSHHVVIGGDFNLYRFASEKSNTNTNSRNMDMFNSFIANLDLREIYRSGPKFTWTNKQDSLVQEVLDRILVTTDWDDMYPTALLSSILRVGSDHIPLLLDTCEGIIVKSKYFKFESAWLAEESFKELVIQRLLPRDNSYILEFWNKKQSSLRRFLVGWGKNNRSKKLREKRTLQCKIEELDKKALTEELTSDEWNQRYSWENDLEHIYEMEELYWHKRCGEQWILEGDRNTEFFHRVANGRKRKCHITSLMDGETELTSKSEIREHIVEYYKTLFRDVPTANIHLSQGVWTNHLNLSDASKENLTRPFVMAELDKVINEAKLNTAPGPDGFSIPFYRAFWPQVKNDLFEMLLMLHNEDLDLKRLNFGVISLIPKNNNPTDIKQFRPICVLNDCFKFLSKVVTNRLTEVADEVVSQTQTAFIPGRFILEGCVIIHEVLHELKSKNSEGIILKIDFEKAYDKVNWEFLIEVMERKNFPKKWISWIKSCVMGGRVCININGERTDFFRTFRGLRQGDPLSPLLFNLVSDALAAMFDSAKAAGVLCGLVPNIFPGGITHLQYADDTVLFVANDVNQIVATKFIL

SEQ ID NO: 19857 - protein, 361 aa, Oryza sativa
  Clone ID: TF_OSC14937j.C1.p3.fg
DATSVKPDKNTAEGPQEMPRYDDHYGSTRLYVGRLSSRTRSRDLEYLFGRYGRSCVFDLNDLVEGFSVFYTTREWKLQVGDAFEYLSHDGLLFGNHWCRIREVELKRDYAFIEFSDPRDADEARYNLDGRDVDGSRILVEFAKGVPRGAAGGSREYMGRGPPPGTGRCFNCGIDGHWARDCKAGDWKNKCYRCGERGHIERNCQNSPRNLSRSRSRSLSGSPRGRRDRDDRRSRSLSYSRSPRRSISPAANGKERNPSPNGRRSPRSPQDRVSPPPKDNDERNGDSPWGRENSRSPSDGYRSPVAANGRSPSPRNNGSPSPMDNNSRSPRDNGSPSPRDGNGDGGSRGGSRSPRASESPEA

SEQ ID NO: 19858 - protein, 324 aa, Oryza sativa
  Clone ID: TF_OSC2613j.C1.p1.fg
EMPRYDDRYGSTRLYVGRLSSRTRSRDLEYHFSRYGRIREVELKRDYAFIEFSDPRDAEEARYNLDGRDVDGNPILGEFAKGVPRGPGGSREYMGRGPPPGTGRCFNCGIDGHWARDCKAGDWKNKCYRCGERGHIERNCQNSPRNLRRERSYSCSPSPRRGRGRSRSYSRSRSRSRSYSRSRSRSLSGSPRARRELERSRSLSYSRSPRRSISPAANEKKRSPTPDGSRSPRSPQDQVSPPPKDNAERNGSDHGDSPRGRENSRSPSDGYRSPAAANGRSPSPRNNGSPSPMDNGSRSPRDGNGDGGSRGGSRSPRPSESPEA

SEQ ID NO: 19859 - protein, 323 aa, Oryza sativa
  Clone ID: TF_OSC400090j.C1.p17.fg
MPRYDDRYGSTRLYVGRLSSRTRSRDLEYHFSRYGRIREVELKRDYAFIEFSDPRDAEEARYNLDGRDVDGSRILVEFAKGVPRGPGGSREYMGRGPPPGTGRCFNCGIDGHWARDCKAGDWKNKCYRCGERGHIERNCQNSPRNLRRERSYSCSPSPRRGRGRSRSYSRSRSRSRSYSRSRSRSLSGSPRARRELERSRSLSYSRSPRRSISPAANEKKRSPTPDGSRSPRSPQDQVSPPPKDNAERNGSDHGDSPRGRENSRSPSDGYRSPAAANGRSPSPRNNGSPSPMDNGSRSPRDGNGDGGSRGGSRSPRPSESPEA

SEQ ID NO: 19860 - protein, 389 aa, Oryza sativa
  Clone ID: TF_OSC900030j.C1.p14.fg
MLRSRARLPLRLPPAVRRCRSPSAAKEKDATSVKPDKNTAEGPQEMPRYDDHYGSTRLYVGRLSSRTRSRDLEYLFGRYGRSCVFDLNDLVEGFSVFYTTREWKLQVGDAFEYLSHDGLLFGNHWCRIREVELKRDYAFIEFSDPRDADEARYNLDGRDVDGSRILVEFAKGVPRGAAGGSREYMGRGPPPGTGRCFNCGIDGHWARDCKAGDWKNKCYRCGERGHIERNCQNSPRNLSRSRSRSLSGSPRGRRDRDDRRSRSLSYSRSPRRSISPAANGKERNPSPNGRRSPRSPQDRVSPPPKDNDERNGDSPWGRENSRSPSDGYRSPVAANGRSPSPRNNGSPSPMDNNSRSPRDNGSPSPRDGNGDGGSRGGSRSPRASESPEA

SEQ ID NO: 19861 - protein, 128 aa, Oryza sativa
  Clone ID: TF_OSC13213j.C1.p5.np
CNVNIIHQGVDDSINDGTQNDNPSNWDSEKDSNGDSNYGTTDANVTKDFQPPIPTPSQNDRPQMDSSAKKTLICYNCKKPGHYSRDCLQSRQSRPPHYRQFTRSRHPNRIVVTGANAVPVRPRVNQNP

SEQ ID NO: 19862 - protein, 465 aa, Oryza sativa
  unsure (1)..(465): unsure at all Xaa locations
  Clone ID: TF_OSC14509j.C1.p1.np
MSWHKAGVLLLGGSILPACPGGSGRRGVGSVLLSMARMGWKLCHVFRPYTVVMFNREKEKNVRGYASSNSSFQLNPPLASRELTRAHPWSIPSMLLGSQLPLVGSQDQNQYVFDQAFATQVNELPMPEEHVPFCHDCREQGHYALNCPWVYAKEAPSFGLAGQTSLNPPPRTKSSLQPSVQGREPNGENPLNPENCFPPSLSYHVGSRTKQAKGKKSKSQKRKAPMRTKEEVRKMTITSAEWPPAGITIPRRQRGNTFRGARRLTQHLLSHGGRVSDQVSSDDEDESPRHLGEEEMESKACTRCGEIGHVASMCLTLCLHCEEDHPPDRCPTSRITCFFCEGTDHVPKDCQSSFLLTKKMANQPASSNGEKHQGNTNPRQDYIIHASRSSPIARVATAPTPASALPQGVNAQFQPQPSVDKTEASIVVPLDVPARSQRNQVQDEEPERKKVIAFTNCSTCXGSRH

SEQ ID NO: 19863 - protein, 1460 aa, Oryza sativa
  Clone ID: TF_OSC413089j.C1.p13.fg
MASRPRRAARAPARFGFEDGRVEPEANHESANERSHHSNRSHRTASRNAEVEQPRRSNRSHRTASRDAEIEQSHRSHRTASHNSGEERLPSPPHVENNMQHLMAVQTQILQGLAAAVAGFQHNAHGNGHPHTNNNRSKLTDFLRSRPPEFSQTVEPVEADDWLKDVDRKLNLVQCTPVEKTLYASHQLRGPAADWWENYCNAHPEPTNIAWDEFATAFRAAHVPESTIDMKKEEFNRLKQGNSSVNEYLSMFNKLARYAPEEVDTDKKKIRKFLKGIAVGMRLQLLAHDFPTFQYMINKALLLEDARKEATEEYKKRKSNHQGNSSRGAPHPRYGQPMQYHQSVTQANRQPGYAPRPQMNRPAPQPQQRAPSGNTAPNSVTSFKSPQGPTTVQCFRCDQMGHYARQCPQNPTNTNSGHANGSTARTPTPAAAQFRPSSQASGQGSRASNNFGRGRVNHIQAETAQDAPDVVMVHSPGRNIRATQICPEVNLRIEEVDFLAKPIVLDSQSLDIILGMDWFAKHKGQIDCAKKSITLQGPGGKQVRFTSNTPTASRSILTCLQVTSLESVPIVCEYPDVFPEELTSMPPDREIEFAIELAPGTAPIAKRPYRMAANELAEVKRQIEELESKGYVRPSSSPWGAPVLLVKKKDGSERMVIDYRALNEVTIKNKYPLPWIDDLFDQLKGARVFSKIDLRSGYHQLKIRSEDIPKTAFSTRYGLYEFTVMSFGLTNAPAFFMNLMNKIFMDYLDQFVVVFIDDILIYSKNEEEHAEHLRLIMEKLRDHQLFAKFSKCEFWLDRIAFLGHVISSSGVEVDPSKVEAVLAWNPPKNVSEIRSFLGLAGYYRRFIEGFSKLARPMTELLKKEKKFQWSAACEDSFQEMKKRLTTAPVLTLPDIRKDFEIFCDASRQGLGCVLMQERKVVAYASRQLRPHEVNYPTHDLELAAVVHALKIWRHYLIRNRCEVYTDHKSLKYIFTQTELNMRQRRWLELIKDYDLGIHYHPGKANVVADALSRKAYCNVAQIRPNQERLCRELEKLRLTVVQSGVPASLTVQPTLESQIREAQKDDEGIKELIKRIQEKKDTNFSIDDQGTVWCGPRICVPAKKELRDIILKEAHESAYSIHPGSTKMYQDIKAYFWWAGMKRDVAEYVALCDICQRVKAEHQRPAGLLQPLPIPEWKWEEIGMDFITGLPRTPSGYDSIWVIVDRLTKSAHFVLVKTTFDGKKLAELYMTHVVCRFGCPKKIVSDRGTQFTSRFWKQLHEALGTDLNFSTAYHPQTNGQTERVNQILEDMLRACALDFEGTWDRCLPYAEFSYNNSYQASIQMSPNEAMFGRKCRTPLCWNEVGEALVFGPNILKSAEEQVKLIRERLKTAQNRQKNYADNRRRDLEFEKGDHVYLRVSPLHGIRRFGMSGKLAPCYIGPYLITARRGEVAYQLELPEGLADVHNVFHVSQLKKCLRVP

SEQ ID NO: 19864 - protein, 694 aa, Oryza sativa
  unsure (1)..(694): unsure at all Xaa locations
  Clone ID: TF_OSC400545j.C1.p13.np
XAAVRWEAAGGGGAPPPPDPAGGEAGVRRREAGATGFINGDNYASQSSGGPFSGYNLILLFTALILIVFLFSAMFSMHCCMMDVYAYYILSMIRSLHLFNNCTSLFPVKVMIIILIIWIKICXIVTIFPTIQKPDRSFSVVGFAASLKPHAFDGSNYKRWKARALLWLTAMQCFFVSRGKLSKPPLSPEEEAKFEAADCIFRGALISVLIDNIVDVYMHMPRKEMWDALEAKFGVSDAGSELYVMEQFYDYKMVDDRSVVEQAHEIQMLAKELENNRYELPDMFVAGGIIAKLPPFWSDFATSLKHRQELSVTDLIGSLGVEEKARAKDNRGKKVEGSSSTNLVXKKNPQASHNNKKVKPDVKPKATTTFKKKGKGKAKGDCFVCGKPGHWAKDCPKRKDRKSANMVISKGGGTSGYGKFLPTVLPICHSPDWWVNTGVNIHVCADISLFSSYQVGRGSSLLMENGSLAAVLGVGTVDLKFTSGKTVQLKNVQHVPSIKKNLVSGSLLCRHDFRFVFESNKCVVSKYGTFIRKCYDSGGLFRFSLDHVSNDDESNVWHSRLCHVNFGCMTRLANMSLIPKFALVKGSKCHTCFQSKQPRKPHSASEARNLAPLELVHSDLCKMNSVLTKGGKKYFMILIDDCTRFCFVYLLKTKDEALHYFKIYKAEVENQLERKIQRLRSDRGGDRLTDTFRF

SEQ ID NO: 19865 - protein, 1200 aa, Oryza sativa
  Clone ID: TF_OSC401345j.C1.p5.fg
MSGVAAAAAAGGDGGGGAPPTGAGSGAGAGAPGGAMNDSNNGGNSASPSSGGLFSGMLLRYCYVPVPDIHDAHSMILVMLRSPYTAYAMIIALTFWIKICRLMTIFPTIQKPDRSFSVVGFAAALKPHAFDGSNYKRWKARALLWLTAMQCFYVSRGKRSEPPLSPEEEAKFEASDCLFRGALISVLADNIVDVYMHMPSGKDMWDALEAKFGVSDAGSELYVMEQFYDYKIFDDRSVVEQAHEIQMLAKELENNNCELPDKFVAGGIITKLPPSWSDFATSLKHKRQEFSISDLIGSLGVEEKARAKDVRGKKVEGGSSANMVQKKNPHASHNNKKVKPDVKPKAATNFKKKGKGKAKVDCFVCGKSGHWAKDCPERKDRKSANMVISEGGGTSGYGKILPIVLSVFHSPDWWVDTGANIHVGRGFSLLMGNGSLAAVHGVGTVDLKFTSGKTVQLKNVQHVPSIKKNLVPSAILAFNRNNLASLTRHLIDDCTRFCYVYLLKTKDEALHYFKIYKAEVENQLERKIKRLRSDRGGEYFSNEFAFFCEEFGIIHERMPPYSPQSNGVAERKNRTLTEMVNALLDTAGLSKEWWGEAVLTACHVLNKIPMKHKKVTPFEEWERKKLNLSYLRTWGCLAKVNVPIAKKRKLGPNTVDCVFLGYAIHSVSYRFLIVNSRVPDMHVGTILESRDATLFENEFPMKHTPSTSSKETVMPHEHFAPIKHNDQTPEENPKEDNIVDTRKSKRQRVAKSFGDDYIVYLVDDTPRTIEEVYSSLDADYWKEAVHSEMDSIMSNGTWEVVERPYGCKPVGCKWVFKKKLRPDGTIEKYKARLVAKGYTQKEGEDFFDTYSPVALLTTIRVLLALAASHGLLVHQMDVKTAFLNGELEEEIYMDQPDGYVLEGQEGMVCKLLKSLYGLKQAPKQWHEKFDTTHTSAGFVVNEADKCVYYHYGGGEGVILCLYVDDILIFGTSLNVIEEVKDYLSKSFEMKDLGEADVILNIKLQRGDEGGITLVQSHYVNKVLSRFGYSDCKPAPTPYDPSVLLRKNQRIARDQLRYSQIIGLLMYLASAMRPDISFAVSKLSRFVSNPGDDHWQALERVMRYLKGTMSYGIHYTGYPKVLEGYSDSNWISDADEIKATSGYVFTLGGGAVSWKSCKQTILTRSTIEAELTALDTATVETEWLRELLMDLPVVENQCQLS

SEQ ID NO: 19866 - protein, 415 aa, Oryza sativa
  Clone ID: TF_OSC21561j.C1.p2.hg
EWAAKIAISPLSPSGLIAILADGGRQRGRPTVCHVSLPPTNWAAGAISAIFLSISPSLRSRLLVSSAAAAAAAAEQRRSPPASSGAVAGFKMPRYDDRDRYDDRYGGNTRLYVGRLSSRTRTRDLEDLFGRYGRVRYVDMKHEFAFVEFSDARDADEARYNLDGRDFDGSRMIVEFAKGVPRGPGGSREYMGRGPPPGSGRCFNCGIDGHWARDCKAGDWKNRCYRCGDRGHIERDCRNSPKNLKRGRSYSRSPSPRRGRSRGRSYSRSRSRSYSRSQSPRRDSRNERRSRSPRDSRSPRGSPRDSRSPRGSPRDSRSPKGSPRDTQSPRGSPRDSRSPRRSASPPNGRNRSPTPNASRSPAPRDSRSPMRADSRSPADHERRDMSTAANGRSPSPRDYEDNGNHRASPRGSASP

SEQ ID NO: 19867 - protein, 118 aa, Oryza sativa
  unsure (1)..(118): unsure at all Xaa locations
  Clone ID: TF_OSC415629j.C1.p19.gp
MDMQETSAGGSSMGNYNSIAGNGSSECYKCKQPGHYARDCPGQSTGGLECFKCKQPGHFSRDCPVQSTGGSECFKCKQPGHFARDCPGQSTGAQHQTYGNNVAASRGYNRQSFVGGYX

SEQ ID NO: 19868 - protein, 1204 aa, Oryza sativa
  Clone ID: TF_OSC16296j.C1.p1.fg
MADQGHSVSDGYEMLLDDLYIMEQFHDYKMADNRFVVEQAHEIQTMVKELELLKCVLPDKFVAGCIIAKLPPSWRSFGTALKHKRQEYSVEGLIASLDVEEKAREKDAASKGDGGQSSANVVHKAQNKSKGKYKAQQTTNFKKQKKNNINPNQDERTCFVCRQPGHLARKCPQRKGMKAPAGQTSKSANVTIGNTGDGSRYGNLPTVFSVNQSTNWWVDTGANVARGSTVLMGTGSHASVHGVGTVDLKFTSGKIVQLKNMQHVPSIDRNLVSGSRLTRDGFKLVFVSNKVVVSKHGYFIGKGYECGGLFRFSFSDFCNKSVNHICGSVDDKTNVWHSRLCHINFGLMFRLSSMCLIPKFSIVKGSKCHSCVQSKQPRKPHKAAEERNLAPLELLHSDLCEINRVLTKGGKRYFMTLIDDATRFCYVYLLKTKDEALDYFKIYKTEVENQLDRKIKRLRSDRGGEFFSNEFNLFCEEHGIIHERTPPYSLESNGIAERKNRTLTDLVNAILDTAGLPKAWWGEALLTSNHVLNRVPNRNKDKTPYEIWIGRKSSLSYLRTLGCLAKVNVPITKKRKLRPKTVDCVFLGYAHHRIAYRFLIVKSEVPDMHVGTIMESRDATFFESFFPMKDTHSSSSQPSEVISSLITPPEQTEHTHEHVTEEDVSEAPRRSKRQRTAKSFGDDFTVYFVDDTPKSISEAYASPDADYWKEAVRSEMDSIIANGTWEVTERPYGCKSAGCKCVFKKKLRSDGTIEKYKARLVAKGYIQKEGEDFFDTYSPIARLTTIRVLLSLPASHGLLVHQMDVKTIFLNGELDEEIYMDQLDGFVVEGQEGKVCKLLKSLYGLKQAPKQWHEKFDKTLTSAGFAVNEADKCVYYRHGGGEGVILCLYVDDILIFGTNLEVINEVKSFLSQNFDMKDLGVADVILNIKLIRGENGITLLQSHYVEKILNRFGYIDSKPSPTPYDPSLLLRKNKRIAKNQLEYSQIIGSLMYLASAIRPNISFVVSKLSRFTSNPGDDHWRALERVMRYLKGTMELGLHYTGYPAVLEGYSDSNWISDVDEIKATSGYVLTLGGGAVSWRSCKQTILTRSTMEAELTALDTATVEAEWLRDLLMDLPIVEKPMPAILMNCDNQTVIVKVNSSKDNMKSSRHVKRRLKSVRKLRNSGVITLDYIQTARNLADPFTKGLSRNVIDNASKEMGLRPM

SEQ ID NO: 19869 - protein, 1204 aa, Oryza sativa
  Clone ID: TF_OSC16300j.C1.p2.fg
MADQGHSVSDGYEMLLDDLYIMEQFHDYKMADNRFVVEQAHEIQTMVKELELLKCVLPDKFVAGCIIAKLPPSWRSFGTALKHKRQEYSVEGLIASLDVEEKAREKDAASKGDGGQSSANVVHQAQNKSKGKYKAQQTTNFKKQKKNNINPNQDERTCFVCRQPGHLARKCPQRKGMKAPAGQTSKSANVTIGNTGDGSRYGNLPTVFSVNQSTNWWVDTGANVARGSTVLMGTGSHASVHGVGTVDLKFTSGKIVQLKNMQHVPSIDRNLVSGSRLTRDGFKLVFVSNKVVVSKHGYFIGKGYECGGLFRFSFSDFCNKSVNHICGSVDDKTNVWHSRLCHINFGLMFRLSSMCLIPKFSIVKGSKCHSCVQSKQPRKPHKAAEERNLAPLELLHSDLCEINRVLTKGGKRYFMTLIDDATRFCYVYLLKTKDEALDYFKIYKTEVENQLDRKIKRLRSDRGGEFFSNEFNLFCEEHGIIHERTPPYSLESNGIAERKNRTLTDLVNAILDTAGLPKAWWGEALLTSNHVLNRVPNRNKDKTPYEIWIGRKSSLSYLRTLGCLAKVNVPITKKRKLRPKTVDCVFLGYAHHRIAYRFLIVKSEVPDMHVGTIMESRDATFFESFFPMKDTHSSSSQPSEVISSLITPPEQTEHTHEHVTEEDVSEAPRRSKRQRTAKSFGDDFTVYFVDDTPKSISEAYASPDADYWKEAVRSEMDSIIANGTWEVTERPYGCKSAGCKCVFKKKLRSDGTIEKYKARLVAKGYIQKEGEDFFDTYSPIARLTTIRVLLSLPASHGLLVHQMDVKTIFLNGELDEEIYMDQLDGFVVEGQEGKVCKLLKSLYGLKQAPKQWHEKFDKTLTSAGFAVNEADKCVYYRHGGGEGVILCLYVDDILIFGTNLEVINEVKSFLSQNFDMKDLGVADVILNIKLIRGENGITLLQSHYVEKILNRFGYIDSKPSPTPYDPSLLLRKNKRIAKNQLEYSQIIGSLMYLASAIRPNISFVVSKLSRFTSNPGDDHWRALERVMRYLKGTMELGLHYTGYPAVLEGYSDSNWISDVDEIKATSGYVLTLGGGAVSWRSCKQTILTRSTMEAELTALDTATVEAEWLRDLLMDLPIVEKPMPAILMNCDNQTVIVKVNSSKDNMKSSRHVKRRLKSVRKLRNSGVITLDYIQTARNLADPFTKGLSRNVIDNASKEMGLRPM

SEQ ID NO: 19870 - protein, 593 aa, Oryza sativa
  Clone ID: TF_OSC421766j.C1.p6.gm
MEASARGNLRNGGARVSGTSAFDVLHREKAAIRRCDFTMAGFADALRLDKFTVQCQYFAQAQNKSKGKYKAQQTTNFKKQKKNNNNPNQDERTCFVCRQPGHLARKCPQRKGMKAPVGQTSKSANVTIGNTGDRSVARGSTVLMGNGSHASVHGVGTVDLKFTSEKIVQLKNSFFPMKDTHSSSSQPSEVIPSSITPPEQTEHTHEHVTEEDVSEAPRRSKRQRTAKSFGDDFTVYLVDDTPKSISEAYASPDADYWKKAVRNEMDSIIANVNEADKCVYYRHGGGEGVILCLYVDDILIFGTNLEVINESHYVEKMLNRFGYIDSKPSPTPYDPSLLLRKNKRIARNQLEYSQIIGSLMYLASATRPDISFAVSKLSRFTSNPGDDHWRALERVMRYLKGTIELGLHYTGYPAVLEGYSDSNWISDVDEIKATSGYVFTLGGGAVSWRSCKQTILTRSTMEAELTALDTATDEAEWLRDLLMDLPIVEKPVLAILMNCDNQTVSGTSAFDVLHREKAAIRFLGSASRDCSLFVRDGSPSSPLVCFAPSSTLATASSSYRATELIQMDSTWPSESEHTENQAPEAAANIALLA

SEQ ID NO: 19871 - protein, 323 aa, Oryza sativa
  Clone ID: TF_OSC401810j.C1.p39.fg
MAFSGGQLMMTGTSVSRQRLAVHGLGRLSGVHGNSSEMVRDAAGADDALRAPSSGAPAGVLFKQQDNHRLPGDRLLLSALPQRTRLLAGHRGKRENHMDHGLVDKAQPSQDNRGNMVKKLEKGSTVACTKSCQENNKSNNKSKGQIQSWIKTLITCFMCKKVGHYALICSNKIDDQVTLPKRRTRRSNRKCYGCNEKSHEVASCPHMKNHFVSSRKKLNIKVASSKVAEKMQDVVKKAPCKDKNRLCYNCRAKGHIGNNCPMGNIPKPNSSFDYDLPRDAKKDICAIRVISSPHASIKSIWVPKSHVTYLYGPNVVEDQNVLK

SEQ ID NO: 19872 - protein, 469 aa, Oryza sativa
  unsure (1)..(469): unsure at all Xaa locations
  Clone ID: TF_OSC101387j.C1.p4.np
MSWQRVGALLLGSVLPACPGGSGRRQIGSVLLSMARMGWKLCHVFRPYTVVMFNREKGKNVSGYASSNSSFQLNPPLASRELTRAHPWSIPSMPLSSQLPLVGSQDQNQYVFDRAFATQVNELPMPEEDVPFCHDCREQGHYALNCPWVYAKEAPSFGLAGQTSLNQPPHTKTSLQPSVQSREPNEENPLNPGNCSPPSLSYHVGSRTKHAKGKKSKNQKRKAPMRTEEEVRKMTITSTEWSTAGITIPRRQXGNTFRGARQLTQHLLSHGGRVSDSEGSDQVSSDYEDESPPHLGEEEMESKACPRCGEIGHIASMCLTLCPHCEEDHPPGECPTRKVTCFLCEGTNHVPKDCQLSVLLTKTAEIQRTTLRLSRQLVSSNSNIDDIIHSTNAPPAAPDSAINHSNNTFSTNHSRHRQPQQXIVVDGRSCFSPRPTPGRAKGNQHQEGDTKQKTVTHFNQQSEGIFLLX

SEQ ID NO: 19873 - protein, 1259 aa, Oryza sativa
  unsure (1)..(1259): unsure at all Xaa locations
  Clone ID: TF_OSC20344j.C1.p4.np
MAYCANALRLDKFSGIHFKGWXNRVTLWLTAMKCFWVSNGKSKGILIAEKQKKFINDRIGCIVSVLGNRLVEVYMHMIDTKELXDALNTKFDATDASNDLYVMEQFQDYKMIDNHSVVEQTHETHTKAKELELLKCVLPDKFVVGCIIAKLPSFWKNFNIALKHTRHEYYVEGLIASLDVEEKTREKDIASKRTCFVCGLPGHLAKNCPQRKGMKAPAGXSSKSSNVTIGNTGDESGYGNLPTIFSVNQSTNWWVDTGANVHVCADISLFCSYQVARDSTVLMENRSHASVHIDTVDLKFTSGKIVQLKNMQHVPTIDKNLVSVSHLCRDGFKLVFESNKVVVSKHGYFIGKGYECNEANVWHSHLCHILLGLMSRLYSMCLIHKFSIVKGSKCHNCVQSKGLMSRLYSMCLIHKFSIVKGSKCHNCVQSKQPRKPYKAAGERNLAPLELLRLDLCEMDGVLKGEKRYFMTLIDEATXFCYVYLLKTKDDGPDYFKIYKAEIENQLDRKIKRFRSDRSGEFFSNEFDLFCEKHGIIHERTPPCTLTDMVNAMLDTVGLAWWGEALLTSNHVLNRVPNRNKDKTPYEQWIERKPSLSYLCTWGFLVNVNVPITKKCKLGTNTVDRVFLGYAHYSIAYRFLIVKSEVPHMYVGTIMETHDATFFESFFPIKDTHSTSSQSCEIILSSITPPGQTEHTHEYITEEDDXGGXSETPWRSKKQRTTKSFSHDFTVYLVDDTPKSILEAYASPGADYXKEAIHSEMDSIIANRILEVTEXPYGCKHVGCKGVFKKKLWPNGTIEKYKDQLVAKGYTQKEGEDFFDTYSPVGRLTTIHVLSLAASHGLLIHQMDVKTAFLNVELDEIYMDQPYGFIVEGIEGKVCKLRRSSYQRTPIPSIWSTGIPRRQISVGFAVNDAKKYVYYHHGGGEGVIICLYVDDILIFWTNLELINDVKSFLSQNFDMKDLGVAAVILNIKLIRGEDGITLLQSHYVEKILSHFGYNSKPSPTPYDPSLLLRKKKRIARNQLEYSQIIGSLMYLPTTTRTDISFAVSKLSRFISNLGDDHWRALEXVMHCLKGTMELGLHCARYPALLEEYSGFNWISDVDEIKTTSGYVFTSGGGAVSXRSCKLTILMRSSIEAELMAEDTAIVEAEWLRVLLMDLSMVEKLKCEKTIELCKCEKTIELCQEIEKLRSYTIGLHPNSKQPGRLHEGTITKCDRQCIEGDGLRPCSILERTHICELDCWSQSMEILGESSRKLNKDQGV

SEQ ID NO: 19874 - protein, 1303 aa, Oryza sativa
  Clone ID: TF_OSC400810j.C1.p4.fg
MSDDGGRYTPPGRRGGGGGGGSGSGRGGASGSGAGDGADGANLPLVPQGRDAGHTARLPVLSRTNYPDWALLMRVNLQAQGLWTAIEPGYAEYRDDRAALSAILQAVPREMLRGLAKHDTAKAAWDAIKTMRVGVDRAMRFKDGETPEEFAMRLTAVVADIRDMGGVMEDEHINKKLLRVVPKKYKPVAISLEQLLDVKTMALEELVGRLSMVNSYSDDEEEGGGDKLYLTEEQWQARARKQEQEGSGGSSKSRGSSGTQNNRRGKAGGSPKGKETINSGNTSRDYSKVKCFNCDEFGHFARQCRKPRRQRRGEVNLTQGEEEPTLLMAHVMGVSLAGEETLGRTPGVHEVHLTEKKVKRSPSFLYILKLNMARPICLAANGTETAWRWHARFGHLNFQALRRLAQAEMVRGLPVIDHVDQLCDGCLAGKQRRVPFPDKARFRAQDALELVHGDLCGPIAPATPGGRKYFLLLVDDMSRFMWIRLLSGKHEAAAAIKQFKAGVEMESGRKLRALRTDRGGEFTSVEFTEFCADRGVSRQLTAPYSPQQNGVVKRRNLTIVAAARSMLKAAGMPAHFWGEAVVAAVYLLNRSPTKSLDGVTPYEAWHGRRPSVEHLKVFGCVGYVKTVKPNLRKLDDRGTRMVFIGYEQGSKAYRMYDPVSRRVYVSRDVVFDEAAMWPWRDPEVTQTGGEEDFTVEFFSTPLGGNRVPDVVVEHGGARETETAPSPLATPDAAPVWSPVTSSSPAGVEFCTPPSDASIESDGAPPRFRTVNNVLATTTPVLDFDYDDECLIAEQEPFSFKEAEKEQCWMKAMEEEMSSIEGNNTWFLCDLPSDHRAIGLKWVYKIKRSAEGEILKYKARLVAKGYVQQQGIDYEEVFAPVARMETVRLLVALAAHEGWQIHHMDVKSAFLNGELEEEVYVVQPPGFVVEHKENKVLKLKKALYGLKQAPRAWYAKLDSTLANLDFVRSATENAVYTRGEGNARLMVGVYVDDLIITGALGTEIAKFKEQMRSMFSMSDLGLLSYYLGMEVKQTEEGITMSQAGYAGRILEKAGMQGCNPCQVPMDARLKLKKGVEDCIDATQFRSIIGSLRYLVNTRPDLSYSVGYVSRYMENPGAEHWAAMKHILRYVAGSLNIGLKFRKGEEKFPRLVGYSDSDMAGDVDDRKSTTGVLFKLGENLITWQSQKQKIVALSSCEAEYIAATTAACQGIWLARLLGELQMKKPCCAMLKVDNKSAINLCKNPVLHDRSKHIDTRYHFIRERVERKEVEVEYTSSAEQLADILTKPLGKVRFLELRGKLGLSPV

SEQ ID NO: 19875 - protein, 1446 aa, Oryza sativa
  unsure (1)..(1446): unsure at all Xaa locations
  Clone ID: TF_OSC401706j.C1.p1.np
SARLLRSSSSSSASSSPTSNTGDNSNTGHKEKEAPANTNGGNTASNSSKGPFSGYNSTFIVFMFSQILLLGAMFSLHSHVTNVYAYSILSMICSQWQTXVXNTDLAAELALISCTSLFPADVILIVLIFXIKIYRIVTIFLTIQKPDRSFSVVGFAASLKPHAFDGSNYKRWKACAVLWLTAMQYFFVSRGKPSEPPLSPEEEAKFEAADCLFRGALISVLADNIVDVYMHMPLGKEMWDALEAKFRVSDPSSELYIMEQFYDXEMVDDRSVVEQAHEIQMLAKELENNRCELPYKFVAGGIIAKLPPSWSDFAISLKHKRQEFTVTDLICSLGVEEKARAKDNRGKRVEGSSSVNASHNNKKVKPDVKLKATNTFKKKGMGKPKGDCFVCGKPGHXAKDCPKRKDRKFANMVISEGGRTSGYGKFLPTIVSVCHSPDWWVDTGANIHVCANISLFSSYQARRGSSLLMGNGSLAAVLGVGTVDLKFTSGKTVQLKNMQHVLSIKKNLVSSSLLCRDGFRLVSESNKCVVSKYETFIGKGFDSGGLFRFSLDNMCNIVNYVSNDDESNVWHSRLCHVNFGCMTHLDNMSLIPKFTLVKGAKFHTCVQSKQPRKPHREFEARNLAPLELIHSDLCEMNGVXTKGGKKYFMTLIDDCTRFCYVYLLKTKDEALHYFKIYMAEVENQLERKIKRLRSDRGGEFSNELTSFCEEFGIIHERMPPYSPXSNGVAKRKNCTLTELVNAMLDTAGLSKESWGEAILIACHVLNRIPTKHKEVTPFEEWERRKLNLSYLLTWGCLAKVNISIGKLGPKTVDYVFLGYAIHSVGYRFLIVNSGVPDMRVGTITESRDATFSTSSEEPILTPEHFAPIEHIDQTPEGNPEEDNNVATRKSMRQSTAKSVCDDYIVYIVDNTPRTIEEAYSSPNANYWKEAVHSEMDSIMSNGTWEVIERPFGCKIGCKXVLKKNLRLDGTIEKYKARLVAKGYTQKEGEFFDIYSSVACLTTIRVLFATAASHGLLVHQMDVKIAFLNGELEEEIHMDQPNGYTLEGQEGIMCKLLKSLYTLEAVEVLKQAPKQWHEKFDKTLTSAGFVVNEADKCVFYRYGGGERVILCLYVNDMSIFGTSLNLIEEVKDFLSKSFEMKDLGVADVILNIKLLRGDEGGITLVQSHYVDKKVVPTPYDPRVLLRKNRRIARDQLSHYVDKKVVPTPYDPRVLLRKNRRIARDQLRYSQIIGSLMHLASATRPNISFAVSKLSRFVXNPGDDHWHAMERVMRYLKGTMSYGIHYAGYPKVPKGYSDSNWISDADEIKATSGYVSTLRDGAVPXKSCKQTILTRSTTEAELTALDTATVEAEWLRELLMDLPVVEKAVPAILMNYDNQTVIIKVNSSKDNMKSSRHVKRRLKSVRRQKNSRVIALDYVXTAKNLADQFTKGLTRNVKRPTSCTIVET

SEQ ID NO: 19876 - protein, 1360 aa, Oryza sativa
  Clone ID: TF_OSC413692j.C1.p3.fg
MSDDGGRYTPPGRRGGGGGGGSGSGRGGASGSGTGGGADGANLPLVPQGRDAGHTARLPVLSRTNYPDWALLMRVNLQAQGLWTAIEPGYAEYRDDRAALSAILQAVPREMLRGLAKHDTAKAAWDAIKTMRVGVDRVREAKEQGFRRQLEAMRFKDGETPEEFAMRLTAVVADIRDMGGVMEDEHINKKLLRVVPKKYKPVAISLEQLLDVKTMALEELVGRLSTVDSYSDDEEEGGGGKLYLTEEQWQARARKQEQEGSGGSSKSRGSSGTQNNRRGKAGGSPKGKETINSGNTSRDYSKVKCFNCDEFGHFARQCRKPRRQRRGEVNLTQGEEEPTLLMAHAMGVSLAGEETLGRTPGVHEVHLTEKKFGDGSVVDIRGRGTVLFQCKNGDHRSLEAVYFIPKLCKNIISIGRLDARGYDAHIYHGVCTLRDPDGLLLAKVKRSPSFLYILKLNMARPICLAANGTETAWRWHARFGHLNFQALRRLAQAEMVRGLPVIDHVDQLCDGCLAGKQRRVPFPDKARFRAQDALELVHGDLCGPIAPATPGGRKYFLLLVDDMSRFMWIRLLSGKHEAAAAIKQFKAGVEMESGRKLRALRTDRGGEFTSVEFTEFCADRGVSRQLTAPYSPQQNGVVERRNLTVVAAARSMLKAAEMPAQFWGEAVVAAVYLLNRSPTKSLDVKPNLRKLDDRGTRMVFIGYEQGSKAYRMYDPVSRRVYVSRDVVFDEAAMWPWRDPEVTQTGGEEDFTVEFFSTPLGGNRVPDVVVEHGGARETETAPSPLATPDAAPVWSPVTSSSPAGVEFCTPPSDASIESDGAPPRFRTVNNVLATTTPVLDFDYDDECLIAEQEPFSFKEAEKEQCWMKAMEEEMSSIEGNNTWFLCDLPSDHRAIGLKWVYKIKRSAEGEILKYKARLVAKGYVQQQGIDYEEVFAPVARMETVRLLVALAAHEGWQIHHMDVKSAFLNGELEEDVYVVQPPGFVVEHKENKVLKLKKALYGLKQAPRAWYAKLDSTLANLDFVRSATENAVYTRGEGNARLVVGVYVDDLIITGALGTEIAKFKEQMRSMFSMSDLGLLSYYLGMEVKQTEEGITMSQAGYAGRILEKAGMQGCNPCQVPMDARLKLKKGVEDCIDATQFRSIIGSLRYLVNTRPDLSYSVGYFSRYMENPGAEHWAAMKHILRYVAGSLNIGLKFRKGEEKFPRLVGYSDSDMAGDVDDRKSTTGVLFKLGENLITWQSQKQKIVALSSCEAEYIAATTAACQGIWLARLLGELQMKKPCCVMLKVDNKSAINLCKNPVLHDRSKHIDTRYHFIRERVERKEVEVEYTSSAEQLADILTKPLGKVRFLELRGKLGLSPV

SEQ ID NO: 19877 - protein, 1495 aa, Oryza sativa
  Clone ID: TF_OSC415431j.C1.p2.fg
MSDDGGRYTPPGRRGGGGGGGSGSGRGGASGSGAGGGADGANLPLVPQRRDAGHTARLPVLSRTNYPDWALLMRVNLQAQGLWTAIEPGYAEYRDDRAALSAILQAVPREMLRGLAKHDTAKAAWDAIKTMRVGVDRVREAKEQGFRRQFEAMRFKDGETPEEFAMRLTAVVADIRDMGGVMEDEHINKKLLRVVPKKYKPVAISLEQLLDVKTMALEELVGRLSMARARKQEQEGSGGSSKSRGSSGTQNNRRGKAGGSPKGKETINSGNTSRDYSKVKCFNCDEFGHFARQCRKPRRQRRGEVNLTQGEEELTLLMAHVMGVSLAGEETLGRTPGVHEVHLTEKKVILNHEVAEEEDNTTEWFLDTGATNHMTGSRSAFADLDTGVVGTVKFGDGSVVDIRGRGTVLFQCKNGDHRSLEAVYFIPKLCKNIISIGRLDARGYDAHIYHGVCTLRDPDGLLLAKVKRSPSFLYILKLNMARPICLAANGTETAWRWHARFGHLNFQALRRLAQAEMVRGLPVIDHVDQLCDGCLAGKQRRVPFPDKARFRAQDALELVHGDLCGPIAPATPGGRKYFLLLVDDMSRFMWIRLLSGKHEAAAAIKQFKAGVEMESGRKLRALRTDRGGEFTSVEFTEFCADRGVSRQLTAPYSPQQNGVVERRNLTVVAAARSMLKAAGMPAQFWGEAVMAAVYLWNRSPTKSLDGVTPYEAWHGRRPSVEHLKVFGCVGYVKTVKPNLRKLDDRGTRMVFIGYEQGSKAYRMYDPVSRRVYVSRDVVFDEAAMWPWRDPEVTQTGGEEDFTVEFFSTPLGGNRVPDVVVEHGGARETETAPSPLATPDAAPVWSPVTSSSPAGVEFCTPPSDASIESDGAPPRFRTVNNVLATTTPVLDFDYNDECLIAEQEPFSFKEAEKEQCWMKAMEEEMSSIEGNNTWFLCDLPSDHRAIGLKWVYKIKRSAEGEILKYKARLVAKGYVQQQGIDYEEVFAPVARMETVRLLVALAAHEGWQIHHMDVKSAFLNGELEEDVYVVQPPGFVVEHKENKVLKLKKALYGLKQAPRAWYAKLDSTLANLDFVRSATENAVYTRGEGNARLVVGVYVDDLIITGALGTEIAKFKEQMRSMFSMSNLGLLSYYLGMEVKQTEEGITMSQAGYAGRILEKAGMQGCNPCQVPMDARLKLKKGVEDCIDATQFRSIIGSLRYLVNTRPDLSYSVGYVSRYMENPGAEHWAAMKHILRYVAGSLNIGLKFRKGEEKFPRLVGYSDSDMAGDVDDRKSTTGVLFKLGENLITWQSQKQKIVALSSCEAEYIAATTAACQGIWLARLLGELQMKKPCCTMLKVDNKSAINLCKNPVLHDRSKHIDTRYHFIRERVERKEVEVEYTSSAEQLADILIKPLGKRYHGATEGDNVVRSQRVAAGLAGRQSRQHMLVYRADDELVVVVGVVLDHSEEAEAKALPPSRRESVGMHPAPVTVVLHGIDAFHKTGSDAPAVFLIVPA

SEQ ID NO: 19878 - protein, 746 aa, Oryza sativa
  unsure (1)..(746): unsure at all Xaa locations
  Clone ID: TF_OSC402671j.C1.p1.np
LRSLNRGSAFSHSLVAPPPPRIPPLPSAPRAIKRGINPRVPLPRFPLFPLSLSLGFVRIKPVIVAGAINGRIFRARPPSPAALSFPRRYLNPPRAPLFRFRRSPLTLAVGIVLAPXHLLSAVAAVLRLAAAAAPLLLPTRRHLPRHRRIAVDLVRASVSLADRRSTVVIVIPSRAAVSLRSGRRSRRRRCPGVSRGPPFAFPLPSSLSGAAPPRRWSPAVTIGARARRSRRPRRRGRPRARPRGCQVGPAVSRPRPRVRLTRGTHGADRRQPRAPGPPWTVGLTRGPHSPWTRANEGYTSCGPMADNEKGNKVRSQDIGTSSSRVNEAQDTSCAAVVQHLINQNKLLIEILQQHRMPILNPSQMQPQVQLEAVQALTPQVSAPPTSQKAPHAMPHVDPKEASIICFMCDEQGHYARNCPQQKRKAPMRTEGEVRKMIITSTEWPPPGMTRRQRRNTFRGAPQLTEHLLANGGRVSDSEDSDQVSSEDEDKMERKACSRCGEIGHVASSDKMERKACSRCGEIGHVASSCASTCVHCEEDHPPDRCPTSRITCFFCEGTDHVPKDCQFSFLLTKKMANQPAGFNGEKHQGNTNPRQDYSFSLTPVPGQRNQNEKRKCRVREDICCFNCQGMGHFADKCPKPRNIAAGTSVHATPCNQKLAPQRMVIHASRSSPIARVATAPIPMSALPQGVNAQFQPQQRIVVDGRSCVSPRPTPGRAKGNQPPEGDTKQKTVIRCNQQSEGSFSCE

SEQ ID NO: 19879 - protein, 1556 aa, Oryza sativa
  Clone ID: TF_OSC400353j.C1.p2.fg
MGCKMADHPPNHRGEGMIDFVAELARMTLVVGYPNAPEYTTVPPLSGELPHRVRLEVHGYVGTCLANMVVEASGGIADHACQEAAYLMMPRLRERHNYIFHDTAYQFHPRRASGDDVSTFRPTAGENDTTFGHMCAVMRGMDRMHSNLHKASKALNDGKLVRIIALKDEIARLKRENAQLKGLPAPGGVRIRTTPRKSTTAPMVYTRNGSRTTGEGSNGEERTDGVHPNSDFGNGPPPLPENPTLAQVMAHQTQMMTAMTQQASARWVVAQKKREFRALHQGNRTVTEYFHEFNRLARYAPEDVRTDAEKQEKFLAGLDDELTNQLISGDYADFERLVDKAIRQEDQRNKMDRKSKAAQFRSNQGSHQRPRFTPGQQSGPTTLIVHQHRPFNASNFHQGASGSQNHHGGQPNRSAAPRPQMALAQSATSAQAKKETGTKPGSCFNCGELGHFAKKCPKPRRAEPRFVQARVNHASTEEAQAAPEVVLGTFPVNSIPATILFDSGATHSFISKKFVGMHGLIREELSTPMRVHTPGNSSTSVQFSPSITIEIQRSPFLANLILLGSKDLDVILGMDWLTKFKGVIDCANRTVTLTNEKGETVVYKSPVSPKQGVSLNQIEVEIPVVTEEKNSRKLEEIPIVCEYPKVFPEDLTTMPPKREIEFRIDLAPGTAPIYKRPYRMAANELAEKKDKTKRMCVDYRALNEVTIKNKYPLPRIDDLFDQLKGAKVFSKIDLRSGYHQLRIREEDIPKTAFTTRYGLYECTVMSFGLTNAPAFFMNLMNKVFMEFLDKFVVVFIDDILIYSKSEEEHEQHLRLVLEKLKEHQLYAKSSKCDFWLSEVKFLRHVITAQGVAVDPSNVESITKWTPPKAVSQIRSFLGLAGYYRRFIENFSRIARPMTQLLKKDEKFKWTAECDKSFEELKKKLVSAPVLILPDQMKDFQVYCDASRHGLGCVLMQEGRVVSYASRQLRPHEGNYPTHDLELAAVVHALKIWRHYLIGNRCEVYTDHKSLKYIFTQPDLNLRQRRWLELIKDYDMSIHYHPGKANVVADALSRKSYCNALCIEGMCGELQQDLERLNVGIVEHGFVAALEAQPTLVDQVRAAQVNDPKIAELKKNMRVGKARDFLEDEHGTIWMGERLCVPDDKELKDLILIEAHQTQYSIHPGSTKMYKDLKEKFWWVSMRREIAEFVALCDVCQRVKAEHQRPAGLLQPLQIPEWKWEEIGMDFIIGLPRTSSGHDSIWVVVDRLTKVAHFIPVHTTYTCKREPIHFKVLAEIARGIGNPVKFQHSLPSADRWSDRRVNQILEDMLRACALDFGGAWDKSLPYAEFSYNNSYQASLQMALFKALYGRKCRTPLFWDQTGERQLFGTEVLAEAEEKVRTVRERLRIAQSRQKSYADNRRRELTFEAGDYVYLRVTPLRGVHRFQTKGKLAPRFVGPYKILEQRGEVAYQLELPSNMIGIHDVFHASQLKKCLRVPKEQANSEHIDIQEDMTYVERPVRILETSERRTRNKVTRFCRVQWSHHSEEEATWEREDELKATHPHLFASSSKSRGRDFI

SEQ ID NO: 19880 - protein, 283 aa, Oryza sativa
  Clone ID: TF_OSC24996j.C1.p1.fg
MWKTLTNLYSGEGNVMLMVEAQEKISVLRQGERSIAEYVAELKHLWSDLDHYDPLGLEHPDCIAKMRKWIERRRVIEFLKGLNSEFEGRRDAMFHQTTLTTLDEAIAAMAQEELKKKVLPSATPSSPSPTYVVAQSKETRECFNCGEMGHLIRDCRAPRKPSYGRGRFGDRGGARGGRGYAGRGNRGRGYEYKSDHRANVVTLEKGCSGSTNVDVANLVHSSSVLIQIGYLTRVHLDMSRERETGKKLGIDVRRDGLWYLDRKATSEDVCLALMASTSEEEAK

SEQ ID NO: 19881 - protein, 1680 aa, Oryza sativa
  Clone ID: TF_OSC401337j.C1.p10.fg
MSTSLAEVPQGGHIKEVIAEGSSGGLSSSTQLLATKRKLAASNPPTAKRRRSPIALPIVRSPGVRQIISQNEVIMERSQVAGQMSPSAESPRARSMSPVARFVSSPSAIPIELDVETQPRESTQSTPHVVTHRSGKRTLKSLIWKEFKPFYSSTGKVLYGKCIHCSKDWKFDPDVARAELLRMLVLQELPFSFVEHPGFRRFCASLNPYFRVLSRITIKGDCLAAYQEQKLALFEDWQIESKLFSITVDNASVNDSMVVELKGNLLGKLAMPCKGELFHFRCAAHILNLIVQDGLSTISGAISRIRESVKYIKASEACEQKFEEIIAQVGIVEEKRPSLDVSTRWNSTYLMLSSSLLFRRAFDSLDRFDPNFQDAPLFFDWDNAEVLCKHLKIFYDATVVVSGTSYPTVSRYFHEFWKVKVMLLNESNSEDVLVASMVSKMDTKFQKYWDLQFLQICVPVIFYPRFKLKFLEFRLKAGFGDKATGPNGYLSRIKRIVRSWFVEYSSQIGGPSAINSQEASTSGVNVGGSQFADWRQYLHDQSKSFGDPYSILTDTVEDDDVNMQLLGMRWPSAAANAATTSFVPCSFYFSNLVRLDALAVVIFVHVQSLLKIIQALQKAKQLIVSHESLSKIQPFQVFCLQKCVASVKGLEQVMGKLVEMLTKKFNEAPTTSSAVVPHTESVQKIELMQNDIKLEGVKNYLSWSRRALLILKTKGLEAYVTGEVKEPENISSVEWKTWRTTNSLVVAWLLTSLIPAIATTVETISSASEMWKTLTNLYSGEGNVMLMVEAQEKISVLRQGERSIAEYVAELKHLWSDLDHYDPLGLEHPDCIAKMRKWIERRRVIEFLKGLNSEFEGRRDAMFHQTTLTTLDEAIAAMAQEELKKKVLPSATPSSPSPTYVVAQSKETRECFNCGEMGHLIRDCRAPRKPSYGRGRFGDRGGARGGRGYAGRGNRGRGYEYRSDHRANVVTLEEGCSGSTNVDVANLVHSSSVLIQIGYLTRVHLDMSRERETGKKLGIDVRRDGLWYLDRKATSEDVCLALMASTSEEEAKEQEWRKPHEEKNLQVYTRRTRCPVIQQVEEDNQVEEDVSREQGSLESGGEEEEVKEESDLPIAIRKSVRSNAGKPPLRYGFEAQDEGDDENNISNYVSYDSLSSTYKAFVASLDSVQIPKDWREAKQDPRWHQAMLDELEALEKNKTWDLVPFPEGKKIVNCKWVYTVKQNPDGKVERYKVRLVAKRYSQTYGIDYDETFAPVAKMSMVRTLISCAANFDWPLHQLDVKNAFLHGDLQEEVYMDVPPGFATSQTKGKVLRLKKSLYGVKQSPRAWFDRFRHAMCAMDYKQCNGDHIVFYHHSGDHITILAVYVDDMVITGNDCLEITRLKRNLSKEFEVKDLGQLRYFLGIEIARSPRGIVISQRKYVLDLLSETGMLGCRPVSTPIDQNHKLCAESGDPVNRKRYQRLVGRLIYLCHTRPDIAYAVSMVSRYMHDPRSGHMEAVYRILRYLKGSPGKGLWFKKNGHLKIEGYCDADWASCLDDRRSTSGYCVYVGGNLVSWRSKKQSVVSRSTAEAEYRAMVVSLSELLWLRNLLVELKILENTPMKLLCDNKSAINIANNPVQYDRTKHVEIDRFFIKEKLDEGVLELGFVTSGGQVADCLTKGLGVKECNCSCDKMGMIDIYHPS

SEQ ID NO: 19882 - protein, 1739 aa, Oryza sativa
  Clone ID: TF_OSC418407j.C1.p7.fg
MSTSLAEVPQGGHIKEVIAEGSSGGLSSSTQLLATKRKLAASNPPTAKRRRSPIALPIVRSPGVRQIISQNEVIMERSQVAGQMSPSAESPRARSMSPVARFVSSPSAIPIELDVETQPRESTQSTPHVVTHRSGKRTLKSLIWKEFKPFYSSTGKVLYGKCIHCSKDWKFDPDVARAELLRMLVLQELPFSFVEHPGFRRFCASLNPYFRVLSRITIKGDCLAAYQEQKLALFEDWQIESKLFSITVDNASVNDSMVVELKGNLLGKLAMSCKGELFHFRCAAHILNLIVQDGLSTVSGAISRIRESVKYIKASEACEQKFEEIIAQVGIVEEKRPSLDVSTRWNSTYLMLSSSLLFRRAFDSLDRFDPNFQDAPLFFDWDNAEVLCKHLKIFYDATVVVSGTSYPTVSRYFHEFWKVKVMLLNESNSEDVLVASMVFKMDTKFQKYWDLQFLQICVPVIFYPRFKLKFLEFRLKAGFGDKATGPNGYLSRIKRIVRSWFVEYSSQIGGPSAINSQEASTSGVNVGGSQFADWRQYLHDQSKSFGDPYSILTDTVEDDDVNMQLLGMRWPSAAANAATTSFVPCSFYFSNLVRLDALAVVIFVHVQSLLKIIQALQKAKQLIVSHESLSKIQPFQVFCLQKCVASVKGLEQVMGKLVEMLTKKFNEAPTTSSAVVPHTESVQKIELMQNDIKLEGVKNYLSWSRRALLILKTKGLEAYVTGEVKEPENISSVEWKTWRTTNSLVVAWLLTSLIPAIATTVETISSASEMWKTLTNLYSGEGNVMLMVEAQEKISVLRQGERSIAEYVAELKHLWSDLDHYDPLGLEHPDCIAKMRKWIERRRVIEFLKGLNSEFEGRRDAMFHQTTLPTLDEAIAAMAQEELKKKVLPSATPSSPSPTYVVAQSKETRECFNCGEMGHLIRDCRAPRKPSYGRGRFGDRGGARGGRGYAGRGNRGRGYEYRSDHRANVVTLEEGCSGSTNVDVANLVHSSSVLIQIGYLTRVHLDMSRERETGKKLGIDVRRDGLWYLDRKATSEDVCLALMASTSEEEAKFIRTDNGGEYINNEFSSFLSSEGILHQTSCPDTPPQNGVAERKNRHLLETARSLMYTMNVPKFLWSEAVMTATYLINRTPSRILGMKTPCEMIFGKNEFVVPPKVFGCTCFVRDHRPSIGKLDPRAVKCIFVGYSSGQKGYKCWSPLERRTFEQEWRKPHEEKNLQVYTRRTRCPVIQQVEEDNQVEEDVSREQGSLESGGEEEEVREESDLPIAIRKSVRSNAASLDSVQIPKDWREAKQDPRWHQAMLDELEAPEKNKTWDLVPFPEGKKIVNSNFDWPLHQLDVKNAFLHGDLQEEVYMDVPPGFATSQTKGKVLRLKKSLYGVKQSPRAWFDRFRHAMCAMDYKQCNGDHIVFYHHSGDHITILAVYVDDMVITGNDCLEITRLKRNLSKEFEVKDLGQLRYFLGIEIARSPRGIVISQRKYVLDLLSETGMLGCRPVSTPIDQNHKLCAESGDPVNRKRYQRLVGRLIYLCHTRPDIAYAVSMVSRYMHDPRSGHMEAVYRILRYLKGSPGKGLWFKKNGHLKIEGYCDADWASCLDDRRSTSGYCVYVGGNLVSWRSKKQSVVSRSTAEAEYRAMVVSLSELLWLRNLLVELKILENTPMKLLCDNKSAINIANNPVQYDRTKHVEIDRFFIKEKLDEGVLELGFVTSGGQVADCLTKGLGVKECNCSCDKMGMIDIYHPS

SEQ ID NO: 19883 - protein, 648 aa, Oryza sativa
  Clone ID: TF_OSC416075j.C1.p3.np
MDEVGRRWTFSRANEGYTSCGPVVEMSYGGGLVNARGSVLPACPGIPAVGRIGSVLLSKARMGWKLCHIFTTGSKAMECGIKMCLVGWPGLAWDELGPRSGCQFGPNHRRPWVKAVLDGQLCEEEDVVSCLPKLRKTAGSASEAKEAVKPAVKQERRVSSFKVLSLVSNLSLPFVFPLSLSKPLQQMAGNEKGNKVRSQDIGTSSSRVNEAPDTSCVTLVQHLINQNRLLIEILQQHQTPILNLSQIQPQVQLEAVQALTPPVSMPPASRRTHGDVPHVDPKEASNICFTCDEQVHYARERPQQKRKTPMRTEDEVRKMIITSTEWPPPGMTRRQRRNTFRGAPQLTEHLLASGGRVSDSEDSDQVSSDDEDEERKACSRCGEVGHVASSCATTCVHCEEDHPPDRCPTSRITCFFCEGTDHVPKDCQFSFLLTKKMANQPASSNGEKHQGNTNPRQDYRFSLTPVPGQRNRNEKRKCRVREDICCFNCQGMGHFADKCPKPRNIAASTSVHATPCNQKLAPQRIVIHASQSSPMARAATASTPASALPQGVNAHFQPQQRIVVDGRSCVSPRPTPGRAKGNQPPEGDTKQKTVIRFNQQSEGSFSCECPITSSQNQSRMQSLEQCQHVSTFVIFSSLLITSKVCSNP

SEQ ID NO: 19884 - protein, 241 aa, Oryza sativa
  Clone ID: TF_OSC408704j.C1.p1.fg
MEQVCRCYNESIKEQEQQQEQKQKQKREQEQEQEQEQESQQEQEPKPKPSARKAAYCSANPPDLTHLNPQGILYARIAGGLVTLLGIANLLLHATDAIFQDTSQQNALLKLFVGTASSLATLLPNARMTPCVTPAARQVIWHVIAQVQDLPGHIARECTNEPVCNLCNVSGHLARNCQKTTISSEIQGGPFRDITCRLCGKPGHISRNCMTTMICGTCGGRGHMSYECPSARMFDRGLRRF

SEQ ID NO: 19885 - protein, 661 aa, Oryza sativa
  Clone ID: TF_OSC102121j.C1.p8.np
MDEVGGRWTFSRANEGYTSCGPVVEMSWQRVGALLLGWPACPGCPGRRGIGSVLLSMARMGWKLCHVFRLYTVVVSCLTTKIWNGWPGLAWDELGPRSGCQFGLNHRRPWVKAVLDGQVSEEEDIVSCLPKLRKTAGSASEVEEALKPAVKQDKRLRSVKVLSLVSNLSLPFVFPLSLSKPLQQMADNEKGNKVRSQDIGTSSSRVNEAPDTSCVTLVQHLINQNRLLIEILQQHQTPILNLSQIQPQVQLEAVQALTPRVSMPPASRRTHGDVPHVDSKEASIICFMCDEQGHYARECPQQKRKTPMRTEDEVRKMIITSTEWPPPGMTKRQRRNTFRGAPQLTEHLLANGGRVSDSEDSDQVSSDDEDEKSPQGFNQNKMERKACSRCGEIGHVASSCATTCVHCEEDHPPDRCPTSRITCFFCEGTDHVPKDCQFSLLLTKKMANQPASSNGEKHQGNTNPRQDYSFSLTPVPGQRNQNEKRKCRVREDICCFNCQGMGHFADKYPKPRDIAASTSVHATPCNQKLAPQRIVIHASRSSPIARVATAPTPASALPQGVNAQFQPQPPVDKTEASIGILPLDVPAQQPRNQVQDEEPSAKKTLICYNCKGPGHYSRDCLQPRQSRSPHYRQFTRSRHPNRIVVTGANAVPVRPRVNQNP

SEQ ID NO: 19886 - protein, 127 aa, Oryza sativa
  Clone ID: TF_OSC102216j.C1.p9.gm
MTLAAAATVAFERDGQRGGGRGSPLTRASKGAAVGDDDLSRIKAVDVTVPGGVALTDGSLPSGCEDRGYGGGGGGDRACYKCGKEAHMAKDCSQGSDNGAGGSSVMLRGPAASPRLGRHLLRPPYGV

SEQ ID NO: 19887 - protein, 909 aa, Oryza sativa
  unsure (1)..(909): unsure at all Xaa locations
  Clone ID: TF_OSC11382j.C1.p6.np
LVIAGFELGRPRPALRFRRRPPEHRRRSTRTSPPFQPRRRRRPVINDVVIGNNLFSSWFGMVYSWFGDRTVQPMPRFKPEYLFGTEGFVQELRTMSFAIGFGTAPLYAQIPHDRDEEKCRVKVTLNTNHEDIPSLMFEAGGGNYIHACQEVARIAIGELRDCYSDQLADTEYRYHPRQPQGSDRGSYLEPAGIENDATTRHLVEMLWAMDEFRAEIVLAAQDREDRNRGKICKLEDKVDRLEKELAALKGEAPPQKARVRLTTRKRALFVPRYQLAPKVRVVEEEAVSANPSVVNVSDDDGEESKRTHSKVEWGATQDDGGKPNEPSINRCPEDLDNGNGPNNNNNNNNNNGENPTLAQVLVQQAQLMNMMMQQFQNQQNQGNNHAPPQNKLAEFLRVRPPTFSSTTNPVEASDWLHAIEKKLDLLQCTNQEKVSFASHQLHGPASEWWDHFRLNRTTAEPITWLEFTAALRKTHIPSGVVSPKKKEFRTLTQGSRSVTEYLHEFNRLARYAPEDVRTDEERQEKFLEGLNDELSYPLMTGDYHDFQKLVDMAIRQEDKYNRMEQKKRRIAHFKAQQGNSQRPCLAMGPQAVSQGGSSLVARPQRQFFNNNSGNNNRNQAPRPVATLAQHQPAKREPGNKPRVCFNCGEPGHYSDKCPKPRRVKVVPAQNNSTAPVSKARVNHVAAAEAQGAPDVILGTFLVNSVPATVLFDSGATHSFLSMSFARNHGMEVEDLRRPLMVSTPSNQALSSQRSPSVRIEIQGVPFLANLILLESKDLDVILGMDWLARYKGVIDCANRKVTLTSNDGQVVTVYALPSEPLRSSLNQVSLEEIPIVQDYPDVFPDDLPGMPPKRDIEFRIDLVPRKTPIHKRPYRMAANELAEVKRQVDDLLQKGYMSHPKNPWSXLVM

SEQ ID NO: 19888 - protein, 1731 aa, Oryza sativa
  unsure (1)..(1731): unsure at all Xaa locations
  Clone ID: TF_OSC420875j.C1.p3.np
VPTFPESPILEGKILKNSRASKATPGLEWYIPGLEIELCSRNGCSGWLGLCNGMPRFKPEYLFGTEGFVQELRTMSFAIGFGTAPLYAQIPHDRDEEKCRVKVTLNTNHEDIPSLMFEAGGGNYIHACQEVARIAIGELRDCYSDQLADTEYRYHPRQPQGSDRGSYLEPAGIENDATTRHLVEMLWAMDEFRAEIVLAAQDREDRNRGKICKLEDKVDRLEKELAALKGEAPPQKARVRLTTRKRALFVPRYQLAPKMVLTHSNGNGPNNNNNNNNNNGENPTLAQVLVQQAQLMNMMMQQFQNQQNQGNNHAPPQNKLAEFLRVRPPTFSSTTNPVEASDWLHAIEKKLDLLQCTNQEKVSFASHQLHGPASEWWDHFRLNRTTAEPITWLEFTAALRKTHIPSGVVSPKKKEFRTLTQGSRSVTEYLHEFNRLARYAPEDVRTDEERQEKFLEGLNDELSYPLMTGDYHDFQKLVDMAIRQEDKYNRMEQKKRRIAHFKAQQGNSQRPCLAMGPQAVSQGGSSLVARPQRQFFNNNSGNNNRNQAPRPVATLAQHQPAKREPGNKPRVCFNCGEPGHYSDKCPKPRRVKVVPAQNNSTAPVSKARVNHVAAAEAQGAPDVILGTFLVNSVPATVLFDSGATHSFLSMSFARNHGMEVEDLRRPLMVSTPSNQALSSQRSPSVRIEIQGVPFLANLILLESKDLDVILGMDWLARYKGVIDCANRKVTLTSNDGQVVTVYALPSEPLRSSLNQVSLEEIPIVQDYPDVFPDDLPGMPPKRDIEFRIDLVPRKTPIHKRPYRMAANELAEVKRQVDDLLQKGYIRPSSSPWGAPVIFVEKKDHTERMCMDYRALNDVTIKNKYPLPRIDDLFVQLKGATVFSKIDLRSGQLRIKEEDIPKTDFTTQDGLFECTVMSFGLTNAPAFFMNLMNKVFMEYLDKFVVVFIDDILIYSRTKEEHEEHLRLALEKLREHQLYAKFSKCEFWLSEVKFLGHVISAGGVAVDPSNVEXVTNXKQPKTVSEIHSFLGLAGYYRRFIENFSKIAKPMTQLLXKDVKYKWSEECEQSFQELKSRLISTPILILPDPKKGFHVYYDASKLGLGCVLMQDGKVVAYASRQLHPHEKNYPSHDLELAAVVHALKIWRHYLFGTRTEVYTNHKGLKYIFTQPDLNMRQRRWLELIKDYDMGIHYHPGKANVVADALSRKGYCNATEGRRLPWELCKEFERLNLGIVSRGFVAALEAKPTLIDQVREAQINDPDIQEIKKNMRRGKAIGYLEDEQGTVWLGERICVPENKELKNAILKEAHDTLYSIHPGSTKMYQDLKEKFWWASIKREIAEYVAVCDVCXRVKAEHQKPTGLLQPLMIPEWKWEEIWMDFITGLPRTSSGHDSIWVIVDKLTKVAHFIPVRTTYSGSRLAELYMARIVCLHGVPKKIVSDRGSQFTSKFWKKLQEEMGSKLNFSTAYHPQTDGQIERVNQILEDMLRACALDFGGSWDKNLPYAEFSYNNSYQASLQMAPYEALYGRKCRTPLLWDQTRERQVFGTDILREVEEKVKITQERLRIAQSRHKSYADNRRRDLSFEEGDHVYLRVMPLWGVHRFHTKGKLAPRFVGPYKIVSRRGEVAYQLELPQCLAGVHNVFHVSXLKKCLRVHTEEANLEQIEIQEDLTYVEKPIRILETDERRTRNRVIRFCKVQWSNHSEEEATWEREEELKSAHPHLFASSSESRGRDSV

SEQ ID NO: 19889 - protein, 542 aa, Oryza sativa
  Clone ID: TF_OSC404471j.C1.p21.gm
MPPPRLGSAEPVSCRARAPAAPPRDRPIGFVPIRAVGSRGPAVDSLGGPGPRWTGAHVPLTGGARLPAPPLPLDDVSEEFPISAPKTPVKMRSRSPKITTAKSMSDQRKVSATCYDCGEQGHYIRNCPWKVFARSPEKDEKQCPGSNQAPSQSTNKKDGTLQHNFGANRKVIWKMDNGRTMIITSSEFTPEDAARIPKRQRGRNTFRGARQLTRHLIKYGPPRPEDDESGERFAADDDDDDTDDDDDTTLNSFMERGLEFKACARCGIVGHTASLCLPTCRCDHVPKDCQLNAVIAKTKKEQGTTVQPIRQPMTIDNSGHNPSALPPTPAPVEANHGRSNVTKDVHKSLLVPVSAAKVHNQKPAPRDQASRFCRNCRKPGHRFSDCPLPRAAKAVRRDSQVTSIAHDTNRHLNVQPPPQRIIVKGTVKGRIVPPATVSSLQHQRQQGKQCQENNSSLQLQRGGTLLRQHPRQVLSAPGRPTVVSSSNAPGIAPIWRPIDKSPLGNPTGKKILPVTADKTVAPPPSKINKQSNVPGETSGSRN

SEQ ID NO: 19890 - protein, 567 aa, Oryza sativa
  unsure (1)..(567): unsure at all Xaa locations
  Clone ID: TF_OSC900396j.C1.p8.np
LKFSLVXNKVRSQNKGASTSRVNEAPDTSCVVVVQRLINQNKLLIELLQQHQTPILNPSQMQPQVQFKEAQELTPQVSAPPASQLAHDAMPHVDSKEARIICFICDEQGHYARKCPQRKRKAPMRTEDEVRKMTITGTEWPPPGMTKRQRGNFFHGAPQLTQHLLANGGRVSDSEDSDQVSSRDEDEKSLQRFKQNKMEHKACSHCGEIGHIASSCVTTCVYCEEDHPPGECPTSKITCFLCEGTDHLPKDCQFSFLLTKKMDNQRSNREKHQGNAIPHQDYSFSLTLVPGQRNQNVKSKSRVRQDISCFNCREMGHFTDKCPKPTNTAASTSVHTTPCNQKLAPQRMVIHASGSSPIARIAIAPTPMSALPQGVNAPFQPHPPIDKTKASIRIVPLDVPVQQPRNQVLDEEPMKKDITPEIVHDQKKDITPEIVHDQSVTHAIIPDIMHEEDRITISGSLEQMQYVKPSARQAGVDACHEGGNLYEVDSNDMNYEKFWNXSPIQLPQPSRSQKGATRDKSGEEKIPSATGDQAKQFRVGKFCWKFVIKTQRKKSENKRRSPNQSSC

SEQ ID NO: 19891 - protein, 620 aa, Oryza sativa
  Clone ID: TF_OSC401303j.C1.p3.fg
MADNEKGNKVRSQDIGTSSSRVNETPDTSCVAVVQHLINQNQLLIEILQQHRMPILNPSQMQPQVQLEAVQALTPQVSAPPTSQKAPHAMPHVDPKEASIICFMCDEQGHYARNCPQQKRKAPMRTEDEVRKMIITSTEWPPPGMTKHQRRNSFRGAQQLTEHLLANGGRVSDSEDSDQVSSDDEDEMERKACSRWGEVGHVASLCATTCFHCEEDHPPGECPMSRITCFFCEGTDHVPKDCQFSFLLTKKMANQPASSNGEKHQGNTNPRQDHRFSLTPVPGQRNRNEKRKCRVREDICCFNCQGMGHFADKCPKPRNIAAGTSVHATPCNQKLAPQRIVLHASRSSPIARVATAPIPMSALPQGVDAQFQPQPPADKTEASICVVPLEVPIQQLRNQVQDEEPELKEGITPKTVPNQGKIDLHITANLHEADIPTVLWSLEQTPYPFHRKAASQRTSSSPEASAIHIKEYHLIEIGRKMIDKKRLAKMFSSMKEVGRKVIDKQKHVLHRSRKTPDCNCPATVTLSLSKQDDLVDNLSEVDSEDMNHEKFWNGSITALPQPSLSQPKGAPWSKSGEEKIPSATGGQAKQFRVVKFCWKFVKTQRKKSDKKRRPPNLSSC

SEQ ID NO: 19892 - protein, 664 aa, Oryza sativa
  unsure (1)..(664): unsure at all Xaa locations
  Clone ID: TF_OSC900144j.C1.p12.np
MDEVVATMDISEANEGYASCGSVIEMSRQMKATRVGARAQSWPACPGIPAVGRVGSVLLFTARMGKGLCHVFYDGSIAMECRVKACLVGWPGLAWDELGPRSGCQFGPNHRRPWVKAVLGGQLCEEEDVVNCLPKLRKTVGSASEAREAVKPDVKQEKKCSSVKVLSLVSDLSLPFVFPLSLSKLQQMADNEKGNKVRSQEMGTSSSRVNEAPDTNCVAVVQHLINQNKLLIEILQQHRMPILNPSQMQPQAQLEAIQALTPQVSAPPTSQKAPHAMSHVDSKEASIIGFMCDEQGHYARNCPQQKRKAPMRTEDEVRKMIITSTEWPPPGMTKRQRRNSFRGAPXLTEHLLANGGRVSDSEDSDQVSSDDEDEKSPQGFNQNKMEHKACSHCGEIGHVASSCATTCFHCKEDHPPGECPMSRITCFLCEGTDHVPKDCQLSFLLTKKMANQHARSNGEKHQGNTNPRQDYSFSLTPVPGQRNQNEKRKYXVRKDICCFNCQEMCHFTDKCPKPRNIATSTSVHATPHNQKLAPQRIVIHASRSIPIARVATAPTPVIALPQGVNAQFQPQPPVDKTEASICVVPLDVPAQQPRNQVQDEEPERKKVIVYFNCREEGHYSRDCPLPRQNQPPHFRQFTGSRHTNRQVVTGANAVPVKPSASQKQ

SEQ ID NO: 19893 - protein, 1429 aa, Oryza sativa
  Clone ID: TF_OSC100841j.C1.p2.fg
MAGFADALRPDKFTGVHFKRWQIRVTLWLTAMKCFWVSTGKPEGVLTAEQQKQFEEATTLFVGCILSVLGDRLVEVYMHMTDAKELWDALNTKFGATDASNDLYIMEQFHDYKMADNRSVVEQAHEIQTMAKELELLKCVLPDKFVAGCIIAKLPPSWRSFGTALKHKRQEYSVEGLIASLDVEEKAREKDAASKGDGGQSSANVVHKAQNKSKGKYKAQQTTNFKKQKKNNNNPNQDERTCFVCGQVGHLARKCPQRKGMKAPAGQTSKSANVTIGNTGDGSWYGNLPTVFSVNQSTNWWVDTGANVHVCGDISLFSSYQVARGSTVLMGNGSHASVHGVGTVDLKFTSGKIVQLKNVQHVPSIDRNLVSGSRLTRDGFKLVFESNKVVVSKHGYFIGKGYEYGGLFRFSLSDFCNKSVNHICGSVDDEANVWHSRLCHINFGLMSRLSSMCLIPKFSIVKGSKCHSCVQSKQPRKPHKAAEERNLAPLELLHSDLCEMNGVLTKGGKRYFMTLIDDATRFCYVYLLKTKDEALDYFKIYKAEVENQLDRKIKRLRSDRGGEFFSNEFDLFCEEHGIIHERTPPYSPESNGIAERKNRTLTDLVNAMLDTAGLPKAWLGEALLTSNHVLNRVPNRNKDKTPYEIWIGRKPSLSYLRTWGCLAKVNVPITKKRKLGPKTVDCVFLGYAHHSIAYRFLIVKSEVPDMHVGTIMESRDATFFESFFPMKDTHSGSNQPSEIIPSSITPPEQTEHTHELVSEEDVSEAPRRSKRQRTAKSFGDDFIVYLVDDTPKSISEAYASPDADYWKEAVRSEMDSIIANGTWEVTERPYGCKPVGCKWVFKKKLRPDGTIEKYKARLVAKGYTQKEGEDFFDTYSPVARLTTIRVLLSLAASHGLLVHQMDVKTAFLNGELDEEIYMDQPDGFVVEGQEGKVCKLLKSLYGLKQAPKQWHEKFDKTLTSAGFAVNEADKCVYYRHGGGEGVILCLYVDDILIFGTNLEVINEVKSFLSQNFDMKDLGVADVILNIKLIRGENGITLLQSHYVEKILNRFGYIDSKPSPTPYDPSLLLRKNKRIARNQLEYSQIIGSLMYLASATRPDISFAVSKLSRFTSNPGDDHWRALERVMRYLKDSKIWRALERVMRYLKGTVELGLHYTGYPAVLEGYSDSNWISDVDEIKATSGYVFTLGGGAVSWRSCKQTILTRSTMEAELTALDTATVEAEWLRDHWRALERVMRYLKGTVELGLHYTGYLAVLEGYSDSNWISDVDEIKATSGYIFTLGGGAVSWRSCKQTILTRSTMEAELTTLDTATVEAEWLRDLLMDLPVVEKPVPAILMNCDNQTTCEKTIEVCQEIKKLRSYNVGLHPNSEKHGRSLHEGTITKCDRQCIEGDGFETHSILEGTHLCELDCWSQSMKILGESSRKLTKDLGV

SEQ ID NO: 19894 - protein, 1441 aa, Oryza sativa
  Clone ID: TF_OSC101706j.C1.p9.fg
MARGGAACRTTNPSRRLRRRQQPTGTRPTGSDRAAAASSVERSAAPEAPSSQSTEDEEPTGRARRPPSSSMEAGGEATEAGGVGGGPLAPTSSPPPPHRPSRSNDAFMLVFICNVMIYLWNRLNHYMSIISTIQQPYYRHCDFTMAGFADALRPDKFTGVHFKRWQIRVTLWLTAMKCFWVSTGKPEGVLTAEQQKQFEEATTLFVGCILSVLGDRLVEVYMHMTDAKELWDALNTKFSATDASNDLYIMEQFHDYKIADNRSVVEQAHEIQTMAKELELLKCVLPDKFVAGCIIAKLPPSWRSFGTALKHKRQEYSVEGLIASLDVEEKAREKDVASKGDGGQSSANVVHKAQNKSKGKYKAQQTTNFKKQKKNNNNPNQDERTCFVCGQVGHLARKCPQRKGMKAPAGQTSKSANVTIGNTGDGSGYGNLPTVFSVNQSTNWWVDTGANVHVCADISLFSSYQVARGSTVLMENGSHAYVHGVGTVDLKFTSGKIVQLKNVQHVPSIDRNLVSGSRLTRDGFKLVFESNKVVVSKHGYFIGKGYECGGLFRFSLSDFCNKSVYHICGSVDDEANVWHSRLCHINFGLMSRLSSMCLIPKFSIVKGSKCHSCVQSKQPRKPHKAAEERNLAPLELLHSDLCEMNGVLTKGGKRYFMTLIDDATRFCYVYLLKTKDEALDYFKIYKAEVENQLDRKIKRLRSDRGGEFFSNEFDLFCEEHGIIHERTPPYSPESNGIAERKNRTLTDLVNAMLDTAGLPKAWWGEALLTSNHVLNRVPNRNKDKTPYEIWIGRKPSLSYLRTWGCLAKVNVPITKKRKLGPKTVDCVFLGYAHHSIAYRFLIVKSEVPDMHVGTIMESRDATFFESFFPIKDTHSGSNQPSEIIPSSITPPEQTEHTHELVSEEDVSEAPRRSKRQRTAKSFGDDFTVYLVDDTPKSISEAYASPDADYWKEAVRSEMDSIIANGTWEVTERPYGCKPVGCKWVFKKKLRPDGIIEKYKARLVAKGYTQKEGEDFFDTYSPVARLTTIRVLLSLAASHGLLVHQMDVKTTFLNGELDEEIYMDQPDGFVVEGQEGKVCKLLKSLYGLKQAPKQWHEKFDKTLTSAGFAVNETDKCVYYRHGGGEGVILCLYVDDILIFGTNLEVINEVKSFLSQNFDMKDLGVADVILNIKLIRGENGITLLRSHYVEKILNRFGYIDSKPSPTPYDPSLLLRKNKRIARNQLEYSQIIGSLMYLASATRPDISFAVSKLSRFTSNPGDDHWRALERVMRYLKGTVELGLHYTGYPAVLEGYSDSNWISDVDEIKATSGYVFTLGGGAVSWRSCKQTILTRSTMEAELTALDTATVEAEWLRDLLMDLPVVEKPVPAILMNCDNQTTCEKTIEVCQEIKKLRSYNVGLHPNSEKPGRSLHEGTITKCDKQCIEGDGFETHVNYTMVVTQSM

SEQ ID NO: 19895 - protein, 1216 aa, Oryza sativa
  Clone ID: TF_OSC101997j.C1.p18.fg
MAGFVDALRPDKFTGVHFKRWQIRVTLWLTAMKCFWVSTGKPEGVLTAEQQKQFEEATTLFVGCILSVLGDRLVEVYMHMTDAKELWDALNTKFGATDASNDLYIMEQFHDYKMADNRSVVEQAHEIQTMAKELELLKCVLPDNFVAGCIIAKLPPSWRSFGTALKHKRQEYSVEGLIASLNVEEKAREKDAASKGDGGQSSANVVHKAQNKSKGKYKAQQTTNFKKQKKNNNNPNQDERTCFVCGQVGHLARKCPQRKGMKAPAGQTSKSANVTIGNTGDGSGYGNLPTVFSVNQSTNWWVDTRANVHVCADISLFSSYQVARGSTVLMGNGSHASVHGVGTVDLKFTSGKIVQLKNVQHVPSIDRNLVSGSRLTRDGFKLVFESNKVVVSKHGYFIGKGYECGGLFRFSLSDFCNKSVNHICGSVDDEANVWHSRLCHINFGLMSRLSSMCLIPKFSIVKGSKCHSCVQSKQPRKPHKAAEERNLAPLELLHSDLCEMNGVLTKGGKRYFMTFIDDATRFCYVYLLKTKDEALDYFKIYKAEVENQLDRKIKRLRSDHGGEFFSNEFDLFCEEHGIIHEMTPPYSPESNGIAERKNRTLTDLVNAMLDTAGLPKAWWGEALLTSNHVLNRVPNRNKDKTPYEIWIGRKPSLSYLRTWGCLAKVNVPITKKRKLGPKTVDCVFLGYAHHSIAYRFLVVKSEVSDMHVGTIMESRDAIFFESFFPMKDTHSGSNQPSEIIPSSITPPEQTEHTHELVSEEDVSEAPRRSKRQRTAKSFGDDFTVYLVDDTPKSISEAYASPDADYWKEAVRSEMDSIIANGTWEVTERPYGCKPVGCKWVFKKKLRPDASHGLLVHQMDVKTAFLNGELDEEIYMDQPDGFVVEGQEGKVINEVKSFLSQNFDMKDLGVADVILNIKLIRGENGITLLQSHYVEKILNRFGYIDSKPSPTPYDPSLLLRKNKRIARNQLEYSQIIGSLMYLASATRPDISFAVSKLSRFTSNPGDDHWRALERVMRYLKGTVELGLHYTGYPVVLEGYSDSNWISDVDEIKATSGYVFTLGGGAVSWRSCKQTILTRSTMEAELTALDTATVEAEWLRDLLMDLPVVEKPVPAILMNCDNQTTCEKTIEVCQEIKKLRSYNVGLHPNSEKPGRSLHEGTITKCDRQCIEGDGFETHMSYTMVSILERTHLCELDCWSQSMKILGESSRKLTKDLGV

SEQ ID NO: 19896 - protein, 1247 aa, Oryza sativa
  Clone ID: TF_OSC102144j.C1.p1.fg
MAGFADALRPDKFTGVHFKRWQIRVTLWLTAMKCFWVSTGKPEGVLTAEQQKQFEEATTLFVGCILSILGDRLVEVYMHMTDAKELWDALNTKFGATDASNDLYIMEQFHDYKMADNRSVVEQAHEIQTMAKELELLKCVLPDKFVAGCIIAKLPPSWRSFGTALKHKRQEYSVEGLIASLDVEEKAREKDAASKGDGGQSSANVVHKAQNKSKGKYKAQQTTNFKKQKKNNNNPNQDERTCFVCGQVGHLARKCPQRKGMKAPAGQTSKSANVTIGNTGDGSGYGNLPTVFSVNQSTNWWVDTGANVHVCADISLFSSYQVARGSTVLMGNGSHASVHGVGTVDLKFTSGKIVQLKNVQHVPSIDRNLVSGSRLTRDGFKLVFESNKVVVSKHGYFIGKGYECGGLFRFSLSDFCNKSVNHICGSVDDEANVWHSRLCHINFGLMSLLSSMCLIPKFSIVKGSKCHSCVQSKQPRKPHKAAEERNLAPLELLHSDLCEMNGVLTKGGKRYFMTLIDDATRFCYVYLLKTKDEALDYFKIYKAEVENQLDRKIKRLRSDRGGEFFSNEFDLFCEEHGIIHERTPPYSPESNGIAERKNRTLTDLVNAMLDTAGLPKACIAYRFLIVKSEVPDMHVGTIMESRDATFFESFFPMKDTHSGLNQPSEIIPSSITPPEQTEHTHELVSEEDVSEAPRRSKRQRTAKSFGDDFTVYLVDDTPKSISEAYASPDADYWKEAVRSEMDSIIANGTWEVTERPYGCKPVGCKWVFKKKLRPDGTIEKYKARLVAKGYTQKEGEDFFDTYSPVARLTTIRVLLSLAASHGLLIHQMDVKTAFLNGELDEEIYMDQPDGFVLEGQEGKVCKLLKSLYGLKQAPKQWHEKFDKTLTSAGFAVNEADKCVYYRHGGGEGVILCLYVDDILIFGTNLEVINEVKSFLFQNFDMKDLGVADVILNIKLIRGENGITLLQSHYVEKILNRFGYIDSKPSPTPYDPSLLLRKNKRIARNQLEYSQIIGSLMYLASATRPDISFAVSKLSRFTSNPGDDHWRALERVMRYLKGTVELGLHYTRYPAVLEGYSDSNWISDVDEIKATSGYVFTLGGGAVSWRSCKQTILTRSTMEAELTALDTATVEAEWLRDLLMDLPVVEKPVPAILMNCDNQTTCEKTIEVCQEIKKLRSYNVGLHPNSEKPGRSLHEGTITKCDTQCIEGDGFETHSILEGTHLCELDCWSQSMKILGESSRKLTKDLGV

SEQ ID NO: 19897 - protein, 411 aa, Oryza sativa
  Clone ID: TF_OSC10364j.C1.p1.gm
SAGERERGGSGRGCEGDVDGVAREARTRGAAAVAGAAASGWSVHRRSGEQVSGTSAFDVLHQEKAAIRHCDFTMAGFADALRPDKFTGVHFKRWQIRVTLWLTAMKCFWVSTGKPEGVLTAEQQKQFEEATTLFVGCILSVLGDRLVEVYMHMTDAKELWDALNTKFGATDASNDLYIMEQFHDYKMADNRSVVEQAHEIQTMAKELELLKCVLPDKFMAGCIIAKLPPSWRSFGTALKHKRQEYSVEGLIASLDVEEKAREKDAASKGDGGQSSANVVHKAQNKSKGKYKAQQTTNFKKQKKNNNNPNQDERTCFVCGQVGHLARKCPQRKGMKAPAGQTSKSANVTIGNTGDGSGYGNLPTVARGSTVLMGNGSHASVHVVGTVDLKFTSGKIVQLKNVQHVPSIDRNL

SEQ ID NO: 19898 - protein, 324 aa, Oryza sativa
  Clone ID: TF_OSC12941j.C1.p2.hg
MHMTDAKELWDALNTKFGATDASNDLYIMEQFHDYKMADNRSVVEQAHEIQTMAKELELLKCVLPDKFVAGCIIAKLPPSWRSFGTALKHKRQEYSVEGLIASLDVEEKAWEKDAASKGDGGQSSANVVHKAQNKSKGKYKAQQTTNFKKQKKNNNNPNQDERTCFVCGQVGHLARKCPQRKGMKAPAGQTSKSANVARGSTVLMGNGSHASVHGVGTVDLKFTSGKIVQLKNVQHVPSIDRNLVSGSRLTRDGFNLITPPEQTEHTHELVSEEDVSEAPRRSKRQRTAKSFGDDFTVYLVDDTPKSISEAYASPDADYWKEAV

SEQ ID NO: 19899 - protein, 678 aa, Oryza sativa
  Clone ID: TF_OSC14597j.C1.p3.fg
MAGFADALRPDKFTGVHFKRWQIRVTLWLTAMKCFWVSTGKPEGVLTAEQQKQFEEATTLFVGCILSVLGDRLVEVYMHMTDAKELWDALNTKFGATDASNDLYIMEQFHDYKMADNRSVVEQAHEIQTMAKELELLKCVLPDKFVAGCIIAKLPPSWRSFGTALKHKRQEYSVEGLIASLDVEEKAREKDAASKGDGGQSSANIVHKAQNKSKGKYKAQQTTNFKKQKKNNNNPNQDERTCFVCGQVGHLARKCPQRKGMKAPAGQTSKSANVTIGNTGDGSGYGNLPTVFSVNQSTNWWVDTGANVHVCADISLFSSYQVARGSTVLMGNGSHASVHGVGTVDLKFTSGKIVQLKNVQHVPSINRNLVSGSRLTRDGFKLVFESNKVVVSKHGYFIGKGYECGGLFRFSLSDFCNKSVNHICGSVDDEANVWHSRLCHINFGLMSRLSSMCLIPKFSIVKGSKCHSCVQSKQPRKPHKAAEERNLAPLELLHSDLCEMNGVLTKGGKRYFMTLIDDATRFCYVYLLKTKDEALDYFKIYKAEVENQLDRKIKRLRSDRGGEFFSNEFDLFCEEHGIIHERTPPYSPESNGIAERKNRTLTDLVNAMLDTAGLPKAWWGEALLTSNHVLNRVPNRNKDKTPYEIWIGRKPSLSYLRTWGCLAKVNVPITKKRKLGPM

SEQ ID NO: 19900 - protein, 1281 aa, Oryza sativa
  Clone ID: TF_OSC15392j.C1.p2.fg
MAGFAGALRPDKFTGVHFKRWQIRVTLWLTAMKCFWVSTGKPEGVLTAEQQKQFEEATTLFVGCILSVLGDRLVEVYMHMTDAKELWDALNTKFGATDASNDLYIMEQFHDYKMADNRSVVEQAHEIQTMAKELELLKCVLPDKFVAGCIIAKLPPSWRSFGTALKHKRQEYSVEGLIASLDVEEKAREKDAASKGDGGQSSANVVHKAQNKSKGKYKAQQTTNFKKQKKNNNNPNQDERTCFVCGQVGHLARKCPQRKGMKAPAGQTSKSANVTIGNTGDGSGYGNLPTVFSVNQSTNWWVDTGANVHVCADISLFSSYQVARGSTVLMGNGSHASVHGVGTVDLKFTSGKIVQLKNVQHVPSIDKNLVSGSRLTRDGFKLVFESNKVVVSKHGYFIGKGYECGGLFRFSFSDFCNKSVNHICGSVDDEANVWHSRLCHINFGLMSRLSSMCLIPKFSIVKGSKCHSCVQSKQPRKPHKAAEERNLAPLELLHSDLCEMNGVLTKGGKRYFMTLIDDATRFCYVYLLKTKDEALDYFKIYKAEVENQLDRKIKRLRSDRGGEFFSNEFDLFCEEHGIIHERTPPYSPESNGIAERKNRTLTDLVNAMLDTAGLPKAWWGEALLTSNHVLNRVPNRNKDKTPYEIWIGRKPSLSYLRTWGCLAKVNVPITKKRKLGPKTVDCVFLGYAHHSIAYRFLIVKSEVPDMHVGTIMESRDATFFESFFPMKDTHSGSNQPSEIIPSSITPPEQTEHTHELVSEEDVSEAPRRSKRQRTAKSFGDDFTVYLVDDTPKSISEAYASPDADYWKEAVRSEMDSIIANGTWEVTEQPYGCKPVGCKWVFKKKLRPDGTIEKYKARLVAKGYTQKEGEDFFDTYSPVARLTTIRVLLSLAASHGLLVHQMDVKTAFLNGELDEEIYMDQPDGFAVNEADKCMYYRHGGGEGVILCLYVDDILIFGTNLEVINEVKSFLSQNFDMKDLGVADVILNIKLIRGENGITLLQSHYVEKILNRFGYIDSKPSPTPYDPSLLLRKNKRIARNQLEYSQIIGSLMYLASATRPDISFAVSKLSRFTSNPGDDHWRALERVMRYLKGTVELGLHYTGYPVVLEGYSDSNWISDVDEIKATSGYVFTLVGGAVSWRSCKQTILTRSTMEAELTALDTATVEAEWLRDLLMDLPVVEKPVPAILMNCDNQTTCEKTIEVYQEIKKLRSYNVGLHPNSEKPGRSLHEGTITKCDRQCIEGDGFETHSILEGTHLCELDCWSQSMKILGESSRKLTKDLGV

SEQ ID NO: 19901 - protein, 1258 aa, Oryza sativa
  Clone ID: TF_OSC16532j.C1.p1.fg
MAGFADALRPDKFTGVHFKRWQIRVTLWLTAMKCFWVSTGKPEGVLTAEQQKQFEEATTLFVGCILSILGDRLVEVYMHMTDAKELWDALNTKFGATDASNDLYIMEQFHDYKMADNRFVVEQAHEIQTMAKELELLKCVLPDKFVAGCIIAKLPPSWRSFGTALKHKRQEYSVEGLIASLDVEEKAREKDAASKGDGGQSSANVVHKAQNKSKGKYKAQQTTNFKKQKKNNNNPNQDERTCFVCGQVGHLARKCPQRKGMKAPAGQTSKSANVTIGNTGDGSGYGNLPTVFSVNQSTNWWVDTGANVHFCADISLFSSYQVARGSTVLMGNGSHASVHGVGTVDLKFTSGKIVQLKNVQHVPSIDRNLVSGSRLTRNGFKLVFESNKVVVSKHGYFIGKGYECGGLFRFSLSDFCNKSVNHICGSVDDEANVWHSRLCHINFGLMSRLSSMCLIPKFSIVKGSKCHSCVQSKQPRKPHKAAEERNLAPLELLHSDLCEMNGVLTKGGKRYFMTLIDDATRFCYVYLLKTKDEALDYFKIYKAEVENQLDRKIKRLRSDRGGEFFSNEFDLFCEEHGIIHERTPPYSPESNRIAERKNRTLTDLVNAMLDTAGLPKAWWGEALLTSNHVLNRVPNRNKDKTPYEIWIGRKPSLSYLRTWGCLAKVNVPITKKRKLGPKTVDCVFLGYAYHSIAYRFLLVKSEVPDMHVGTIMESRDATFFESFFPMKDTHSGSNQPSEIIPSSITPPEQTEHTHELVSEEDVSEAPRRSKRQRTAKSFGDDFTVYLVDDTPKSISEAYASPDADYWKEAVRSEMDSIIANGTWEVIERPYGCKPVGYKWVFKKKLRPDGTIEKYKARLVAKGYTQKEGEDFFDTYSPVARLTTIRVLLSLAPHMVFSFIKWTLRQLFLMESWMRRSIWINLMGFAVNEADKCVYYRHGGGEGVILCLYVDDILIFGTNLEVINEVKSFLSQNFDMKDLGVADIILNIKLIRGENGITLLQSHYVEKILNRFGYIDSKPSPTPYDPSLLLRKNKRIARNQLEYSQIIGSLMYLASATRPDISFAVSKLSRFTSNPGDDHWRALERVMRYLKGTVELGLHYTGYPAVLEGYSDSNWISDVDEIKATSGYVFTLGGGAVSWRSCKQTILTRSTMEAELTALDTATVEAEWLRDLLMDLPVVEKPVPAILMNCDNQTTCEKTIEVCQEIKKLRSYNVGLHPNSEKPGRSLHEGTITKCDRQCIEGDGLETHVSYTMVVTQSM

SEQ ID NO: 19902 - protein, 1302 aa, Oryza sativa
  Clone ID: TF_OSC21378j.C1.p19.np
MASFADALRPDKFTGVHFKRWQIRVTLWLTAMKCFWVSTGKPEGVLTAEQQKQFEEATTLFVGCILSVLGNRLVEVYMHMTDAKELWDALNTKFGATDGSNDLYIMEQFHDYKMADNRSVVEQAHEIQTMAKELELLKCVLPDKFVAGCIIAKLPPSWRSFGTALKHKRQEYSVEGLIASLDVEEKAREKDAASKGDGGQSSANVVHKAQNKSKGKYKAQQTTNFKKQKKNNNNPNQDERTCFVCGQVGHLARKCPQRKGMKAPAGQTSKSANVTIGNTGDGSGYGNLPTVFSVNQSTNWWVDTGANVHVCADISLFSSYQVARGSTVLMGNGSHASVHGVGTVDLKFTSGKIVQLKNVQHVPSIDRNLVSGSRLTRDGFKLVFESNKVVVSKHGYFIGKGYECGGLFRFSLSDFCNKSVNHICGSVDDEANVWHSRLCHINFGLMSRLSSMCLIPKFSIVKGSKCHSCVQSKQPRKPHKAAEERNLAPLELLHSDLCEMNGVLTKGGKRYFMTFIDDATRFCYVYLLKTKDEALDYFKIYKAEVENQLDRKIKRLRSDRGGEFFSNEFDLFCEEHGIIYEMTPPYSPESNGIAERKNRTLTDLVNAMLDTAGLPKAWWGEALLTSNHVLNRVPNRNKDKTPYEIWIGRKPSLSYLRTWGCLAKVNVPITKKRKLGPKTVDCVFLGYAHHSIAYRFLIVKSEVPDMHVGTIMESRDAIFFESFFPMKDTHSGSNQPFEIIPSSITPPEQTEHTHELVSEEDVSEAPRRSKRQRTAKSFGDDFTVYLVDDTPKSISEAYASPDADYWKEAVRSEMDSIIANGTWEVIERPYGCKPVGCKWVFKKKLRPDGTIEKYKARLVAKGYTQKEGEDFFDTYSPVARLTTIRVLLSLAASHGLLVHQMDVKTAFLNGELDEEIYMDQPDGFVVEGQERKVCKLLKSLYGLKQAPKQWHEKFDKTLTSAGFAVNEADKCVYYRHGGGEGVILCLYVDDILIFGTNLEVINEVKSFLSQNFDMKDLGVADVILNIKLIRGENGITLLQSHYVEKILNRFGYIDSKPSPTPYDPSLLLRKNKRIARNQLEYSQIIGSLMYLASATRPDISFAVSKLSRFTSNPGDDHWRALERVMRYLKGTVELGLHYTGYPAVLEGYSDSNWISDVDEIKATSGYVFTLGGGAVSWRSCKQTILTRSTMEAELTALDTATVEAEWLRDLLMDLPVVEKPVPAILMNCDNQTVIVKVNSSKDNMKSSRHVKRRLKSVRKLRNSGVITLDYIQTARNLADPFTKGLSRNVIDNASKEMGLRPI

SEQ ID NO: 19903 - protein, 1083 aa, Oryza sativa
  Clone ID: TF_OSC22414j.C1.p2.fg
MAERLRRIRGGGAMLVLILLAVVASAQQEYEVTSSSSSSPSRRGAGEGHRPPPWAQQEYDVTSAATTDYSIPLAGVHQRSGEQVSGTSAFDVLHREKAAIRLNRYMSIISTIQKPYYRHCDFTMAGFADALRPDKFTGVHFKRWQIRVTLWLTTMKCFWVSTGKSEGVLTAEQQKQFEEATTLFVGCILSVLGDRLVEVYMHMTDAKELWDALNTKFGATDASNDLYIMKQFHDYKMADNRSVVEQAHEIQTMAKELELLKCVLPDKFVAGCIIVKLPPSWRSFGTALKHKRQEYSVEGLIASLDVEEKAREKDAASKGDGGQSSANVVHKAQNKSKGKYKAQQTTNFKKQKKNNNNPNQDERTCFVCGQVGHLARKCPQRKGMKAPAGQTSKSANVTIGNTGDGSGYGNLPTVFSVNQSTNWWVDTGANVARGSTVLMGNGSHASVHGVGTVDLKFTSGKIVQLKNVQHVPSIDRNLVSGSRLTRDGFKLVFESNKVVVSKHGYFIGKGFECGGLFRFSLSDFCNKSVNHICGSVDDEVNVWHSRLCHINFGLMSRLSSMCLIPKFSIVKGSKCHSCVQSKQPRKPHKAAEERNLAPLELLHSDLCEMNGVLTKGGKRYFMTLIDDATRFCYVYLLKTKDEALDYFKIYKAEVENQLDRKIKRLRSDRGGEFFSNEFDLFCEEHGIIHERTPPYSPESNGIAERKNRTLTDLVNAMLDTAGLPKAWWGEALLTSNHVLNRVPNRNKDKTPYEIWIGRKPSLSYLRTWGCLAKVNVPITKKRKLGPKTVDCVFLGYAHHSIAYRFLIVKSEVPDMHVGTIMESRDATFFESFFPMKDTHSGSNQPSEIIPSSITPPEQTEHTHELVSEEDVSEAPRRSKRQRTAKSFGDDFTVYLVDDTPKSISEAYASPDADYWKEAVRSEMDSIIANGTWEVTERPYGCKPVGCKWVFKKKLRPDGTIEKYKARLVAKGYTQKEGEDFFDTYSPVARLTTIRVLLSLAASHGLLVHQMDVKTAFLNGELDEEIYMDQPDGFVVEGPCDAYCHAQKFPNRIPSRMCIKIPVQDQPGYTNDNVDIQIHVLQTS

SEQ ID NO: 19904 - protein, 1295 aa, Oryza sativa
  Clone ID: TF_OSC23264j.C1.p7.gm
MSTAAASETSSASAWWAALDSVPCAERRIGQRRHGQQPPPSTRVSCCWAEAAAVAEQAGLRWSSAHEAGSGSGSARGGGERERQAATGNKQIHDERVSDKADTRLTTRMTRWRRAAGNWQLPNSTVYALAKLAPLVASLFLSFSSCTINQSIDGSAHRSNYSIPLAGVHQRSGEQVSGTSAFNVLHREKAAIRHCDFTMAGFADALRPDKFTGVHFKRWQIRVTLWLTAMKCFWVSTGKPEGVLTAEQQKQFEEATTLFVGCILSVLGDRLVEVYMHMTDAKELWDALNTKFGATDASNDLYIIEQFHDYKMADNRSVIEQAHEIQTMAKELELRKCVLPDKFVAGCIIAKLPSSWRSFGTALKHKRQEYSVEGLIASLDVEEKAREKDAASKGDGGQSSANVVHKAQNKSKGKYKAQQTTNFKKQKKNNNNPNQDERTCFVCGQVGHLARKCPQRKGMKAPAGQTSKSANVTIGNTGDGSGYGNLPTVARGSTVLMGNGSQASVHGVGTVDLKFTSGKIVQLKNVQHVPSIDRNLVSGSRLTRDGFKLVFESNKVVVSKHGYFIGKGYECGGLFRFSLSDFCNKSVNHICGSVDDEANVWHSHYWKEAVRSEMDSIIANGTWEVTERPYGCKPVGCKWVFKKKLRPDGFAVNEADKCVYYRHGGGEGVILCLYVDDILIFGTNLEVINESHYVEKILNRFGYIDSKPSPTPYDPSLLLRKNKRIARNQLEYSQIIGSLMYLASATRPDISFAVSKLSRFTSNPGDDHWRALERVMRYLKGTVELGLHYTGYPAVLEGYSDSNWISDVDEIKATSGYVFTLGGGAVSWRSCKQTILTRSTMEAELTALDTATVEAEWLRDLLMDLPVVEKPVPAILMNCDNQTEIKKLRSYNVGLHPNSEKPGRSLHEGTITKCDKQCIEGDGFETHVSGTSAFDVLHREKAAIRYSSNTPALACPALRSGGGGDHGGETQQRGAPAAALLSLGGAATCTRFGSAGEPADCGTAAAGLRPTRLLFTPAMARLSCVQAAVTTCRLPLTNPWDTQQTKLWELSKTPSTVIGKASATYTWRARMRDADLCEDTHWQYHKVESSDTIDNVKAKIQDKEGIPPDQQRLIFAGKQLEDGRTLADYNIQKESTLHLVLRLRGGMQIFVKTLTRKTHHFGASLSLLASSLRMDKEGIPPDQQRLIFAGKQLKDGRTLADYNIQKESTLHLVLRLRGGMQIFVKTLTGKTITLEVESSDTIDNVKAKIQDKEGIPPDQQRLIFAGKQLEDGRTLAGYNIQKESTLHLALRLRGG

SEQ ID NO: 19905 - protein, 1459 aa, Oryza sativa
  Clone ID: TF_OSC26101j.C1.p4.fg
MDGRGRGRREVDLAAATGGEELGVSSGSGVSKAGPQAMRNRQRELREDGSRCGRPRMEERWEPESASSSSSATPPASMLDLTLLAALELRLIFLSRSGQSSTKPTRPSWPSSRHSSMRRWCSSIGELEPAARCRAEEDAEHVLRQVRPAAGCVRCSVFMCAPPWGKPPRSNDAFMLVFICNVMIYLWNKLNPYMPIISTIQKPYYRHCDFTMAGFADALRPDKFTGVHFKRWQIRVTLWLTAMKCFWVSTGKPEGVLTAEQQKQFEEATTLFVGCILSVLGDRLVEVYMHMTDAKELWDALNTKFGATDASNDLYIMEQFHDYKMADNRSVVEQAHEIQTMAKELELLKCVLPNKFVAGCIIAKLPPSWRSFGTALKHKRQEYSVEGLIASLDVEEKAREKDAASKGDGGQSSANVVHKAQNKSKGKYKAQQTTNFKKQKKNNNNPNQDERTCFVCGQVGHLARKCPQRKGMKAPAGQTSKSANVTIGNTGDGSGYGNLPTVFSVNQSTNWWVDTGANVARGSTVLMGNGSHASVHGVGTVDLKFTSGKIVQLKNVQHVPSIDRNLVSGSRLTRDGFKLVFESNKVVVSKHGYFIGKGYECGGLFRFSLSDFCNKSVNHICGSVDDEANVWHSRLCHINFGLMSRLSSMCLIPKFSIVKGSKCHSCVQSKQPRKPHKAAEERNLAPLELLHSDLCEMNGVLTKGGKRYFMTLIDDATRFCYVYLLKTKDEALDYFKIYKAEVENQLDRKIKRLRSDRGGEFFSNEFDLFCEEHGIIHERTPPYSPESNGIAERKNRTLTDLVNAMLDTAGLPKAWWGEALLTSNHVLNRVPNRNKDKTPYEIWIGRKPSLSYLRTWGCLAKVNVPITKKRKLGPKTVDCVFLGYAHHSIAYRFLIVKSEDVSEAPRRSKRQRTAKSFGDDFTVYLVDDTPKSISEAYASPDADYWKEAVRSEMDSIIANGTWEVTERPYGCKPVGCKWVFKKKLRPDGTIEKYKARLVAKGYTQKEDEDFFDTYSPVARLTTIRVLLSLAASHGLLVHQMDVKTVFLNGELDEEIYMDQPDGFVVEGQEGKVCKLLKSLYGLKQAPKQWHEKFDKTLTSAGFAVNEADKCVYYRHGGGEGVILCLYVDDILIFGTNLEVINEVKSFLSQNFDMKDLGVADVILNIKLIRGENGITLLQSHYVEKILNRFGYIDSKPSPTPYDPSLLLRKNKRIARNQLEYSQIIGSLMYLASATRPDISFAVSKLSRFTSNPGDDHWRALERVMRYLKGTVELGLHYTGYPAVLEGYSDSNWISDVDEIKATSGYVFTLGGGAVSWRSCKQTILTRSTMEAELTALDTATVEAEWLRDLLMDLPVVEKPVPAILMNCDNQTTCEKTIEVCQEIKKLRSYNVGLHPNSEKPGRSLHEGTITKCDRQCIEGDGFETHSILEGTHLCELDCWSQSMKILGESSRKLTKDLGV

SEQ ID NO: 19906 - protein, 884 aa, Oryza sativa
  Clone ID: TF_OSC28278j.C1.p3.gm
MPVRCNGRRVAAEVLGAVVGLLNELDAGQRQELHQLKANDYSIPLAGVHQRSGEQVSGTSVFDVLHREKAAIRHCDFTMAGFADALRPDKFTGVHFKRWQIRVTLWLTAMKCFWVSTGKPEGVLTAEQQKQFEEATTLFVGCILSVLGDRLVEVYMHMTDAKELWDALNSKFGATDASNDLYIMEQFHDYKMADNRSVVEQAHEIQAMAKELELLKCVLPDKFVAGCIIAKLPPSWRSFGTALKHKRQEYSVEGLIASLDVEEKAREKDAASKGDGGQSSANVVHKAQNKSKGKYKAQQTTNFKKQKKNNNNPNQDERTCFVCGQVGHLARKCPQRKGMKAPAGQTSKSANVTIGNTGDGSGYGNLPTVARGSTVLMGNGSHASVHGVGTVDLKFTSEKIVQLKNVQHVPSIDRNLVSGSQSRDAIFFESFFPMKDTHSGSNQPSEIIPSSITPPEQTEHTHELVSEEDVSEAPRRSKRQRTAKSFGDDFTVYLVDDTPKSISEAYASPDADYWKEAVRSEMDSIIANGTWEVTERPYGCKPVGCKWVFKKKLRPDASHGLLVHQMDVKTAFLNGELDEEIYMDQPDGFVVEGFAVNEADKCVYYRHGGGEGVILCLYVDDILIFGTNLEVINESHYVEKILNRFGYIDSKPSPTPYDPSLLLRKNKRIARNQLEYSQIIGSLMYLASATRPDISFAVSKLSRFTSNPGDDHWRALERVMRYLKGTVELGLHYTGYPAVLEGYSDSNWISDVDEIKATSGYVFTLGGGAVSWRSCKQTILTRSTMEAELTALDTATVEAEWLRDLLMDLPVVEKPVPAILMNCDNQTAAAAVPKVLIADDCYLSMPSPISSATSSATESPRPPHRLGPGSSSRRTLSAPPPAIR

SEQ ID NO: 19907 - protein, 1308 aa, Oryza sativa
  Clone ID: TF_OSC28278j.C1.p3.np
MAGFADALRPDKFTGVHFKRWQIRVTLWLTAMKCFWVSTGKPEGVLTAEQQKQFEEATTLFVGCILSVLGDRLVEVYMHMTDAKELWDALNSKFGATDASNDLYIMEQFHDYKMADNRSVVEQAHEIQAMAKELELLKCVLPDKFVAGCIIAKLPPSWRSFGTALKHKRQEYSVEGLIASLDVEEKAREKDAASKGDGGQSSANVVHKAQNKSKGKYKAQQTTNFKKQKKNNNNPNQDERTCFVCGQVGHLARKCPQRKGMKAPAGQTSKSANVTIGNTGDGSGYGNLPTVFSVNQSTNWWVDTGANVHVCADISLFSSYQVARGSTVLMGNGSHASVHGVGTVDLKFTSEKIVQLKNVQHVPSIDRNLVSGSRLTRDGFKLVFESNKVVVSKHGYFIGKGYECVGLFRFSLSDFCNKSVNHICGSVDDEANVWHSRLCHINFGLMSRLSSMCLIPKFSIVKGSKCHSCVQSKQPRKPHKAAEERNLAPLELLHSDLCEMNGVLTKGGKRYFMTFIDDATRFCYVYLLKTKDEALDYFKIYKAEVENQLDRKIKRLRSDRGGEFFSNEFDLFCEEHGIIHEMTPPYSPESNGIAERKNRTLTDLVNAMLDTAGLPKAWWGEALLTSNHVLNRVPNRNKDKTPYEIWIGRKPSLSYLRTWGCLAKVNVPITKKRKLGPKTVDCVFLGYAHHSIAYRFLIVKSEVPDMHVGTIIESRDAIFFESFFPMKDTHSGSNQPSEIIPSSITPPEQTEHTHELVSEEDVSEAPRRSKRQRTAKSFGDDFTVYLVDDTPKSISEAYASPDADYWKEAVRSEMDSIIANGTWEVTERPYGCKPVGCKWVFKKKLRPDGTIEKYKARLVAKGYTQKEGEDFFDTYSPVARLTTIRVLLSLAASHGLLVHQMDVKTAFLNGELDEEIYMDQPDGFVVEGQEGKVCKLLKSLYGLKQAPKQWHEKFDKTLTSAGFAVNEADKCVYYRHGGGEGVILCLYVDDILIFGTNLEVINEVKSFLSQNFDMKDLGVADVILNIKLIRGENGITLLQSHYVEKILNRFGYIDSKPSPTPYDPSLLLRKNKRIARNQLEYSQIIGSLMYLASATRPDISFAVSKLSRFTSNPGDDHWRALERVMRYLKGTVELGLHYTGYPAVLEGYSDSNWISDVDEIKATSGYVFTLGGGAVSWRSCKQTILTRSTMEAELTALDTATVEAEWLRDLLMDLPVVEKPTCEKTIEVCQKIKKLWSYNVGLHPNSEKPGRSLHEGTITKCDRQCIEGDGFETHSILERTHLCELDCWSQSMKILGESSRKLTKDLGV

SEQ ID NO: 19908 - protein, 1366 aa, Oryza sativa
  Clone ID: TF_OSC2875j.C1.p7.fg
MQPPFVTDPPSSRNICENQSRVCLLLCTAPSLVDYSIPLASVHQRSGEQVSGTSAFDVLHREKAAIRHCDFTMAGFADALRPDKFTGVHFKRWQIRVTLWLTAMKCFWVSTGKPEGVLTAEQQKQFEEATTLFVGCILSVLGDRLVEVYMHMTDAKELWDALNTKFGATDASNDLYIMEQFHDYKMADNRSVVEQAHEIQTMAKELELLKCVLPDKFVAGCIIAKLPPSWRKLGKKDAASKGDGGQSSANVVHKAQNKSKGKYKAQQTTNFKKQKKNNNNPNQDERTCFVCGQVGHLARKCPQRKGMKAPAGQTSKSANVTIGNTGDGSGYGNLPTVFSVNQSTNWWVDTGANLHVCADISLFSSYQVARGSTVLMGNGSHASVHGVGTVDLKFTSGKIVQLKNVQHVPSIDRNLVSGSRLTRDGFKLVFESNKVVVSKHGYFIGKGYECGGLFRFSLSDFCNKSVNHICGSVDDEANVWHSRLCHINFGLMSRLSSMCLIPKFSIVKGSKCHSCVQSKQPRKPHKAAEERNLAPLELLHSDLCEMNGVLTKGGKRYFMTLIDDATRFCYVYLLKTKDEALDYFKIYKAEVENQLDRKIKRLRSDRGGEFFSNEFDLFCEEHGIIHERTPPYSPESNGIAERKNRTLTDLVNAMLDTAGLPKAWWGEALLTSNHVLNRVPNRNKDKTPYEIWIGRKPSLSYLRTWGCLAKVNVPITKKRKLGPKTVDCVFLGYAHHSIAYRFLIVKSEVPDMHVGTIMESRDATFFESFFPMKDTHSGSNQPSEIIPSSITPTEQTEHTHELVSEEDVSEAPRRSKRQRTAKSFGDDFTVYLVDDTPKSISEAYASPDADYWKEAVRSEMDSIIANGTWEVTERPYGCKPVGCKWVFKKKLRPDGTIEKYKARLVAKGYTQKEGEDFFDTYSPVARLTTIRVLLSLAASHGLLVHQMDVKTAFLNGELDEEIYMDQPDGFVLEGQEGKVCKLLKSLYGLKQAPKQWHEKFDKTLTSAGFAVNEANKCVYYRHGGGEGVILCLYVDDILIFGTNLEVINEVKSFLSQNFDMKDLGVADVILNIKLIRGENGITLLQSHYVEKILNRFGYIDSKPSPTPYDPSLLLRKNKRIARNQLEYSQIIGSLMYLASATRPDISFAVSKLSRFTSNPGDDHWRALERVMRYLKGTVELGLHYTGYPAVLEGYSDSNWISDVDEIKATSGYVFTLGGGAVSWRSCKQTILTRSTMEAELTALDIATVEAEWLRDLLMDLPVVEKPVPAILMNCDNQTTCEKTIEVCQEIKKLRSYNVGLHPNSEKPGRSLHEGTITKCDRQCIEGDGFETHSILEGTHLCELDCWSQSMKILGESSRKLTKDLGV

SEQ ID NO: 19909 - protein, 334 aa, Oryza sativa
  Clone ID: TF_OSC29687j.C1.p1.fg
MAGFADALRPDKFTGVHFKRWQIRVTLWLTAMKCFWVSTGKPEGVLTAEQQKQFEEATTLFVGCILSVLGDRLVEVYMHMTDAKELWDALNTKFGATDASNDLYIMEQFHDYKMADNRSVVEQAHEIQTMAKELELLKCVLPDKFVAGCIIAKLPSSWRSFGTALKHKRQEYSVEGLIASLDVEEKAREKDAASKGDGGQSSANVVHKAQNKSKGKYKAQQTTNFKKQKKNNNNPNQDERTCFVCGQVGHLARKCPQRKGMKAPAGQTSKSANVTIGNTGDGSGYGRTGFHRPNGEWVTCFCSWCWHGRSEVYFGKDRAAEERAACPFYRQESC

SEQ ID NO: 19910 - protein, 285 aa, Oryza sativa
  Clone ID: TF_OSC30492j.C1.p1.fg
MAGFADALRPDKFTGVHFKRWQIRVTLWLTAMKCFWVSTGKPEGVLTAEQQKQFEEATTLFVGCILSVLGDRLVEVYMHMTDAKELWDALNTKFGATDASNDLYIMEQFHDYKMADNRSVVEQAHEIQTMAKELELLKCVLPDKFVAGCIIAKLPPSWRSFGTALKHKRQEYSVEGLIASLDVEEKAREKDAASKGDGGQSSANVVHKAQNKSKGKYKAQQTTNFKKQKKNNNNPNQDERTCFVCGQVGHLARKCPQRKGMKAPAGQTSKSANVTIGNTGDGSGY

SEQ ID NO: 19911 - protein, 453 aa, Oryza sativa
  Clone ID: TF_OSC3839j.C1.p1.gm
VIEKIIAVSISNAAMISTKKRIPRTPPARERAPLAGGAPTAKGRAPPLGGKAPLAWWRMPRLRHRAPSAGRSPWLRDYSIPLAGVHRRLGEQVSGTSAFDVLHREKAAIRHCDFTMAGFADALRPDKFTGVHFKRWQIRVTLWLTAMKCFWVSTGKPEGVLTAKQQKQFEEATTLFVGCILSVLGDRLVEVYMHMTDAKELWDALNTKFGATDASNDLYIMEQFHDYKMADNRSVVEQAHEIQTMAKELELLKCVLPDKFVAGCIIAKLPPSWRSFGTALKHKRQEYSVEGLIASLDVEEKAREKDAASKGDGGQSSANVVHKAQNKSKGKYKAQQTTNFKKQKKNNNNPNQDERTCFVCGQVGHLARKCPQRKGMKAPAGQTSKSANVTIGNTGDGSGYGNLPTVARGSTVLMGNGSHASVHGVGTVDLKFTSGKIVQLKNVQHVPSIDRNL

SEQ ID NO: 19912 - protein, 1029 aa, Oryza sativa
  Clone ID: TF_OSC400036j.C1.p96.gm
MAGFADALRPDKFTGVHFKRWQIRVTLWLTAMKCFWVSTGKPEGVLTAEQQKQFEEATTLFVGCILSVLGDRLVEVYMHMTDAKELWDALNTKFGATDASNDLYIMEQFHDYKMADNRSVVEQAHEIQTMAKELELLKCVLPDKFVAGCIIAKLPPSWRSFGTALKHKRQEYSVEGLIASLDVEEKAREKDAASKGDGGQSSANVVHKAQNKSKGKYKAQQTTNFKKQKKNNNNPNQDERTCFVCGQVGHLARKCPQRKGMKAPAGQTSKSANVTIGNTGDGSGYGNLPTVARGSTVLMGNGSHASVHGVGTVDLKFTSGKIVQLKNVQHVPSIDRNLVSGSRLTRDGFKLVFESNKVVVSKHGYFIGKGYECGGLFRFSLSDFCNNMCLIPKFSIVKGSKCHSCVQSKQPRKPHKAAEERNLAPLELLHSDLCEMNGVLTKEVENQLDRKIKRLRSDRGGEFFSNEFDLFCEEHGIIHERTPPYSPESNGIAERKNRTLTDLVNAMLDTAGLPKACEAPRRSKRQRTAKSFGDDFTVYLVDDTPKSISEAYASPDADYWKEAVRSEMDSIIANGTWEVTERPYGCKPVGCKWVFKKKLRPDASHGLLVHQMDVKTAFLNGELDEEIYMDQPDGFVVEGFAVNEADKCVYYRHGGGEGVILCLYVDDILIFGTNLEVINESHYVEKILNRFGYIDSKPSPTPYDPSLLLRKNKRIARNQLEYSQIIGSLMYLASATRPDISFAVSKLSRFTSNPGDDHWRALERVMRYLKGTVELGLHYTGYPAVLEGYSDSNWISDVDEIKATSGYVFTLGGGAVSWSKDVVLQSILEGTHLCELDCWSQSMKILDYSIPLAGVHQRSGEQVSGTSAFDVLHREKAAIRVLTWNDGFYNGEIKTRKIENNLVTELTAEQLLLQRSEQLRELYNSLLSGESADQQRRRPVTALSPEDLGNVEWYYVVCMTYAFRPGQCVPGKSFASNGCAWLCNAQSADSKAFPRKLLAKNASIQTIVCVPFMTGVLELGTTDPKTDTF

SEQ ID NO: 19913 - protein, 1320 aa, Oryza sativa
  Clone ID: TF_OSC400151j.C1.p72.fg
MAGFADALRPDKFTGVHFKRWQIRVTLWLTAMKCFWVSTGKPEGVLTAEQQKQFEEATTLFVGCILSVLGDRLVEVYMHMTDAKELWDALNTKFGATDASNDLYIMEQFHDYKMADNRSVVEQAHEIQTMAKELELLKCVLPDKFVAGCIIAKLPSSWRSFGTALKHKRQEYSVEGLIASLDVEEKAREKDAASKGDGGQSSANVVHKAQNKSKGKYKAQQTTNFKKQKKNNNNPNQDERTCFVCGQVGHLARKCPQRKGMKAPAGQTSKSANVTIGNTGDGSGYGNLPTVFSVNQSTNWWVDTGANVHVCADISLFSSYQVARGSTVLMGNGSHASVHGVGTVDLKFTSGKIVQLKNVQHVPSIDRNLVSGSRLTRDGFKLVFESNKVVVSKHGYFIGKGYECGGLFRFSLSDFCNKSVNHICGSVDDEANVWHSRLCHINFGLMSRLSSMCLIPKFSIVKGSKCHSCVQSKQPRKPHKAAKERNLAPLELLHSDLCEMNGVLTNGGKRYFMTLIDDATRFCYVYLLKTKDEALDYFKIYKAEVENQLDRKIKRLRSDRGGEFFSNEFDLFCEEHGIIHERTPPYSPESNGIAERKNRTLTDLVNAMLDTAGLPKAWWGEALLTSNHVSNRVPNRNKDKTPYEIWIGRKPSLSYLRTWGCLAKVNVPITKKRKLGPKTVDCVFLGYAHHSIAYRFLIVKSEVPDMHVGTIMESRDSIFFESFFPMKDTHSGSNQPSEIIPSSITPPEQTEHTHELVSEEDVSEAPRRSKRQRTAKSFGDDFTVYLVDDTPKSISEAYASPDADYWKEAVRSEMDSIIANGTWEVTERPYGCKPVGCKWVFKKKLRPDGTIEKYKARLVAKGYTQKEGEDFCDTYSPVARLTTIRVLLSLAASHGLLVHQMDVKTAFLNGELDEEIYMDQPDGFVVEGQEGKVCKLLKSLYGLKQAPKQWHEKFDKTLTSAGFAVNEADKCVYYRHGGGEGVILCLYVDDILIFGTNLEVINEVKSFLSQNFDMKDLGVADVILNIKLIRGENGITLLQSHYVEKILNRFGYIDSKPSPTPYDPSLLLRKNKRIARNQLEYSQIIGSLMYLASATRPDISFAVSKLSRFTSNPGDDHWRALERVMRYLKGTVELGLHYTGYPAVLEGYSDSNWISDVDEIKATSRYVFTLGGGAVSWRSCKQTILTRSTMEAELTALDTATVEAEWLRDLLMDLPVVEKLVPAILMNCDNQTTCEKTIEVCQEIKKLRSYNVGLHPNSEKPGRSLHEGTITKCDRQCIEGDVFETHSILERTHLCELDCWSQSMKILGESSRKLTKDLGV

SEQ ID NO: 19914 - protein, 1214 aa, Oryza sativa
  Clone ID: TF_OSC400226j.C1.p50.fg
MAGFADALRPDKFTGVHFKRWQIRVTLWLTAMKCFWVSTGKPEGVLTAEQQKQFEEATTLFVGCILSVLGDRLVEVYMHMTDAKELWDALNTKFGATDASNDLYIMEQFHDYKMADNRSVVEQAHEIQTMAKELELLKCVLPDKFVAGCIIAKLPPSWRSFGTALKHKRQEYSVEGLIASLDVEEKAREKDAASKGDGGQSSANVVHKAQNKSKGKYKAQQTTNFKKQKKNNNNPNQDERTCFVCGQVGHLARKCPQRKGMKAPAGQTSKSANVTIGNTGDGSGYGNLPTVFSVNQSTNWWVDTGANVARGSTVLMGNGSHASVHGVGTVDLKFTSGKIVQLKNVQHVPSIDRNLVSGSRLTRDGFKLVFESNKVVVSKHGYFIGKGYECGGLFRFSLSDFCNKSVNHICGSVDDEANVWHSRLCHINFGLMSRLSSMCLIPKFSIVKGSKCHSCVQSKQPRKPHKAAEERNLAPLELLHSDLCEMNGVLTKGGKRYFMTLIDDATRFCYVYLLKTKDEALDYFKIYKAEVENQLDRKIKRLRSDRGGEFFSNEFNLFCEEHGIIHERTPPYSPESNGIAERKNRTLTDLVNAMLDTAGLPKAWWGEALLTSNHVPDMHVGTIMESRDATFFESFFPMKDTHSGSNQPSEIIPSSITPPEQTEHTHELVSEEDVSEAPRRSKRQRTAKSFGDDFTVYLVDDTPKSISEAYASPDADYWKEAVRSEMDSIIANGTWEVTERPYGCKPVGCKWVFKKKLRPDGTIEKYKARLVAKGYTQKEGEDFFDTYSPVARLTTIRVLLSLAASHGLLVHQMDVKTAFLNGELDEEIYMDQPDGFVVEGQEGKVCKLLKSLYGLKQAPKQWHEKFDKTLTSAGFAVNEADKCVYYRHGGGEGVILCLYVDDILIFGTNLEVINEVKSFLSQNFDMKDLGVADVILNIKLIRGENGITLLQSHYVEKILNRFGYIDSKPSPTPYDPSLLLRKNKRIARNQLEYSQIIGSLMYLASATRPDISFAVSKLSRFTSNPGDDHWRALERVMRYLKGTVELGLHYTGYPAVLEGYSDSNWISDVDEIKATSGYVFTLGGGAVSWRSCKQTILTRSTMEAELTALDTATVEAEWLRDLLMDLPVVEKPVPAILMNCDNQTVIVKVNSSKDNMKSSRHVKRRLKSVRKLRNSGVITLDYIQTARNLADPFMKGLSRNVIDNASKEMGLRPM

SEQ ID NO: 19915 - protein, 1100 aa, Oryza sativa
  Clone ID: TF_OSC400282j.C1.p49.gm
MGGSGRFGRMQPPERSGEQGRTTCGSRHPSHHEASSAARQGDAMEASSTAAARVTRARRLGQAGDERGDELGDGRGDELGDEKGDEPATTGSGRAPARASDGGRGERIRGGEGGPEGNIPPRCRMGGSGRFGRMQPPERSGEQGRTTCGSRHPSHHEASSAARQGDAMEASSTAAARVTRARRLGQAGDERGDELGDGRGDELGDEKGDEPATTGSGRAPARASDGGRGERIRGGESTSYAVRRVAGSHYSIPLAGVHRRSGEQVSGTSAFDVLHREKAAIRVTLWLTAMKCFWVSTGKPEGVLTAEQQKQFEEATTLFVGCILSVLGDRLVEVYMHMTDAKELWDALNTKFGATDASNDLYIMEQFHDYKMADNRSVVEQAHEIQTMAKELELLKCVLPDKFVAGCIIAKLPPSWRSFGTALKHKRQEYSVEGLIASLDVEEKAREKDAASKGDGGQSSANVVHKAQNKSKGKYKAQQTTNFKKQKKNNNNPNQDERTCFVCGQVGHLARKCPQRKGMKAPAGQTSKSANVTIGNTGDGSGYGNLPTVFSVNQSTNWWVDTGANVHVCADISLFSSYQVARGSTVLMGNGSHASVHGVGMVDLKFTSGKIVQLKNVQHVPSIDRNLVSGSRLTRDGFKLVFESNKVVVSKHGYFIGKGYECGGLFRFSLSDFCNKSVNHICGKVENQLDRKIKRLRSDRGGEFFSNEFDLFCEEHGIIHERTPPYSPESNGIAERKNRTLTDLVNAMLDTAGLPKACEAPRRSKRQRTAKSFGDDFTVYLVDDTPKSISEAYASPDANYWKEAVRSEMDSIIANGTWEVTERPYGCKPVGCKWVFKKKLRPDASHGLLVHQMDVKTAFLNGELDEEIYMDQPDGFVVEGFAVNEADKCVYYRHGGGEGVILCLYVDDILIFGTNLEVINESHYVEKILNRFGYIDSKPSPTPYDPSLLLRKNKRIARNQLEYSQIIGSLMYLASATRPDISFAVSKLSRFTSNPGDDHWRALERVMRYLKGTVELGLHYTGYPAVLEGYSDSNWISDVDEIKATSGYVFTLGGGAVSWSEDVVLQSILERTHLCELDCWSQSIKILGESSRKLTKDLGV

SEQ ID NO: 19916 - protein, 1911 aa, Oryza sativa
  Clone ID: TF_OSC400302j.C1.p22.fg
MAGFADALRPDKFTGVHFKRWQIRVTLWLTAMKCFWVSTGKPEGVLTAEQQKQFEEATTLFVGCILSVLGDRLVEVYMHMTDAKELWDALNTKFGATDASNDLYIMEQFHDYKMADNRSVVEQAHEIQTMAKELELLKCVLPDKFVAGCIIAKLPPSWRSFGTALKHKRQEYSVEGLIASLDVEEKAREKDAASKGDGGQSSANVVHKAQNKSKGKYKAQQTTNFKKQKKNNNNPNQDERTCFVCGQVGHLARKCPQRKGMKAPAGQTSKSANVTIGNTGDGSGYGNLPTVFSVNQSTNWWVDTGANVHVCADISLFSSYQVARGSTVLMGNGSHASVHGVGTVDLKFTSGKIVQLKNVQHVPSIDRNLVSGSRLTRDGFKLVFESNKVVVSKHGYFIGKGYECGGLFRFSLSDFCNKSVNHICGSVDDEANVWHSRLCHINFGLMSRLSSMCLIPKFSIVKGSKCHSCVQSKQPRKPHKAAEERNLAPLELLHSDLCEMNGVLTKGGKRYFMTLIDDATRFCYVYLLKTKDEALDYFKIYKAEVENQLDRKIKRLRSDRGGEFFSNEFDLFCEEHGIIHERTPPYSPESNGIAERKNRTLTDLVNAMLDTAGLPKAWWGEALLTSNHVLNRVPNRNKDKTPYEIWIGRKPSLSYLRTWGCLAKVNVPITKKRKLGPKTVDCVFLGYAHHSIAYRFLIVKSEVPDMHVGTIMESRDATFFESFFPMKDTHSGSNQPSEIIPSSITPPEQTEHTHELVSEEDVSEAPRRSKRQRTAKSFGDDFTVYLVDDTPKSISEAYASPDADYWKEAVRSEMDSIIANGTWEVTERPYGCKPVGCKWVFKKKLRPDGTIEKYKARLVAKGYTQKEGEDFFDTYSPVARLTTIRVLLSLAASHGLLVHQMDVKTAFLNGELDEEIYMDQPDGFVLEGQEGKVCKLLKSLYGLKQAPKQWHEKFDKTLTFAGFAVNEADKCVYYRHGGGEGVILCLYVDDILIFGTNIEVINEVKSFLSQNFDMKDLGVADVILNIKLIRGENGITLLQSHYVEKILNRFGYIDSKPSPTPYDPSLSLRKNKRIARNQLEYSQIIGSLMYLASATRPDISFAVSKLSRFTSNPGDDHWRALERVMRYLKGTVELGLHYTGYPAVLEGYSDSNWISDVDEIKATSGYVFTLGGGAVSWRSCKQTILTRSTMEAELTALDTATVEAEWLRDLLMDLPVVEKPVPAILMNCDNQTVIVKVNNSKDNMKSSRHVKRRLKSVRKLRNSGVITLDYIQTARNLADPFTKGLSRNVIDNASKEMGLRPISNDAFMLVFICNVMTYLWNKLNHYMPIISTVLSHDKTCGYQSSGHLQKNKESGDTETDPLMPIPADIDLPILENMPKTKRGGDDLARSLHKNRKTCNGGRTDSLASGCLHGDPNEDVWTELNDVVKSNLSKSVASLSLRNGVAVDRQGRLTKFLTSASLVELLVRALNDTNKNHGDLELEVYHEGNEVCQGYLTDFDLDHNLAIVEIWTDFDVHVGLLQHAVEFLPHCKVIAIGREITGKLMARRVQLMDDLSVSEDSEDLDCKIKEAWEGAPLFSFDGNFVGMNLFLAMGRAFFLPWGTIQKHWASLQNKTGLPESNSLKVYRFGTSSTAEKSNSHPEVNNDILDPEQIHIDSMGYPKFPTHMFAAFCTTNNYAIMYLSPDGMILVNTFEETFGDLRGEGVWSKLSKKSCSNIDRSVVALASFSGERRFFACTGFFVEWNGSTVILTSASLVRSSGDENKIVDNLRIEVLLPNKQRVEGMLQHCNLHYNVALVSVGYRALRPAHGQLDWWGKSSKVVAVGRCFKSGALMAASGTVTPWTGTLDCDFLERSSCKITKAGIGGPVVTLDGDCIGMNFYDTRIGTPFLSWEVIVDIVASFEEKRWPVPMPY

SEQ ID NO: 19917 - protein, 1297 aa, Oryza sativa
  Clone ID: TF_OSC400397j.C1.p61.fg
MASFADALRPDKFTGVHFKRWQIRVTLWLTAMKCFWVSTGKPEGVLTAEQQKQFEEATTLFVGCILSVLGNRLVEVYMHMTDAKELWDALNTKFGATDGSNDLYIMEQFHDYKMADNRSVVEQAHEIQTMAKELELLKCVLPDKFVAGCIIAKLPPSWRSFGTALKHKRQEYSVEGLIASLDVEEKAREKDAASKGDGGQSSANVVHKAQNKSKGKYKAQQTTNFKKQKKNNNNPNQDERTCFVCGQVGHLARKCPQRKGMKAPAGQTSKSANVTIGNTGDGSGYGNLPTVFSVNQSTNWWVDTGANVHVCADISLFSSYQVARGSTVLMGNGSHASVHGVGTVDLKFTSGKIVQLKNVQHVPSIDRNLVSGSRLTRDGFKLVFESNKVVVSKHGYFIGKGYECGGLFRFSLSDFCNKSVNHICGSVDDEANVWHSRLCHINFGLMSRLSSMCLIPKFSIVKGSKCHSCVQSKQPRKPHKAAEERNLAPLELLHSDLCEMNGVLTKGGKRYFMTFIDDATRFCYVYLLKTKDEALDYFKIYKAEVENQLDRKIKRLRSDRGGEFFSNEFDLFCEEHGIIYEMTPPYSPESNGIAERKNRTLTDLVNAMLDTAGLPKAWWGEALLTSNHVLNRVPNRNKDKTPYEIWIGRKPSLSYLRTWGCLAKVNVPITKKRKLGPKTVDCVFLGYAHHSIAYRFLIVKSEVPDMHVGTIMESRDAIFFESFFPMKDTHSGSNQPFEIIPSSITPPEQTEHTHELVSEEDVSEAPRRSKRQRTAKSFGDDFTVYLVDDTPKSISEAYASPDADYWKEAVRSEMDSIIANGTWEVIERPYGCKPVGCKWVFKKKLRPDGTIEKYKARLVAKGYTQKEGEDFFDTYSPVARLTTIRVLLSLAASHGLLVHQMDVKTAFLNGELDEEIYMDQPDGFVVEGQERKVCKLLKSLYGLKQAPKQWHEKFDKTLTSAGFAVNEADKCVYYRHGGGEGVILCLYVDDILIFGTNLEVINEVKSFLSQNFDMKDLGVADVILNIKLIRGENGITLLQSHYVEKILNRFGYIDSKPSPTPYDPSLLLRKNKRIARNQLEYSQIIGSLMYLASATRPDISFAVSKLSRFTSNPGDDHWRALERVMRYLKGTVELGLHYTGYPAVLEGYSDSNWISDVDEIKATSGYVFTLGGGAVSWRSCKQTILTRSTMEAELTALDTATVEAEWLRDLLMDLPVVEKPVPAILMNCDNQTTCEKTIEVCQEIKKLRSYNVGLHPNSEKPGRSLHEGTITKCDRQCIEGDGFETHMSYTMVVTQSM

SEQ ID NO: 19918 - protein, 1320 aa, Oryza sativa
  Clone ID: TF_OSC400429j.C1.p5.fg
MAGFADALRPDKFTGVHFKRWQIRVTLWLTAMKCFWVSTGKPEGVLTAEQQKQFEEATTLFVGCILSVLGDRLVEVYMHMTDAKELWDALNTKFGATDASNDLYIMEQFHDYKMADNRSVVEQAHEIQTMAKELELLKCVLPDKFVAGCIIAKLPPSWRSFGTALKHKRQEYSVEGLIASLDVEEKAREKDAASKGDGGQSSANVVHKAQNKSKGKYKAQQTTNFKKQKKNNNNPNQDERTCFVCGQVGHLARKCPQRKGMKAPAGQTSKSANVTIGNTGDGSGYGNLPTVFSVNQSTNWWVDTGANVHVCADISLFSSYQVARGSTVLMGNGSHASVHGVGTVDLKFTSGKIVQLKNVQHVPSIDRNLVSGSRLTRDGFKLVFESNKVVVSKHGYFIGKGYECGGLFRFSLSDFCNKSVNHICGSVDDEANVWHSRLCHINFGLMSRLSSMCLIPKFSIVKGSKCHSCVQSKQPRKPHKAAEERNLAPLELLHSDLCEMNGVLTKGGKRYFMTLIDDATRFCYVYLLKTKDEALDYFKIYKAEVENQLDRKIKRLRSDRGGEFFSNEFDLFCEEHGIIHERTPPYSPESNGIAERKNRTLTDLVNAMLDTAGLPKAWWGEALLTSNHVLNRVPNRNKDKTPYEIWIGRKPSLSYLRTWGCLAKVNVPITKKRKLGPKTVDCVFLGYAHHSIAYRFLIVKSEVPDMHVGTIMESRDATFFESFFPMKDTHSGSNQPSEIIPSSITPPEQTEHTHELVSEEDVSEAPRRSKRQRTAKSFGDDFTVYLVDDTPKSISEAYASPDADYWKEAVRSEMDSIIANGTWEVTERPYGCKPVGCKWVFKKKLRPDGTIEKYKARLVAKGYTQKEGEDFFDTYSPVARLTTIRVLLSLAASHGLLVHQMDVKTAFLNGELDEEIYMDQPDGFVLEGQEGKVCKLLKSLYGLKQAPKQWHEKFDKTLTSAGFAVNEADKCVYYRHGGGEGVILCLYVDDILIFGTNIEVINEVKSFLSQNFDMKDLGVADVILNIKLIRGENGITLLQSHYVEKILNRFGYIDSKPSPTPYDPSLSLRKNKRIARNQLEYSQIIGSLMYLASATRPDISFAVSKLSRFTSNPGDDHWRALERVMRYLKGTVELGLHYTGYPAVLEGYSDSNWISDVDEIKATSGYVFTLGGGAVSWRSCKQTILTRSTMEAELSALDTATVEAEWLRDLLMDLPVVEKPVPAILMNCDNQTTCEKTIEVCQEIKKLRSYNVGLHPNSEKPGRSLHEGTITKCDRQCIEGDGFETHSILEGTHLCELDCWSQSMKILGESSRKLTKDLGV

SEQ ID NO: 19919 - protein, 1320 aa, Oryza sativa
  Clone ID: TF_OSC400522j.C1.p21.fg
MAGFADALRPDKFTGVHFKRWQIRVTLWLTAMKCFWVSTGKPEGVLTAEQQKQFEEATTLFVGCILSVLGDRLVEVYMHMTDAKELWDALNTKFGATDASNDLYIMEQFHDYKMADNRSVVEQAHEIQTMAKELELLKCVLPDKFVAGCIIAKLPPSWRSFGTALKHKRQEYSVEGLIASLDVEEKAREKDAASKGDGGQSSANVVHKAQNKSKGKYKAQQTTNFKKQKKNNNNPNQDERTCFVCGQVGHLARKCPQRKGMKAPAGQTSKSANVTIGNTGDGSGYGNLPTVFSVNQSTNWRVDIGANVHVCADISLFSSYQVARGSTVLMGNGSHASVHGVGTVDLKFTSGKIVQLKNVQHVPSIDRNLVSGSRLTRDGFKLVFESNKVVVSKHGYFIGKGYECGGLFRFSLSDFCNKSVNHICGSVDDEANVWHSRLCHINFGLMSRLSSMCLISKFYIVKGSKCHSCVQSKQPRKPHKAAEERNLAPLELLHSDLCEMNGVLTKGGKRYFMTLIDDATRFCYVYLLKTKDEALDYFKIYKAEVENQLDRKIKRLRSDRGGEFFSNEFDLFCEEHGIIHERTPPYSPESNGIAERKNRTLTDLVNAMLDTAGLPKAWWGEALLTSNHVLNRVPNRNKDKTPYEIWIGRKPSLSYLRTWGCLAKVNVPITKKRKLGPKTVDCVFLGYAHHSIAYRFLIVKSEVPDMHVGTIMESRDATFFESFFPMKDTHSGSNQPSEIIPSSITPPEQTEHTHELVSEEDVSEAPRRSKRQRTAKSFGDDFTVYLVDDTPKSISEAYASPDADYWKEAVRSEMDSIIANGTWEVTERPYGCKPVGCKWVFKKKLRPDGTIEKYKARLVAKGYTQKEGEDFFDTYSPVARLTTIRVLLSLAASHGLLVHQMDVKTAFLNGELDEEIYMDQPDGFVVEGQEGKVCKLLKSLYGLKQAPKQWHEKFDKTLTSAGFAVNEADKCVYYRHGGGEGVILCLYVDDILIFGTNLEVINEVKSFLSQNFDMKDLGVADVILNIKLIRGENGITLLQSHYVEKILNRFGYIDSKPSPTPYDPSLLLRKNKRIARNQLEYSQIIGSLMYLASATRPDISFAVSKLSRFTSNPGDDHWRALERVMRYLKGTVELGLHYTGYPAVLEGYSDSNWISDVDEIKATSGYVFTLGGGAVSWRSCKQTILTRSTMEAELTALDTATVEAEWLRDLLMDLPVVEKPVPAILMNCDNQTTCEKTIEVCQEIKKLRSYNVGLHPNSEKPGRSLHEGTITKCDRQCIEGDGFETHSILEGTHLCELDCWSQSMKILGESSRKLTKDLGV

SEQ ID NO: 19920 - protein, 1320 aa, Oryza sativa
  Clone ID: TF_OSC400522j.C1.p35.fg
MAGFADALRPDKFTGVHFKRWQIRVTLWLTAMKCFWVSTGKPEGVLTAEQQKQFEEATTLFVGCILSGLGDRLVEVYMHMTDAKELWDALNTKFGATDASNDLYIMEQFHDYKMADNRSVVEQAHEIQTMAKELELLKCVLPDKFVAGCIIAKLPPSWRSFGTALKHKRQEYSVEGLIASLDVEEKAREKDAASKGDGGQSSANVVHKAQNKSKGKYKAQQTTNFKKQKKNNNNPNQDERTCFVCGQVGHLARKCPQRKGMKAPAGQTSKSANVTIGNTGDGSGYGNLPTVFSVNQSTNWWVDTGANVHVCADISLFSSYQVARGSTVLMGNGSHASVHGVGTVDLKFTSEKIVQLKNVQHVPSIDRNLVSGSRLTRDGFKLVFESNKVVVSKHGYFIGKGYECGGLFRFSLSDFCNKSVNHICGSVDDEANVWHSRLCHINFGLMSRLSSMCLIPKFSIVKGSKCHSCVQSKQPRKPHKAAEERNLAPLELLHSDLCEMNGVLTKGGKRYFMTLIDDATRFCYVYLLKTKDEALDYFKIYKAEVENQLDRKIKRLRSDRGGEFFSNEFDLFCEEHGIIHERTPPYSPESNGIAERKNRTLTDLVNAMLDTAGLPKAWWGEALLTSNHVLNRVPNRNKDKTPYEIWIGRKPSLSYLRTWGCLAKVNVPITKKRKLGPKTVDCVFLGYAHHSIAYRFLIVKSEVPDMHVGTIMESRDATFFESFFPMKDTHSGSNQPSEIIPSSITPPEQTEHTHELVSEEDVSEAPRRSKRQRTAKSFGDDFTVYLVDDTPKSISEAYASPDADYWKEAVRSEMDSIIANGTWEVTERPYGCKPVGCKWVFKKKLRPDGTIEKYKARLVAKGYTQKEGEDFFDTYSPVARLTTIRVLLSLAASHGLLVHQMDVKTAFLNGELDEEIYMDQPDGFVVEGQEGKVCKLLKSLYGLKQAPKQWHEKFDKTLTSAGFAVNEVDKCVYYRHGGGEGVILCLYVDDILIFGTNLEVINEVKSFLSQNFDMKDLGVADVILNIKLIRGENGITLLQSHYVEKILNRFGYIDSKPSPTPYDPSLLLRKNKRIARNQLEYSQIIGSLMYLASATRPDISFAVSKLSRFTSNPGDDHWRALERVMRYLKGTVELGLHYTGYPAVLEGYSDSNWISDVDEIKATSGYVFTLGGGAVSWRSCKQTILTRSTMEAELTALDTATVEAEWLRDLLMDLPVVEKPVPAILMNCDNQTTCEKTIEVCQEIKKLRSYNVGLHPNSEKPGRSLHEGTITKCDRQCIEGDGFETHSILEGTHLCELDCWSQSMKILGESSRKLTKDLGV

SEQ ID NO: 19921 - protein, 1607 aa, Oryza sativa
  Clone ID: TF_OSC400525j.C1.p60.fg
MALRLAAVPESAAADLSAAANTLPCISYRDSIRSVAAVVSGGRGPLFQSEDSASTWSSSSYASDCSGHSSGVSAAAAAGFRALTAHELREVARRMVADGYAQRMVQAFDDAATVEVLEGEMLADCRLDDDIAKDYEARAAVREARAAREEAEARLQVATRAARLVAAEAEAARTAEAARQAAAAAATLRAEEEEERRDLELTDAARVRRDADRDRHIGRRDRDFSPHRRGSDLHRGEEERRDPWRDPRINRALETQRLREQAAAIEAQLDFDREQGGRDVGARSPRRQRASPSPDRRRGRRGRSGSPPVVQIVVKDVGGAWPMLTKTNYAEWAMVMKVKLQARHMWDAVRYGDVDYGEDRRALERLAQLGDTTIDEERAVEKLLCVVPEKYTQLALSIETLLDFTELTNEEVTGRLKAVDNRKQLPPSEPITIGGKLFFTKEKWLARQQERKKGEATSSSASGSSSSRKRRPRKWEKARSGALGGADGERKGSRNDTCHNCGKTGHWAKDCRQAKHGGQAHVAQAQEGDEVALFFVHGSIEPHFTPTPDATAPLHLDELWAHVFLSNGSCDDKIDGWCLDTGATHHMTGRREFFSKLDSSVQGSVKFEDASAVEIKGVGSILFTTKTGEHRLLTGVYYIPALRNSIISLGQLDENGLLVEIEDGVLRVWDRHRRLLVKVNRGANRLYVLHVQVAQPVCLAARRDDDAWRWHERFGHLNFEALKQLSNKEMVQGMPRVEHVEQFCDTCVLTKQRRLPFPRQASFCAKEKLELVHGDLCGPVTPATPGGRRFFLLLVDDVSCYMWVVLLDSKAVAADAIKHHQVAAEKECGRKLRVLHTDNGGEFTTAEFAAYCADERIQRHFSAPYTPQQNGVVERRNQTVVATARALLKQRGMPAIYWGEAVMTAVHLLNRSPTKALDGKTSYEAWHGRKPVVSHLRVFGCLAFAKELNHVGKLNDRSSPGVFIGYAEGVKAYRILDPSTQHVRISRDVVFDEGRGWASYKAVDDGSTSTLRDFVVDYVHFRAAGGASSSSSPSSSTSAPGSPSAPASPLPPTPPATPPSPATPRSPTPAPTPPVEFATPLSNDEDRVDAYHDDEPLRYRTMDNIFGDQPVPGLETRDFEAELHLAHEDGEPCSFAEANGDVAWRTAMQHEMDAVERNWTWVLADLPASHRAITLKWVYKLKKDEAGAVIKHKARLVARGFVQQEGVDFDDAFAPVARMESVRLLLALAAQEGWRVHHMDVKSAFLNGDLKEEVYVHQPPGFVIPGKENKVLRLRKALYGLRQALYAKLDSTLKQMGFQQNSHEAAVYQRGKDGNALLVGVYVDDLVITGTKEAEVEAFKEEMKATFQMSDLGLLSFYLGIEVHQDSSGISLRQTAYAKCIVELGGLTGCNPAYTPMEERLKLSRDSTAEEVDATQYRHIVGSLRYLVHTRPDLAFAVGYVSRFMQRPTTEHQQAVTSRAPPTTAFTTRGVPCLISWQSVKQQVVALSSCEAEYIATTTASTQALWLARLLGDLLGRNTEAVELRMDSKSALALAKNPVFHERSKHIRIKYHFIRSCLEEGSIKASYINTQDQLADLLTKSLGRVKFQEFRARIGMVQIPQKAPHMT

SEQ ID NO: 19922 - protein, 643 aa, Oryza sativa
  Clone ID: TF_OSC400758j.C1.p21.gm
MSDKTEAGIGGAVICAFFLTSSPVWSNSRGPHIACMLGGLGASQRPNGLEKCLCVYCIKLLDSASFACYNTGKPIQVVRCYSRKPNIIAKLEEDYSIPLAGVHQRSGEQVSGTSAFDVLHWEKAAIRHCDFTMAGFADALRPDKFTGVHFKRWQIRVTLWLTAMKCFWVSTGKPEGVLTAEQQKQFEEATTLFVGCILSVLGDRLVEVYMHMTDAKELWDALNTKFGATDASNDLYIMEQFHDYKMADNRSVVEQAHEIQTMAKELELLKCVLPDKFVAGCIIAKLPPSWRSFGTALKHKRQEYSVEGLIASLDVEEKAREKDAASKGDGGQSSANVVHKAQNKSKGKYKAQQTTNFKKQKKNNNNPNQDERTCFVCGQVGHLARKCPQRKGMKAPAGQTSKSANVTIGNTGDGSGYGNLPTVARGSTVLMGNGSHASVHGVGTVDLKFTSGKIVQLKNVQHVPSIDRNLDTHSGSNQPSEIIPSSITPPEQIEHTHELVSEEDVSEAPRRSKRQRTAKSFGDDFTVYLVDDTPKSISEAYASPDADYWKEAVRSEMDSIIANGTWEVTEQPYGCKPVGCKWVFKKKLRPDDYSIPLAGVHQRSGEQVSGTSAFDVLHWEKAAIRQHSMTGFGSCAVLTMTAT

SEQ ID NO: 19923 - protein, 1703 aa, Oryza sativa
  Clone ID: TF_OSC400763j.C1.p16.fg
MRLLVLMCLVIAAAMQMQAASGAPPTAAKLAHCLKSCGGANISYPYGVGAGCFRPGFELTCDHSTKPPKLLLLGVATNTNTTTTKIVDQYRDGYVQAYVSFNIATTPGVLGTYNRTWESPGRILSIGPDYYALVAVGCGIEVYLVDPDTEDMLGYCFSMCTDMAMMHKEAEGKACSGMGCCVVTFRRPVRAFRVSITQREATQPFQVANASTIKVFLSEESTTYHYNFTIGDLLSDEINETTVASTSAYLSTFIADQPNCTIAQKDPERYACGDNKCLDADDENGGYRCACIKYTNSNPYLDGDCDQDYSIPLAGVHQRSGEQVSGTSAFDVLHREKAAIRSNDAFMLVFICNVMTYLWNKLNHYMPIISTIQKPYYRHCDFTMAGFADALRPDKFTGVHFKRWQIRVTLWLTAMKCFWVSTGKPEGVLTAEQQKQFEEATTLFVGCILSVLGDRLVEVYMHMTDAKELWDALNTKFGATDASNDLYIMEQFHDYKMADNRSVVEQAHEIQTMAKELELLKCVLPDKFVAGCIIAKLPPSWRSFGTALKHKRQEYSVEGLIASLDVEEKAREKDAASKGDGGQSSANVVHKAQNKSKGKYKAQQTTNFKKQKKNNNNPNQDERTCFVCGQVGHLARKCPQRKGMKAPAGQTSKSANVTIGNTGDGSGYGNLPTVFSVNQSTNWWVDTGANVHVCADILLFSSYQVARGSTVLMGNGSHASVHGVGTVDLKFTSGKIVQLKNVQHVPSIDRNLVSGSRLTRDGFKLVFESNKVVVSKHGYFIGKGYECGGLFRFSLSDFCNKSVNHICGSVDDEANVWHSRLCHINFGLMSRLSSMCLIPKFSIVKGSKCHSCVQSKQPRKPHKAAEERNLAPLELLHSDLCEMNGVLTKGGKRYFMTLIDDATRFCYVYLLKTKDEALDYFKIYKAEVENQLDRKIKRLRSDRGGEFFSNEFDLFCEEHGIIHERTPPYSPESNGIAERKNRTLTDLVNAMLDTAGLPKAWWGEALLTSNHVLNRVPNRNKDKTPYEIWIGRKPSLSYLRTWGCLAKVNVPITKKRKLGPKTVDCVFLGYAHHSIAYRFLIVKSEVPDMHVGTIMESRDATFFESFFPMKDTHSGSNQPSEIIPSSITPPEQTEHTHELVSEEDVSEAPRRSKRQRTAKSFGDDFTVYLVDDTPKSISEAYASPDADYWKEAVRSEMDSIIANGTWEVTERPYGCKPVGCKWVFKKKLRPDGTIEKYKARLVAKGYTQKEGEDFFDTYSPVARLTTIRVLLSLAASHGLLVHQMDVKTAFLNGELDEEIYMDQPDGFVLEGQEGKVCKLLKSLYGLKQAPKQWHEKFDKTLTSAGFAVNEADKCVYYRNGGGEGVILCLYVDDILIFGTNIEVINEVKSFLSQNFDMKDLGVADVILNIKLIRGENGITLLQSHYVEKILNRFGYIDSKPSPTPYDSSLSLRKNKRIARNQLEYSQIIGSLMYLASATRPDISFAVSKLSRFTSNPGDDHWRALERVMRYLKGTVELGLHYTGYPAVLEGYSDSNWISDVDEIKATSGYVFTLGGGAVSWRSCKQTILTRSTMEAELTALDTATVEAEWLRDLLMDLPVVEKPVPAILMNCDNQTTCEKTIEVCQEIKKLRSYNVGLHPNSEKPGRSLHEGTITKCDRQCIEGDGFETHSILEGTHLCELDCWSQSMKILGESSRKLTKDLGV

SEQ ID NO: 19924 - protein, 1655 aa, Oryza sativa
  Clone ID: TF_OSC400772j.C1.p45.fg
MAPRKPNPASATGPDPGRIDDDSTAFLGASLVDDDELAKLVSAGPLVEGQAFLPGKAVVPKPGDNWTVVFAVFFGAGLRFSCNVLLLEILRLFQTLAKSFDQAAGLSVTSVSTGKPEGVLTAEQQKQFEEATTLFVGCILSVLGDRLVEVYMHMTDAKELWDALNTKFGATDASNDLYIMEQFHDYKMADNRSVVEQAHEIQTMAKELELLKCVLPDKFVAGCIIAKLPSSWRSFGTALKHKRQEYFVEGLIASLDVEEKAREKDAASKGDGGQSSANVVHKAQNKSKGKYKAQQTTNFKKQKNNNNNPNQDERTCFVCGQVGHLARKCPQRKGMKAPAGQTSKSANVTIGNTGDGSGYGNLPTVFLVNQSTNWWVDTGANVHVCADISLFSSYQVARGSTDLMGNGSHASVHGVGTVDLKFTSGKIVQLKNVQHVPSIDRNLVSGSRLTRDGFKLVFESNKVVVSKHGYFIGKGYECGGLFCFSLSDFCNKSVNHICGSVDDEANVWHSRLCHINFGLMSRLSSMCLIPKFSIVKGSKCHSCVQSKQPRKPHKAAKERNLAPLELLHSDLCEMNGVLTNGGKRYFMTLIDDATRFCYVYLLKTKDEALDYFKIYKAEVENQLDRKIKRLRSDRGGEFFSNEFDLFCEEHGIIHERTPPYSPESNGIAERKNRTLTDLVNAMLDTAGLPKAWWGEALLTSNHVLNRVPNRNKDKTPYEIWIGRKPSLSYLRTWGCLAKVNVPITKKRKLGPKTVDCVFLGYAHHSIAYRFLIVKSEVPDMHVGTIMESRDSIFFESFFPMKDTHSGSNQPFEIIPSSITPPKQTEHTHELVSEEDVSEAPRRSKRQRTAKSFGDDFTVFLVDDTPKSISEAYASPDADYWKEAVRSEMDSIIANGTWEVIELPYGCKPMGCKWVFKKKLRPDGTIEKYKARLVAKGYTQKEGEDFFDTYSPVARLTTIRVLLSLAASHGLLVHQMDVKTAFLNGELDEEIYMDQPDGFVVEGQEGKVCKLLKSLYGLKQAPKQWHEKFDKTLTSAGFAVNEADKCVYYRHGGGEGVILCLYVDDILIFGTNLEVINEVKSFLSQNFDMKDLGVADVILNIKLIRGENGITLLQSHYVEKILNRFGYIDSKPSPTPYDPSLLLRKNKRIARNQLEYSQIIGSLMYLASATRPDISFAVSKLSRFTSNPGDDHWRALERVMRYLKGTVELGLHYTGYPAVLEGYSDSNWISDVDEIKATSGYVFTLGGGAVSWRSCKQTILTRSTMEAELTALDTATVEAEWLRDLLMDLPVVEKPVPAILMNCDNQTTCEKTIEVCQEIKKLRSYNVGLHPNSEKPGRSLHEGTITKCDRQCIEGDGFETHKEEANKRLQGVQITTTAPIISHLLFADDSLLLFKATSVCADAVSRVLTNYCAASGQLVNFSKSCIFFSKKCDMAIREDIKRKVGMTNESITDRYLGLPTDVGRAKEGKFKYLKDRVWKRVQGWMEKTLSVGGKEVLIKSIVQAIPTYSMSCFRLPMGLCNHINSLIRKFWWASKQGSRKTNWVAWDKMTVPKFLGGMGFRDINIFNLVLLAKQGWRILQYPNSLAARVLKAVYFSNGDFLNAGLGSRPSHTWRAIIEGREILKLGIIRRIGSGKDTFIWDDNWIPRDWMLRPIRA

SEQ ID NO: 19925 - protein, 1306 aa, Oryza sativa
  Clone ID: TF_OSC400773j.C1.p24.fg
MAGFADALRPDKFTGVHFKRWQIRVTLWLTAMKCFWQKQFEEATTLFVGCILSVLGDRLVEVYMHMTDAKELWDALNTKFGATDASNDLYIMEQFHDYKMADNRSVVEQAHEIQTMAKELELLKCVLPDKFVAGCIIAKLPPSWRSFGTALKHKRQEYSVEGLIASLDVEEKAREKDAASKGDGGQSSANVVHKAQNKSKGKYKAQQTTNFKKQKKNNNNPNQDERTCFVCGQVGHLARKCPQRKGMKAPAGQTSKSANVTIGNTGDGSGYGNLPTVFSVNQSTNWWIDTGANVHVCADISLFSSYQVARGSTVLMGNGSHASVHGVGTVDLKFTSGKIVQLKNVQHVPSIDRNLVSGSRLTRDGFKLVFESNKVVVSKHGYFIGKGYECGGLFRFSLSDFCNKSVNHICGSVDDEANVWHSRLCHINFGLMSRLSSMCLIPKFSIVKGSKCHSCVQSKQPRKPHKAAEERNLAPLELLHSDLCEMNGVLTKGGKRYFMTLIDDATRFCYVYLLKTKDEALDYFKIYKAEVENQLDRKIKRLRSDRGGEFFSNEFDLFCEEHGIIHERTPPYSPESNGIAERKNRTLTDLVNAMLDTAGLPKAWWGEALLTSNHVLNRVPNRNKDKTPYEIWIGRKPSLSYLRTWGCLAKVNVPITKKRKLGPKTVDCVFLGYAHHSIAYRFLIVKSEVPDMHVGTIMESRDATFFESFFPMKDTHSGSNQPSEIIPSSITPPEQTEHTHELVSEEDVSEAPRRSKRQRTAKSFGDDFTVYLVDDTPKSISEAYASPDADYWKEAVRSEMDSIIANGTWEVTERPYGCKPVGCKWVFKKKLRPDGTIEKYKARLVAKGYTQKEGEDFFDTYSPVARLTTIRVLLSLAASHGLLVHQMDVKTAFLNGELDEEIYMDQPDGFVVEGQEGKVCKLLKSLYGLKQAPKQWHEKFDKTLTSAGFAVNEADKCVYYRHGGGEGVILCLYVDDILIFGTNLEVINEVKSFLSQNFDMKDLGVADVILNIKLIRGENGITLLQSHYVEKILNRFGYIDSKPSPTPYDPSLLLRKNKRIARNQLEYSQIIGSLMYLASATRPDISFAVSKLSRFTSNPGDDHWRALERVMRYLKGTVELGLHYTGYPAVLEGYSDSNWISDVNEIKATSGYVFTLGGGAVSWRSCKQTILTRSTMEAELTVLDTATVEAEWLRDLLMDLPVVEKPVPAILMNCDNQTTCEKTIEVCQEIKKLRSYNVGLHPNSEKPGRSLHEGTITKCDRQCIEGDGFETHSILEGTHLCELDCWSQSMKILGESSRKLTKDLGV

SEQ ID NO: 19926 - protein, 1289 aa, Oryza sativa
  Clone ID: TF_OSC400800j.C1.p51.fg
MAGFADALRPDKFTGVHFKRWQIRVTMWLTAMKCFWVSTGKPEGVLTAEQQKQFEEATTLFVGCILSVLVRSSWSTVFHDYKMADNRSVVEQAHEIQTMAKELELLKCVLPDKFVAGCIIAKLPPSWRSFGTALKHKRQEYSVEGLIASLDVEEKAREKDAASKGDGGQSSANVVHKAQNKSKGKYKAQQTTNFKKQKKNNHNPNQDERTCFVCGQVGHLARKCPQRKGMKAPAGQTSKSANVTIGNTGDGSGYGNLPSVFSVNQSTNWWVDTGANVHVCADISLFSSYQVARGSTVLMGNGSHASVHGVGTVDLKFTSGKIVQLKNVQHVPSIDRNLVSGSRLTRDGFKLVFESNKVVVSKHGYFIGKGYECGGLFRFSLSDFCNKSVNHICGSVDDEANVWHSRLCHINFGLMSRLSSMCLIPKFSIVKGSKCHSCVQSKQPRKPHKAAEERNLAPLELLHSDLCEMNGVLTKGGKRYFMTLIDDATRFCYVYLLKTKDEALDYFKIYKAEVENQLDRRINRLRSDRGGEFFSNEFDLFCEEHGIIHERTPPYSPESNGIAERKNRTLTDLVNAMLDTAGLPKAWWGEALLTSNYVLNRVPNRNKDKTPYEIWIGRKPSLSYLRTWGCLAKVNVPITKKRKLGPKTVDCVFLGYAHHSIAYRFLIVKSEVPDMHVGTIMESRDATFFESFFPMKDTHSGSNQPSEIIPSSITPPEQTEHTHELVSEEDVSEAPRRSKRQRTAKSFGDDFTVYLVDDTPKSISEAYASPDADYWKEAVRSEMDSIIANGTWEVTERPYGCKPVGCKWVFKKKLRPDGTIEKYKARLVAKGYTQKEGEDFFDTYSPVARLTTIRVLLSLAASHGLLVHQMDVKTAFLNGELDEEIYMDQPDGFVVEGQEGKVCKLLKSLYGLKQAPKQWHEKFDKTLTSAGFAVNEADKCVYYRHGGGEGVILCLYVDDILIFGTNLEVINEVKSFLSQNFDMKDLGVADVILNIKLIRGENGITLLQSHYVEKILNRFGYIDSKPSPTPYDPSLLLRKNKRIARNQLEYSQIIGSLMYLASATRPDISFAVSKLSRFTSNPGDDHWRVLERVMRYLKGTVELGLHYTGYPAVLEGYSDSNWISDVDEIKATSGYVFTLGGGAVSWRSCKQTILTRSTMEAELTALDTATVEAEWLRDLLMDLPVVEKPVPAILMNCDNQTTCEKTIEVCQEIKKLRSYNVGLHPNSEKPGRSLHEGTITKCDRQCIEGDGFETHSILEGTHLCELDCWSQSMKILGESSRKLTKDLGV

SEQ ID NO: 19927 - protein, 1302 aa, Oryza sativa
  Clone ID: TF_OSC400978j.C1.p6.fg
MAGFADALRPDKFTGVHFKRWQIRVTLWLTAMKCFWVSTGKPEGVLTAEQQKQFEEATTLFVGCILSVLGDRLVEVYMHMTDAKELWDALNTKFGATDASNDLYIMEQFHDYKMADNRSVVEQSHEIQTMAKELELLKCVLPDKFVAGCIIAKLPPSWRSFGTALKHKRQEYSVEGLIASLDVEEKAREKDAASKGDGGQSSANVVHKAQNKSKGKYKAQQTTNFKKQKKNNNNPNQDERTCFVCGQVGHLARKCPQRKGMKAPAGQTSKSANVTIGNTGDGSGYGNLPTVFSVNQSTNWWVDTGANVHVCADISLFSSYQVARGSTVLMWNGSHASVHGVGTVDLKFTSGKIVQLKNVQHVPSIDRNLVSGSRLTRDGFKLVFESNKVVVSKHGYFIGKGYECGGLFRFSLSDFCNKSVNHICGSVDDEAIVWHSRLCHINFGLMSRLSSMCLIPKFSIVKGSKCHSCVQSKQPRKPHKAAEERNLAPLELLHSDLCEMNGVLTKGGKRYFMTLIDDATRFCYVYLLKTKDEALDYFKIYKAEVENQLDRKIKRLRSDRGGEFFSNEFDLFCEEHGIIHERTPPYSPESNGIAERKNRTLTDLVNAMLDTAGLPKAWWGEALLTSNHVLNRVPNRNKDKTPYEIWIGRKPSLSYLRTWGCLAKVNVPITKKRKLGPKTVDCVFLGYAHHSIAYRFLIVKSEIPDMHVGTIMESRDATFFESFFPMKDTHSGSNQPSEIIPSLITPPEQTEHTHELVSEEDVSEAPRRSKRQRTAKSFGDDFTVYLVDDTPKSISEAYASPDADYWKEAVRSEMDSIIANGTWEVTERPYGCKPVGCKWVFKKKLRPDGTIEKYKARLVAKGYTQKEGEDFFDTYSPVARLTTIHVLLSLAASHGLLVHQMDVKTAFLNGELDEEIYMDQPDGFVVEGQEGKVCKLLKSLYGLKQAPKQWHEKFDKTLTSAGFAVNEADKCVYYRHGGGEGVILCLYVDDILIFGTNLEVINEVKSFLSQNFDMKDLGVADVILNIKLIRGENGITLLQSHYVEKILNRFGYIDSKPSPTPYDPSLLLRKNKRIARNQLEYSQIIGSLMYLASATRPDISFAVSKLSRFTSNPGDDHWRALERVMRYLKGTVELGLHYTGYPAVLEGYSDSNWISDVDEIKATSGYVFTLGGGAVSWRSCKQTILTRSTMEAELTALDTATVEAEWLRDLLMDLPVVEKPVPAILMNCDNQTVIVKVNSSKDNMKSSRHVKRRLKSVRKLRNSGVITLDYIQTARNLADPFTKGLSRNVIDNASKEMGLRPM

SEQ ID NO: 19928 - protein, 1810 aa, Oryza sativa
  Clone ID: TF_OSC401035j.C1.p18.fg
MSKRRGNCSSSNEEKKTCTNSRKKGDQTHFSGTGIVVRNKDEVTTSILTSANVIRCFDDDSKINPFLDVVLLALSLQIRVLLPNKQRVIGWMGHFDLNYNIAVVVIKYLPGLRAASFDHEVRFGSQSKDMAGGPLIDLDGNFVGMNFFSEERTPFLPRNKIYRSLVRSCTLWVEIDDECTSIIERCRSKMIHNNFVGTSRGVAKKRNQEQTVSITSFSEGTSDEENESETQKLPEYSTSDSEDFWEEELFPELIKPLPDDEFTQLLKKDLKSRNYPMPIRFWGGMRLKNTFEEEFAEDTWCKLSKKVALNTSQSVVSLASFKDYSIPLAGVHQRSGEQVSGTSAFDVLHREKAAIRSNDAFMLVFICNVMIYLWNKLNPYMPIISTIQKPYYRHCDFTMAGFADALRPDKFTGVHFKRWQIRVTLWLTAMKCFWVSTGKPEGVLTAEQQKQFEEATTLFVGCILSVLGDRLVEVYMHMTDAKELWDALNTKFGATDASNDLYIMEQFHDYKMADNRSVVEQAHEIQTMAKELELLKCVLPDKFVAGCIIAKLPPSWRSFGTALKHKRQEYSVEGLIASLDVEEKAREKDAASKGDGGQSSANVVHKAQNKSKGKYKAQQTTNFKKQKKNNNNPNQDERTCFVCGQVGHLARKCPQRKGMKAPAGQTSKSANVTIGNTGDGSGYGNLPTVFSVNQSTNWWVDTGANVARGSTVLMGNGSHASVHGVGTVDLKFTSGKIVQLKNVQHVPSIDRNLVSGSRLTRDGFKLVFESNKVVVSKHGYFIGKGYECGGLFRFSLSDFCNKSVNHICGSVDDEANVWHSRLCHINFGLMSRLSSMCLIPKFSIVKGSKCHSCVQSKQPRKPHKAAEERNLAPLELLHSDLCEMNGVLTKGGKRYFMTLIDDATRFCYVYLLKTKDEALDYFKIYKAEVENQLDRKIKRLRSDRGGEFFSNEFDLFCEEHGIIHERTPPYSPESNGIAERKNRTLTDLVNAMLDTAGLPKAWWGEALLTSNHVLNRVPNRNKDKTPYEIWIGRKPSLSYLRTWGCLAKVNVPITKKRKLGPKTVDCVFLGYAHHSIAYRFLIVKSEVPDMHVGTIMESRDATFFESFFPMKDTHSGSNQPSEIIPSSITPPEQTEHTHELVSEEDVSEAPRRKRPYGCKPVGCKWVFKKKLRPDGTIEKYKARLVAKGYTQKEGEDFFDTYSPVARLTTIRVLLSLAASHGLLVHQMDVKTAFLNGELDEEIYMDQPDGFVVEGQEGKVCKLLKSLYGLKQAPKQWHEKFDKTLTSAGFAVNEADKCVYYRHGGGEGVILCLYVDDILIFGTNLEVINVVKSFLSQNFDMKDLGVADVILNIKLIRGENGITLLQSHYVEKILNRFGYIDSKPSPTPYDPSLLLRKNKRIARNQLEYSQIIGSLMYLASATRPDISFAVSKLSRFTSNPGDDHWRALERVMRYLKGTMELGLHYTGYPAVLEGYSDSNWISDVDEIKATSGYVFTLGGGAVSWRSCKQTILTRSTMEAELTALDTATVEAEWLRDLLMDLPVVEKPVPAILMNCDNQTTCEKTIEVCQEIKKLRSYNVGLHPNSEKPGRSLHEGTITKCDRQCIEGDGFETHSILEGTHLCELDCWSQSMKILGEERFFACTGVFIDFNGSTSRVVTSASLVRISADENKIADNLKIKVYLPNKRIAVGELQHCNLSYNIAVVSVKGFCCLRTAELDKQMQIEPHREVVAIGRIFESGKLMATSGILSDEESKLDCRELMISTCKITKAGIGGPLIDFDGNFVGINFYGTKETHYLPRLMIQRLLKDFDG

SEQ ID NO: 19929 - protein, 1320 aa, Oryza sativa
  Clone ID: TF_OSC401137j.C1.p48.fg
MAGFADALRPDKFTGVHFKRWQIRVTLWLTAMKCFWVSTGKPEGVLTAEQQKQFKEATTLFVGCILSVLGDRLVEVYMHMTDAKELWDVLNTKFGATDASNDLYIMEQFHDYKMADNRSVVEQAHEIQTMAKELELIKCVLPDKFVAGCIIAKLPPSWRSFGTALKHKRQEYSVEGLIASLDVEEKAREKDAASKGDGGQSSANVVHKAQKKSKGKYKAQQTTNFKKQKKNNNNPNQDERTCFVCGQVGHLARKCPQRKGMKAPAGQTSKSANVTIGNTGDGSGYGNLPTVFSVNQSTNWWVDTGANVHVCADISLFSSYQVARGSTVLMGNGSHASVHGVGTVDLKFTSGKIVQLKNVQHVPSIDMNLVSGSRLTRDGFKLVFESNKVVVSKHGYFIGKGYECGGLFRFSLSDFCNKSVNHICGSVDDEANVWHSRLCHINFGLMSRLSSMCLIPKFSIVKGSKCHSCVQSKQPRKPHKAAEERNLAPLELLHSDLCEMNGVLTKGGKRYFMTFIDDATRFCYVYLLKTKDEALDYFKIYKAEVENQLDRKIKRLRSDRGGEFFSHEFDLFCGEHGIIHERTPPYSPESNGIAERKNRTLTDLVNAMLDTAGLPKAWWGEALLTSNHVLNRVPNRNKDKTPYEIWIGRKPSLSYLRTWGCLAKVNVPITKKRKLGPKTVDCVFLGYAHHSIAYRFLIVKSEVLDMHVGTIMESRDATFFESFFPMKDTHSGSNQPSEIIPSSITPPEQTEHTHELVSEEDVSEAPRRSKRQRTAKSFGDDFTVYLVDDTPKSISEAYASPDADYWKEAVHSEMDSIIANGTWEVTEQPYGCKPVGCKWVFKKKLRPDGTIEKYKARLVAKGYTQKEGEDFFDTYSPVARLTTIRVLLSLAASHGLLVHQMDVKTAFLNGELDEEIYMDQPDGFVVEGQEGKVCKLLKSLYGLKQAPKQWHEKFDKTLTSAGFGVNEADKCVYYRHGGGEGVILCLYVDDILIFGTNLEVINEVKSFLSQNFDMKDLGVADVILNIKLIRGENGITLLQSHYVEKILNRFGYIDSKPSPTPYDPSLLLRKNKRIARNQLEYSQIIGSLMYLASATRPDISFAVSKLSRFTSNPGDDHWRALERVIRYLKGTVELGLHYTGYPAVLEGYSDSNWISDVDEIKATSGYVFTLGGGAVSWRSCKQTILTRSTMEAELTALDTATVEAEWLRDLLMDLPVVEKPVPANLMNCDNQTTCEKTIEVCQEIKKLRSYNVGLHPNSEKPGRSLHEGTITKCDRQCIEGDGFETHSILERTHLCELDCWSQSMKILGESSRKLTKDLGV

SEQ ID NO: 19930 - protein, 1302 aa, Oryza sativa
  Clone ID: TF_OSC401186j.C1.p1.fg
MAGFADALRPDKFTGVHFKRWQIRVTLWLTAMKCFWVSTGKPEGVLTAEQQKQFEEATTLFVGCILSVLGDRLVEVYMHMTDAKELWDALNTKFGATDASNDLYIMEQFHDYKMADNRSVVEQAHEIKTMAKELELLKCVLPDKFVAGCIIAKLPPSWRSFGAALKHKRQEYSVEGLIASLDVEEKAREKDAASKGDGGQSSANVVHKAQNKSKGKYKAQQTTNFKKQKKNNNNPNQDERTCFVCGQVGHLARKCPQRKGMKAPAGQTSKSANVTIGNTGDGSGYGNLPTVFSVNQSTNWWVDTGANVHVCADISLFSSYQVARGSTVLMGNGSHASVHGVGTVDLKFTSGKIVQLKNVQHVPSIDRNLVSGSRLTRDGFKLVFESNKVVVSKHGYFIGKGYECGGLFRFSLSDFCNKSVNHICGSVDDEANVWHSRLCHINFVLMSRLSSMCLIPKFSIVKGSKCHSCVQSKQPRKPHKAAEERNLAPLELLHSDLCEMNGVLTKGGKRYFMTLIDDATRFCYVYLLKTKDEALDYFKIYKAEVENQLDRKIKRLRSDRGGEFFSNEFDLFCEEHGIIHERTPPYSPESNGIAERKNRTLTDLVNAMLDTAGLPKAWWGEALLTSNHVLNRVPNRNKDKTPYEIWIGRKPTLSYLRTWGCLAKVNVPITKKRKLGPKTVDCVFLGYAHHSIAYRFSIVKSEVPDMHVGTIMESRDATFFESFFPMKDTHSGSNQPSEIIPSSITPPEQTEHTHELVSEEDVSEAPRRSKRQRTAKSFGDDFTVYLVDDTPKSISEAYASPDADYWKEAVRSEMDSIIANGTWEVTERPYGCKPVGCKWVFKKKLRPDGTIEKYKARLVAKGYTQKEGEDFFDTYSHVARLTTIRVLLSLAASHGLLVHQMDVKTTFLNGELDEEIYMYQPDGFVVEGQEGKVCKLLKSLYGLKQAPKQWHEKFDKTLTSAGFAVNEADKCVYYRHGRGEGVILCLYVDDILIFKTNLEVINEVKSFLSQNFDMKDLGVADVILNIKLIRGENGITLLQSHYVEKILNRFGYIDSKPSPTPYDPSLLLRKNKRIARNQLEYSQIIGSLMYLASATRPDISFAVSKLSRFTSNPGDDHWRALERVMRYLKGTVELGLHYTGYPAVLEGYSDSNWISDVDEIKATSGYVFTLGGGAVSWRSCKQTILTRSTMEAELTALDTATVEAEWLRDLLMDLPVVEKPVSAILMNCDNQTVIVKVNSSKDNMKSSRHVKRRLKSVRKLRNSGVITLDYIQTARNLADPFTKGLSRNVIDNASKEMGLRPM

SEQ ID NO: 19931 - protein, 1320 aa, Oryza sativa
  Clone ID: TF_OSC401254j.C1.p2.fg
MAGFADALRPDKFTGVHFKRWQIRVTLWLTAMKCFWVSTGKPEGVLTAEQQKQFEEATTLFVGCILSVLGDRLVEVYMHMTDAKELWDALNTKFGATDASNDLYIMEQFHDYKMADNRSVVEQAHEIQTMAKELELLKCVLPDKFVAGCIIAKLPPSWRSFGTALKHKRQEYSVEGLIASLDVEEKAREKDAASKGDGGQSSANVVHKAQNKSKGKYKAQQTTNFKKQKKNNNNPNQDERTCFVCGQVGHLARKCPQRKGMKAPAGQTSKSANVTIGNTGDGSGYGNLPTVFSVNQSTNWWVDTGANVHVCADISLFSSYQVARGSTVLMGNGSHASVHGVGTVDLKFTSGKIVQLKNVQHVPSIDRNLVSGSRLTRDGFKLVFESNKVVVSKHGYFIGKGYECGGLFRFSLSDFCNKSVNHICGSVDDEANVWHSRLCHINFGLMSRLSSMCLIPKFSIVKGSKCHSCVQSKQPRKPHKAAEERNLAPLELLHSDLCEMNGVLTKGGKRYFMTLIDDATRFCYVYLLKTKDEALDYFKIYKAEVENQLDRKIKRLRSDRGGEFFSNEFDLFCEEHGIIHERTPPYSPESNGIAERKNRTLTDLVNAMLDTAGLPKAWWREALLTSNHVLNRVPNRNKDKTPYEIWIGRKPSLSYLRTWGCLAKVNVPITKKRKLGPKTVDCVFLGYAHHSIAYRFLIVKSEVPDMHVGTIMESRDATFFESFFPMKDTHSGSNQPSEIIPSSITPPEQTEHTHELVSEEDVSEAPRRSKRQRTAKSFGDDFTVYLVDDTPKSISEAYASPDADYWKEAVRSEMDSIIANGTWEVTERPYGCKPVGCKWVFKKKLRPDGTIEKYKARLVAKGYTQKEGEDFFDTYSPVARLTTIRVLLSLAASHGLLVHQMDVKTAFLNGELDEEIYMDQPDGFVVEGQEGKVCKLLKSLYGLKQAPKQWHEKFDKTLTSAGFAVNEADKCVYYRYGGGEGVILCLYVDDILIFGTNLEVINEVKSFLSQNFDMKDLGVADVILNIKLIRGENGITLLQSHYVEKILNRFGYIDSKPSPTPYDPSLLLRKNKRIARNQLEYSQIIGSLMYLASATRPDISFAVSKLSRFTSNPGDDHWRALERVMRYLKGTVELGLHYTGYPAVLEGYSDSNWISDVDEIKATSGYVFTLGGGAVSWRSCKQTILTRSTMEAELTALDTATVEAEWLRDLLMDLPVVEKPVPAILMNCDNQTTCEKTIEVCQEIKKLRSYNVGLHPNSEKPGRSLHEGTITKCDRQCIEGDGFETHSILEGTHLCELDCWSQSMKILGESSRKLTKDLGV

SEQ ID NO: 19932 - protein, 1296 aa, Oryza sativa
  Clone ID: TF_OSC401274j.C1.p11.fg
MAGFADALRPDKFTGVHFKRWQIRVTLWLTAMKCFWVSTGKPEGVLTAEQQKQFEEATTLFVGCILSILGDRLVEVYMHMTDAKELWDALNTKFGATDASNDLYIMEQFHDYKMADNRSVVEQAHEIQTMAKELELLKCVLPDKFVAGCIIAKLPPSWRSFGTALKHKRQEYSVEGLIASLDVEEKAREKDAASKGDGGQSSANVVHKAQNKSKGKYKAQQTTNFKKQKKNNNNPNQDERTCFVCGQVGHLARKCPQRKGMKAPAGQTSKSANVTIGNTGDGSGYGNLPTVFSVNQSTNWWVDTGANVHVCADISLFSSYQVARGSTVLMGNGSHASVHGVGTVDLKFTSGKIVQLKNVQHVPSIDRNLVSGSRLTRDGFKLVFESNKVVVSKHGYFIGKGYECGGLFRFSLSDFCSKSVNHICGSVDDEANVWHSRLCHINFGLMSRLSSMCLIPQFSIVKGSKCHSCVQSKQPRKPHKAAEERNLAPLELLHSDLCEMNRVLTKGGKRYFMTFIDDATRFCYVYLLKTKDEALDYFKIYKAEVENQLDRKIKRLRSDRGEEFFSNEFDLFCEEHGIIHEMTPPYSPESNGIAERKNRTLTDLVNAMLDTAGLPKAWWGEALLTSNHVLNRVPNRNKDKTPYEIWIGRKPSLSYLRTWGCLAKVNVPITKKRKLGPKTVDCVFLGYAHHSIAYRFLIVKSEVPDMHVGTIMESRDAIFFESFFPMKDTHSGSNQPSKIIPSSITPPEQTEHTHELVSEEDVSEAPRRSKRQRTAKSFDDDFTVYLVDDTPKSISEAYASPDADYWKEAVRSEMDSIIANGTWEVTERPYGCKPVGCKWVFKKKLRPDGTIENYKARLVAKGYTQKEGEDFFDTYSPVARLTTIRVLLSLAASHGLLVHQMDVKTAFLNGELDEEIYMDQPDGFVVEGQEGKVCKLLKSLYGLKQAPKQWHEKFDKTLTSAGFAVNEADKCVYYRHGGGEGVILCLYVDDILIFGTNLEVINEVKSFLSQNFDMKDLGVADVILNIKLIRGENGITLLQSHYVEKILNRFGYIDSKPSPTPYDPSLLLRKNKRIARNQLEYSQIIGSLMCLASATRPDISFAVSKLSRFTSNPGDDHWRALERVMRYLKGTVELGLHYTGYPAVLEGYSDSNWISDVDEIKATSGYVFTLGGGAVSWRSCKQTILTRSTMEAELTALDTATVEAEWLRDLLMDLPVVEKPVPAILMNCDNQTSILERTHLCELDCWSQSMKILGESSRKLTKDLEMKGTCVCAAEQRTQNTETHTRGMLRHRHSLK

SEQ ID NO: 19933 - protein, 1032 aa, Oryza sativa
  Clone ID: TF_OSC401369j.C1.p2.fg
MAGFADALRPDKFTGVHFKRWQIRVTLWLTAIKCFWVYMHMTDAKELWDALNTKFGATDGSNDLYIMEQFHDYKMADNRSVVEQAHEIQTMAKELELLKCVLPDKFVAGCIIAKLPPSWRSFGTALKHKRQEYSVEGLIASLDVEEKAREKDAASKGDGGQSSANVVHKAQNKSKGKYKAQQTTNFKKQKKNNNNPNQDERTCFVCGQVGHLARKCPQRKGMKAPAGQTSKSANVTIGNTGDGSGYGNLPTVFSVNQSTNWWVDTGANVARGSTVLMGNGSHASVHGVGTVDLKFTSGKIVQLKNVQHVPSIDRNLVSGSRLTRDGFKLVFESNKVVVSKHGYFIGKGYECGGLFRFSLSDFCNKSVNHICGSVDDEANVWHSRLCHINFGLMSRLSSMCLIPKFSIVKGSKCHSCVQSKQPRKPHKAAEERNLAPLELLHSDLCEMNGVLTKGGKRYFMTLIDDATRFCYVYLLKTKDEALDYFKIYKAEVENQLDRKIKRLRSDRGGEFFSNEFDLFCEEHGIIHERTPPYSPESNGIAERKNRTLTDLWVFKKKLRPDGTIEKYKARLVAKGYTQKEGEDFFDTYSPVARLTTIRVLLSLAASHGLLVHQMDVKTAFLNGELDEEIYMDQPDGFVVEGQEGKVCKLLKSLYGLKQAPKQWHEKFDKTLTSAGFAVNEADKCVYYRHGGGEGVILCLYVDDILIFGTNLEVINEVKSFLSQNFDMKDLGVADVILNIKLIRGENEITLLQSHYVEKILNRFGYIDSKPSPTPYDPSLLLRKNKRIARNHLEYSQIIGSLMYLASATRPDISFAVSKLSRFTSNPGDDHWRALERVMRYLKGTVELGLHYTGYLAVLEGYSDSNWISDVDEIKATSGYVFTLGGGAVSWRFCKQTILTRSTMEAELTALDTATVEAERLRDLLMDLPVVEKPVPAILMNCDNQTVIVKVNSSKDNMKSSRHVKRRLKSVRKLRNSGVITLDYIQTARNLADPFTKGLSRNVIDNASKEMGLRPIAFLKELTFVSLTVGRSL

SEQ ID NO: 19934 - protein, 1378 aa, Oryza sativa
  Clone ID: TF_OSC401437j.C1.p27.gm
MRKANSHRRSFSRVTPLPIVFTLQAPPAGRVDDTAEAAGREQWGTPSMRRRRRRRTPATAPRGDPAGKAFLGGGGGGGKAAGKGRRADGRGQCAGDGGRSCAWAAGDGGARVAGGGAARGLPRQSPRWALRWHSGAGIGIGIDLRAALQSRSNLLAWSTAAEVDSRRDYSIPLAGVHRRSGEQVSGTSAFDVLHREKAAIRVTLWLTAMKCFWVSTGKPEGVLTAEQQKQFEEATTLFVGCILSVLGDRLVEVYMHMTDAKELWDALNTKFGTTDASNDLYIMEQFHDYKMADNRSVVEQAHEIQTMAKELELLKCVLPDKFVAGCIIAKLPPSWRSFGTALKHKRQEYSVEGLIASLDVEEKAREKDAASKGDGGQSSANVVHKAQNKSKGKYKAQQTTNFKKQKKNNNNPNQDERTCFVCGQVGHLARKCPQRKGMKAPAGQTSKSANVTIGNTGDGSGYGNLPTVARGSTVLMGNGSHASVHGVGTVDLKFTSEKIVQLKNMQHVPSIDRNLVSGSRLTRDGFKLVFESNKVVVSKHGYFIGKGYECGGLFRFSLSDFCNKSVNHICGSVDDEANVWHSQVENQLDRKIKRLRSDRGGEFFSNEFDLFCEEHGIIHERTPPYSPKSNGIAERKNRTLTDLVNAMLDTAGLPKACEAPRRSKRQRTAKSFGDDFTVYLVDDTPKSISEAYASPDADYWKEAVRSEMDSIIANGTWEVTERPYGCKPVGCKWVFKKKLRPDASHGLLVHQMDVKTAFLNGELDEEIYMYQPDGFVVEGFAVNEADKCVYYRHGGGEGVILCLYVDDILIFGTNLEVINESHYVEKILNRFGYIDNKPSPTPYDPSLLLRKNKRIARNQLEYSQIIGLLMYLASATRPDISFAVSKLSRFTSNPGDDHWRALERVMRYLKGTVELGLHYTGYPAVLEGYSDSNWISDVDEIKATSGYVFTLGGGAVSWSSQRRQRLVLASRRHRACTCFLPLRLPAPTRSSRLAAINKPTPTPAFPRLPAVMAPVLERPHGVAVLTAFLPPRRHRQADVGFVLGRSSPASPRLCHASPLRRRRPPPPPLSRRRPPPLPSRVGYLADKRIYHGGYRVSSLHFRYSPPTSSSWICQAVTWSPRRWMAEQTMNKALLGGDSLRTASRMSKGRMDNGGDDSASTGKLSPRRLHPHLPPVAAVSVFRSSLALDGSFVEAAPSSSTSPPPFPSSSPFALPLWSCHRRPSPLACADLVDRGDFNRAHHVAACRARRRRPLGRGYKEGHSGDEGMTKTKEAMAAPDRDSDMCDTCGSHAESAVTSDNTGVKTTEWPKVNGAAAAAHFARGRSEEAHGRAFGEWAYRCRVQELKAPLGSLVVALKSSNESTSVLFPAIVVQRMLPVP

SEQ ID NO: 19935 - protein, 1210 aa, Oryza sativa
  Clone ID: TF_OSC401487j.C1.p3.fg
MAGFADALRPDKFTGVHFKRWQIRVTLWLTAMKCFWVSTGKPEGVLTAEQQKQFEEATTLFVGCILSVLGDRLVEVYMHMTDAKELWDALNTKFGATDASNDLYIMEQFHDYKMADNRSVVEQAHEIQTMAKELELLKCVLPDKFVAGCIIAKLPPSWRSFGTALKHKRQEYSVEGLIASLDVEEKAREKDAASKGDGGQSSANVVHKAQNKSKGKYKAQQTTNFKKQKKNNNNPNQDERTCFVCGQVGHLARKCPQRKGMKAPAGQTSKSANVTIGNTGDGSGYGRTGFHRPNGEWVTCFCSWCWHGRSEVYFGKDRAAEERAACPFYRQESCYECGGLFRFSLSDFCNKSVNHICGSVDDEANVWHSRLCHINFGLMSRLSSMCLIPKFSIVKGSKCHSCVQSKQPRKPHKAAEERNLAPLELLHSDLCEMNGVLTKGGKRYFMTLIDDATRFCYVYLLKTKDEALDYFKIYKAEVENQLDRKIKRLRSDRGGEFFSNEFDLFCEEHGIIHERTPPYSPESNGIAERKNRTLTDLVNAMLDTAGLPKAWWGEALLTSNHVLNRVPNRNKDKTPYEIWIGRKPSLSYLRTWGCLAKVNVPITKKRKLGPKTVDCVFLGYAHHSIAYRFLIVKSEVPDMHVGTIMESRDATFFESFFPMKDTHSGSNQPSEIIPSSITPPEQTEHTHELVSEEDVSEAPRRSKRQRTAKSFGDDFTVYLVDDTPKSISEAYASPDADYWKEAVRSEMDSIIANGTWEVTERPYGCKPVGCKWVFKKKLRPDASHGLLVHQMDVKTAFLNGELDEEIYMDQPDGFVVEGQEGKVCKLLKSLYGLKQAPKQWHEKFDKTLTSAGFAVNEADKCVYYRHGGGEGVILCLYVDDILIFGTNLEVINEVKSFLSQNFDMKDLGVADVILNIKLIRGENGITLLQSHYVEKILNRFGYIDSKPSPTPYDPSLLLRKNKRIARNQLEYSQIIGSLMYLASATRPDISFAVSKLSRFTSNPGDDHWRALERVMRYLKGTVELGLHYTGYPAVLEGYSDSNWISDVDEIKATSGYVFTLGGGAVSWRSCKQTILTRSTMEAELTALDTATVEAEWLRDLLMDLPVVEKPVPAILMNCDNQTTCEKTIEVCQEIKKLRSYNVGLHPNSEKPGRSLHEGTITKCDRQCIEGDGFETHSILEGTHLCELDCWSQSMKILGESSRKLTKDLGV

SEQ ID NO: 19936 - protein, 1152 aa, Oryza sativa
  Clone ID: TF_OSC401546j.C1.p23.fg
MAGFADALRPDKLTGVHFKRWQIRVTLWLTAMKCFWVSTGKPEGVLTAEQQKQFEEATTLFVGCILSVLGDRLVEVYMHMTDAKELWDALNTKFGATDASNDLYIMEQFHDYKMADNRSVVEQAHEIQTMARELELLKCVLPDKFVAGCIIAKLPPSWRSFGTALKHKRQEYSVEGLIASLDVEEKAREKDAASKGDGGQSSANVVHKAQNKSKGKYKAQQTTNFKKQKKNNNNPNQNERTCFVCGQVGHLARKCPQRKGMKAPAGQTSKSANVTIGNTGHGSGYGNLPTVFSVNQSTNWWVDTGANVHVCADISLFSSYQVARGSTVLIGNGSHASVHGVGTVDLKFTSGKIVQLKNMQHVPSIDRNLVSGSRLTRDGFKLVFESNKVVVSKHVYFIGKGYECGGLFRFSLSDFCNKSVNHICGSVDDEANVWHSRLCHINFGLMSRLSSMCLIPKFSIVKGSKCHSCVQSKQPRKPHKAAEERNLAPLELLHSDLCEMNGVLTKGGKRYFMTLIDDATRFCYVYLLKTKDEALDYFKIYKAEVENQLDRKIKRLRSDRGGEFFSNEFDLFCEEHGIIHERTPPYSPESNGIAERKNRTLTDLVNAMLDTAGLPKAWWGEALLTSNHVLNIVPNRNKDKTPYEIWIGKKPPLSYLRTWGCLAKVNVPITKKRKLGPKTVDCVFLGYAHHSIAYRFLIVKSEVPDMHVGTIMESRDSIFFESFFPMKDTHSGSNQPSEIIPSPITPPEQTEHTHELVSEEDVSEAPRRSKRQRTAKSFDDDFTVYLVDDTPKSISEAYASPDADYWKEAVRSEMDSIIANGTWEVTERPYGCKPVGCKWVFKKKLRPDGTIEKYKARLVAKGYTQKEGEYFFDTYSPVARLTTIRVLLSLAASHGLLVHQMDVKTAFLNGELDEEIYMDQPDGFVVEGQEGKVCKLLKSLYGLKQAPKQWHEKFDKTLTSAGFAVNEADKCVYYRHGGGEGVILCLYVDDILIFGTNLEVINEVKSFLSQNFDMKDLGVADVILNIKLIRGENGITLLQSHYVEKILNRFGYIDSKPSPTPYDPSLLLRKNKRIARNQLEYSQIIGSLMYLASATRPDISFAVSKLSRFTSNPGDDHWRALERVMRYLKGTVELGLHYTGYPAVLEGYSDSN

SEQ ID NO: 19937 - protein, 1196 aa, Oryza sativa
  Clone ID: TF_OSC401589j.C1.p1.fg
MRLCLDSIVCLFAKRTSRRGVDGMEQRTSIANVLLDYSCSKVLSTPSVSRFKYALYFWAEEKAREKDAASKGDGGQSSANVVHKTQNKSKGKYKAQQTTNFKKKKKNNNNPNQDERTCFVCGQVGHLARKCPQRKGMKAPAGQTSKSANVTIGNTGDGSGYGNLPTVFSVNQSTNWWVDTGTNVHVCADISLFSSYQVARGSTVLMGNGSHASVHGVGMVDLKFTSGKIVQLKNVQHVPSIDRNLVSGSRLTRDGFKLVFESNKVVVSKHGYFIGKGYECGGLFRFSLSDFCNKSVNHICGSVDDEANVWHSRLCHINFGLMSRLSSMCLIPKLSIVKGSKCHSCVQSKQPRKPHKAAEERNLAPLELLHSDLCEMNGVLTKGGKRYFMTLIDDATRFCYVYLLKTKDEALDYFKIYKAEVENQLDRKIKRLRSDRGGEFFSNEFDLFCEEHGIIHERTPPYSLESNGIAERKNRTLTDLVNAMLDTAGLPKAWWGEALLTSNHVLNRVPNRNKDKTPYEIWIGRKLSLSYLRTWGCLAKVNVPITKKRKLGPKTVDCVFLGYAHHSIAYRFLIVKSEVPDMHVGTIMESRDATFFESFFPMKDTHSGSNQPSEIILSSITPPEQTEHTHELVSEEDVSEAPRRSKRQRMAKSFGDDFTVYLVDDTPKSISEAYASPDADYWKEAVRSEMDSIIANGTWEVTERPYGCKPVGCKWVFKKKLRPDGTIEKYKARLVAKGYTQKEGEDFFDTYSPVARLTTIRVLLSLAASHGLLVHQMDVKTAFLNGELDEEIYMYQPDGFVVEGQEGKVCKLLKSLYGLKQAPKQWHEKFDKTLTSAGFAVNEADKCVYYRHGGGEGVILCLYVDDILIFGTNLEVINEVKSFLSQNFDMKDLGVADVILNIKLIRGENGITLLQSHYVEKILNRFGYIDSKPFPTPYDPSLLLRKNKRIARNQLEYSQIIGSLMYLASATRPDISFAVSKLSRFTSNPGDDHWRALERVMRYLKGTVELGLHYTGYPTVLEGYSDSNWISDVDEIKATSGYVFTLGGGAVSWRSCKQTILTRSTMEAELTALDTATVEAEWLRDLLMDLPVVEKPVPAILMNCDNQTTCEKTIEVCQEIKKLRSYNVGLHPNSEKPGRSLHEGTITKCDRQCIEGDGFETHSILERTHLCELDCWSQSMKILGESSRKLTKDLGV

SEQ ID NO: 19938 - protein, 1320 aa, Oryza sativa
  Clone ID: TF_OSC401620j.C1.p13.fg
MAGFADALRPDKFTGVHFKRWQIRVTLWLTAMKCFWVSTGKPEGVLTAEQQKQFEEATTLFVGCILSILGDRLVEVYMHMTDAKELWDALNTKFGATDASNDLYIMEQFHDYKMADNRSVVEQAHEIQTMAKELELLKCVLPDKFVAGCIIAKLPPSWRSFGTALKHKRQEYSVEGLIASLDVEEKAREKDAASKGDGGQSSANVVHKAQNKSKGKYKAQQTTNFKKQKKNNNNPNQDERTCFVCGQVGHLARKCPQRKGMKAPAGQTSKSANVTIGNTGDGSGYGNLPTVFSVNQSTNWWVDTGANVHVCADISLFSSYQVARGSTVLMGNGSHASVHGVGTVDLKFTSGKIVQLKNVQHVPSIDRNLVSGSRLTRDGFKLVFESNKVVVSKHGYFIGKGYECGGLFRFSLSDFCNKSVNHICGSVDDEANVWHSRLCHINFGLMSRLSSMCLIPKFSIVKGSKCHSCVQSKQPRKPHKAAEERNLAPLELLHSDLCEMNGVLTKGGKRYFMTLIDDATRFCYVYLLKTKDEALDYFKIYKAEVENQLDRKIKRLRSDRGGEFFSNEFDLFCEEHGIIHERTPPYSPESNGIAERKNRTLTDLVNAMLDTAGLPKAWWGEALLTSNHVLNRVPNRNKDKTPYEIWIGRKPSLSYLRTWGCLAKVNVPITKKRKLGPKTVDCVFLGYAHHSIAYRFLIVKSEVPDMHVGTIMESRDATFFESFFPMKDTHSGSNQPSEIIPNSITPPEQTEHTHELVSEEDVSEAPRRSKRQRTAKSFGDDFTVYLVDDTPKSISEAYASPDADYWKEAVRSEMDSIIANGTWEVTERPYGCKPVGCKWVFKKKLRPDGTIEKYKARLVAKGYTQKEGEDFFDTYSPVARLTTIRVLLSLAASHGLLVHQMDVKTAFLNGELDKEIYMDQPDGFVVEGQEGKVCKLLKSLYGLKQAPKQWHEKFDKTLTSAGFAVNEADKCVYYRHGGGEGVILCLYVDDILIFGTNLEVINEVKSFLSQNFDMKDLGVADVILNIKLIRGENGITLLQSHYVEKILNRFGYIDSKPSPTPYDPSLLLRKNKRIARNQLEYSQIIGSLMYLASATRPDISFAMSKLSRFTSNPGDDHWRALERVMRYLKGTVELGLHYTGYPAVLEGYSDSNWISDVDEIKATSGYVFTLGGGAVSWRSCKQTILTRSTMEAELTALDTATVEAEWLRDLLMDLPVVEKPVPAILMNCDNQTTCEKTIEVCQEIKKLRSYNVGLHPNSEKPGRSLHEGTITKCDRQCIEGDGFETHSILEGTHLCELDCWSQSMKILGESSRKLTKDLGV

SEQ ID NO: 19939 - protein, 1228 aa, Oryza sativa
  Clone ID: TF_OSC401828j.C1.p40.fg
MAGFADALRPDKFTGVHFKRWQIRVTLWLTAMKCFWVSTGKPEGVLTAEQQKQFEEATTLFVGCILSVLGDRLVEVYMHMTDAKELWDALNTKFGATDASNDLYIMEQFHDYKMADNRSVVEQAHEIQTMAKELELLKCVLPDKFVAGCIIAKLPPSWRSFGTALKHKRQEYSVEGLIASLDVEEKAREKDAASKGDGGQSSANVVHKAQNKSKGKYKAQQTTNFKKQKKNNNNPNQDERTCFVCGQVGHLARKCPQRKGMKAPAGQTSKSANVTIGNTGDGSGYGNLPTVFSVNQSTNWWVDTGANVHVCADISLFSSYQVARGSTVLMGNGSHASVHGVGTVDLKFTLGKIVQLKNVQHVPSIDRNLVSGSRLTRDGFKLVFESNKVVVSKHGYFIGKGYECGGLFRFSLSDFCNKSVNHICGSVDDEANVWHSRLCHINFGLMSRLSSMCLIPKFSIVKGSKCHSCVQSKQPRKPHKAAEERNLAPLELLHSDLCEMNGVLTKGGKRYFMTLIDDATRFCYVYLLKTKDEALDYFKIYKAEVENQLDRKIKRLRSDRGGEFFSNEFDLFCEEHGIIHERTPPYSPESNGIAKRKNRTLTDLVNAMLDTAGLPKAWWGEALLTSNHVLNRVPNRNKDKTPYEIWIGRKPSLSYLRTWGCLAKVNVPITKKRKLGPKTVDCVFLGYAHHSIAYRFLIVKSEVPDMHVGTIMESRDATFFESFFPMKDTHSGSNQPSEIIPSSITPPEQTEHTHELVSEEDVSEAPRRSKRQRTAKSFGDDFTVYLVDDTPKSISEAYASPDADYWKEAVRSEMDSIIANGTWEVTERPYGCKPVGCKWVFKKKLRPDGTIEKYKARLVAKGYTQKEGEDFFDTYSPVARLTTIRVLLSLAASHGLLVHQMDVKTAFLNGELDEEIYMDQPDGFVVEGQEGKVCKLLKSLYGLKQAPKQWHEKFDKTLTSAGFAVNEADKCVYYRHGGGEGVILCLYVDDILIFGTNLEVINEVKSFLSQNFDMKDLGVADVILNIKLIRGENGITLLQSHYVEKILNRFGYIDSKPSPTPYDPSLLLRKNKRIARNQLEYSQIIGSLMYLASATRPDISFAVSKLSRFTSNPGDDHWRALERVMRYLKGTVELGLHYTGYPAVLEGYSDSNWISDVDEIKATSGYVFTLGGGAVSWRSCKQTILTRSTMEAELTALDTATVEAEWLRDLLMDLPVVEKTGAGYPYEL

SEQ ID NO: 19940 - protein, 1170 aa, Oryza sativa
  Clone ID: TF_OSC401831j.C1.p15.gm
MGSALYPLGEMRRSQRADGLAAVLAIGTANPPNCVTQEEFPDFYFRVTNSDHLTALKDKFKRICQEMGVQRRYLHHTEEMLSAHPEFVDRDAPSLDARLDIAADAVPELAAEAAKKAIAEWGRPAADITHLVVTTNSGAHVPGVDFRLVPLLGLRPSVRRTMLHLNGCFAGCAALRLAKDLAENSRGARVLVVAAELTLMYFTGPDEGCFRTLLVQGLFGDGAAAVIVGADADDVERPLFEIVSAAQTIIPESDHALNMRFTERRLDGVLGRQVPGLIGDNVERCLLDMFGPLLGGDGGGGWNDLFWAVHPGSSTIMDQVDAALGLEPGKLAASRRVLSDYGNMSGATVIFALDELRRQRKEAAAAGEWPELGVMMAFGPGMTVDAMLLHATSHGDGGLLDFLDMWNIKAVARTSPKMHGGKTLGNYSIPLAGVHQRSGEQVSGTSAFDVLHREKAAIRHCDFTMAGFADALRPDKFTGVHFKRWQIRVTLWLTAMKCFWVSTGKPEGVLTAEQQKQFEEATTLFVGCIVSVLGDRLVEVYMHMTDAKELWDALNTKFGATDASNDLYIMEQFHDYKMADNRSVVEQAHEIQTMDKELELLKCVLPDKFVAGCIIAKLPPSWRSFGTALKHKRQEYSVEGLIASLDVEEKAREKDAASKGDGGQSSANVVHKAQNKSKGKYKAQQTTNFKKQKKNNNNPNQDERTCFVCGQVGHLARKCPQRKGMKAPAGQTSKSANVTIGNTGDGSGYGNLPTVARGSTVLMGNGSHASVHGVGTVDLKFTSGKIVQLKNVQHVPSIDRNLDTHSGSNQPSEIIPSSITPPEQTEHTHELVSEEDVSEAPRRSKRQRTAKSFGDDFTVYLVDDTPKSISEAYASPDADYWKEAVRSEMDSIIANGTWESHYVEKILNRFGYIDSKPSPTPYDPSLLLRKNKRIARNQLEYSQIIGSLMYLASATRPDISFAVSKLSRFTSNPGDDHWRALERVMRYLKGTVELGLHYTGYPAVLEGYSDSNWISDVDEIKATSGYVFTLGGGAVSWRSCKQTILTRSTMEAELTALDTAIVEAEWLRDLLMDLPVVEKPVPAILMNCDNQTEIKKLRSYNVGLHPNSEKPGRSLHEGTITKCDRQCIEGDGFETHSILEGTHLCELDCWSQSMKILGESSRKLTKDLGV

SEQ ID NO: 19941 - protein, 1394 aa, Oryza sativa
  Clone ID: TF_OSC401876j.C1.p5.fg
MQPPFAVLFCCKFGFVFVLETFRKIRSNDAFMLVFICNVMIYLWNRLNHYMSIISTIQKPYYRHCDFTLAGFADALRPDKFTGVHFKRWQIRVTLWLTVMKCFWVSTGKPEGVLTAEQQKQFEEATTLFVGCILSVLGDRLVEVYMHMTDAKELWDALNTKFGATDASNDLYIMEQFHDYKMADNRSVVEQAHEIQTMAKELELLKCVLPDKFVAGCIIAKLPPSWRSFGTALKHKRQEYSVEGLIASLDVEEKAREKDAASKGDGGQSSANVVHKAQNKSKGKYKAQQTTNFKKQKKNNNNPNQDERTCFVCGQVGHLARKCPQRKGMKAPAGQTSKSANVTIGNTGDGSGYGNLPAVFSVNQSTNWWVDTGANVHVCADISLFSSYQVARGSTVLMGNGSHASVHGVGTVDLKFTSGKIVQLKNVQHVPSIDRNLVSGSRLTRDGFKLVFESNKVVVSKHGYFIGKGYECGGLFRFSLSDFCNKSVNHICGSVDDEANVWHSRLCHINFGLMSRLSSMCLIPKFSIVKGSKCHSCVQSKQPRKPHKAAEERNLAPLELLHSDLCEMNGVLTKGGKRYFMTFIDDATRFCYVYLLKTKDEALDYFKIYKAEVENQLDRKIKRLRSDRGGEFFSNEFDLFCEEHGIIHEMTPPYSPESNGIAERKNRTLTDLVNAMLDTAGLPKAWWGEALLTSNHVLNRVPNRNKDKTPYEIWIGRKPSLSYLRTWGCLAKVNVPITKKRKLGPKTVDCVFLGYAHHSIAYRFLIVKSEVPDMHVGTIMESRDAIFFESFFPMKDTHSGSNQPSEIIPSSITPPEQTEHTHELVSEEDVSEAPRRSKRQRTAKSFGDDFTVYLVDDTPKSISEAYASPDADYWKEAVRSEMDSIIANGTWEVTERPYGCKPVGCKWVFKKKLRPDGTIEKYKARLVAKGYTQKEGEDFFDTYSPVARLTTIRVLLSLAASHGLLVHQMDVKTAFLNGELDEEIYMDQPDGFVVEGQEGKVCKLLKSLYGLKQAPKQWHEKFDKTLTSAGFAVNEADKCVYYRHGGGEGVILCLYVDDILIFGTNLEVINEVKSFLSQNFDMKDLGVADVILNIKLIRGENGITLLQSHYVEKILNRFGYIDSKPSPTPYKPSLLLRKNKRIARNQLEYSQIIGSLMYLASATRTDISFAVSKLSRFTFNPGDDHWRALERVMRYLKGTVELGLHYTGYPAVLEGYSDSNWISDVDEIKATSGYVFTLGGGAVSWRSCKQTILTRSTMEAELTALDTATVEAEWLRDLLMDLPVVEKPVPAILMNCDNQTTCEKTIEVCQEIKKLRSYNVGLHPNSEKPGRSLHEGTITKCDRQCIEGDGFETHMSYTMVSILERTHLCELDCWSQSMKILGESSRKLTKDLGV

SEQ ID NO: 19942 - protein, 1312 aa, Oryza sativa
  Clone ID: TF_OSC402429j.C1.p11.fg
MAGFADALRPDKFTGVHFKRWQIRVTLWLTAMKCFWVSTGKPEGVLTAEQQKQFEEATTLFVGCILSVLGDRLVEVYMHMTDAKELWDALNTKFGATDASNDLYIMEQFHDYKMADNRSVVEQAHEIQTMAKELELLKCVLPDKFVAGCIIAKLPPSWRSFGTALKHKRQEYSVEGLIASLDVEEKAREKDAASKGDGGQSSANVVHKAQNKSKGKYKAQQTTNFKKQKKNNNNPNQDERTCFVCGQVGHLARKCPQRKGMKAPAGQTSKSANVTIGNTGDGSGYGNLPTVFSVNQSTNWWVDTGANVHVCADISLFSSYQVARGSTVLMGNGSHASVHGVGTVDLKFTSGKIVQLKNVQHVPSIDRNLVSGSRLTRDGFKLVFESNKVVVSKHGYFIGKGYECGGLFRFSLSDFCNKSVNHICGSVDDEANVWHSRLCHINFGLMSRLSSMCLIPKFSIVKSSKCHSCVQSKQPRKPHKAAKERNLAPLELLHSDLCEMNGVLTKGGKRYFMTLIDDATRFCYVYLLKTKDEALDYFKIYKAEIENQLDRKIKRLRSDRGGEFFSNEFDLFCEEHGIIHERTPPYSPESNGIAERKNRTLTDLVNAMLDTAGLPKAWWGEALLTSNHVLNRVPNRNKDKTPYEIWIGRKPSLSYLRTWGCLAKVNVPITKKRKLGPKTVDCVFLGYAHHSIAYRFLIVKSEVPDMHVGTIMESRDATFFESFFPMKDTHSGSNQPSEIIPSSITPSEQTEHTHELVSEEDVSEAPRRSKRQRTAKSFGDDFTVYLVDDTPKSISEAYASPDADYWKEAICSEMDSIIANGTWEVTERPYGCKPVGCKWVFKKKLRPDGTIEKYKARLVAKGYTQKEGEDFFDTYSPVARLTTIRVLLSLAASHGLLVHQMDVKTAFLNGELDEEIYMDQPDGFVVEGQEGKVCKLLKSLYGLKQAPKQWHEKFDKTLISAGFAVNEADKCVYYRHGGGEGVILCLYVDDILIFGTNLEVINEVKSFLSQNFDMKDLGVADVILNIKLIRGENGITLLQSHYVEKILNRFGYIDSKPSPTPYDPSLLLRKNKRIARNQLEYSQIIGSLMYLASATRPDISFAVSKLSRFTSNPGDDHWRALERVMRYLKGTVELGFHYTGYPAVLEGYSDSNWISDVDEIKATSGYVFTLGGGAVSWRSCKQTILTRSTMEAELTALDTATVEAEWLRDLLMDLPVVEKPVPAILMNCDNQTTCEKTIEVCQEIKKLRSYNVGLHPNSEKSGRSLHEGTITKCDRQCIEGDGFETHIKSLYVYNLNTNNQKKQPFLGTDITT

SEQ ID NO: 19943 - protein, 1320 aa, Oryza sativa
  Clone ID: TF_OSC402924j.C1.p5.fg
MAGFADALRPDKFTGVHFKRWQIRVTLWLTAMKCFWVSTGKPEEVLTAEQQKQFEEATTLFVGCILSVLGDRLVEVYMHMTDAKELWDALNTKFGATDASNDLYIMEQFHDYKMADNRSVVEQAHEIQTMAKELELLKCVLPDKFVAGCIIAKLPPSWRSFGTALKHKRQEYSVEGLIASLDVEEKAREKDAASKGDGGQSSANVVHKAQNKSNGKYKAQQTTNFKKQKKNNNNPNQDERTCFVCGQVGHLARKCPQRKGMKAPAGQTSKSANVTIGNTGDGSGYGNLPTVFSVNQSTNWWVDTGANVHVCADISLFSSYQVARGSTVLMGNGSHASVHGVGTVDLKFTSGKIVQLKNVQHVPSIDRNLVSGSRLTRDGFKLVFESNKVVVSKHGYFIGKGYEYGGLFRFSLSDFCNKSVNHICGTVDDEANVWHSRLCHINFGLMSRLSSMCLIPKFSIVKGSKCHSCVQSKQPRKPHKAAEERNLAPLELLHSDLCEMNGVLTKGGKRYFMTLIDDATRFCYVYLLKTKDEALDYFKIYKAEVENQLDRKIKRLRSDRGGEFFSNEFDLFCEEHGIIHERTPPYSPESNGIAERKNRTLTDLVNAMLDTAGLPKAWWGEALLTSNHVLNRVPNRNKDKTPYEIWIGRKPSLSYLRTWGCLVKVNVPITKKRKLGPKTVDCVFLGYAHHSIAYRFLIVKSEVPDMHVGTIMESRDATFFESFFPMKDTNSGSNQPSEIIPSSITPPEQTEHTHELVSEEDVSEAPRRSKRQRTAKSFGDDFTVYLVDDTPKSISEAYASPDADYWKEAVRSEMDSIIANGTWEVTERPYGCKPVGCKWVFKKKLRPDGTIEKYKARLVAKGYTQKEGEDFFDTYSPVARLTTIRVLLSLAASHGLLVHQMDVKTAFLNGELDEEIYMDQPDGFVVEGQEGKVCKLLKSLYGLKQAPKQWHEKFDKTLTSAGFAVNEADKCVYYRHGGGEGVILCLYVDDILIFGTNLEVINEVKSFLSQNFDMKDLGVADVILNIKLIRGENGITLLQSHYVEKILNRFGYIDSKPSPTPYDPSLLLRKNKRIARNQLEYSQIIGSLMYLASATRPDISFAVSKLSRFTSNPGDDHWRALERVMRYLKGTVELGLHYTGYPAVLEGYSDSNWISDVDEIKATSGYVFTLGGGAVSWRSCKQTILTRSTMEAELTALDTATVEAEWLRDLLMDLPVVEKPVPAILMNCDNQTTCEKTIEVCQEIKKLRSYNVGLHPNSEKPGRSLHEGTITKCDRQCIEGDGFETHSILERTHLCELDCWSQSMKILGESSRKLTKDLGV

SEQ ID NO: 19944 - protein, 1536 aa, Oryza sativa
  Clone ID: TF_OSC403329j.C1.p39.gm
MYWSVSSAVMWGRTYVRQRRARDVRRAAARARSSPRRAVSPPPATSSPPPAAAPPSSDSSSGASCPPGMGDPNDLKTSVEALTTAMKEMQASIAANAKAIAALSSGRTSSSGATTDSGEPRTVRPPRFQKMDFPRYDGKSDPLTFLNWCESYFHQQRIMDEEKVWMASYNLEDGAQLWYMQVQADEGKPSWRRFRELLVLRYGPPLRSAPLFELADCRRTTTVEDYQDHFQALLPRAGRLTKAQRVQLFTGGLLPPLSLKVQMQNPQSLVTAMSLARQFELMEQCTATLAKAPGHGILPTLGPRQAPPQPPAPRAASPPVLIDGRPVKRLSQAEQDERRRLGLCFNYYSIPLAGVHQRSGEQVSGTSAFDVLHREKAAIRHCDFTMAGFADALRPDKFTGVHFKRWQIRVTLWLTAMKCFWVSTGKPEGILTAEQQKQFEEATTLFVGCILSVLGDRLVEVYMHMTDAKELWDALNTKFGATDASNDLYIMEQFHDYKMADNRSVVEQAQEIQTMAKELELLKCVLPDKFVAGCIIAKLPPSWRSFGTALKHKRQEYSVEGLIASLDVEEKAREKDAASKGDGGQSSANVVHKAQNKSKGKYKAQQTTNFKKQKKNNNNPNQDERTCFVCGQVGHLARKCPQRKGMKAPAGQTSKSANVTIGNTGDGSGYGNLPTVARGSTVLMGNGSHASVHGVGTVDLKFTSGKIVQLKNVQHVPSIDRNLVSGSRLTRDGFKLVFESNKVVVSKHGYFIGKGYECGGLFRFSLSDFCNNMCLIPKFSIVKGSKCHSCVQSKQPRKPHKAAEERNLAPLELLHSDLCEMNGVLTKEVENQLDRKIKRLRSDRGGEFFSNEFDLFCEEHGIIHERTPPYSPESNGIAERKNRTLTDLVNAMLDTAGLPKACEAPRRSKRQRTAKSFGDDFTVYLVDDTPKSISEAYASPDADYWKEAVHSEMDSIIANGTWEVTERPYGCKPVGCKWVFKKKLRPDASHGLLVHQMDVKTAFLNGELDEEIYMDQPDGFVVEVNEADKCVYYRHGGGEGVILCLYVDDILIFGTNLEVINESHYVEKILNRFGYIDSKPSPTPYDPSLLLRKNKRIARNQLEYSQIIGSLMYLASATRPDISFAVSKLSRFTSNPGDDHWRALERVMRYLKGTVELWLHYTGYPAVLEGYSDSNWISDVDEIKATSGYVFTLGGGAVSWSKDVVLQSILEGTHLCELDCWSQSMKILDYSIPLAGVHQRSGEQVSGTSAFDVLHREKAAISRGHNKICKHLFLLDCAMDDDDDTDAAEEPQDLESPVFSLHAIAGVPVADTMQVQVTVGATTLTALLDSGSTHSFIAEEAACRTGLPVQPRPRMTATVANGEKVACPGVIRQAVLSIDGSLFTVDLFVIPLAGYDMVLGTQWMASLGPIVWDFTERTMSFQYHGRTICWAGVPSSPAPRIRVTTAASESLLDELLADFGDVFAEPKGLPLQHARDHTIVLKPDAPPVAVRPYRYPAAHKDELERQCAAMIEQGIVRRSDSAFSSPVLLIKKADGS

SEQ ID NO: 19945 - protein, 1320 aa, Oryza sativa
  Clone ID: TF_OSC404997j.C1.p16.fg
MAGFADALRPDKFTGVHFKRWQIRVTLWLTAMKCFWVSTGKPEGVLTAEQQKQFEEATTLFVGCILSVLGDCLVEVYMHMTDAKELWDALNTKFGATDASNDLYIMEEFHDYKMADNRSVVEQAHEIQTMAKELELLKCVLPDKFVAGCIIAKLPPSWRSFGTALKHKRQEYSVEGLIASLDVEEKAREKDAASKGDGGQSSANVVHKAQNKSKGKYKAQQTTNFKKQKKNNNNPNQDERTCFVCGQVGHLARKCPQRKGMKAPAGQTSKSANVTIGNTGDGSGYGNLPTVFSVNQSTNWWVDTGANVHVCADISLFSSYQVARGSTVLMGNGSHASVHGVGTVDLKFTSGKIVQLKNVQHVPSIDRNLVSGSRLTRDGFKLVFESNKVVVSKHGYFIGKGYECGGLFRFSLSDFCNKSVNHICGSVDDEANVWHSRLCHINFGLMSRLSSMCLIPKFSIVKGSKCHSCVQSKQPRKPHKAAEERNLAPLELLHSDLCEMNGVLTKGGKRYFMTLIDDATRFCYVYLLKTKDEALDYFKIYKAEVENQLDRKIKRLRSDRGGEFFSNEFDLFCEEHGIIHERTPPYSPESNGIAERKNRTLTDLVNAMLDTAGLPKAWWGEALLTSNHVLNRVPNRNKDKTPYEIWIGRKPSLSYLRTWGCLAKVNVPITKKRKLGPKTVDCVFLGYAHHSIAYRFLIVKSEVPDMHVGTIMESRDATFFESFFPMKDTHSGSNQPSEIIPSSITPPEQTEHTHELVSEEDVSEAPRRSKRQRTAKSFGDDFTVYLVDDTPKSISEAYASPDADYWKEAVRSEMDSIIANGTWEVTERPYGCKPVGCKWVFKKKLRPDGTIEKYKARLVAKGYTQKEGEDFFDTYSPVARLTTIRVLLSLAASHGLLVHQMDVKTAFLNGELDEEIYMDQPDGFVVEGQEGKVCKLLKSLYGLKQAPKQWHEKFDKTLTSAGFAVNEADKCVYYRHGGGEGVILCLYVDDILIFGTNLEVINEVKSFLSQNFDMKDLGVADVILNIKLIRCENGITLLQSHYVEKILNRFGYIDSKPSPTPYDPSLLLRKNKRIARNQLEYSQIIGSLMYLASATRPDISFAVSKLSRFTSNPGDDHWRALERVMRYLKGTVELGLHYTGYPAVLEGYSDSNWISDVDEIKATSGYVFTLGGGAVSWRSCKQTILTRSTMEAELTALDTATVEAEWLRDLLMDLPVVEKPVPAILMNCDNQTTCEKTIEVCQEIKKLRSYNVGLHPNSEKPGRSLHEGTITKCDRQCIEGDGFETHSILERTHLCELDCWSQSMKILGESSRKLTKDLGV

SEQ ID NO: 19946 - protein, 1518 aa, Oryza sativa
  Clone ID: TF_OSC405015j.C1.p1.fg
MADSTARTVKDVNPHEFVKAYSAHLKRSGKMELPEWVDIVKTARFKELPPYDPDWYYTRAASIARKIYLRQGIGVGGFQKIYGGRQRNGSRPPHFCKSSGAISRNILQQLQKMGIIDVDPKGGRLITSQGRRDLDQVAGRVDESIRDRKVEATGQQSQTLDSTWTAKMHPNALPSNDAFMLVFICNVMIYLWNKLNHYMPIISTIQKPYYRHCDFTMAGFADALRPDKFTGVHFKRWQIRVTLWLTAMKCFWVSTGKPEGVLTAEQQKQFEEATTLFVGCILSVLGDRLVEVYMHMTDAKELWDALNTKFGATDASNDLYIMEQFHDYKMADNRSVVEQAHEIQTMAKELELLKCVLPDKFVAGCIIAKLPPSWRSFGTALKHKRQEYSVEGLIASLDVEEKAREKDAASKGDGGQSSANVVHKAQNKSKGKYKAQQTTNFKKQKKNNNNPNQDERTCFVCGQVGHLARKCPQRKGMKAPAGQTSKSANVTIGNTGDGSGYGNLPTVFSVNQSTNWWVDTRANVHVCADISLFSSYQVARGSTVLMGNGSHASVHGVGTVDLKFTSGKIVQLKNVQHVPSIDRNLVSGSRLTRDGFKLVFESNKVVVSKHGYFIGKGYECGGLFRFSLSDFCNKSVNHICGSVDDEANVWHSRLCHINFGLMSRLSSMCLIPKFSIVKGSKCHSCVQSKQPRKPHKAAEERNLAPLELLHSDLCEMNGVLTKGGKRYFMTLIDDATRFCYVYLLKTKDEALDYFKIYKAEVENQLDRKIKRLRSDRGGEFFSNEFDLFCEEHGIIHERTPPYSPESNGIAERKNRTLTDLVNAMLDTAGLPKAWWGEALLTSNHVLNRVPNRNKDKTPYEIWIGRKPLLSYLRTWGCLAKVNVPITKKRKLGPKTVDCVFLGYAHHSIAYRFLIVKSEVPDMHVGTIMESRDATFFESFFPMKDTHSGSNQPSEIIPSSITPPEQTEHTHELVSEEDVSEAPRRSKRQRTAKSFGDDFTVYLVDDTPKSISEAYASPDADYWKEAVRSEMDSIIANGTWEVTERPYGCKPVGCKWVFKKKLRPDGTIEKYKARLVAKGYTQKEGEDFFDTYSPVARLTTIRVLLSLAASHGLLVHQMDVKTAFLNGELDEEIYMDQPDGFVVEGQEGKVCKLLKSLYGLKQAPKQWHEKFDKTLTSAGFAVNEADKCVYYRHGGGEGVILCLYVDDILIFGTNLEVINEVKSFLSQNFDMKDLGVADVILNIKLIRGENGITLLQSHYVEKILNRFGYIDSKPSPTPYDPSLLLRKNKRIARNQLEYSQIIGSLMYLASATRPDISFAVSKLSRFTSNPGDDHWRALERVMRYLKGTVELGLHYTGYPAVLEGYSDSNWISDVDEIKATSGYVFTLGGGAVSWRSCKQTILTRSTMEAELTALDTATVEAEWLRDLLMDLPVVEKPVPAILMNCDNQTVIVKVNSSKDNMKSSRHVKRRLKSVRKLRNSGVITLDYIQTARNLADPFTKGLSRNVIDNASKEMGLRPM

SEQ ID NO: 19947 - protein, 786 aa, Oryza sativa
  Clone ID: TF_OSC405836j.C1.p5.gm
MSNQADKKLLLRLLPQHYHHHLKPKANDYSIPLAGVHRRSGEQVSRTFAFDVLHREKAAIRHCDFTMAGFSDALRPDKFTGVHFKRWQIRVTLWLTAMKCFWVSTGKPEGVLTAEQQKQFEEATTLFVGCILSVLGDRLVEVYMHMTDAKELWDALNTKFGATDASNDLYIMEQFHDYKMADNRSVVEQAHEIQTMAKELELLKCVLPDKFVAGCIIAKLPPSWRSFGTALKHKRQEYSVEGLIASLDVEEKAREKDAASKGDGGQSSANVVHKAQNKSKGKYKAQQTTNFKKQKKNKNNPNQDERTCFVCGQVGHLARKCPQRKGMKAPAGQTSKSANVTIGNTGDGSGYGNLPTVARGSTVLMGNGSHASVHGVGTVYLKFTSGKIVQLKNVQHVPSIDRNLVSGSRLTRDGFKLVFESNKVVVSKHGYFIGKGYECGCLFRFSLSDFCNKSVNHICGSVDDEANVWHSHYWKEAVHSEMDSIIANGTWEVTERPYGCKPVGCKWVFKKKLRPDDTIEKYKARLVAKGYTQKEGEDFFDTYSPVARLTTIRVLLSLAASHGLLVHQMDVKTAFLNGELDEEIYMDQPDGFVVEGFAVNEADKCVYYRHGGGEGVILCLYVDDILIFGTNLEVINESHYVEKILNRFGYIDSKPSPTPYDPSLLLRKNKRIARNQLEYSQIIGSLMYLASATRPDISFAVSKLSRFTSNPGDDHWRALERVMRYLKDYSIPLAGVHRRSGEQVSGTSAFDVLHREKAAISPPRSTPCRSSSPAAASYVIHASCRS

SEQ ID NO: 19948 - protein, 604 aa, Oryza sativa
  Clone ID: TF_OSC407908j.C1.p8.fg
MWDALEAKFGVFDAGSELYVIEQFYDYKMVDDHSIVEQAHEIQMLAKELENNNCKLLDKFVAGGIIAKLPPSWLDFATSLKHKRQEFSVSDLIGSLGVEEKARAKDKAKRLREKVKPDVKPKAATNFKKKGKGKAKGSCFVCGKSGHWAKDCPERKDKKSSNMVISEGGGTSGYGKILPTVLSVFHSPDWWVDTGANIHVGRGSSLLMGNGSLAAVHGVGSKCHTCVQSKQPRKPHKASEHKEMTPFEEWERKKLNLSYLRIWGCLAKSRDATFFENEFPMKHTPSTSSQETVMPHEHFAPIEHNDQTPEENPEEDNIVDTRKSKRQRVAKSFGDDYIVYLVDDTPRTIEEAYSSPDADYWKEAVRSEMDSIMSNGTWEVVERPYGCKPVGCKWVFKKKLRPDGTIEKYKARLVAKGYTQKEGEDFFDTYSPVARLTTIRVLLALAASHGFLVHQMDVKTAFLNGELEEEIYMDQPDGYVLEGQEGMVCKLLKSLYGLKQAPKQWHEKFDTTLTSVGFVVNEADKCVYYRYGGGEGVILCLYVDDILIFGTSLNVIEEVKDYLSKSFEMKDLGEADVILKGKVHFTPSNFYVCLKCTPKLQNRI

SEQ ID NO: 19949 - protein, 1241 aa, Oryza sativa
  Clone ID: TF_OSC408072j.C1.p12.fg
MAGFADALRPDKFTGVHFKRWQIRVTLWLTAMKCFWVSTGKPEGVLTAEQQKQFEEATTLFVGCILSVLGDRLVEVYMHMTDAKELWDALNTKFGATDASNDLYIMEQFHDYKMADNRSVVEQAHEIQTMAKELELLKCVLPDKFVAGCIIAKLPPSWRSFGTALKHKRQEYSVEGLIASLDVEEKAREKDAASKGDGGQSSANVVHKAQNKSKGKYKAQQTTNFKKQKKNNNNPNQDERTCFVCGQVGHLARKCPQRKGMKAPAGQTSKSAKVTIGNTGDGSGYGNLPTVFSVNQSTNWWVDTGANVYVCADISLFSSYQVARGSTVLMGNGSHASVHGVGTVDLKFTSGKIVQLKNVQHVPSIDRNLVSGSRLTRDGFKLVFESNKVVVSKHGYFIGKGYECGGLFRFSLSDFCNKSVNHICGSVDDEANVWHSRLCHINFGLMSRLSSMCLIPNFSIVKGSKCHSCVQSKQPRKPHKAAEERNLAPLELLHSDLCEMNGVLTKGGKRYFMTLIDDATRFCYVYLLKTKDEALDYFKIYKAEVENQLDRKIKRLRSDRGGEFFSNEFDLFCEEHGIIHERTPPYSPESNGIAERKNRTLTDLVNAMLDTAGLPKAWWGEALLTSNHVLNRVPNRNKDKTPYEIWIGRKPSLSYLRTWGCLAKVNVPITKKRKLGPKTVDCVFLGYAHHSIAYRFLIVKSEFITPPEQTEHTHELVSEEDVSEAPRRSKRQRTAKSFGDDFTVYLVDDTPKSISEAYASPDADYWKEVVHSEMDSIIANGTWEVTERPYGCKPVGCKWVFKKKLRPDGTIEKYKARLVAKGYTQKEGEDLFDTYSPVARLTTIRVLLSLAASHGLLVHQMDVKTAFLNGELDEEIYMYQPDGFVVEGQEGKVCKLLKSLYGLKQAPKQWHEKFDKTLTSAGFAVNEADKCVYYRHGGGEGVILCLYVDDILIFGTNLEVINEVKSFLSQNFDMKDLGVADVILNIKLIRGENGITLLQSHYVEKILNRLATLINKRIARNQLEYSQIIGSLMYLASATRPDISFAVSKLSRFTSNPGDDHWRAFERVMRYLKGTMELGLHYTGYPAVLEGYSDSNWISDVDEIKATSGYVFTLGGGAVSWRSCKQTILTRSTMEAELTALDTATVEAEWLRDLLMDLPVVEKPVPTILMNCDNQTTCEKTIEVCQEIKKLRSYNVGLHPNSEKPGRSLHEGTITKCDRQCIEGDGFETHVSYTMVVTQSM

SEQ ID NO: 19950 - protein, 1320 aa, Oryza sativa
  Clone ID: TF_OSC408663j.C1.p15.fg
MAGFADALRPDKFTGVHFKRWQIRVTLWLTAMKCFWVSTGKPEGVLTAEQQKQFEEATTLFVGCILSVLGDRLVEVYMHMTDAKELWDALNTKFGATDASNDLYIMEQFHDYKMADNRSVVEQAHEIQTMAKELELLKCVLPDKFVAGCIIAKLPPSWRSFGTALKHKRQEYSVEGLIASLDVEEKAREKDAASKGDGGQSSANVVHKAQNKSKGKYKAQQTTNFKKQKKNNNNPNQDERTCFVCGQVGHLARKCPQRKGMKAPAGQTSKSANVTIGNTGDGSGYGNLPTVFSVNQSTNWWVDTGANVHVCADISLFSSYQVARGSTVLMGNGSHASVHGVGTVDLKFTSGKIVQLKNVQHVPSIDRNLVSGSRLTRDGFKLVFESNKVVVSKHGYFIGKGYECGGLFRFSLSDFCNKSVNHICGSVDDEANVWHSRLCHINFGLMSRLSSMCLIPKFSIVKGSKCHSCVQSKQPRKPHKAAEERNLAPLELLHSDLCEMNGVLTKGGKRYFMTLIDDATRFCYVYLLKTKDEALDYFKIYKAEVENQLDRKIKRLRSDRGGEFFSNEFDLFCEEHGIIHERTPPYSPESNGIAERKNRTLTDLVNAMLDTAGLPKAWWGEALLTSNHVLNRVPNRNKDKTPYEIWIGRKPSLSYLRTWGCLAKVNVPITKKRKLGPKTVDCVFLGYAHHSIAYRFLIVKSEVPDMHVGTIMESRDATFFESFFPMKDTHSGSNQPSEIIPSSITPPEQTEHTHELVSEEDVSEAPRRSKRQRTAKSFGDDFTVYLVDDTPKSISEAYASPDADYWKEAVRSEMDSIIANGTWEVTERPYGCKPVGCKWVFKKKLRPDGTIEKYKARLVAKGYTQKEGEDFFDTYSPVARLTTIRVLLSLAASHGLLVHQMDVKTAFLNGELDEEIYMDQPDGFVLEGQEGKVCKLLKSLYGLKQAPKQWHEKFDKTLTSAGFAVNEADKCVYYHHGGGEGVILCLYVDDILIFGTNLEVINEVKSFLSQNFDMKDLGVADVILNIKLIRGENGITLLQSHYVEKILNRFGYIDSKPSPTPYDPSLSLRKNKRIARNQLEYSQIIGSLMYLASATRPDISFAVSKLSRFTSNPGDDHWRALERVMRYLKGTVELGLHYTGYPAVLEGYSDSNWISDVDEIKATSGYVFTLGGGAVSWRSCKQTILTRSTMEAELTALDTATVEAEWLRDLLMDLPVVEKPVPAILMNCDNQTTCEKTIEVCQEIKKLRSYNVGLHPNSEKPGRSLHEGTITKCDRQCIEGDGFETHSILEGTHLCELDCWSQSMKILGESSRKLTKDLGV

SEQ ID NO: 19951 - protein, 1409 aa, Oryza sativa
  Clone ID: TF_OSC409798j.C1.p5.fg
MQSRVCLLLCTAPSLVDYSIPLAGVHLRSGEQVSGTSAFDVLHREKAAIRSNDAFMLVFICNVMIYLWNKLNPYMPIISTIQKPYYRHCDFTMAGFADALRPDKFTGVHFKRWQIRVTLWLTAMKCFWVSTGKPEGVLTAEQQKQFEEATTLFVGCVLGDRLVEVYMHMTDAKELWDALNTKFGATDASNDLYIMEQFHDYKMADNRSVVEQAHEIQTMAKELELLKCVLPDKFVAGCIIAKLPPSWRSFGTALKHKRQEYSVEGLIASLDVEEKAREKDAASKGDGGQSSANVVHKAQNKSKGKYKAQQTTNFKKQKKNNNNPNQDERTCFVCGQVGHLARKCPQRKGMKAPAGQTSKSANVTIGNTGDGSGYGNLPTVFSVNQSTNWWVDTGANVHVCADISLFSSYQVARGSTVLMGNGSHASVHGVGTVDLKFTSGKIVQLKNVQHVPSIDRNLVSGSRLTRDGFKLVFESNKVVVSKHGYFIGKGYECGGLFRFSLSDFCNKSVNHICGSVDDEANVWHSRLCHINFGLMSRLSSMCLIPKFSIVKGSKCHSCVQSKQPRKPHKAAEERNLAPLELLHSDLCEMNGVLTKGGKRYFMTLIDDATRFCYVYLLKTKDEALDYFKIYKAEVENQLDRKIKRLRSDRGGEFFSNEFDLFCEEHGIIHERTPPYSPESNGIAERKNRTLTDLVNAMLDTAGLPKAWWGEALLTSNHVLNRIPNRNKDKTPYEIWIGRKPSLSYLRTWGCLAKVNVPITKKRKLGPKTVDCVFLGYAHHSIAYRFLIVKSEVPDMHVGTIMESRDATFFESFFPMKDTHSGSNQPSEIIPSSITPPEQTEHTHELVSEEDVSEAPRRSKRQRTAKSFGDDFTVYLVDDTPKSISEAYASPDADYWKEAVRSEMDSIIANGTWEVTERPYGCKPVGCKWVFKKKLRPDGTIEKYKARLVAKGYTQKEGEDFFDTYSPVARLTTIRVLLSLAASHGLLVHQMDVKTAFLNGELDEEIYMDQPDGFVVEGQEGKVCKLLKSLYGLKQAPKQWHEKFDKTLTSAGFAVNEADKCVYYRHGGGEGVILCLYVDDILIFGTNLEVINEVKSFLSQNFDMKDLGVADVILNIKLIRGENGITLLQSHYVEKILNRFGYIDSKPSPTPYDPSLLLRKNKRIARNQLEYSQIIGSLMYLASATRPDISFAVSKLSRFTSNPGDDHWRALERVMRYLKGTVELGLHYTGYPAVLEGYSDSNWISDVDEIKATSGYVFTLGGGAVSWRSCKQTILTRSTMEAELTALDTATVEAEWLRDLLMDLPVVEKPVPAILMNCDNQTTCEKTIEVCQEIKKLRSYNVGLHPNSEKPGRSLHKGTITKCDRQCIEGDGFETHSILEGTHLCELDCWSQSMKILGESSRKLTKDLGV

SEQ ID NO: 19952 - protein, 2830 aa, Oryza sativa
  Clone ID: TF_OSC409831j.C1.p21.gm
MPPPIVGNGRAKSGRLPLPPATIPVAVPAPPVAGSLPHPIKWDPHPPFSRFSPIPSLPVPSTSSTPRFRRNAIAANLYIRLAGVVRPPVPPRRAPVDHTSTTSGIAAASGVVLVVLVPVQPLPAVLVASSPVPVVVVVVVVILSSFPVVVAFVPPSSRSRSSSSLRQDRCSPVLVFVLGSASSSLVPAASRLRPRIAAEAVPSPFVSVVPVCLRRARSSLSFPRLVAWWANEGYTSCGPVVEMSYGGGLVPNARGSVLPACPGYPGRRAKEHALRENMTKIFCPCRHCKNQKLLVDPGEILGHIMEYGFTANYKVWTYHGEFANPEDDDEELSFEMNEAENFIIEDMSRERMIVDVSTDSDDFDGGFDLEDMLRHVEPEDRLKRLYSNPTDAELMRWHQESRKIDGMIRHPADARQWKTFDAKHPEFAKDPRNVRFALSTDGMNPFGDLSSSHSTWPVLLTMYNLPTWICQKRKYILLTILIQGPNQPGIDIDVFLEPLMEDMEELWKEGLRLWDEFKREHFNLRAIIFVTINDLPANFSLSGQIKGKTGCLICLEKTSYKYLTSSLKTVYMRHRRFLPQRHRYRKMARLFDNTVENDTAPVARGGTYVYEITKKIKVVYGKGKKKTVKRKKADGDNGTASPFKKHSIFFKYLDYWKDLEIRHAIDVMHLEKNVFDSTVGTLLDIPSPLQTFAVETVCQLEMYFPPSFLDMMEHLIVHIVPQIIELGPLYLHQMWAYERYMSILKGYVHNRAHPEGSMIEGYTTEEAVECCMDYIKDANAIGIPVHRHEGRLSGRGTVGRKQFFDNDYKKVSAAHNSVLQQLAIVEPFIERHLEEIKACFPGRSNDWISREHKRRFPLWLKDLNLPVGDSVEELTLQRLACGPSSIVNSWQGYDINGFTLSTTTKDMKSTSQNSGIRVEAIDTSGEKRSYYGTIQEIWELDYGLNIQIPVLRCEWVKDTIGVSVDDYGLTIVDHSKTGHKDDPWVLAERVAQVFYVKDPSDERKTIVISGKQQIVGIDNIEDPNDYNQFDDVPLFTDLPMRIKKVERTIDEANMSYVRADGVAKDLSPLAVAVAAARTSPPSPSPSPPAGRRRHCTELSPLAVAIPAARSSPPPSRPRYRRLLPEVAPPLAVADATARTSPPSPSPSPPHGPLPPRRCHRRRQVVAAARSSPPSLGASSEETWRTPSDPFPMEITQVAPRDDDPDYIPIEQAMVVRRRSKRKAGRNRTEQEVEMDTATSAPERTETSTSAGGSGKKRRGERSKNKLPKETYNVIALDQDGKPIEPPIVRSKFSNACGTLVRTRCPINVKLWETVDDNIKTLLWNELQKYFVFPPGSEADWDTFVADRTTAEALALRKKMSELAKKNKYPHRLGSSGYAGHVDQWREIEQRFAAAGKPLLVDPMVERSKNWVWARSTGQVSDEGDILFETPDIEEVTTNLQQIVEKERSGQFVPRRERDQLTAALGTAEHSGRVRGLSSKTSWKVGFPQDAPSYKKRDKYKEQLSDKIYAQVKEHFYSLAAENPTAFPRNSEKRKELAHVLSDSQKSVLAAQDEVQSWLSADVPETYEYGKPFLPTYLMNKLPWEMRVMHECMQFHEADRTGAKVGYVDPTRICKTQHTIELRQDCEQLVGKTPEEKEEYVKTLHKRKKLEVATYLAIAMLAHADKDVLMVPYQFTAHKYYRKRGGPVHIPSQKKLSVRTGWPIPEIPYIAQRFNHTTILNVAADLCRFIRRDVCNARGLFYDNQSVTPESASFADTGYDPPPKKWKGICQVGPSFEAISCNRKFIGARWYIDDEILSSISDNEVLSPRDVEGHGTHTASTAGGNIIHNVSFLGLAAGTVRGGAPRARLAIYKACWSGYGCSGATVLKAMDDAVYDGVDVLSLSIGGTKEDVGTLHVVANGISVVYAGGNDGPIAQTVENQSPWLVTVAATTIDRSLPVVITLGNGEKLVAQSFVLLETASQFSEIQKYTDEECNANNIMNSTVKGKIAFCFMGEMLNNKQQTSYPDVTTAVAAKGGRAPDIAAPGVSILAAAQIPYYKGVSYHFDSGTSMACPHVAGIIAVLKSIHPKWSPAALKSAIMTTDYSIPLAGVHQRSGEQVSGTSAFDVLHREKAAIRHCDFTMADFADALRPDKFTGVHFKRWQIRVTLWLTAMKCFWVSTGKPEGVLTAEQQKQFEEATTLFVGCILSVLGDRLVEEYSVEGLIASLDVEEKAREKDAASKGDGGQSSANVVHKAQNKSKGKYKAQQTTNFKKQKKNNNNPNQDERTCFVCGQVGHLARKCPQRKGMKAPAGQTSKSANVTIGNTGDGSGYGNLPTVARGSTVLMGNGSHASVHGVGTVDLKFTSGKIVQLKNVQHVPSIDRNLDTHSGSNQPSEIIPSSIIPPEQTEHTHELVSEEDVSEAPRRSKRQRTAKSFGDDFTVYLVDDTPKSISEAYASPDADYWKEAVRSEMDSIIANGTWEVTEQPYGCKPVGCKWVFKKKLRPDASHGLLVHQMDVKTAFLNGELDEEIYMDQPDGFVVEGFGVNEADKCVYYRHGGGEGVILCLYVDDILIFGTNLEVINESHYVEKILNRFGYIDSKPSPTPYDPSLLLRKNKRIARNQLEYSQIIGSLMYLASATRPDISFAVSKLSRFTSNPGDDHWRALERVMRYLKGTVELGLHYTGYPAVLEGYSDSNWISDVDEIKATSGYVFTLGGGAVSWRSCKQTILTRSTMEAELTALDTATVEAEWLRDLLMDLPVVEKPVPAILMNCDNQTEIKKLRSYNVGLHPNSEKPGRSLHEGTITKYYSMPLAGVHQRSGEQVSGTSAFDVLHREKAAIRHLRKVSTKQQI

SEQ ID NO: 19953 - protein, 1320 aa, Oryza sativa
  Clone ID: TF_OSC411700j.C1.p3.fg
MAGFADALRPDKFTAVHFKRWQIRVTLWLTAMKCFWVSTGKPEGVLTAEQQKQFEEATTLFVGCILSVLGDRLVEVYMHMTDAKELWDALNTKFGATDASNDLYIMEQFHDYKMADNRSVVEQAHEIQTMAKELELLKCVLPDKFVAGCIIAKLPPSWRSFGTALKHKRQEYSVEGLIASLDVEEKAREKDAASKGDGGQSSANVVHKAQNKSKGKYKAQQTTNFKKQKKNNNNPNQDERTCFVCGQVGHLARKCPQRKGMKAPAGQTSKSANVTIGNTGDGSGYGNLPTVFSVNQSTNWWVDTGANVHVCADISLFSSYQVARGSTVLMGNGSHASVHGVGTVDLKFTSGKIVQLKNVQHVPSIDRNLVSGSRLTRDGFKLVFESNKVVMSKHGYFIGKGYECGDLFRFSLSDFCNKSVNHICGSVDDEANVWHSRLCHINFGLMSRLSSMCLIPKFSIVKGSKCHSCVQSKQPRKPHKAAEERNLAPLELLHSDLCEMNGVLTKGGKRYFMTLIDDATRFCYVYLLKTKDDALDYFKIYKAEVENQLDRKIKRLRSDRGGEFFSNEFDLFCEEHGIIHERTPPYSPESNGIAERKNRTLTDLVNAMLDTAGLPKAWWGEALLTSNHVLNRVPNRNKDKTPYEIWIGRKPSLSYLRTWGCLAKVNVPITKKRKLGPKTVDCVFLGYAHHSIAYRFLIVKSEVPDMHVGTIMESRDSIFFESFFPMKDTHSGSNQPSEIIPSSITPPEQTEHTHELVSEEDVSEAPRRSKRQRTAKSFGDDFTVYLVDDTPKSISEAYASPDADYWKEAVRSEMDSIIANGTWEVTERLYGCKPVWCKWVFKKKLRPDGTIEKYKARLVAKGYTQKEGEDFFDTYSPVARLTTIRVLLSLAASHGLLVHQMDVKTAFLNGELDEEIYMDQPDGFVVEGQEGKVCKLFKSLYGLKQAPKQWHEKFDKTLTSAGFAVNEADKCVYYRHGGGEGVILCLYVDDILIFGTNLEVINEVKSFLSQNFDMRDLGVADVILNIKLIRGENGITLLQSHYVEKILNRFGYIDSKPSPTPYDPSLLLRKNKRIARNQLEYSQIIGSLMYLASATRPNISFAVSKLSRFTSNPGDDHWRALERVMRYLKGTVELRLHYTGCPAVLEGYSDSNWISDVDEIKATSGYVFTLGGGAVSWRSCKQTILTRSTMEAELTALDTATVEAEWLRDLLMDLPVVEKPVPAILMNCDNQTTCEKTIEVCQEIKKLRSYNVGLHPNSEKPGRSLHEGTITKCDRQCIEGDGFETHSILERTHLCELDCWSQSMKILGESSRKLTKDLGV

SEQ ID NO: 19954 - protein, 1320 aa, Oryza sativa
  Clone ID: TF_OSC412577j.C1.p22.fg
MAGFADALRPDKFTGVHFKRWQIRVTLWLTAMKCFWVSTGKPEGVLTAEQQKQFEEATTLFVGCILSVLGDRLVEVYMHMTDAKELWDALNTKFGATDASNDLYIMEQFHDYKMADNRSVVEQAHEIQTMAKELELLKCVLPDKFVAGCIIAKLPPSWRSFGTALKHKRQEYSVEGLIASLDVEEKAREKDAASKGDGGQSSANVVHKAQNKSKGKYKAQQTTNFKKQKKNNNNPNQDERTCFVCGQVGHLARKCPQRKGMKAPAGQTSKSANVTIGNTGDGSGYGNLPTVFSVNQSTNWWVDTGANVHVCADISLFSSYQVARGSTVLMGNGSHASVHGVGTVDLKFTSGKIVQLKNVQHVPSIDRNLVSGSRLTRDGFKLVFESNKVVVSKHGYFIGKGYECGGLFRFFLSDFCNKSVNHICGSVDDEANVWHSRLCHINFGLMSRLSSMCLIPKFSIVKGSKCYSCVQSKQPRKPHKAAEERNLAPLELLHSDLCEMNGVLTKGGKRYFMTLIDDATRFCYVYLLKTKDEALDYFKIYKAEVENQLDRKIKRLRSDRGGEFFSNEFDLFCEEHGIIHERTPPYSPESNGIAERKNRTLTDLVNAMLDTAGLPKAWWGEALLTSNHVLNRVPNRNKDKTPYEIWIGRKPSLSYLRTWGCLAKVNVPITKKRKLGPKTVDCVFLGYAHHSIAYRFLIVKSEVPDMHVGTIMESRDATFFESFFPMKDTHSGSNQPSEIIPSSITPPEQTEHTHELVSEEDVSEAPRRSKRQRTAKSFGDDFTVYLVDDTPKSISEAYASPDADYWKEAVRSEMDSIIANGTWEVTERPYGCKPVGCKWVFKKKLRPDGTIEKYKARLVAKGYTQKEGEDFFDTYSPVARLTTIRVLLSLAASHGLLVHQMDVKTAFLNGELDEEIYMDQPDGFVVEGQEGKVCKLLKSLYGLKQAPKQWHEKFDKTLTSAGFAVNEADKCVYYRHGGGEGVILCLYVDDILIFGTNLEVINEVKSFLSQNFDMKDLGVADVILNIKLIRGENGITLLQSHYVEKILNRFGYIDSKPSPTPYDPSLLLRKNKRIARNQLEYSQIIGSLMYLASATRPDISFAVSKLSRFTSNPGDDHWRALERVMRYLKGTVELGLHYTGYPAVLEGYSDSNWISDVDEIKATSGYVFTLGGGAVSWRSCKQTILTRSTMEAELTALDTATVEAEWLRDLLMDLPVVEKPVPAILMNCDNQTTCEKTIEVCQEIKKLRSYNVELHPNSEKPGRSLHEGTITKCDKQCIEGDGFETHSILERTHLCELDCWSQSMKILGESSRKLTKDLGV

SEQ ID NO: 19955 - protein, 1460 aa, Oryza sativa
  Clone ID: TF_OSC413111j.C1.p1.fg
MAGFADALRPDKFTGVHFKRWQIRVTLWLTAMKCFWVSTGKPEGVLTAEQQKQFEEATTLFVGCILSVLGDRLVEVYMHMTDAKELWDALNTKFGATDASNDLYIMEQFHDYKMADNRSVVEQAHEIQTMAKELELLKCVLPDKFVAGCIIAKLPPSWRSFGTALKHKRQEYSVEGLIASLDVEEKAREKDAASKGDGGQSSANVVHKAQNKSKGKYKAQQTTNFKKQKKNNNNPNQDERTCFVCGQVGHLARKCPQRKGMKAPAGQTSKSANVTIGNTGDGSGYGNLPTVFSVNQSTNWWVDTGANVHVCADISLFSSYQVARGSTVLMGNGSHASVHGVGTVDLKFTSGKIVQLKNVQHVPSIDRNLVSGSRLTRDGFKLVFESNKVVVSKHGYFIGKGYECGGLFRFSLSDFCNKSVNHICGSVDDEANVWHSRLCHINFGLMSRLSSMCLIPKFSIVKGSKCHSCVQSKQPRKPHKAAEERNLAPLELLHSDLCEMNGVLTKGGKRYFMTLIDDATRFCYVYLLKTKDEALDYFKIYKAEVENQLDRKIKRLRSDRGGEFFSNEFDLFCEEHGIIHERTPPYSPESNGIAERKNRTLTDLVNAMLDTAGLPKAWWGEALLTSNHVLNRVPNRNKDKTPYEIWIGRKPSLSYLRTWGCLAKVNVPITKKRKLGPKTVDCVFLGYAHHSIAYRFLIVKSEVPDMHVGTIMESRDATFFESFFPMKDTHSGSNQPSEIIPSSITPPEQTEHTHELVSEEDVSEAPRRSKRQRTAKSFGDDFTVYLVDDTPKSISEAYASPDADYWKEAVRSEMDSIIANGTWEVTERPYGCKPVGCKWVFKKKLRPDGTIEKYKARLVAKGYTQKEGEDFFDTYSPVARLTTIRVLLSLAASHGLLVHQMDVKTAFLNGELDEEIYMDQPDGFVLEGQEGKVCKLLKSLYGLKQAPKQWHEKFDKTLTSAGFAVNEADKCVYYRHGGGEGVILCLYVDDILIFGTNLEVINEVKSFLSQNFDMKDLGVADVILNIKLIRGENGITLLQSHYVEKILNRFGYIDSKPSPTPYDPSLSLRKNKRIARNQLEYSQIIGSLMYLASATRPDISFAVSKLSRFTSNPGDDHWRALERVMRYLKGTVELGLHYTGYPAVLEGYSDSNWISDVDEIKATSGYVFTLGGGAVSWRSCKQTILTRSTMEAELTALDTATVEAEWLRDLLMDLPVVEKPVPAILMNCDNQTTCEKTIEVCQEIKKLRSYNVGLHPNSEKPGRSLHEGTITKCDRQCIEGDGFETHSILEGTHLCELDCWSQSMKILGESSRKLTKDLGRQHQPRIEQQQSNQQRSKQQWWWRPAGGDGFGGGSSKSAAGGRFGCGSARNSARTPGGGEDSKTAVRSIPILLEDDDGGGTDSVVAQANPPPVVVWQSREHIQWWRRGRGELIAAVDGGSGCGSARSSARMPSGGEDSKTR

SEQ ID NO: 19956 - protein, 1428 aa, Oryza sativa
  Clone ID: TF_OSC413293j.C1.p2.fg
MAGFADALRPDKFTGVHFKRWQIRVTLWLTAMKYFWVSTGKPEGVLTAEQQKQFEEATTLFVGCILSVLGDRLVEVYMHMTDAKELWDALNTKFGATDASNDLYIMEQFHDYKMADNRSVVEQAHEIQTMAKELELLKCVLPDKFVAGCIIAKLPPSWRSFGTALKHKRQEYSVEGLIASLDVEEKAREKDAASKGDGGQSSANVVHKAQNKSKGKYKAQQTTNFKKQKKNNNNPNQDERTCFVCGQVGHLARKCPQRKGMKALAGQTSKSANVTIGNTGDGSGYGNLPTVFSVNQSTNWWVDTGANVHVCADISLFSSYQVARGSTVLMGNGSHASVHGVGTVDLKFTSGKIVQLKNVQHVPSIDRNLVSGSRLTRDGFKLVFESNKVVVSKHGYFISKGYECGGLFRFSLSDFCNKSVNHICGSVDDEANVWHSRLCHINFGLMSRLSSMCLIPKFSIVKGSKCHSCVQSKQPRKPHKAAEERNLAPLELLHSDLCEMNGVLTKGEKRYFMTLIDDATRFCYVYLLKTKDEALDYFKIYKAEVENQLDRKIKRLRSDRGGEFFSNEFDLFCEEHGIIHERTPPCSPESNGIAERKNRTLTDLVNAMLDTAGLPKAWWGEALLTSNHVLNRVPNRNKDKTPYEIWIGRKPSLSYLRTWGCLAKVNVPITKKRKLGPKTVDCVFLGYAHHSIAYRFLIVKSEVPDMHVGTIMESRDATFFESFFPMKDTHSGSNQPSEIIPSSITPPEQTEHTHELVSEEDVSEAPRRSKRQRTAKSFGDDFTVYLVDDTPKSISEAYASPDADYWKEAVRSEMDSIIANGTWEVTERPYGCKPVGCKWVFKKKLRPDGTIEKYKARLVAKGYTQKEGEDFFDTYSPVARLTTIRVLLSLAASHGLLVHQMDVKTAFLNGELDEEIYMDQPDGFVVEGQEGKVCKLLKSLYGLKQAPKQWHEKFDKTLTSAGFAVNEADKCVYYRHGGGEGVILCLYVDDILIFGTNLEVINEVKSFLSQNFDMKDLGVADVILNIKLIRGENGITLLQSHYVEKILNRFGYIDSKPSPTPYDPSLLLRKNKRIARNQLEYSQIIGSLMYLASATRPDISFAVSKLSRFTSNPGDDHWRALERVMRYLKGTVELGLHYTGYPAVLEGYSDSNWISDVDEIKATSGYVFTLGGGAVSWRSCKQTILTRSTMEAELTALDTATVEAEWLRDLLMDLPVVEKPVPAILMNCDNQTTCEKTIEVCQEIKKLRSYNVGLHPNSEKPGRSLHEGTITKCDRQCIEGDGFETHTTPSRSPACTSDREKQVSGTSAFDVLHREKAAIRYIGTTTTQDLSLTEVMSWDSEIYLPEIPNSLQMCNWGIYTGYRPNLLSPLTFASQQDDDEDEEDESGPFIRQLLCAIRHKKLLKRSLPMTSTNHTSGKRICSGNSCIC

SEQ ID NO: 19957 - protein, 943 aa, Oryza sativa
  Clone ID: TF_OSC413295j.C1.p5.fg
MAAICGETISVDELWREILLRAPTKDVARSCCVSTQWRGIVRDPSFRKLHHDRHAVPSKDDVPDALLVITVNADGQSVSTVVPAMVSPVSTSQRAPMYRVIKNGISYSLANVCNGFLCFASWSRAKVVVCNPITGEKLAIPRAPPIGPDYKSSRARIDVYTLPTSGGKICVMTATGTPSWHPPEIPTLGPVLVVDVASEKHRMYSPPDNGCPAADETSFTAFELHGRLCLAIRISMTNTVQFWTLSVEEDDDDDDDLPWQLLYTIKINMKDGYNNGFQELEPMNDWFNGGNNGFIQVPEPMDAWLDGETHTLATERAAHCTLDYSIPLAGVHQRSGEQVSGTSAFDVLHREKAAIRSNDAFMLVFICDVMIYLWNKLNPYMPIISTIQKPYYRHCDFTMAGFADALRPDKFTGVHFKRWQIRVTLWLTAMKCFWVSTGKPEGVLTAEQQKQFEEATTLFVGCILSVLGDRLVEVYMHMTDAKELWDALNTKFGATDASNDLYIMEQFHDYKMADNRSVVEQAHEIQTMAKELELLKCVLPDKFVAGCIIAKLPPSWRSFGTALKHKRQEYSVEGLIASLDVEEKAREKDAASKGDGGQSSANVVHKAQNKSKGKYKAQQTTNFKKQKKNNNNPNQDERTCFVCGQVGHLARKCPQRKGMKAPAGQTSKSANVTIGNTGDGSGYGNLPTVFSVNQSTNWWIDTGANIHVCADISLFSSYQVARGSTVLMGNGSHASVHGVGTVDLKFTSGKIVQLKNVQHVPSIDRNLVSGSRLTRDGFKLVFESNKVVVSKHGYFIGKGYECGGLFRFSLSDFCNKSVNHICGSVDDEANVWHSRLCHINFGLMSRLSSMCLIPKFSIVKGSKCHSCVQSKQPRKPHKAAEERNLAPLELLHSDLCEMNGVLTKGGKRYFMTLIDDATRFCYVYLLKTKDEALDFFKFFKAES

SEQ ID NO: 19958 - protein, 1409 aa, Oryza sativa
  Clone ID: TF_OSC413883j.C1.p1.fg
MAGFADALRPDKFTGVHFKRWQIRVTLWLTAMKCFWVSTGKPEGVLTAEQQKQFEEATTLFVGCILSVLGDRLVEVYMHMTDAKELWDALNTKFGATDASNDLYIMEQFHDYKMADNRSVVEQAHEIKTMAKELELLKCVLPDKFVAGCIIAKLPPSWRSFGAALKHKRQEYSVEGLIASLDVEEKAREKDAASKGDGGQSSANVVHKAQNKSKGKYKAQQTTNFKKQKKNNNNPNQDERTCFVCGQVGHLARKCPQRKGMKAPAGQTSKSANVTIGNTGDGSGYGNLPTVFSVNQSTNWWVDTGANVHVCADISLFSSYQVARGSTVLMGNGSHASVHGVGTVDLKFTSGKIVQLKNVQHVPSIDRNLVSGSRLTRDGFKLVFESNKVVVSKHGYFIGKGYECGGLFRFSLSDFCNKSVNHICGSVDDEANVWHSRLCHINFVLMSRLSSMCLIPKFSIVKGSKCHSCVQSKQPRKPHKAAEERNLAPLELLHSDLCEMNGVLTKGGKRYFMTLIDDATRFCYVYLLKTKDEALDYFKIYKAEVENQLDRKIKRLRSDRGGEFFSNEFDLFCEEHGIIHERTPPYSPESNGIAERKNRTLTDLVNAMLDTAGLPKAWWGEALLTSNHVLNRVPNRNKDKTPYEIWIGRKPTLSYLRTWGCLAKVNVPITKKRKLGPKTVDCVFLGYAHHSIAYRFSIVKSEVPDMHVGTIMESRDATFFESFFPMKDTHSGSNQPSEIIPSSITPPEQTEHTHELVSEEDVSEAPRRSKRQRTAKSFGDDFTVYLVDDTPKSISEAYASPDADYWKEAVRSEMDSIIANGTWEVTERPYGCKPVGCKWVFKKKLRPDGTIEKYKARLVAKGYTQKEGEDFFDTYSHVARLTTIRVLLSLAASHGLLVHQMDVKTTFLNGELDEEIYMYQPDGFVVEGQEGKVCKLLKSLYGLKQAPKQWHEKFDKTLTSAGFAVNEADKCVYYRHGRGEGVILCLYVDDILIFKTNLEVINEVKSFLSQNFDMKDLGVADVILNIKLIRGENGITLLQSHYVEKILNRFGYIDSKPSPTPYDPSLLLRKNKRIARNQLEYSQIIGSLMYLASATRPDISFAVSKLSRFTSNPGDDHWRALERVMRYLKGTVELGLHYTGYPAVLEGYSDSNWISDVDEIKATSGYVFTLGGGAVSWRSCKQTILTRSTMEAELTALDTATVEAEWLRDLLMDLPVVEKPVSAILMNCDNQTTCEKTIEVCQEIKKLRSYNVGLHPNSEKPGRSFHEGTITKCDRQCIEGDGFETHIKSLYVYNLNRLYLPLAPVCITSAPPLLRRRRASSARTLNSTADLAKHLPTGAVLAFEVLSPSSTADDSYTATNRALIACLVGAYALCCFLLSFTDSYRDGTGAVRYDFVTPKTYCAVRAARG

SEQ ID NO: 19959 - protein, 1377 aa, Oryza sativa
  Clone ID: TF_OSC414138j.C1.p4.fg
MAIRGIPSSREMTVDDFKNWLKQFDTDNDGRISRGELREAIRRRGGWFSGLKAGRAVRHADRDNSGFVDESEIENLVAFAQKTLGMKVTAWHCDFTMADFADALRPDKFTGVHFKRWQIRVTLWLTAMKCFWVSTGKPEGVLTAEQQKQFEEATTLFVGCILSVLGDRLVEVYMHMTDAKELWDALNTKFGATDASNDLYIMEQFHDYKMADNRSVVEQAHEIQTMAKELELLKCVLPDKFVARCIIAKLPPSWRSFGTALKHKRQEYSVEGLIASLDVEEKAREKDAASKGDGGQSSANVVHKAQNKSKGKYKAQQTTNFKKQKKNNNNPNQDERTCFVCGQVGHLARKCPQRKGMKAPAGQTSKSANVTIGNTGDGSGYGNLPTVFSVNQSTNWWVDTGANVARGSTVLMGNGSHASVHGVGTVDLKFTSGKIVQLKNVQHVPSIDRNLVSGSRLTRDGFKLVFESNKVVVSKHGYFIGKGYECGGLFRFSLSDFCNKSVNHICGSVDDEANVWHSRLCHINFGLMSRLSSMCLIPKFSIVKGSKCHSCVQSKQPRKPHKAAEERNLAPLELLHSDLCEMNGVLTKGGKRYFMTLIDDATRFCYVYLLKTKDEALDYFKIYKAEVENQLDRKIKRLRSDRGGEFFSNEFDLFCEEHGIIHERTPPYSPESNGIAERKNRTLTDLVNAMLDTAGLPKAWWGEALLTSNHVLNRVPNRNKDKTPYEIWIGRKPSLSYLRTWGCLAKVNVPITKKRKLGPKTVDCVFLGYAHHSIAYRFLIVKSEDTHSGSNQPSEIIPSSITPPEQTEHTHELVSEEDVSEAPRRSKRQRTAKSFGDDFTVYLVDDTPKSISEAYASPDADYWKEVVRSEMDSIIANGTWEVTERPYGCKPVGCKWVFKKKLRPDGTIEKYKARLVAKGYTQKEGEDFFDTYSPVARLTTIRVLLSLAASHGLLVHQMDVKTAFLNGELDEEIYMDQPDGFVLEGQEGKVCKLLKSLYGLKQAPKQWHEKFDKTLTSAGFAVNEADKCVYYRHGGGEGVILCLYVDDILIFGTNLEVINEVKSFLSQNFDMKDLGVADVILNIKLIRGENGITLLQSHYVEKILNRFGYIDSKPSPTPYDPSLSLRKNKRIARNQLEYSQIIGSLMYLASATRPDISFAVSKLSRFTSNPGDDHWRALERVMRYLKGTVELGLHYTGYPAVLEGYSDSNWISDVDEIKATSGYVFTLGGGAVSWRSCKQTILTRSTMEAELTALDTATVEAEWLRDLLMDLPVVEKPVPAILMNCDNQTTCEKTIEVCQEIKKLRSYNVGLHPNSEKPGRSLHEGTITKCDRQCIEGDGFETHSILEGTHLCELDCWSQSMKILGESSRKLTKDLGV

SEQ ID NO: 19960 - protein, 1607 aa, Oryza sativa
  Clone ID: TF_OSC417160j.C1.p3.fg
MALRLAAVPESAAADLSAAANTLPCISYRDSIRSVAAVVSGGRGPLFQSEDSASTWSSSSYASDCSGHSSGVSAAAAAGFRALTAHELREVARRMVADGYAQRMVQAFDDAATVEVLEGEMLADCRLDDDIAKDYEARAAVREARAAREEAEARLQVATRAARLVAAEAEAARTAEAARQAAAAAATLRAEEEEERRDLELTDAARVRRDADRDRHIGRRDRDFSPHRRGSDLHRGEEERRDPWRDPRINRALETQRLREQAAAIEAQLDFDREQGGRDVGARSPRRQRASPSPDRRRGRRGRSGSPPVVQIVVKDVGGAWPMLTKTNYAEWAMVMKVKLQARHMWDAVRYGDVDYGEDRRALERLAQLGDTTIDEERAVEKLLCVVPEKYTQLALSIETLLDFTELTNEEVTGRLKAVDNRKQLPPSEPITIGGKLFFTKEKWLARQQERKKGEATSSSASGSSSSRKRRPRKWEKARSGALGGADGERKGSRNDTCHNCGKTGHWAKDCRQAKHGGQAHVAQAQEGDEVALFFVHGSIEPHFTPTPDATAPLHLDELWAHVFLSNGSCDDKIDGWCLDTGATHHMTGRREFFSKLDSSVQGSVKFEDASAVEIKGVGSILFTTKTGEHRLLTGVYYIPALRNSIISLGQLDENGLLVEIEDGVLRVWDRHRRLLVKVNRGANRLYVLHVQVAQPVCLAARRDDDAWRWHERFGHLNFEALKQLSNKEMVQGMPRVEHVEQFCDTCVLTKQRRLPFPRQASFCAKEKLELVHGDLCGPVTPATPGGRRFFLLLVDDVSCYMWVVLLDSKAVAADAIKHHQVAAEKECGRKLRVLHTDNGGEFTTAEFAAYCADERIQRHFSAPYTPQQNGVVERRNQTVVATARALLKQRGMPAIYWGEAVMTAVHLLNRSPTKALDGKTSYEAWHGRKPVVSHLRVFGCLAFAKELNHVGKLNDRSSPGVFIGYAEGVKAYRILDPSTQHVRISRDVVFDEGRGWASYKAVDDGSTSTLRDFVVDYVHFRAAGGASSSSSPSSSTSAPGSPSAPASPLPPTPPATPPSPATPRSPTPAPTPPVEFATPLSNDEDRVDAYHDDEPLRYRTMDNIFGDQPVPGLETRDFEAELHLAHEDGEPCSFAEANGDVAWRTAMQHEMDAVERNWTWVLADLPASHRAITLKWVYKLKKDEAGAVIKHKARLVARGFVQQEGVDFDDAFAPVARMESVRLLLALAAQEGWRVHHMDVKSAFLNGDLKEEVYVHQPPGFVIPGKENKVLRLRKALYGLRQALYAKLDSTLKQMGFQQNSHEAAVYQRGKDGNALLVGVYVDDLVITGTKEAEVEAFKEEMKATFQMSDLGLLSFYLGIEVHQDSSGISLRQTAYAKCIVELGGLTGCNPAYTPMEERLKLSRDSTLREVDATQYRHIVGSLRYLVHTRPDLAFAVGYVSRFMQRPTTEHQQAVTSRAPPTTAFTTRGVPCLISWQSVKQQVVALSSCEAEYIATTTASTQALWLARLLGDLLGRNTEAVELRMDSKSALALAKNPVFHERSKHIRIKYHFIRSCLEEGSIKASYINTQDQLADLLTKSLGRVKFQEFRARIGMVQIPQKAPHMT

SEQ ID NO: 19961 - protein, 571 aa, Oryza sativa
  Clone ID: TF_OSC417394j.C1.p2.gm
MAGFADALRPDKFTGVHFKRWQIRVTLWLTAMKCFWVSTGKPEGVLTAEQQKQFEEATTLFVGCILSVLGDRLVEVYMHMTDAKELWDALNTKFGATDASNDLYIMEQFHDYKMADNRSVVEQAHEIETMAKELELLKCVLPDKFVAGCIIAKLPPSWRSFGTALKHKRQEYSVEGLIASLDVEEKTREKDAASKGDGGQSSANVVHKAQNKSKGKYKAQQTTNFKKQKKNNNNPNQDERTCFVCGQVGHLARKCPQRKGMKAPAGQTSKSANVTIGNTGDGSGYGNLPTVARGSTVLMGNGSHASVHGVGTVDLKFTSGKIVQLKNVQHVPSIDRNLVSGSRLTRDGFKLVFESNKIVVSKHGYFIGKGYECGGLFRFSLSDFCNKSVNHIYGTVDDEANVWHSHYWKEAVRSEMDSIIANGTWEVTERPYGCKPVGCKWVFKKKLRPDDYSIPLAGVHRRSGEQVSGTSAFDVLHREKAAIRLEHEDRASGIVPVRPLEVRFSDSRCVALATSDTGPLTVLRRIISPGSHDSGIVIEMELEAKQSLKIGMLWEPKGAISFANENYNVSN

SEQ ID NO: 19962 - protein, 1935 aa, Oryza sativa
  Clone ID: TF_OSC418579j.C1.p4.fg
MGMGSELYVATGWRERSAMQAVGRETRWCLRLAGGSGATHYSIPLAGVHQRSGEQVSGTSAFDVLHREKAAIRLNHYMSIISTIQKPYYRHCDFTMAGFADALRPDKFTGVHFKRWQIRVTLWLTAMKCFWVSTGKPEGVLTAEQQKQFEEATTLFVGCILSVLGDRLVEVYMHMTDAKELWDALNTKFGATDASNDLYIMEQFHDYKMADNRSVVEQAHEIQTMAKELELLKCVLPDKFVAGCIIAKLPPSWRSFGTALKHKRQEYSVEGLIASLDVEEKAREKDAASKGDGGQSSANVVHKAQNKSKGKYKAQQTTNFKKQKKNNNNPNQDERTCFVCGQVGHLARKCPQRKGMKAPAGQTSKSANVTIGNTGDGSGYGNLPTVFSVNQSTNWWVDTGANVHVCADISLFSSYQVARGSTVLMGNGSHASVHGVGTVDLKFTSGKIVQLKNVQHVPSIDRNLVSGSRLTRDGFKLVFESNKVVVSKHGYFIGKGYECGGLFRFSLSDFCNKSVNHICGSVDDEANVWHSRLCHINFGLMSRLSSMCLIPKFSIVKGSKCHSCVQSKQPRKPHKAAEERNLAPLELLHSDLCEMNGVLTKGGKRYFMTLIDDATRFCYVYLLKTKDEALDYFKIYKAEVENQLDRMIKRLRSDRGGEFFSNEFDLFCEEHGIIHERTPPYSPKSNGIAERKNRTLTDLVNAMLDTAGLPKAWWGEALLTSNHVLNRVPNRNKDKTPYEIWIGRKPSLSYLRTWGCLAKVNVPITKKRKLGPKTVDCVFLGYAHHSIAYRFLIVKSEVPDMHVGTIMESRDATFFESFFPMKDTHSGSNQPSEIIPSSITPPEQTEHTHELVSEEDVSEAPRRSKRQRTAKSFGDDFTVYLVDDTPKSISEAYASPDADYWKEAVRSEMDSIIANGTWEVTERPYGCKPVGCKWVFKKKLRPDGTIEKYKARLVAKGYTQKEGEDFFDTYSSVARLTTIRVLLSLAASHGLLVHQMDVKTAFLNGELDEEIYMDQPDGFVVEGQEGKVCKLLKSLYGLKQAPKQWHEKFDKTLTSAGFAVNEADKCVYYRHGGGEGVILCLYVDDILIFGTNLEVINEVKSFLSQNFDMKDLGVADVILNIKLIEKILNRFGYIDSKPSPTPYDSSLLLRKNKRIARNQLEYSQIIGSLMYLASATRPDISFAVSKLSRFTSNPGDDHWRALERVMRYLKGTVELGLHYTGYPAVLEGYSDSNWISDVDEIKATSGYVFTLGGGAVSWRSCKQTILTRSTMEAELTALDTATVEAEWLRDLLMDLPVVEKPVPAILMNCDNQTTCEKTIEVCQEIKKLRSYNVGLHPNSEKPGRSLHEGTITKCDKQCIEGDGFETHIKSLYVYNLNRAVHAFKPFDKLARRESPRVESIMSTTPTAASRRLVLILCTLAISCSSGIAGFAAGDDDAFIRCLAAAAVPPRLVHTPGSASYAPTLVSSIRNLRFVTPGTPRPLAIVAAAEAGHAQAAVRCGRRHGVRVRARSGGHDYEGLSYLSLDRRERFAVLDLAALRDVRVDADRAEAWVGSGATLGELYYAVGAASRTLAFPAGVCPTVGVGGHISGGGFGTLMRRYGLAADNVLDAVLVDADGRLLNRTTMGEGLFWAIRGGGGESFGVVLSWKLRLVRVPETVTVFTIRRPRNQSATDLITKWQEISPSLPRDVILRVVVQSQHAQFESLFLGRCRRLARLMRARFPELGMTQSDCEEITWIQSTVYFAFYSSSKPLELLLDRGTEPDRYFKAKSDYVQEPIPRHAWESTWPWLEEHDAGLLILDPYGGEMARVSPAATPFPHRKGNLYNLQYYSFWFEHGAETLERHLSWVRGLYGEMEPYVSKNPRTGYVNYRDMDLGRNEIEGNVTSYTKGKVWGEKYFRGNFERLAAVKAMVDPDDFFRNEQSIPPLPAAKGWSSI

SEQ ID NO: 19963 - protein, 967 aa, Oryza sativa
  Clone ID: TF_OSC418806j.C1.p3.gm
MALYTDCAWDMQIPGDMVVNAMMVAMAAHSGEQAQTIYHVTSSLSNPAPYAVLSDAGHRYFFANPPPRAGKNGRLRRMRFFSTVASFRAHMAINYKLPLEILRLVNIALCGMFSRRYDELSRKYKFVMHLVELYAPYTLFKGCFDDINTEKLRITMRKQEDKNDGGYCFDFDPKSIDWDEYFYKVHIPDYSIPLAGVHRRSGEQVSGTSAFDVLHREKAAIRVTLWLTAMKCFWVSTGKPEGVLTAEQQKQFEEATTLFMGCILSVLGDRLVEVYMHMTDAKELWDALNTKFGATYASNDLYIMEQFHDYKMADNRSVVEQAHEIQTMAKELELLKCVLPDKFVAGCIIAKLPPSWRSFGTALKHKRQEYSVEGLIASLDVEEKAREKDAASKGDGGQSSANVVHKAQNKSKGKYKAQQTTNFKKQKKNNNNPNQDERTCFVCGQVGHLARKCPQRKGMKAPAGQTSKSANVTIGNTGDGSGYGNLPTVARGSTVLMGNGSHASVHGVGTVDLKFTSGKIVQLKNVQHVPSIDRNLVSGSRLTRDGFKLVFESNKVVVSKHGYFIGKGYECGGLFRFSLSDFCNKFVNHICGSVDDEANVWHSPSHGLLVHQMDVKTAFLNGELDEEIYMDQPDGFVVEGFAVNEADKCVYYRHGGGEGVILCLYVDDILIFGTNLEVINESHYVEKILNRFGYIDSKPSPTPYDPSLLLRNNKRIARNQLEYSQIIGSLMYLASATRPDISFAVSKLSRFTSNPGDDHWRALERVMRYLKGTVELGLHYTGYPAVLEGYSDSNWISDVDEIKATSGYVFTLGGGAVSWRSCKQTILTRSTMEAELTALDTATVEAEWLRDLLMDLPVVEKPVPAILMNCDNQTSILERTHLCELDCWSQSMKILDYSIPLAGVHRRSGEQVSGTSAFDVLHREKAAISGYTMSFIFMGPEVVFLGRPIRWRRASMDHQVSYALSRR

SEQ ID NO: 19964 - protein, 1152 aa, Oryza sativa
  Clone ID: TF_OSC419888j.C1.p1.fg
MAGFADALRPDKFTGVHFKRWQIRVTLWLTAMKCFWVSTGKPEGVLIAEQQKQFEEATTLFVGCILSVLGNRLVEVYMHMTDAKELWDALNTKFGATDASNDLYIMEQFHDYKMADNRSVVKRAHEIQTMAKELELLKCVLPDKFVAGCIIAKLPPSWRSFGTALKHKRQEYSVEGLIASLDVEEKAREKDAASKGDGGQSSANVVHKAQNKSKGKYKAQQTTNFKKQKKNNINPNQDERTCFVCGQVGHLARKCPQRKGMKAPAGQTSKSANVTIGNTGDGSGYGNLPTVFSVNQSTNWWVDTGANIHVCADISLFSSYQVARGSTVLMGNGSHASVHGVGTVDLKFTSGKIVQLKNVQHVPSIDRNLVSGSRLTRDGFKLVFKSNKVVVSKHGYFIGKGYECGGLFRFSLSDFCNKSVNHIFGSMDDEANVWHSRLCHINFGLMSRLSSMCLIPKFSIVKGSKCHSCVQSKQPRKPHKAAEEINLAPLELLHSDLCEMNGVLTKGGKRYFMTLIDDATRFCYVYLLKTKDEALDYFKIYKAEVENQLDRKIKRLRSDRGGEFFSNEFDLFCEKHGIIHERTPPYSPESNGIGERKNRTLTDLVNAMLDTAGLPKAWWGEALLTSNHVLNRVPNRNKDKTPYEIWIGRKPSLSYLRTWGCLAKVNVPITKKRKLGPKTVDCVFLGYAHHSIAYRFLIVKSEVPDMHVGTIMESRDATFFESFFPMKDTHSGSNQPSEIIPNSITPPEQTEHTHELVSEEDVSEAPRRSKRQRTAKSFGDDFTVYLVDDTPKSISEAYASPDADYWKEAVRNEMDSIIANGTWEVTERPYGCKPVGCKWVFKKKLRPDGTIEKYKARLVAKGYTRKEGEDFFNTYSPVARLTTIRVLLSLAASHGLLVHQMDVKTAFLNGELDEEIYMYQPDGFVVEGQEGKVCKLLKSLYGLKQAPKQWHEKFDKTLTSAGFVVNEADKCVYYRHGGGEGVILCLYVDDILIFGTNLEVINEVKSFLSQNFDMKDLGVADVILNIKLIRGENGITLLQSHYVEKILNRFGYIDSKPSPTPYDPSLLLRKNKRIARNQLEYSQIIGSLMYLASATRPDISFAVSKLSRFTSNPGDDHWRALERVMRYLKGTMELGLHYTGYPAVLEGYSDSN

SEQ ID NO: 19965 - protein, 1320 aa, Oryza sativa
  Clone ID: TF_OSC420440j.C1.p14.fg
MAGFVDALRPDKFTGVHFKRWQIRVTLWLTAMKCFWVSTGKPEGVLTAEQQKQFEEATTLFVGCILSVLGDRLVEVYMHMTDAKELWDALNTKFGATDASNDLYIMEQFHDYKMADNRSVVEQAHEIQTMAKELELLKCVLPDKFVAGCIIAKLPPSWRSFGTALKHKRQEYSVEGLIASLDVEEKAREKDAASKGDGGQSSANVVHKAQNKSKGKYKAQQTTNFKKQKKNNNNPNQDERTCFVCGQVGHLARKCPQRKGMKAPAGQTSKSANVTIGNTGDGSGYGNLPTVFSVNQSTNWWVDTGANVHVCADISLFSSYQVARGSTVLMGNGSHASVHGVGTVDLKFTSGKIVQLKNVQHVPSIDRNLVSGSRLTRDGFKLVFESNKVVVSKHGYFIGKGYECGGLFRFSLSDFCNKSVNHICGSVDDEANVWHSRLCHINFGLMSRLSSMCLIPKFSIVKGSKCHSCVQSKQPRKPHKAAEERNLAPLELLHSDLCEMNGVLTKGGKRYFMTLIDDATRFCYVYLLKTKDEALDYFKIYKAEVENQLDRKIKRLRSDRGGEFFSNEFDLFCEEHGIIHERTPPYSPESNGIAERKNRTLTDLVNAMLDTAGLPKAWWGEALLTSNHVLNRVPNRNKDKTPYEIWIGRKPSLSYLRTWGCLAKVNVPITKKRKLGPKTVDCVFLGYAHHSIAYRFLIVKSEVPDMHVGTIMESRDATFFESFFPMKDTHSGSNQPSEIIPSSITPPEQTEHTHELVSEEDVSEAPRRSKRQRTAKSFGDDFTVYLVDDTPKSISEAYASPDADYWKEAVRSEMDSIIANGTWEVTERPYGCKPVGCKWVFKKKLRPDGTIEKYKARLVAKGYTQKEGEDFFDTYSPVARLTTIRVLLSLAASHGLLVHQMDVKTAFLNGELDEEIYMDQPDGFVLEGQEGKVCKLLKSLYGLKQAPKQWHEKFDKTLTSAGFAVNEADKCVYYRHGGGEGVILCLYVDDILIFGTNIEVINEVKSFLSQNFDMKDLGVADVILNIKLIRGENGITLLQSHYVEKILNRFGYIDSKPSPTPYDPSLSLRKNKRIARNQLEYSQIIGSLMYLASATRPDISFAVSKLSRFTSNPGDDHWRALERVMRYLKGTVELGLHYTGYPAVLEGYSDSNWISDVDEIKATSGYVFTLGGGAVSWRSCKQTILTRSTMEAELTALDTATVEAEWLRDLLMDLPVVEKPVPAILMNCDNQTTCEKTIEVCQEIKKLRSYNVGLHPNSEKPGRSLHEGTITKCDRQCIEGDGFETHSILEGTHLCELDCWSQSMKILGESSRKLTKDLGV

SEQ ID NO: 19966 - protein, 334 aa, Oryza sativa
  Clone ID: TF_OSC420751j.C1.p1.fg
MAGFADALRPDKFTGVHFKRWQIRVTLWLTAMKCFWVSTGKPEGVLTAEQQKQFEEATTLFVGCILSVLGDRLVEVYMHMTDAKELWDALNTKFGATDASNDLYIMEQFHDYKMADNRSVVEQAHEIQTMAKELELLKCVLPDKFVAGCIIAKLPPSWRSFGTALKHKRQEYSVEGLIASLDVEEKAREKDAASKGDGGQSSANVVHKAQNKSKGKYKAQQTTNFKKQKKNNNNPNQDERTCFVCGQVGHLARKCPQRKGMKAPAGQTSKSANVTIGNTGDGSGYGRTGFHRPNGEWVTCFCSWCWHGRSEVYFGKDRAAEERAACPFYRQESC

SEQ ID NO: 19967 - protein, 1320 aa, Oryza sativa
  Clone ID: TF_OSC422154j.C1.p1.fg
MAGFADALRPDKFTGVHFKRWQIRVTLWLTAMKCFWVSTGKPEGVLTAEQQKQFEEATTLFVGCILSVLGDRLVEVYMHMTDAKELWDALNTKFGATDASNDLYIMEQFHDYKMADNRSVVEQAHEIQTMAKELELLKCVLPDKFVAGCIIAKLPPSWRSFGTALKHKRQEYSVEGLIASLDVEEKAREKDAASKGDGGQSSANVVHKAQNKSKGKYKAQQTTNFKKQKKNNNNPNQDERTCFVCGQVGHLARKCPQRKGMKAPAGQTSKSANVTIGNTGDGSGYGNLPTVFSVNQSTNWWVDTGANVHVCADISLFSSYQVARGSTVLMGNGSHASVHGVGTVDLKFTSGKIVQLKNVQHVPSIDRNLVSGSRLTRDGFKLVFESNKVVVSKHGYFIGKGYECGGLFRFSLSDFCNKSVNHICGSVDDEANVWHSRLCHINFGLMSRLSSMCLIPKFSIVKGSKCHSCVQSKQPRKPHKAAEERNLAPLELLHSDLCEMNGVLTKGGKRYFMTLIDDATRFCYVYLLKTKDEALDYFKIYKAEVENQLDRKIKRLRSDRGGEFFSNEFDLFCEEHGIIHERTPPYSPESNGIAERKNRTLTDLVNAMLDTAGLPKAWWGEALLTSNHVLNRVPNRNKDKTPYEIWIGRKPSLSYLRTWGCLAKVNVPITKKRKLGPKTVDCVFLGYAHHSIAYRFLIVKSEVPDMHVGTIMESRDATFFESFFPMKDTHSGSNQPSEIIPSSITPPEQTEHTHELVSEEDVSEAPRRSKRQRTAKSFGDDFTVYLVDDTPKSISEAYASPDADYWKEAVRSEMDSIIANGTWEVTERPYGCKPVGCKWVFKKKLRPDGTIEKYKARLVAKGYTQKEGEDFFDTYSPVARLTTIRVLLSLAASHGLLVHQMDVKTAFLNGELDEEIYMDQPDGFVLEGQEGKVCKLLKSLYGLKQAPKQWHEKFDKTLTSAGFAVNEADKCVYYRHGGGEGVILCLYVDDILIFGTNIEVINEVKSFLSQNFDMKDLGVADVILNIKLIRGENGITLLQSHYVEKILNRFGYIDSKPSPTPYDPSLSLRKNKRIARNQLEYSQIIGSLMYLASATRPDISFAVSKLSRFTSNPGDDHWRALERVMRYLKGTVELGLHYTGYPAVLEGYSDSNWISDVDEIKATSGYVFTLGGGAVSWRSCKQTILTRSTMEAELTALDTATVEAEWLRDLLMDLPVVEKPVPAILMNCDNQTTCEKTIEVCQEIKKLRSYNVGLHPNSEKPGRSLHEGTITKCDRQCIEGDGFETHSILEGTHLCELDCWSQSMKILGESSRKLTKDLGV

SEQ ID NO: 19968 - protein, 878 aa, Oryza sativa
  Clone ID: TF_OSC4254j.C1.p16.gm
VTLWLTAMKCFWVSTGKPEGVLTAEQQKQFEEATTLFVGCILSVLGDRLVEVYMHMTDAKELWDALNTKFGATDASNDLYIMEQFHDYKMADNRSVVEQAHEIQTMAKELELLKCVLPDKFVAGCIIAKLPPSWRSFGTALKHKRQEYSVEGLIASLDVEEKAREKDAASKGDGGQSSANVVHKAQNKSKGKYKAQQTTNFKKQKKNNNNPNQDERTCFVCGQVGHLARKCPQRKGMKAPAGQTSKSANVTIGNTGDGSGYGNLPTVARGSTVLMGNGSHASVHGVGTVDLKFTSGKIVQLKNVQHVPSIDRNLVSGSRLTRDGFKLVFESNKVVVSKHGYFIGKGYECGGLFRFSLSDFCNNMCLIPKFSIVKGSKCHSCVQSKQPRKPHKAAEERNLAPLELLHSDLCEMNGVLTKEVENQLDRKIKRLRSNRGGEFFSNEFDLFCEEHGIIHERTPPYSPESNGIAERKNRTLTDLVNAMLDTAGLPKACEAPRRSKRQRTAKSFGDDFTVYLVDDTPKSISEAYASPDADYWKEAVRSEMDSIIANGTWEVTERPYGCKPVGCKWVFKKKLRPDASHGLLVHQMDVKTAFLNGELDEEIYMDQPDGFVVEGFAVNEADKCVYYRHGGGEGVILCLYVDDILIFGTNLEVINESHYVEKILNRFGYIDSKPSPTPYDPSLLLRKNKRIARNQLEYSQIIGSLMYLASATRPDISFAVSKLSRFTSNPGDDHWRALERVMRYLKGTVELGLHYTGYPAVLEGYSDSNWISDVDEIKATSGYVFTLGGGAVSWSKDVVLQSILERTHLCELDCWSQSMKILDYSIPLAGVHRRSGEQVSGTSAFDVLHREKATLAKSFDQAAGLSVTSVRVQYVAHI

SEQ ID NO: 19969 - protein, 1356 aa, Oryza sativa
  Clone ID: TF_OSC4267j.C1.p2.fg
MAGFADALRPDKFTGVHFKRWQIRVTLWLTAMKCFRVSTGKPEGVLTAEQQKQFEEATTLFVGCILSVLGDRLVEVYMHMTDAKELWDALNTKFGATDASNDLYIMEQFHDYKMADNRSVVEQAHEIQTMAKELELLKCVLPDKFVAGCIIAKLPPSWRSFGTALKHKRQEYSVEGLIASLDVEEKAREKDAASKSDGGQSSANVVHKAQNKSKGKYKAQQTTNFKKQKKNNNNPNQDERTCFVCGQVGHLARKCPQRKGMKAPAGQTSKSANVTIGNTGDGSGYGNLPTVFSVNQSTNWWVDTGANVHVCADISLFSSYQVARGSTVLMGNGSHASVHGLGTVDLKFTSGKIVQLKNVQHVPSIDRNLVSGSRLTRDGFKLVFESNKVVVSKHGYFIGKGYECGGLFRFSLSDFCNKSVNHICGSVDDEANVWYSRLCHINFGLMSRLSSMCLIPKFSIVKGSKCHSCVQSKQPRKPHKAAEKRNLAPLELLHSDLYEMNGVLTKGGKRYFMTLIDDATTFCYVYLLKMKDEALDYFKIYKAEVENQLDRKIKRLRSDRGGEFFSNEFDLFCEEHGIIHERTPPYSPESNGIAERKNRTLTDLVNAMLDTAGLPKAWWGEALLTSNHVLNRVPNRNKDKTPYEIWIGRKPSLSYLRTWGCLAKVNVPITKKRKLGPKTVDCVFLGYAHHSIAYRFLIVKSEVLDMHVGTIMESRDATFFESFFPMKDTHSGSNQPSEIIPSSITPPEQTEHTHELVSEEDVSEAPRRSKRQRTAKSFGDDFTVYLVDDTPKSISEAYASPDADYWKEAVRSEMDSIIANGIWEVTERPYGCKPVGCKWVFKKKLRPDGTIEKYKARLVAKGYTQKEGEDFFDTYSPIARLTTIRVLLSLAASHGLLVHQMDVKTAFLNGELDEEIYMDQPDGFVVEGQEGKVCKLLKSLYGLKQAPKQWHEKFDKTLTSAGFAVNEADKCVYYRHGGGKGVILCLYVDDILIFGTNLEVINEVKSFLSQNFDMKDLGVADVIINIKLIRGENGITLLQSHYVEKILNRFGYIDSKPSPTPYDPSLLLRKNNRIARNQLEYSQIIGSLMYLASATRPDISFAVSKLSRFTSNPGDDHWRALERIMRYLKGTVELGLHYTGYPAVLEGYSDSNWISDVDEIKATSGYVFTLGGGAVSWRSCKQTILTRSTMEAELTALDTATVEAEWLRDLLMDLPVVEKPVPAILMNCDNQTTCEKTIEVCQEIKKLRSYNVGLHPNSEKPGRSLHEGTITKCDRQCIEGDGFETHIQNGYYSISLVETTIEPNKVGYDLCVGITSLGYTQKDMYSQKVTTCVVFTFGSTTSPIAKIPPPFVESRQ

SEQ ID NO: 19970 - protein, 1432 aa, Oryza sativa
  Clone ID: TF_OSC4900j.C1.p8.fg
MAKTMEQEWREAKSRASALPGQRRLRRRVQGEDYLPKEDDFALASSPPRGPKKPFRPIKPRGNRAGDRQMAHQGPMSPYIIMYPCKCPFHKDYSIPLAGVHRRSGEQVSGTSAFDVLHREKAAIRHCDFTMAGFADALRPDKFTGVHFKRWQIRVTLWLTAMKCFWVSTGKPEGVLTAEQQKQFEEATTLFVGCILSVLGDRLVEVYMHMIDAKELWDALNTKFGATDASNDLYIMEQFHDYKMADNHSVVEQAHEIQTMAKELELLKCVLPDKFVAGCIIAKLPPSWRSFGTALKHKRQEYSVEGLIASLDVEEKAREKDAASKGDGGQSSANVVHKAQNKSKGKYKAQQTTNFKKQKKNNNNPNQDERTCFVCGQVGHLARKCPQRKGMKAPAEQTSKSANVTIGNTGDGSGYGNLPTVFSVNQSTNWWVDTGANVHVCADISLFSSYQVARGSTVLMGNGSHASVHGVGTVDLKFTSGKIVQLKNVQHVPSIDRNLISGSRLTRDGFKLVFESNKVVVSKHGYFIGKGYECGGLFRFSLSDFCNKSVNHTCGSVDDEANVWHSRLCHINFGLMSRLSSMCLIPKFSIVKGSKCHSCVQSKQPRKPHKAAEERNLAPLELLHSDLCEMNGVLTKGGKRYFMTLIDDATRFCYVYLLKTKDEALDYFKIYKAEVENQLDRKIKRLRSDRGGEFFSNEFDLFCEEHGIIHERTPPYSPESNGIAERKNRTLTDLVNAMLDTAGLPKAWWGEALLTSNHVLNRVPNRNKDKTPYEIWIGRKPSLSYLRTWGCLVKVNVPITKKRKLGPKTVDCVFLGYAHHSIAYRFLIVKSEVPDMHVGTIMESRDATFFESFFPMKDTHSGSNQPSEIIPSSITPPEQTEYTHELVSEEDVSEAPRRSKRQRTAKSFGDDFTVYLVDDTPKSISEAYASPDADYWKEAVRSEMDSIIANGTWEVTERPYGCKPVGCKWVFKKKLRPDGTIEKYKARLVAKGYTQKEGEDFFDTYSPVARLTTIRVLLSLAASHGLLVHQMDVKTAFLNGELDEEIYMDQPDGFVVEGQEGKVCKLLKSLYGLKQAPKQWHEKFDKTLTSAGFGVNEADKCVYYRHGGGEGVILCLYVDDILIFGTNLEVINEVKSFLSQNFDMKDLGVADVILNIKLIRGENGITLLQSHYMEKILNRFGYIDSKPSPTPYDPRLLLRKNKRIARNQLEYSQIIGSLMYLASATRPDISFAVSKLSRFTSNPGDDHWRALERVMRYLKGTVELGLHYTGYPAVLEGYSDSNWISDVDEIKATSGYVFTLGGGAVSWRSCKQTILTRSTMEAELTALDTATVEAEWLRDLLMDLPVVEKPVPAILMNCDNQTIIVKVNSSKDNMKSSRHVKRRLKSVRKLRNSGLITLDYIQTARNLADPFTKGLSRNVIDNASKEMGLRPM

SEQ ID NO: 19971 - protein, 1297 aa, Oryza sativa
  Clone ID: TF_OSC549j.C1.p1.fg
MAGFADALRPDKFTGVHFKRWQIRVTLWLTAMKCFWVSTGKPEGVLTAEQQKQFEEATTLFVGCILSVLGDRLVEVYMHMTDAKELWDALNTKFGATDASNDLYIMEQFHDYKMADNRSVVEQAHEIQTMAKELELLKCVLPDKFVAGCIIAKLPPSWRSFGTALKHKRQEYSVEGLIASLDVEEKAREKDAASKGDGGQSSANVVHKAQNKSKGKYKAQQTTNFKKQKKNNNNPNQDERTCFVCGQVGHLARKCPQHKGMKAPAGQTFKSANVTIGNTGDGSGYGNLPTVFSVNQSTNWWVDTGANVYVCADILLFSSYQVARGSTVLMGNGSHASVHGVGTVDLKFTSGKIVQLKNVQHVPSIDKNLVSGSRLTRDGFKLVFESNKVVVSKHGYFIGKGYECGGLFRFSLSDFCNKSVNHICGSVDDEANVWHSRLYHINFGLMSRLSSMCLIPKFSIVKGSKCHSCVQSKQPRKPHKAAEERNLAPLELLHSDLCEMNGVLTKGGKRYFMTLIDDATRFCYMYLLKTKDEALDYFKIYKAEVENQLDRKIKRLRSDRGGEFFSNKFDLFCEEHGIIHERTPPYSPESNGIAERKNRTLTDLVNAMLDTAGLPKAWWGEALLTSNHVLNRVPNRNKDKTPYEIWIGRKPSLSYLRTWGCLAKVNVPITKKRKLGPKTVDCVFLGYAHHSIAYRFLIVKSEVPDMHVGTIMESRDATFFESFFPMKDTHSGSNQPSEIIPSSITPPEQTEHTHELVSEEDVSEAPRRSKRQRTAKSFGDDFTVYLVDDTPKSISEAYASPDADYWKEAVRSEMDSIIANGTWEVTERPYGCKPVGCKWVFKKKLRPDGTIEKYKARLVAKGYTQKEGEDFFDTYSPVARLTTIRVLLSLAVSHGLLVHQMDVKTAFLNGELDEEIYMDQPDGFVVEGQEGKVCKLLKSLYGLKQAPKQCHEKFDKPLTSAGFAVNEADKCVYYRHGGGEGVILCLYVDDILIFGTNLEVINEVKSFLSQNFDMKDLGVADVILNIKLIRGENGITLLQSHYVEKILNRFGYIDSKPSPTPYDPSLLLHKNKRIARNQLEYSQIIGSLMYLASATRPDISFAVSKLSRFTSNPGDDHWRALERVMRYLKGTVELGLHYTGYPAVLEGYSDSNWISDVDEIKATSGYVFTLGGGAVSWRSCKQTILTRSTMEAELTALDTATVEAEWLRDLLMDLPIVEKPVPAILMNCDNQTTCEKTIEVCQEIKKLRSYNVGLHTNSEKPGRSLHEGTITKCDRQCIEGDGFETHVSYTMVVTQSM

SEQ ID NO: 19972 - protein, 551 aa, Oryza sativa
  Clone ID: TF_OSC549j.C1.p1.gm
YSIPLAGVHRRSGEQVSGTSAFDVLHREKAAIRHCDFTMAGFADALRPDKFTGVHFKRWQIRVTLWLTAMKCFWVSTGKPEGVLTAEQQKQFEEATTLFVGCILSVLGDRLVEVYMHMTDAKELWDALNTKFGATDASNDLYIMEQFHDYKMADNRSVVEQAHEIQTMAKELELLKCVLPDKFVAGCIIAKLPPSWRSFGTALKHKRQEYSVEGLIASLDVEEKAREKDAASKGDGGQSSANVVHKAQNKSKGKYKAQQTTNFKKQKKNNNNPNQDERTCFVCGQVGHLARKCPQHKGMKAPAGQTFKSANVTIGNTGDGSGYGNLPTVARGSTVLMGNGSHASVHGVGTVDLKFTSGKIVQLKNVQHVPSIDKNLVSGSHYWKEAVRSEMDSIIANGTWEVTERPYGCKPVGCKWVFKKKLRPDVSHGLLVHQMDVKTAFLNGELDEEIYMDQPDGFVVEGFAVNEADKCVYYRHGGGEGVILCLYVDDILIFGTNLEVINESHYVEKILNRFGYIDNYSIPLAGVHRRSGEQVSGTSAFDVLHREKAAI

SEQ ID NO: 19973 - protein, 1218 aa, Oryza sativa
  Clone ID: TF_OSC5516j.C1.p2.gm
MADLLGDPTWPQLHRRPCTDTPWPGLQCELAPDDARHLRATRLHFGPDVATPPCRPGARLAAPVLLGLPHLKTLSLFGCFVVADLSSEPIKSQEMRAHAAAAAAAVELPPALFTNASSLEQLVLKSNPGLTGRIPATLSDLRSLRVLSLSQNGFRGEIPPELGRLAPLQQLDLSYNNLTGEIPEEIGGMESLSILDLSWNSLAGGLPAALGSLRMLEKADLSHNELAGRVPAEVGSLRELVFLDLSHNELAGPLPASMAGLGKLQYLLLQENPIGTAVPAAVVGSLRRLQVVGMSGCGLTGPIPRGAFAALASLAALSLDRNRLDGPIPASLAALPRLGRLNLSQNRLAGEIALPAEFVARLGRRLDVRGNDKLCVGRERYGGAQASYLGAPPCAAAGGGSGAAVGGTSSSPVESSAGAAATAGRGFRVYGIAGMFGGMFCFAANAPSLVDYSIPLAGVHQRSGEQVFLLQFCFAANAPSLVDYSIPLAGVHQRSGEQVSGTSAFDVLHREKAAIRVTLSLTAMKCFWVSTGKPERVLTAEQQKQFEEATTLFVGCILSVLGDRLVEMYMHMTDAKELWDALNTKFGATDASNNLYIMEQFHDYKMADNRSVVEQAHEIQTMAKELELLKCVLPDKFVAGCIIAKLPPSWRSFGTALKHKRQEYSVEGLIASLDVEEKAREKDAASKGDGGQSSANVVHKAQNKSKGKYKAQQTTNFKKQKKNNNNPNQDERTCFVCGQVGHLARKCPQRKGMKAPAGQTSKSANVTIGNTGDGSGSHGLKNVQHVPSIDRNLVSGSRLTRDGFKLVFESNKVVVSKHGYFIGKGYECGGLFRFSLSDFCNKSVNHICGSVDDEANVWHSHYWKEAVRSEMDSIIANGTWEVTERPYGCKPVGCKWVFKKKLRPDASHGLLVHQMDVKTAFLNGELDEEIYMDQPDGFVVEGFAVNEADKCVYYRHGGGEGVILCLYVDDILIFGTNLEVINESHYVEKILNRFGYIDSKPSPTPYDPSLLLRKNKRIARNQLEYSQIIGSLMYLASATRPDISFAVSKLSRFTSNPGDDHWRALERVMRYLKGTVELGLHYTGYPAVLEGYSDSNWISDVDEIKATSGYVFTLGGGAVSWSKDVVLQSILEGTHLCELDCWSQSMKILGESSRKLTELGAPHRETAQAPLCRFGRGPWVRAAEKRNTLLLCFGGSVYEEATKCEPAPDRSGIVSSRL

SEQ ID NO: 19974 - protein, 646 aa, Oryza sativa
  Clone ID: TF_OSC6238j.C1.p1.gm
EYSVEGLIASLDVEEKAREKDAASKGDGGQSSANVVHKAQNKSKGKYKAQQTTNFKKQKKNNNNPNQDERTCFVCGQVGHLARKCPQRKGMKAPAGQTSKSADVTIGNIGDGSGYGNLPTVARGSTVLMGNGSHASVHGVGTVDLKFTSGKIVQLKNVQHVPSIDRNLVSDSRLIRDGFKLVFESNKVVVSKHGYFIGKGYECGGLFRFSLSDFCNKSVNHICGSVDDEANVWHSQVENQLDRKIKRLRSDRGGEFFSNEFDLFFEEHGIIHERTPPYSPESNGIAERKNRTLTDLVNAMLDTAGLPKACEAPRRSKRQRTAKSFGDDFTVYLVDDTPKSISEAYASPDADYWKEAVRSEMDSIIANGTWEVTERPYGCKPVGCKWVFKKKLRPDASHGLLVHQMDVKTAFLNGELDEEIYMDQPDGFVVEGFAVNEADKCVYYRHGGGEGVILCLYVDDILIFGTNLEVINESHYVEKILNRFGYIDSKPSPTPYDPSLLLRKNKRIARNQLEYSQIIGSLMYLASATRPDISFASILERTHLCELDCWSQSMKILDYSIPLAGVHQRSGEQVSGTSAFDVLHREKAAIRGVIGIIIDIHLITTQWGSDKHIFVSFLVHKAARFIAFHYSVPIALRALSNMCNPS

SEQ ID NO: 19975 - protein, 2623 aa, Oryza sativa
  Clone ID: TF_OSC8778j.C1.p2.fg
MSNEKVPSNAPIAPQEGNAPQNSGSNKHPGASSEETWRTPSDPFPMEITQVAPRDDDPDYIPIEQAMVVRRRSKRKAGRNRTEQEVEMDTATSAPERTETSTSAGGSGKKRRGERSKNKLPKETYNVIALDQDGKPIEPPIVRSKFSNACGTLVRTRCPINVKLWETVDDNIKTLLWNELQKYFVFPPGSEVRGRDYALKKMGDRWRQWKSDLNRDYVQKNLPPFTDYGHISQADWDTFVADRTTAEALALRKKMSELAKKNKYPHRLGSSGYAGHVDQWREIEQRFAAAGKPLLVDPMVERSKNWVWARSTGQVSDEGDILFETPDIEEVTTNLQQIVEKERSGQFVPRRERDQLTAALGTAEHSGRVRGLSSKTSWKVGFPQDAPSYKKRDKYKEQLSDKIYAQVKEHFYSLAAENPTAFPRLFPDSQQPTQSAQQTTNVPSSVGSVQTSTFPVDSITGPTPCSLVVPIGRAGKTKEVATGLAIPGRQFHNTAIPEDYARVQVAKVHSDHVSLELDIPAPEGIELLGDAVNQFILWHRRDIILSAAVLAAGSSTPSSSQAMTAAAPAPPSPPEPPSPRHPPSPPPLRSPARQPTPPPSPSQQPPLPTPQPVQASPTSPTKQHAPPAPPSVQTSPPTPQSALVEEVHIPDGTTSEPKSNTLEPRRIIPKLISTYDPKEIDKDKEKFMFSAFRNSEKRKELAHVLSDSQKSVLAAQDEVQSWLSADVPETYEYGKPFLPTYLMNKLPWEMRVMHEWYMKASRKGLGFISVAVPEGAFMSGPNGIFFISFQDLYALYKLDKMDVNLVAAFCLMQFHEADRTGAKVGYVDPTRICKTQHTIELRQDCEQLVGKTPEEKEEYVKTLHKRKKLEVATYLAIAMLAHADKDVLMVPYQFTDHYILFLVYPKDQLIISLDPAHYDKETFMEFLTILNLAHKYYRKRGGPVHIPSQKKLSVRTGWPCYKQPPGTNLCGYYVCEMLRVNGRYKTTSNRIPEIPYIAQRFNHTTILNVAADLCRFIRRDVCNARGVTPESASFADTGYDPPPKKWKGICQVGPSFEAISCNRKFIGARWYIDDEILSSISDNEVLSPRDVEGHGTHTASTAGGNIIHNVSFLGLAAGTVRGGAPRARLAIYKACWSGYGCSGATVLKAMDDAVYDGVDVLSLSIGGTKEDVGTLHVVANGISVVYAGGNDGPIAQTVENQSPWLVTVAATTIDRSLPVVITLGNGEKLVAQSFVLLETASQFSEIQKYTDEECNANNIMNSTVKGKIAFCFMGEMLNNKQQTSYPDVTTAVAAKGGRAPDIAAPGVSILAAAQIPYYKGVSYHFDSGTSMACPHVAGIIAVLKSIHPKWSPAALKSAIMTTDYSIPLAGVHQRSGEQVSGTSAFDVLHREKAAIRHCDFTMADFADALRPDKFTGVHFKRWQIRVTLWLTAMKCFWVSTGKPEGVLTAEQQKQFEEATTLFVGCILSVLGDRLVEVYMHMTDAKELWDALNTKFGATDASNDLYIMEQFHDYKMADNRSVVEQAHEIQTMAKSFGTALKHKRQEYSVEGLIASLDVEEKAREKDAASKGDGGQSSANVVHKAQNKSKGKYKAQQTTNFKKQKKNNNNPNQDERTCFVCGQVGHLARKCPQRKGMKAPAGQTSKSANVTIGNTGDGSGYGNLPTVFSVNQSTNWWVDTGANVARGSTVLMGNGSHASVHGVGTVDLKFTSGKIVQLKNVQHVPSIDRNLVSGSRLTRDGFKLVFESNKVVVSKHGYFIGKGYECGGLFRFSLSDFCNKSVNHICGSVDDEANVWHSRLCHINFGLMSRLSSMCLIPKFSIVKGSKCHSCVQSKQPRKPHKAAEERNLAPLELLHSDLCEMNGVLTKGGKRYFMTFIDDATRFCYVYLLKKKDEALDYFKIYKAEVENQLDRKIKRLRSDRGGEFFSNEFDLFCEEHGIIHERTPPYSPESNGIAERKNCTLTDLVNAMLDTAGLPKAWWGEVLLTSNHVLNRVPNRNKDKTPYEIWIGRKPSLSYLRTWGCLAKVNVPITKKRKLGPKTVDCVFLGYAHHSIAYRFLIVKSEVLDMHVGIIMESRDATFFESFFPMKDTHSGSNQPSEIIPSSIIPPEQTEHTHELVSEEDVSEAPRRSKRQRTAKSFGDDFTVYLVDDTPKSISEAYASPDADYWKEAVRSEMDSIIANGTWEVTEQPYGCKPVGCKWVFKKKLRPDGTIEKYKARLVAKGYTQKEGEDFFDTYSPVARLTTIRVLLSLAASHGLLVHQMDVKTAFLNGELDEEIYMDQPDGFVVEGFGVNYAYPCVYYRHGGGQGVILCLYVDDILIFGTNLEVINEVKSFLSQNFDMKDLGVADVILNIKLIRGENGITLLQSHYVEKILNRFGYIDSKPFPTPYDPSLLLRKNKRIARNQLEYSQIIGSLMYLASATRPDISFAVSKLSRFTSNPGDDHWRALERVMRYLKGTVELGLHYTGYPAVLEGYSDSNWISDVDEIKATSGYVFTLGGGAVSWRSCKQTILTRSTMEAELTALDTATVEAEWLRDLLMDLPVVEKPVPAILMNCDNQTTCEKTIEVCQEIKKLRSYNVGLHPNSEKPGRSLHEGTITKCDRQCIEGDGFETHVSYTMVVTQSM

SEQ ID NO: 19976 - protein, 1513 aa, Oryza sativa
  Clone ID: TF_OSC900007j.C1.p16.fg
MAGFADALRPDKFTGVHFKRWQIRVTLWLTAMKCFWVSTGKPEGVLTAEQQKQFEEATTLFVGCILSVLGDRLVEVYMHMTDAKELWDALNTKFGATDASNDLYIMEQFHDYKMADNRSVVEQAHEIQTMAKELELLKCVLPDKFVAGCIIAKQPPSWRSFGTALKHKRQEYSVEGLIASLDVEEKAREKDAASKGDGGQSSANVVHKAQNKSKGKYKAQQTTNFKKQKKNNNNPNQDERTCFVCGQVGHLARKCPQRKGMKAPAGQTSKWKRVARGSTVLMGNGSHASVHGVGTVDLKFTSGKIVQLKNVQHVPSIDRNLVSGSRLTRDGFKLVFESNKVVVSKHGYFIGKGYECGGLFRFSLSDFCNKSVNHICGSVDDEANVWHSRLCHINFGLMSRLSSMCLIPKFSIVKGSKCHSCVQSKQPRKPHKAAEERNLAPLELLHSDLCEMNGVLTKGGKRYFMTFIDDATRFCYVYLLKTKDEALDYFKIYKAEVENQLDRKIKRLRSDRGGEFFSNEFDLFCEEHGIIHERTPPYSPESNGIAERKNRTLTDLVNAMLDTAGLPKAWWGEALLTSNHVLNRVPNRNKDKTPYEIWIGRKPSLSYLRTWGCLAKVNVPITKKRKLGPKTVDCVFLGYAHHSIAYRFLIVKSEVLDMHVGTIMESRDATFFESFFPMKDTHSGSNQPSEIIPSSITPPEQTEHTHELVSEEDVSEAPRRSKRQRTAKSFGDDFTVYLVDDTPKSISEAYASPDADYWKEAVTEQPYGCKPVGCKWVFKKKLRPDGTIEKYKARLVAKGYTQKEGEDFFDTYSPVARLTTIRVLLSLAASHGLLVHQMDVKTAFLNGELDEEIYMDQPDGFVVEGQEGKVCKLLKSLYGLKQAPKQWHEKFDKTLTSAGFGVNEANKCVYYRHGGGEGVILCLYVDDILIFGTNLEVINEVKSFLSQNFDMKDLGVADVILNIKLIRGENGITLLQSHYVEKILNRFGYIDSKPSPTPYDPSLLLRKNKRIARNQLEYSQIIGSLMYLASATRPDISFAVSKLSRFTSNPGDDHWRALERVMRYLKGTVELGLHYTGYPAVLEGYSDSNWISDVDEIKATSGYVFTLGGGAVSWRSCKQTILTRSTMEAELTALDTATVEAEWLRDLLMDLPVVEKPVPAILMNCDNQTTCEKTIEVCQEIKKLRSYNVGLHPNSEKPGRSLHEGTITKCDRQCIERDGFETHMQPPFAVLFCCKFGFVFVLETFRKIRICENQSRVCLLLCTAPSLVDYSIPLAGVHQRSGEQVSGTSAFDVLHREKAAIRCSRRTQSTENVEEADDANQLAVVGVHHPHLRHADKATEATPSTTASARPNGCAAAGSEDDADDGSPSPSDSVPVEESDVADLWSTVTGFALPESGGLVWSTVTCSNDALAPLSCRGSGFALSASGDDSEWPENDGPPPPLLSTIGFMPPATGGEGEEPENEASSYGECPENTYGGRLLLSAVLPHYSRRRQRRLPSAPQRPPPQPPDGLHR

SEQ ID NO: 19977 - protein, 1028 aa, Oryza sativa
  Clone ID: TF_OSC900144j.C1.p23.gm
MGTKTNPDRWNGSLSQGLGEGGLFFEDESGYDDKVGVGSAGQTGRQASQASGTPAVRPTHDVGQTGLGRRLRVLLMLLEMVLQKLLLRPILIQNVDQLQKLLLLCTFTADIRRNTIIGNIGERTARLVWLLPVTRPNCGKGETSVKGNTGGKTYIRVLGNHVEHGGGVLELISKPHILKAQVSVLYYYSIPLAGVHQRSGEQVSGTSAFDVLHREKAAIRVTLWLTAMKCFWVSTGKPEGVLTAEQQKQFEEATTLFVGCILSVLGDRLVEVYMHMTDAKELWDALNTKFGATDASNDLYIMEQFHDYKMADNRSVVEQAHEIQTMAKELELLKCVLPDKFVAGCIIAKLPPSWRSFGTALKHKRQEYSVEGLIASLDVEEKAREKDAASKGDGGQSSANVVHKAQNKSKGKYKAQQTTNFKKQKKNNNNPNQDERTCFVCGQVGHLARKCPQRKGMKAPAGQTSKSANVTIGNTGDGSWYGNLPTVARGSTVLMGNGSHASVHGVGTVDLKFTSGKIVQLKNVQHVPSIDRNLVSGSRLTRDGFKLVFESNKVVVSKHGYFIGKGYEYGGLFRFSLSDFCNNMCLIPKFSIVKGSKCHSCVQSKQPRKPHKAAEERNLAPLELLHSDLCEMNGVLTKEVENQLDRKIKRLRSDRGGEFFSNEFDLFCEEHGIIHERTPPYSPESNGIAERKNRTLTDLVNAMLDTAGLPKACEAPRRSKRQRTAKSFGDDFIVYLVDDTPKSISEAYASPDADYWKEAVRSEMDSIIANGTWEVTERPYGCKPVGCKWVFKKKLRPDASHGLLVHQMDVKTAFLNGELDEEIYMDQPDGFVVEGFAVNEADKCVYYRHGGGEGVILCLYVDDILIFGTNLEVINESHYVEKILNRFGYIDSKPSPTPYDPSLLLRKNKRIARNQLEYSQIIGSLMYLASATRPDISFAVSKLSRFTSNPGDDHWRALERVMRYLKDYSIPLAGVHQRSGEQVSGTSAFDVLHREKAAIRFLGSASRDCSLFVRDGSPSSSLACFVPS

SEQ ID NO: 19978 - protein, 1247 aa, Oryza sativa
  Clone ID: TF_OSC900152j.C1.p4.fg
MAGFADALRPDKFTGVHFKRWQIRVTLWLTAMKCFWVSTGKPEGVLTAEQQKQFEEATTLFVGCILSVLGDRLVEVYMHMTDAKELWDALNTKFGATDASNDLYIMEQFHDYKMADNRSVVEQAHEIQTMAKELELLKCVLPDKFVAGCIIAKLPPSWRSFGTALKHKRQEYSVEGLIASLDVEEKAREKDAASKGDGGQSSANVVHKAQNKSKGKYKAQQTTNFKKQKKNNNNPNQDERTCFVCGQVGHLARKCPQRKGMKAPAGQTSKSANVTIGNTGDGSGYGNLPTVFSVNQSTNWWVDTGANVHVCADISLFSSYQVARGSTVLMGNGSHASVHGVGTVDLKFTSGKIVQLKNVQHVPSIDRNLVSGSRLTRDGFKLVFESNKVVVSKHGYFIGKGYECGGLFRFSLSDFCNKSVNHICGSVDDEANVWHSRLCHINFGLMSRLSSMCLIPKFSIVKGSKCHSCVQSKQPRKPHKAAEERNLAPLELLHSDLCEMNGVLTKGGKRYFMTLIDDATRFCYVYLLKTKDEALDYFKIYKAEVENQLDRKIKRLRSNRGGEFFSNEFDLFCEEHGIIHERTPPYSPESNGIAERKNRTLTDLVNAMLDTAGLPKACIAYRFLIVKSEVPDMHVGTIMESRDATFFESFFPMKDTHSGSNQPSEIIPSSITPPEQTEHTHELVSEEDVSEAPRRSKRQRTAKSFGDDFTVYLVDDTPKSISEAYASPDADYWKEAVRSEMDSIIANGTWEVTERPYGCKPVGCKWVFKKKLRPDGTIEKYKARLVAKGYTQKEGEDFFDTYSPVARLTTIRVLLSLAASHGLLVHQMDVKTAFLNGELDEEIYMDQPDGFVVEGQEGKVCKLLKSLYGLKQVPKQWHEKFDKTLTSAGFAVNEADKCVYYRHGGGEGVILCLYVDDILIFGTNLEVINEVKSFLSQNFDMKDLGVADVILNIKLIRGENGITLLQSHYVEKILNRFGYIDSKPSPTPYDPSLLLRKNKRIARNQLEYSQIIGSLMYLASATRPDISFAVSKLSRFTSNPGDDHWRALERVMRYLKGTVELGLHYTGYPAVLEGYSDSNWISDVDEIKATSGYVFTLGGGAVSWRSCKQTILTRSTMEAELTALDTATVEAEWLRDLLMDLPVVEKPVPAILMNCDNQTTCEKTIEVCQEIKKLRSYNVGLHPNSEKPGRSLHEGTITKCDRQCIEGDGFETHSILERTHLCELDCWSQSMKILGESSRKLTKDLGV

SEQ ID NO: 19979 - protein, 556 aa, Oryza sativa
  Clone ID: TF_OSC900192j.C1.p20.gm
MLLLSAVIRGGRCIIAGDCDADRAGSEIDVHDPDAEIWVTRDVQRSSEADVQRRGCAVLRISDRRQSRGGPTAGGGVRRAGGWGGAIWMGRTERWCSRTGTGTATEDRDEEAEAEAEGERRRRRPPIPSPSSYRCGFSHKGYPFYCPWAEPHSEHSVQPIEKEASSRIKLTSRSHLRRTWALPASTVRWPPLPSWRQAPGLPRFIKFDFNIAQTYPEADYSISLAGVHRRSGEQVSGTSAFDVLHREKAAIRVTLWLTAMKCFWVSTGKPEGVLTAEQQKQFEEATTLFVGCILSVLGDRLVEVYMHMTDAKELWDALNTKFGATDASNDLYIMEQFHDYKMADNRSVVEQAHEIQTMAKELELLKCVLLDKFVAGCIIAKLPPSWRSFGTALKHKRQEYSVEGLIASLDVEEKAREKDAASKGDGGQSSSNVVHKAQNKSKGKYKAQQTTNFKKQKKNNNNPNQDERTCFVCGQVGHLARKCPQRKGMKAPAGQTSKSANVTIGNTGDGSGYGNLPTVARGSTVLMGNGSHASVHGVGTVDLKFTSGKIVQLKNV

SEQ ID NO: 19980 - protein, 1320 aa, Oryza sativa
  Clone ID: TF_OSC900225j.C1.p25.fg
MAGFADALRPDKFTGVHFKRWQIRVTLWLTAMKCFWVSTGKPEGVLTAEQQKQFEEATTLFVGCILSVLGDRLVEVYMHMTDAKELWDALNTKFGATDASNDLYIMEQFHDYKMADNRSVVEQAHEIQTMAKELELLKCVLPDKFVAGCIIAKLPPSWRSFGTALKHKRQEYSVEGLIASLDVEEKAREKDAASKGDGGQSSANVVHKAQNKSKEKYKAQQTTNFKKQKKNNNNPNQDERTCFVCGQVGHLARKCPQHKGMKAPAGQTSKSANVTIGNTGDGSGYGNLPTVFSVNQSTNWWVDTGANVHVCADISLFSSYQVARGSTVLMGNGSHASVHGVGTVDLKFTSGKIVQLKNVQHVPSIDRNLVSGSRLTRDGFKLVFESNKVVVSKHGYFIGKGYECGGLFRFSLSDFCNKSVNHICGSVDDEANVWHSRLCHINFGLMSRLSSMCLISKFSIVKGSKCHSCVQSKQPRKPHKAAEERNLAPLELLHSDLCEMNGVLTKGGKRYFMTLIDDVTRFCYVYLLKTKDEALDYFKIYKAEVENQLDRKIKRLRSDRGGEFFSNEFDLFCEEHGIIHERTPPYSPESNGIAERKNRTLTDLVNAMLDTAGLPKAWWGEALLTLNHVLNRVPNRNKNKTPYEIWIGRKPSLSYLRTWGCLAKVNVPITKKRKLGPKTVDCVFLGYAHHSIAYRFLIVKSEVPDMHVGTIMESRDGTFFESFCPMKDTHSGSNQPSEIIPSSITPPEQTEHTHELVSEEDVSEAPRRSKRQRTAKSFGDDFTVYLVDDTPKSISEAYASPDADYWKEAVRSEMDSIIANGTWEVTERPYGCKPVGCKWVFKKKLRPDGTIEKYKARLVAKGYTQKEGEDFFDTYSPVARLTTIRVLLSLVASHGLLVHQMNVKTAFLNGELDEEIYMDQPDGFVVEGQEGKVCKLLKSLYGLKQAPKQWHEKFDKTLTSAGFAVNEADKCVYYRHGGGEGVILCLYVDDILIFGTNLEVINEVKSFLSQNFDMKDLGVADVILNIKLIRGENGITLLQSHYVEKILNRFGYIDSKPSPTPYDPSLLLHKNKRIARSQLEYSQIIGSLMYLASATRPDISFAVSKLSRFTSNPGDDHWRALERVMRYLKGTVELGLHYTGYPAVLEGYSDSNWISDVDEIKATSGYVFTLGGGAVSWRSCKQTILTRSTMEAELTALDTATVEAEWLRDLLMDLPVVEKPVPAILMNCDNQTTCEKTIEVCQEIKKLRSYNVGLHSNSEKSGRSLHEGTITKCDRQCIEGDGFETHSILERTHLCELDCWSQSMKILGESSRKLTKDLGV

SEQ ID NO: 19981 - protein, 1326 aa, Oryza sativa
  Clone ID: TF_OSC900345j.C1.p2.fg
MAGFADALRPDKFTGVHFKRWQIRVTLWLTAMKCFWVSTGKPEGVLTAEQQKQFEEATTLFVGCILSVLGDRLVEVYMHMTDAKELWDALNSKFGATDASNDLYIMEQFHDYKMADNRSVVEQAHEIQAMAKELELLKCVLPDKFVAGCIIAKLPPSWRSFGTALKHKRQEYSVEGLIASLDVEEKAREKDAASKGDGGQSSANVVHKAQNKSKGKYKAQQTTNFKKQKKNNNNPNQDERTCFVCGQVGHLARKCPQRKGMKAPAGQTSKSANVTIGNTGDGSGYGNLPTVFSVNQSTNWWVDTGANVHVCADISLFSSYQVARGSTVLMGNGSHASVHGVGTVDLKFTSEKIVQLKNVQHVPSIDRNLVSGSRLTRDGFKLVFESNKVVVSKHGYFIGKGYECVGLFRFSLSDFCNKSVNHICGSVDDEANVWHSRLCHINFGLMSRLSSMCLIPKFSIVKGSKCHSCVQSKQPRKPHKAAEERNLAPLELLHSDLCEMNGVLTKGGKRYFMTFIDDATRFCYVYLLKTKDEALDYFKIYKAEVENQLDRKIKRLRSDRGGEFFSNEFDLFCEEHGIIHEMTPPYSPESNGIAERKNRTLTDLVNAMLDTAGLPKAWWGEALLTSNHVLNRVPNRNKDKTPYEIWIGRKPSLSYLRTWGCLAKVNVPITKKRKLGPKTVDCVFLGYAHHSIAYRFLIVKSEVPDMHVGTIIESRDAIFFESFFPMKDTHSGSNQPSEIIPSSITPPEQTEHTHELVSEEDVSEAPRRSKRQRTAKSFGDDFTVYLVDDTPKSISEAYASPDADYWKEAVRSEMDSIIANGTWEVTERPYGCKPVGCKWVFKKKLRPDGTIEKYKARLVAKGYTQKEGEDFFDTYSPVARLTTIRVLLSLAASHGLLVHQMDVKTAFLNGELDEEIYMDQPDGFVVEGQEGKVCKLLKSLYGLKQAPKQWHEKFDKTLTSAGFAVNEADKCVYYRHGGGEGVILCLYVDDILIFGTNLEVINEVKSFLSQNFDMKDLGVADVILNIKLIRGENGITLLQSHYVEKILNRFGYIDSKPSPTPYDPSLLLRKNKRIARNQLEYSQIIGSLMYLASATRPDISFAVSKLSRFTSNPGDDHWRALERVMRYLKGTVELGLHYTGYPAVLEGYSDSNWISDVDEIKATSGYVFTLGGGAVSWRSCKQTILTRSTMEAELTALDTATVEAEWLRDLLMDLPVVEKPVPAILMNCDNQTTCEKTIEVCQKIKKLWSYNVGLHPNSEKPGRSLHEGTITKCDRQCIEGDGFETHMSYTMVSILERTHLCELDCWSQSMKILGESSRKLTKDLGV

SEQ ID NO: 19982 - protein, 1397 aa, Oryza sativa
  Clone ID: TF_OSC900387j.C1.p13.fg
MAKAAGQPPNDQPASSGSGSGAAACFHLPPHDYWPILVSWPASCTMRYSSVVLRTLNHYMSIISTIQKPYYRHCDFTMAGFADALRPDKFTGVHFKRWQIRVTLWLTAMKCFWVSTGKPEGVLTAEQQKQFEEATTLFVGCILSVLGDRLVEVYMHMTDAKELWDALNTKFGATDASNDLYIMEQFHDYKMADNRSVVEHAHEIQTMAKELELLKCVLPDKFVAGCIIAKLPPSWRSFGTALKRKRQEYSVEGLIASLDVEEKAREKDAASKGDGGQSSANVVHKAQNKSKGKYKAQQTTNFKKQKKNNNNPNQDERTCFVCGQVGHLARKCPQRKGMKAPAGQTFKSANVTIGNTGDGSGYGNLPTVFSVNQSTNWWVDTGANVHVCADISLFSSYQVARGSTVLMGNGSHASVHGVGTVDLKFTSEKIVQLKNVQHVPSIDRNLVSGSRLTRDGFKLVFESNKVVVSKHGYFIGKGYECGGLFRFSLSDFCNKSVNHICGSVDDEANVWHSRLCHINFGLMSRLSSMCLIPKFSIVKGSKCHSCVQSKQPRKPHKAAEERNLAPLELLHSDLCEMNGVLTKGGKRYFMTLIDDATRFCYVYLLKTKDEALDYFKIYKAEVENQLDRKIKRLRSDRGGEFFSNEFDLFCEEHGIIHERTPPYSPESNGIAERKNRTLTDLVNAMLDTAGLPKAWWGEALLTSNHVLNRVPNRNKDKTPYEIWIGRKPSLSYLRTWGCLAKVNVPITKKRKLGPKTVDCVFLGYAHHSIAYRFLIVKSEVPDMHVGTIMESRDATFFERFFPMKDTHSGSNQPSEIIPSSITPPEQTEHTHELVSEEDVSEAPRRSKRQRTAKSFGDDFTVYLVDDTPKSISEAYASPDADYWKEAVRSEMDSIIANGTWEVTERPYGCKPVGCKWVFKKKLRPDGTIEKYKARFVGKGYTQKEGEDFFDTYSPVARLTTIRVLLSLAASHGLLVHQMDVKTAFLNGELDEEIYMDQPDGFVVEGQEGKVCKLLKSLYGLKQAPKQWHEKFDKTLTSAGFAVNEADKCVYYRHGGGEGVILCLYVDDILIFGTNLEVINEVKSFLSQNFDMKDLGVADVILNIKLIRGENGITLLQSHYVEKILNRFGYIDSKPSPTPYDPSLLLRKNKRIARNQLEYSQIIGSLMYLASATRPDISFAVSKLSRFTSNPGDDHWRALERVMRYLKGTVELGLHYTGYPAVLEGYSDSNWISDVDEIKATSGYVFTLGGGAVSWRSCKQTILTRSTMEAELTALDTATVEAEWLRDLLMDLPVVEKPVPAILMNCDNQTTCEKTIEVCQEIKKLRSYNVGLHPNSEKPGRSLHEGTITKCDKQCIEGDGFETHSILERTHLCELDCWSQSMKILGESSRKLTKDLGV

SEQ ID NO: 19983 - protein, 702 aa, Oryza sativa
  Clone ID: TF_OSC9742j.C1.p1.fg
MAGFADALRPDKFTGVHFKRWQIRVTLWLIAMKCFWVSTGKPEGVLTAEQQKQFEEATTLFVGCILSVLGDRLVQVYMHMTDAKELWDALNTKFGATDASNDLYIMEQFHDYKMANNRSVVEQAHEIQTMAKELELLKCVLPDKFVAGCIIAKLAPSWRSFGTALKHKRQEYSVEGLIASLDVEEKAREKDAASKGDGGQSSANVVHKAQNKSKGKYKAQQTTNFKKQKKNNNNPNQDERTCFVCGQVGHLARKCPQRKGMKAPAGQTSKSANVTIGNTGDGSGYGNLPTVFSVNQSTNWWVDTGANVHVCADISLFSSYQVARGSTVLMGNGSHASVHGVGTVDLKFTSGKIVQLKNVQHVPSIDRNLVSGSRLTRDGFKLVFESNKVVVSKHGYFIGKGYECGGLFRFSLSNFCNKSVNHICGSVDDEANVWHSRLCHINFGLMSRLSSMCLIPKFSIVKGFKCHSCVQSKQSRKPHKAAEERNLAPLELLHSDLCEINGVLTKGGKRYFMTLIDDATRFCYVYLLKTKDEALDYFKIYKAEVENQLDRKIKRLRSDRGGEFFSNEFDLFCEEHGIIHERTPPYSPESNGIAERKNRTLTDLVNAMLDTAGLPKAWWGEALLTSNHVLNRVPNRNKDKTPYEIWIGRKPSLSYLRTWGCLAKVNVPITKKRKLGPKTVDCVFLGYAHHSIAYRFLIVKSE

SEQ ID NO: 19984 - protein, 1502 aa, Oryza sativa
  Clone ID: TF_OSC400737j.C1.p9.fg
MAQLSATLKVRRATNNATSPRSWPAGYTFADVLTAAACAPEGKPRGVLTAAACAPGGKPRGGNRAEGVSFDQIKGKAPLEAFGEVASSSATANSSALPATSHCHEGPSPQFPREKLDACSFNIHADFGAIQETRGGCYGDKLEDLFPRVSRGFREWVWVRKGSLSPQLGFPARSEEIRRFGDSARRIWRVLERRCDHRTFAQVVMKRRPPPGRPDWQANKRKAMESGDGGGDWGRQAGGDWGKQAGGSWAHREEEELRKQLLAKGNQVVGDPRRPGRPGQERRDWGDRGAGGSKPAMKCFKCGREGHHQASCTNPPLCYSCHSSGHISANFPMLQSKRGVKLCGFGIPGQGFYSLQVDVSDVEMAKHPASVVETGMTEDAIDELAVVWVKIFGVPKLARSEEHIKAIVELVGEFEMIDLSTLRRDGPVRERLACKDPRELHFAIHVYINKVGYMIRWEPEGYPPYDNSQFPPDDGDDKDKKGNGDNDDMNVDEDQNTQSPARGRSAHDRRSFMGGSRGDVQSAPPAYKGKKALEETCLSETQQCPTKRAACKKQSLLVVEKESMVDQEGDSKAMIVWEGNTTQDVEYESQEIDFPVTQKSTEEGDNEDVLTGILEFEKCDIPSLFDIAIQREEEELDEEDSFQEVSYKKNRPKKSEPAITSRMSLRNRDMASVPIPKIAELLTQKKNLETGGNSNPFVVFQIIDPVELNSIAIAANISLGSNEEEIANTIETIKAKELVQAKLAEMRWKKEKEKEMTDVDSLLRNEKELPDNMGEEVDNLNTPSQEMNNMEISSESLELKKRGLGNIARKKQLKEAWKSSRGASGGILIGTNDELIEKLGTHAGAFFLSVEFRYKKDNSVWEVIVVYGPVLESLKPDFLNELRWVGSDHSPPILNIGEDIERPPKYFRFESAWLTMENFHELVRQHMIPRDGSYILDYSNKKQSFLRRFLKGWELNLRQEKNQQKAVILTQIQELDAQADIRDLSPDEWNKRYEMEADLEHIYEMEELFWHKRCGEMTLLQGDRNTEFFHRMANGRRRKCLILSLEDEGRELTSKEDLKSHIIEYYKSLFRADNLSTVHLSPQIWQSELCLNADQKEAITRPFSMEELDKVIREAKLNIAPGPDGLNIHFYRAFWPEIKNDLFEMLLMLYEGKLDLKRLNFGVISLIPKSSDPTNIRQFRPICVLNDCFKFLSKVVTNRLSEVAPFVISQTQTAFIPGRFILEGCIILHEVLHEFKLKNQQGIILKIDFEKAYDRVSWNFLFEVLERKGFPKIWIDWIKACVMWDKVCVNINGERSDFFRTYRGLRQGDPLSPLLFNLVSDALAAMLDSAKRDSILTGLVPGIFPGGITHLQYADDTVIFIPFDVRQIVATKFLLYCFEEMAGMKINYHKSEIFTVRLIDAENEEVAKMLNCPRGKFPMKYLGLPISPDKILNQEFNFLPHKMEKRLSLWNGGNLTYAGRAVHINACLSSIPSYAMGFYQLPEGIHHKFDSLRGKYYWAGNR

SEQ ID NO: 19985 - protein, 296 aa, Oryza sativa
  Clone ID: TF_OSC25199j.C1.p1.np
DNEKGNKVRSQDIGTSSSRVIEAPDTSCVTLVQHLINQNRLLIEILQQHQTPILNLSQIQPQVQLEAVQALTPQVSMPPASRRTHGDVPHVDSKEASIICFMCDEQGHYARECPQQKRKTPMRTEDEVRKMIITSTEWPPPGMTKRQRRNTFRGAPQLTEHLLANGGRVSDSEDSDQVSSDDEDEMERKACSRCGEIGHVASSCATTCVHCEEDHPPDRCPTSRINCFFCEGTDHVPKDFQFSFLLTKKMANQPASFNGKKHQGNTNPRQDYSFSLTPVPGQRNQNEKRKCRVRKD

SEQ ID NO: 19986 - protein, 488 aa, Oryza sativa
  Clone ID: TF_OSC400610j.C1.p25.fg
MDISRTNEGYTSCGPVVEMSWHRAGVLLLGAQSCLPVPEVPAVGGVGSVLLFMARMGWEICHVFRPYTVVMFNREKGKNVSGYASSNSSFQLNPPLASRELTRAHPWSIPSMLLSSQLPLVGSQDQNQYVFDRAFATQVNELPMPEEDVPFCHDCRERGHYALNCPWVYAKEAPSFGLAGQTSLNQPPRTKSSLQPSVQSREPNGENPLNPENCFPPSLSYHVGSRTKQAKGKKSKNQQRKAPMRTEEEVRKMTITSTEWPPAGITIPRHQRGNTFRGARQLTQHLLSHGGRVSDSEGSDQVSSDDEDESPRHVGEEEMESKACTRCGEIGHIASMCLTLCPYCEEDHPPGECPTRKVTCFLCEGTNHVPKDCQLSVLLTKTAEIQRTTLRLSHQLVSSNSNIDDIIHSTNAPPAAPDSAINHSNNTFSTNHSLHRQPQQRIVIDGRSCVSPRPTPGRAKGNQPQEGDTKQKTVICFKQQSEGSFSCE

SEQ ID NO: 19987 - protein, 401 aa, Oryza sativa
  Clone ID: TF_OSC401914j.C1.p17.fg
MSSRAAAPLLPSPPLAAAAKSLSFPSLRRFMVNTRASGSGNNNNEENPTLAQVLAQQTQLINMLVQQMQNQQGNNNVNPPPPQNKLADFLRVRPPTFSSTTNPVEVGDWLHAVEKKLELLQCTDQEKVVFASHQLQGSASEWWDHFRMNRAEGQPITWAEFTEAFKKTHIPAGVVALKKREFRALKQKDRTVTEYLHEFNRLARYAPEDVRTDEERQEKFLEGLKDELSVMLISHDYEDFQELVDKAIRLEDKKNRMDNRKRGRIVFQEAQDSSQRQRIKPLQIGESSSAGQEQSQQLNIGGEINSETNASNEDNDGQATQSVSFQQDQSQEDNSSGREQQVCFSCYKPGHFARECPKSQHQQPQGQINNIVVTGANAVPVASSRVVSSSVTTQPPVSKRQ

SEQ ID NO: 19988 - protein, 793 aa, Oryza sativa
  Clone ID: TF_OSC900010j.C1.p11.fg
MAKELELLKFVLPDKFVVGCIIAKLPPSWRGFGTALEHKRHEYSVKGLIASLDVEEKAREKDAASKGDGGQSSANVVHKAQNKSKGKYKAQQTTNFKKQKKNNNNPNQDERTCFVCGQPGHLARKCLQRKGMKAPAGQTSKSANVTIGNTGDGSGYGNLPTVFSVNQSTNWWVDTRANVHVCADILLFSSYQVARGFTVLMGNGSHASVHGVGTVDLKFTSGKIVQLKNVQHVPSIDRNLVSGSRLTRDGFKLVFESNKVVVSKHGYFIGKGYECGGLFRFSLFDFCNKSVNHICGSVDDEANVWHSRLCHINFGLMSRLSSMCLIPKFFIVKGSKCHSCVQSKQPRKPHKAAEERNLAPLELLHSDLCEMNGVLTKGGKRYFMTLIDDATRFCYVYLLKTKDEALDYFKIYKADVENQLDRKIKRLRSDRGGEFFSNKFDLFCEEHGIIHERTPPCSPESNGIAERKNRTLTDLVNAMLDTAGLPKAWRGEALLTSNHVLNRVPNINKDKTPYEIWIGRKPSLSYLRTWGCLAKVNVPITKKRKLGPKTVDCVFLGYAHHSIAYRFLIVKSEVPDMHVGTIMESRDATFFESFFPMKDTHSSSSQPFEVIPSSITLPEQTEHTHEHVTEEDVSEAPRRSKRQRTAKSFGDDFTVYLVDDTPKSISQAYASLDVNYWKEAIRSEMDSIIANGTWEVTERPYGCKSVGCKWVFKKKLRPDGTIEKYKARLVAKGYTQKEGEDFFDTYSPIARLTTIRVLLSLAASHGLLVHQMDVKTAFLNGELDEEIYMDQSH

SEQ ID NO: 19989 - protein, 840 aa, Oryza sativa
  Clone ID: TF_OSC900327j.C1.p13.fg
MTDTKELWDALNTKFGATDASNDLYIMEQFHDYKMVDNRSIVEQAHEIHTMAKELELLKCVLPDKFVAGCIIAKLPPSWRGFGTALKHKRQEYSVEGLIASLDVKEKAREKDAASKGDGGQSTANVVHKAQNKSKGKHKAQQTTNFKKQKKNNNNPNLDERTCFVCGQPGHLARKCLQRKGMKAPAGQTSKSANVSIGNTGDGSGYVARGSTVLMGNGSHASVHGVSMAEVENQLNRKIKRLRTDRGREFFSNEFDLFREEHGIIHKRTPPYSHESNGIAERKNRTLTDLGLPKAWWGEALLTSNHVLNRVPNRNKDKTPYEISIGRKPSLSYLRTWGCLAKVNVPITKKRKLGPKTVDRVFLGYAHHNIAYRFLIVKSEVPDMHVGTIMESRDATFFESFFPMKDTHSSSSRPSKIIYSSISPPEQTEHTHEHVTEEDDSEAPRRSKRQRTAKSFGDDFTVYLVDDTPMSILEAYASPDADYWKEAVRSEMDFIIANGTWEVTERLYGCKLVGCKWVFKKKLRPDGTIEKYKARLVVINEVKSFLSQNFDMKDLGVADVILNIKLIRGENGITLLQSHYVEKILNRFGYIDSKPSPTPYDPSLLLRKNKRIARNQLEYSQIIGSLMYLASATRLDISFAMSKLSRFASNPGDDHWRALERVMHYLKGTMELGLHYTGYPAVLEGYSDSNWISDVDEIKATSGYVFTLGGGPVSWRSCKQTILTRSTMESELTAPDTTTVEAEWLRDLLMNLPIVEKPVPTILMKCDNQTVIVKVNSSKDNMKSSRHVKRRLKSVRKLRNSRVITLDYIQTARNLADPFTKGLSRNVIDNASKEMGLRPM

SEQ ID NO: 19990 - protein, 581 aa, Oryza sativa
  Clone ID: TF_OSC22542j.C1.p4.gm
MAKELELLKCVLPDKFVAGCIIAKLPPSWRSFGTALKHKRQEYSVEGLIASLDVEEKARKKDDASKGDGGQSSANVVHKAQNKSKGKYKAQQTTNFKKQKKNNNNPNQDEMTCFVCGQPGHLARKCPQRKGMKAPAGQTSKSANMTIGNIGDGSGYGNLPTVARGSTVLMGNGSHASVHGVGTVDLKFTSGKIVQLKNVHHVPSIDRNLVSGSHYWKEAVRSEMDSIIANGTWEVTERPYGCKPVGYKWVFKKKLRPDASHGLLVHQMDVKTAFLNRELDEEIYMDQPDGFVVEGFAVNEADKCVYYRHGGGEGVILCLYVDDILIFGTNLEVINEVKSFLSQKFDMKDLGVADVILNIKLIRGENEITLLQSHYVEKILNRFGYIDSKPSPTPYVPSLLLRKNKRIARNQLEYSQIIGSLMYLASATRPDISFAVSKLSWFTSNPGDDHWRALERVMRYLKGTMELGLHYSGYPAVLEGYSDSNWISDVDEIKATSGYVFTLVGGAVSWRSCKQTILTRSTMEAELTALDTATVEAEWLRDLLMDLPIVEKPVPAILMNYDNQTEVEKLRSYNVGLHPNN

SEQ ID NO: 19991 - protein, 1157 aa, Oryza sativa
  Clone ID: TF_OSC33907j.C1.p1.fg
MAKELELLKCVLPDKFVAGCIIAKLPPSWRSFGTALKHKRQEYSVEGLIASLDVEEKARKKDDASKGDGGQSSANVVHKAQNKSKGKYKAQQTTNFKKQKKNNNNPNQDEMTCFVCGQPGHLARKCPQRKGMKAPAGQTSKSANMTIGNIGDGSGYGNLPTVFSVNQSTNWWVDTGANVHVCADISLFSSYQVARGSTVLMGNGSHASVHGVGTVDLKFTSGKIVQLKNVHHVPSIDRNLVSGSRLTRDGFKLVFESNKVVVSKHGYFIGKGYECGGLFRFSLSDFCNKSVNHICGSVDDEANVWHSRLCHINFGLMSRLSSMCLIPKFSIVKGSKCHSCVQSKQPCKPHKAAEERNLAPLELLHSDLCEMNGVLTKGGKRYFMTLIDDAIRFCYVYLLKTKDEALDYFKIYKAEVENQLDRKIKRLRSDRGGEFFSKEFDLFCEEYGIIHERTPPYSPESNGIAERKNCTLTDLVNAMLDTAGLPKAWWGEALLTSSHVLNRVPNRNKDKTPYEIWIGRKPSLSYLRTWGCLAKVNVPITKKRKLGPKTVDCVFLGYAHHSIAYRFSIVKSEVPDMHVGTIMESRDATFFESFFPMKDTHSSSSQPSEIIPSSITPPEQTEHTHEHVTEEDDSEAPRRSKRQRTAKSFGDDFTVYLVDDTPKSISEAYASPDADYWKEAVRSEMDSIIANGTWEVTERPYGCKPVGYKWVFKKKLRPDGTIEKYKARLVAKGYTQKEGEDFFDTYSPVARLTTIRVLLSLAASHGLLVHQMDVKTAFLNRELDEEIYMDQPDGFVVEGQEDKVCKLLKYLYGLKQAPKQWHEKFDRTLTSAGFAVNEADKCVYYRHGGGEGVILCLYVDDILIFGTNLEVINEVKSFLSQKFDMKDLGVADVILNIKLIRGENEITLLQSHYVEKILNRFGYIDSKPSPTPYVPSLLLRKNKRIARNQLEYSQIIGSLMYLASATRPDISFAVSKLSWFTSNPGDDHWRALERVMRYLKGTMELGLHYSGYPAVLEGYSDSNWISDVDEIKATSGYVFTLVGGAVSWRSCKQTILTRSTMEAELTALDTATVEAEWLRDLLMDLPIVEKPVPAILMNYDNQTVIVKVNSSKDNMKSSRHVKRRLKSVRKLRNSGVITLDYIQTTRNLADPFTKGLS

SEQ ID NO: 19992 - protein, 660 aa, Oryza sativa
  Clone ID: TF_OSC400773j.C1.p145.fg
MDEVGGRWTFSRANEGYTSCGPVVEMSWHRVGALLLGGSVPPACPGGSGRRGIGSVLLSMARMGWKLCHVFRLYTVVMFNREKGKNVSGYASSNSSFQLNPPLASRELTRAHPWSIPSMLLSPQLPLVGSQDQNQYVFDRAFATQVDELPIPEEDVPFCHDCREQGHYALNCPWVYAKEAPSLGLTVQTSLNQPLRTKSSLQPSVQSREPNEENPLNPGNCFPPSPSYHVGSRTKQAKGKKSKNQRRKAPMRTEEEVRKMTITSTEWPPPGMTKRQRRNTFRGAPQLTEHLLANGGRVSDSEDSDQVSSDDEDQKSPQGFNQNKMERKACSRCGEIGHVASSCATTCVHCEEDHPPDRCPMSRITCFFCQGTDHVPKDCQFSFLLTKRMASQPASSNGEQHQGNTNPRQDYSFSLTSVPGQRNQNEERKCRVREDICCFNCQGMGHFADKWPKPRNIAAGTSVHATPCNQKLAPQRIVIHASRSSPIAPVATAPTPASTLPQGVNAQFQPQPPVDKTAALYLWMFQHSSQKKNQVQDEEPEPIIPSAPTILCADSLSRELSSMEEVVSLPDLLQAEQRAINLRRAIPSRRPSSASNSNQTEASPVNDSIMQSYHIITEPIKDAVTRTMPAISLQSQNEQPCLWFSVRYLSLRNRKFAAIM

SEQ ID NO: 19993 - protein, 333 aa, Oryza sativa
  unsure (1)..(333): unsure at all Xaa locations
  Clone ID: TF_OSC25200j.C1.p1.np
MERKACSRCGEIGHVASSCATTCVHCEEDHPPDRCPTSRITCFFCEGTDHVPKDCQFSFLLTKKMANQPAGFNGEKHQGNTNPRQDYSFSLTPVPGQRNQNEKRKCRVREDICCFNCQGMGHFADKCPKPRNIAAGTSVHATPCNQKLAPQRMVIHASRSSPIARVATAPIPMSALPQGVNAQFQPQPPADKTDASICVVPLEAPIQQLRNQVQDEEPECTTILCNDSLSKELSXMEGVVSLPDLLQAEPRAINLRRAIPSRRPSSAATNNQKEASPVNDSIMQSYHIITEPIKDAVTRTMPAISLQNQNEQPCLWFSVRYLSWCNRKFAAIM

SEQ ID NO: 19994 - protein, 469 aa, Oryza sativa
  unsure (1)..(469): unsure at all Xaa locations
  Clone ID: TF_OSC29052j.C1.p1.np
IRDEFIRTXQEGPQQKRKTPMRTEDEVRKMIITSTEWPPPGMTKRQRRNTFRGAPQLTEHLLANGGRVSDSEDSDQVSSDDEDEKSPQGFNQNKMERKACSRCGEIGHVASSCATTCVHCEEDHPPDRCPTSRITCFFCEGTDHVPKDCQFSFLLTKKMANQPVSSNGEKHQGNTNPRQDYSFSLTPVPGQRKQNEKRKCRVREDICCFNCQGMGHFADKCPKPRNVAASTSVHANPRNQKLAPQRIVIHASRSSPIARVATAPIPMSALPQGVNAQFQPQPPADKTEASICVVPLEVPIQQLRNQVQDEEPEKKGITPKTVPNQGKKGITPKTVPNQGKIDLHITANLHEADIPIVLWSLEQTPYQRVKSSTRYQMLHGVKSASTGYQVDAKDMNDKKFXNRSPTQPPQPSLGQLEVQPDKSGEEKIPSATGDRAKRSRVEKFCYKLVIKTERKKSDKKRRPPNLSSC

SEQ ID NO: 19995 - protein, 1248 aa, Oryza sativa
  Clone ID: TF_OSC401985j.C1.p4.gm
MELTSEQEQLIHRNAQASNAILSALSPEEFNKVDGLEEAKEIWDTLQLAHEGSPAVREAKIELLEGRLGRFVMDDKETPQEMYDRMMILVNKIKGLGSEDMTNHFVVKRLLRAFGPRNPTLVSMIRERKDFKRLTPNDILGRIVSHEMQEEEAREVRQMVKNAPMIKNQEVALKANQEEESSCEESEDEEMAFIVKRFKHFLRKSGYGKGRKDDDKGKRQSKRACFNCGEYGHFIADCPRSNEAKAKGGKKKPKRAHVAEAHMAEVWYSGDEKYPEVKPKPKSKDKVEGKGGVATIAFKSSSSSKERLFNNLSDDDDDSYHYSCFMAQGRKVMTQKPSHTSLDVDSSDEESDNELDDVLKSLSKPTMQHLAKLMRALDSKEQSLERQEELLILEKKRNLDLEESLAKECAKNEQLANDLNLANGSLASLRDVNETLQEKFACLDKSHKDLEVQFDTLWNSTSQPNVVSNSSNPSTSNGCVRCYNIYLNSYATNIDAMQALKKENERLGTLVKYGCMKTYHSKDALYKTITAHPNKDGHGLGFSGGSPVSKRVMAYSSGGSCWVVDNGCTNHMTGERSMFTSLDKENGTRENIVFGDDGKGKLGYNCLFTDEDVTVFRRDDSSVAFKGKLKGDLYLVDFDVDRVNPEACLIAKSSMGWLWHRRLAHVGMRNLATLLKGEHILGLTNVTFEKDRVCSACQAGKQVGNPHSIKNIMTTTCPFELLHMDLFRPVAYISIGDNKYGFVIVDDFSRFTWVYVLHDKSEAQDVFKRFAKQAQNLYDLTIKRVRSDNGGEFKNTQVEEFLDEQAQEGTFISQTKYVKDILKKFGMEDAKPIKTPMPTNGHLDLDDNGKCVDQKVGNAFVHQYYNILHQSPDLVHRFYQDGSRIGRPASPAAAEMDTVTTMEAINAKIVSMDIVRAEIKAVDAQESLGGGVTVLVTGHLTGSDDVRREFSQSFFLAPQEKGYFVLNDILRYVGGEGDQEVEPEPELELSFPPSQQPDSVPAPSANGTSVPREQEAFSQPEQHVADPAPNAQEADLNGEEVYNPPNNTEGPVVEETPIPEVIDEVPNNVAVAMPTPPAPAPAPVPQEEAPKKSPAPPKQEKQVAPAPVAPVADAPTFSPNPESSNIQEAEEFEDPSSVQSAIAGSPVTISDRQCYVEEKRTAGSRGGGRGRFAPGRGGNFRGEGMRGRGNYTGGRGYGRGEFNYRSDYGGRGAGRGGSSRGGDVGYQRVDHSAGRAARAPSGTSAVAK

SEQ ID NO: 19996 - protein, 1455 aa, Oryza sativa
  Clone ID: TF_OSC101306j.C1.p6.fg
MSLHSIRSPSLSSHASSTSSGRGSRRSAADAEGDGDATAAARVAQEAQAAAREARAACEEAEARLQAATRAARLAAAEAEAARTAEAARQAAAAAAVLRAEEEEEWRDLERADAARVRRDADRDRHAGRRDRDFSPHRGGADLHRGEEERRDPWRDPRIDRALEAQRLREQAAAIEAQLDFDREQGGRDVGARSPRRQRASPSPDRRRGRRGPSGSPPVVQTVVKDVGGAWPMLTKTNYVEWAMVMKVKLQARHMWDAVWYGDVDYGEDWRALEALLAAVPTEMQSSIVNKRIAKDAWDAIASARIGSDRARRSTLQKLRQDWENLAFKPGEDIDDFVLRFNSLQQRLAQLVDTTIDKERAVEKLLRVVPEKYTQLALSIETLLDFTELTIEEVTGRLKAVDNRKQLPPSEPITIGGKLFFTKEQWLARQQEQKKGEATGSSASGSSSSRKRRPRKWEKARSGTLGGADGERKGSRDNTCHNCGKTGHWAKDCRQATHGGQAHVAQALEGDEVALFFVHRSIEPHFTPAQDATTPLQLDEPRAHVFLSNGSCGDKIDGWCLDTGATHHMTGRREFFSELDSSVQGSVKFRDASAVEIKGVGSILFTAKTGEHRLLTGVYYIPALRNSTISLGQLDENGSRVEIEDGVLRVWDRHRRLLVKRFGHLNFEALKQLGNKEMVQGMPRVEHVEQFCNTCILTKQRRLPFPRQASFRAKEKLELVHGDLCGPVTPATPGGRRFFLLLVDDVSCYMWVVLLDSKAAAADTIKRHQVAAEKECGRKLRVLRTDNGIQRHFSVPYTPQQNSVVERRNQTVVATARALLKQRGMPAIYWGEAVMTAVHLLNRSPTKALDGKTPYEAWHGRKPVVSHLRIFGCLAFAKELNHIGKLDDRSSPGVFIGYAEGVKAYRILDPATQRVRISRDVVFDEGRGWAWDKAVDDGSTSTLRDFVVDYVHFGGARGASSSSSPSSSTSAPGSPSAPASPPPPTPPATPPSPATPRSPTPAPTPPVEFATPLSNDEDRVDAYHDDEPLRYRTVDSIFSDQPVLGLVTRDFEAELHLAHEDGEPCSFAEANGDVAWRTAMQHEMNAVERNRTWPPGFVIPGKENKVLRLRKALYGLRQAPRAWNAKLDSTLKQLGFQQSSHEAIVYRRGKDNNALLVGVYVNDLVITGTKEAEVEAFKEEMKATFQMSDLGLLSFYLGIEVHQDSSDISLRQTAYAKRIVELGGLTGCNPAYTPMEERLKLSRDNTAEEVDATQYRRIVGSLRYLVHTRPDLAFAVGYVSRFMQRPTTEHQQAVKRILRYVEGTTDYGLHYPRCPASSRSSNKWWQSVKQQVVALSSCEAEYITTTTASTQALWLARLLGDLLGRDAEAVELRVDSKSALAMAKNPVFHERSKHIRIKYHFIRSCLEEGSIKASYINTQDQLADLLTKSLGRVKFQEFRARIGMVQIPQKAPHKT

SEQ ID NO: 19997 - protein, 535 aa, Oryza sativa
  Clone ID: TF_OSC1821j.C1.p3.fg
MDNTGNKGYGNDGSDDSRTQANGNEKSINETSPELIQIVVNQTNMLATAFQLLQNRNNPAGATNVQVPTVQQQCKLSEFLKTGPPTFAMAVDPMEASDWLRTVEKKLGLIQCTDQERVGFATHQLVGPASEWWDSYEASRPEGHTITWNEFSSVFKRSHVPAGMITLRKREFRYLKQGDLTVTEYLHEFYRLAQYAPEDVETDEDKQEKFLQGLKDELAVQLLLEDYEDFEKLVDKAMQLESEHNRMTNCKRRMVNNPVFPGGNQRQRTEPLQITGSSVVYQEFLPQEDERNAGNNNSNTNADDTTNNHGSCPIHDHLDQACNVNIIHQDIDDSINEGTQNDNPSNFDSGKDSNGDSNNGTTDANVSKDSQPPIPTPSQNDRPQMDSSVKKTLICYNCKGPGHFSRDCPQPKRNLRHHSGHYARRRQVTRLVVTGANAVPVRPHVNSNPYGNLSEVDSEDMKHEKFWNGSITELPQPSLSQPKGAPWSKSGEEKIPSATGGQAKQFRVVKFCWKFVKTQRKKSDKKRRPPNLSSC

SEQ ID NO: 19998 - protein, 753 aa, Oryza sativa
  unsure (1)..(753): unsure at all Xaa locations
  Clone ID: TF_OSC23989j.C1.p1.np
LRSCGTLHHFLAPPPPRIPPLPSVPRAIKRGNIPRDSLPLSPHYSLPLSLGFVWKPSPNPAGAIDGARERHRFPFPPAALSPSQPYINTPRASLHRFRHSPLSLSARIELAPSLSLSAVTAELRSAAVVAPDLLPPRRRLLQLRRILADLVHPSISVADRRNAVDPVDPSRAAAFLRSGRRFRRRRRPGVSRGPPLHFPLPSPLSGAAPPRRWSPAATIGARARRSRRLCRRGRLRARPAAAMWGPAVSRPRPRVRLTRGTHGAGRRKPRAPGPPWTVRLPRGPLPWTRTNEGYTSCGPMADNEKGNKVRSQDIGTSSSLVNEAPDTSCVTLVQHLINQNRLLIEILQQHQTPILNLSQIQAQVQLEAVQSLTPQVSMPPASQKTHGGVPHVDSKEASIICFMCDEQGHYARNCPQQKRKTPMRTEDEVRKMIITSTEWPPPGMTKRQRRNTFRGAPQLTEHLLANGGRVSDSEDSDQVSPDDEDEMERKACSRCGEIGHVASSCATTCVHDDEDEMERKACSRCGEIGHVASSCATTCVHCEEDHPPDRCQTSRITCFFCEGTDHVPKDCQFSFLLTKKMANQPASSNGEKHQGNTNPRQDYSFSLTPVPGQRNQNEKRKCRVREDICCFNCQGRGHFADKCPKPRNIAASTSVQATPDNQKLAPQRIVIHASRSSPIVPVATAPTPASALPQGVNAQFQPQPPVDKIEASIGIVPLDVPAQQPRNQVQDEEPKPMGMRKASTKPRQSXSKL

SEQ ID NO: 19999 - protein, 1705 aa, Oryza sativa
  unsure (1)..(1705): unsure at all Xaa locations
  Clone ID: TF_OSC26838j.C1.p3.np
MSNEVNHVGKAPMFNGTNYTTWKIKMSTHLKAMSFHIWSIVDVGFAITGTPLTEIDHRNLXLNAQAMNALFNSLIQEXFDRVSNLETAYEIWNKLVEIHEGTSEYKDAKLHFLKIQYETFSMLPHEVNDMYGRLNVIVDDLKGLGANYTDLEVAQKMLRALPEKYETLVTMLINSDMSRMTPASLLGKINTNDMYKLKKKEMEETSPSKKCIARQAEVEDKGNGKVNEANENLEEEIALLARRFNDLLGRRKERGRGSNSNRRRNRRPNKTLSNLRCFECGEKGHFALKCPSKDDDGDKSSKKKSGGYKLMKKLKKXGKKIEAFIGEWDSNEESSASSGSEEEDGDDTSSKKKKMAVVAIKEAPSLFAPLCLMAKGSSKVTSLSDSESDDDCDDVSYDELVSMFEELYAYSEKEIVKFKALKKDHASLEVLYEELKTSHERLTISHEKLKEAQDNLISTTQHGALIDVGISCDLLGDSATCHIAHVASSSISTSCDDLVDMSSSSSTSCVSICDASLVVENNELKEQVAKLNKSLERCFKDKNTLDKILSEQRCILNKEGLGFIPKKGKKPSHCATRFVKSNGKYCSKCREVGHLVNDCPCGKPPKTCMFDSHYMLRKAHDGSIVARYVGSPILGGKKNAIWVPKALVSNLQGPKQVWIILAILVFFLHDKSIVAELFKKFAKRAQNEFSCTLVKIRSDNGSEFKNTNIEDYCDDLGIKHELSATYSPQQNGVVERKNRILIEMARTMLDEYSVSDSFWAEAINTACHTTNRLYLHRLLKKTSYELIVGRKPNVAYFXVFGCKCYIYRKGVRLTKFENRCDEGFLLGYASNSKAYQVYNKNKGDEGLMRAMKDEGLMRAMKNMSIGDVKPIEVEDKPSTSTQDKSSTSATPSQAQVEVEEEKAQDPPIPPRIHTALSKDHPIDQVLGDISKGVQTRSRVASICEHYSFVSCLEPKHVDEALCDLDWMNAMHEELNNFARNKVWTLVERPRDHNVIGTKWVFRNKQDENGLVVRNKARLVAQGFTQVEGLDFGETFAPVARLKAILILLAFASCFDIKLFQMDVKSAFLNGEIAELVFVEQPPSFXDPKNPNHVYKLSKALYGLKQAPRAWYERLRDFLLSKDFKIGKVDTTLFTKIIGDDFFVCQIYVDDIIFGSTNEVFCKEFGDMMSREFDMSMIGELSFFLGLQIKQLQDGTFVSQTKYIKDLLKRFGLEDAKPIKTHMATNGHLDLDEGGKPVDLKLYRSMIVSLLYLTASRPDIMFSVCMCARFQAAPKECHLVAYPKGYPKGAKFKLVGYSDSDYAGCKVDRKSTSCSFQMLVMPPRTRHGRRAPTPDPVSEPEESSGEDYAQRDEEVEANVEGASEEESGDDDSGSGEYEDEESDDMHIDPSIQFVVNMRNPSQYTILRHHDQFLRPRDTPDPRFHTAFQKSVYEQVYAGKAFAEHKWISWRDINETLEFEGLQDLFRTVGIDRIMTLKQDYNEDLIRQFYATVWVAGDYSEMKWMSDTLXCSISRRQFRRLLNIRLDFGDDLHEEHTHNPLSIDYLSQFYEDGARYTYGKVAGLRTIPSVVNKIVRATILPRLGNNDDIRGVAWHVIDAIIQGRQFDIVTLMLQEIAISKGTFTQGIYYAPYIMRLPPPSRLVEKLPGDLSEKIVEEARCRFVSGLEFTIFGVKEELPVIEAWVVLSVGRLSPCPPLDEGGVRWLRG

SEQ ID NO: 20000 - protein, 344 aa, Oryza sativa
  Clone ID: TF_OSC400501j.C1.p2.fg
MVNTRASGSGNNNNEGNPTLAQVLAQQTQLMNMMIQQMQNQLNQGNNNAPPTQNKLADFLRVRPPTFSSTTNPVEAGDWLHAVEKKLELLQCTDQEKVVFASHQLQGPASEWWDHFRMNRAEGQPINWEEFTEGFKKTHIPVGVVTLKKREFRALKQKDRTVAEYLHEFNRLARYAPEDVRTDEERQEKFLEGLKDELPVTLISHDYVDFQQLVDKEAQGSSQRQRIKPLQISEPFSAGQGQSQQLNIGGEIKSETNESNEVNIEQANQPVPVQQDQSQENNSSGREQQVCFNCYKAGHFARECPKPKHQQPQGQVYNIVVTGANAVPVVSSSVTTQPPVSKRQ

SEQ ID NO: 20001 - protein, 348 aa, Oryza sativa
  Clone ID: TF_OSC400817j.C1.p15.fg
MEFTTEQEKAIHLNAQAANAILSALSPEEFNKVDGLEEAMEIWDTLQLAHEGSPAVRESKIELLEGRVGRFVMDDKETPQEMYDRMMLLVNKIRGLGSEDMTNHFVKRLLRVFVPRNPILVSMIRERKDYKRLSPSDILGRIVSNEMLEEEARELKQMVKNAAMIKNQEIGLKANQEEDSSGGEESEDEEMALIVNRFKHFLRKSGYGKGRKEDDKGKRQSKRACFKCGEYGHFIADCPKTNEAKHKVVKKKPDRAHVAEAHMAEVWYSGDEGSPKAMEKGDGDGGVATVAIKSSSTKERLFNILSDDDNDSYHHSCFMDHGRKVMPIQKPSLDDDNTSDEDSDNELD

SEQ ID NO: 20002 - protein, 920 aa, Oryza sativa
  Clone ID: TF_OSC401828j.C1.p30.fg
MSAPTPRVSRSREPHQRRISRSPPHRRGRRRPGEDRELIPVQRVVKEVGGSANYPLLTKTNYGDWALMMKVMLQARGLWDAVEHGDADFQADRMAMEAILRAVPPEMLASLAVKPSAKEAWDAIKMMRVGVDRVCKSKAQMLQKQYDAMEFKDGETVEEFSLRLNGLVTNLATLGVHLEEGKVVEKFLNSVPDHLSQIALSIETLLDLDELTLEEVTGRLRNAEEKLPAKSSAAGGKLFLTEEQWTARWKEKQAAESSSGKAKSGGGNRRRRGGKKKAEAAAHDGDRAGGDTQEGREPNRDKCRNCGRTGHWAKDCRKPKRPAEAHQALADEDDDESALLMAHVVDAAPVSASSSSAPPASSPPSQPDKTIELVEPKVFAHLLTEKQTNGGVWHLDTGATNHMTGIREVFAELDLSMRGSVRFGDGSVVGIEGRGKIIFECRNQEHRALTGVYYIPKLNANLISLGQLDENGCDVRIYHGVCTIRDPAAQLLARVRRTRNRLYLIKLTIGQPVCLAAKAQECAWLWHARYGHLHFDALRRLASRDMVRGMPDIDHVKQLCDSCVISKQRRTPFPRRSMFRAEDRLELVHGDLCGPISPATPGGKTHFLLLVDDASRYMWITLLGRKSEAADAIKRFQARAEAESKQKLRILRTDNGGEFTSVEFATYCAEQGVSRHFSAPYSPQQNGVVERRNQTILGMARSLLKAKNMPARYWGEAVTTAVFLLNRAPTKSLANMTPYEAWHGKKPAVGYLRTFGCLAYVKDVRPHLPKLSDRSKPMVLIGYADGAKAYEVFDPVSGRVQVSRDVIFDEGAGWDWDAAGAAAVPGGGGCSDFTVEYLTTATSLSPSTSAPSSASSGASASRAVTPSSASTPATLASASTPATPTFVSPPPGIDENLDAEQDDCPLRYRSMGDLLGDARY

SEQ ID NO: 20003 - protein, 726 aa, Oryza sativa
  unsure (1)..(726): unsure at all Xaa locations
  Clone ID: TF_OSC401861j.C1.p3.np
MSHLEGDKELDENGDGSTSKGTSTPKGASISFDYNKLTIPSHNFVSVPSLRSPQFDGTYYAAWKHKMKLRHLISLHPSIWKVVCTCVDVPNEDMEFTTEQEKAIHLNAQAANAILSALSPEEFNKVDGLEEAMEIWDTLQLAHEGSPAVRESKIELLEGRVGRFVMDDKETPQEMYDRMMLLVNKIRGLGSEDMTNHFVKRLLRVFVPRNPILVSMIRERKDYKRLSPSDILGRIVSNEMLEEEARELKQMVKNAAMIKNQEIGLKANQEEMALIVNRFKHFLRKSGYGKMALIVNRFKHFLRKSGYGKGRKEDDKGKRQSKRACFKCGEYGHFIADCPKTNEAKHKVVKKKPDRAHVAEAHMAEVWYSGDEGSPKAMEKGDGDGGVATVAIKSSSTKERLFNILSDDDNDSYHHSCFMDHGRKVMPIQKPSLDDDNTSDEDSDNELDXMFKNFSKPAMKQLSKLMKALDSKERFLERQEDLLILEKKKNLALEEDLAKEGERIELLQYEISLLNDSMASLTSVNETLQEELVVLDKNHINLEVEIDTLRNSASSLNETPMTPMPSISVGCARCYNYDLSSYATNLEAMEALEKKNERLGTLVKYGCMKTYHSKDALYKTIATNPNKDGHELGFSDESPVSKRVVVNGKIFLMFVREGKAPQESEVTLPFVGQRPGASGQNVQNFLAPVRIIVLLAPGLAGPWPSAGPARAREGEGNGPAAHXGKN

SEQ ID NO: 20004 - protein, 324 aa, Oryza sativa
  Clone ID: TF_OSC900065j.C1.p2.fg
MVNTRASGSGNNNNEGNPTLAQVLAQQTQLMNMMIQQMQNQLNQGNNNAPPTQNKLADFLRVRPPTFSSTTNPVEAGDWLHAVEKKLELLQCTDQEKVVFASHQLQGPASEWWDHFRMNRAEGVVTLKKREFRALKQKDRTVAEYLHEFNRLARYAPEDVRTDEERQEKFLEGLKDELPVTLISHDYVDFQQLVDKEAQGSSQRQRIKPLQISEPFSAGQGQSQQLNIGGEIKSETNESNEVNIEQANQPVPVQQDQSQENNSSGREQQVCFNCYKAGHFARECPKPKHQQPQGQVYNIVVTGANAVPVVSSSVTTQPPVSKRQ

SEQ ID NO: 20005 - protein, 1546 aa, Oryza sativa
  Clone ID: TF_OSC401393j.C1.p1.fg
EHARQGRRPLPEHHEYDAEDESLGLCSDEGDHHRRPRHPPRRGPAFMDRVVDDIHRDNRNRRAARVPLDEGLDPEDYLQWEMRCDQIFNSHNYLEDKKARLASIEFTGYALSWWNQLQLKQGDLSVDAYYKEMELLMSHTGVTENDEATIARFLTGLNDDVKERVEISYYYDIQNMVHIAQRVEQQLTSRHTSRSCSFQRDGDGSAASKSMSFKLTTPSRDGSKPAASSVSKSKSKVESTATSSSKSRSVQCYTCGGRGHYMRDCPNQKKVLMTKEGYVSESILENSEGVQLDHTLTTGYRDIDDSSMDDGAEKNNGLSMLAYAVQRDGSNVDAKGQRCNIFQSECKIQEKLLLGRPWQFDRNATHEGRSNCYSWANGQAESSNKTLLKLVKKKIEEDPNKWHEVLSEALWAHRISKHGTTKVTPSELVYGQEAVLPVEALEEIEKEKKRVAKAYNKRVKAKLFQVGDLVRKTILPLGTRSREFGVAIVLVDLSKKLPTVCIAANCPTSFGMASWINSAWLLDVVCTKNFESPLDKLGFKEDAALVKRSWQPAPSSFNLRSILEKEKLTGTNFMDWTKQELRGLIPQSPCLRASLQKSLPPSFEPFIMNFNMNNLNKTLAELHEMQKTAEESIKKNSNHVMVMHKRKPNNKKSGQKRKLNYDGITSTSNSKTKVQKTGPAKDAECFFCKKTGHWKRNCKKYLEQLKQKQQDGKSSTSALCKNVISASCLQAEGYGFRSVDNGCSVYYNDIFYFHAPMMSGLYIVNLDGCSIYNINAKRQGPNDLNPTFIWHCRLGHINEKRMEKLHRDGLLHSLDFESFETCESCLLGKMTKAPFTGQSERTSELLVLVHTDVCGPMSSTARCGFGYFITFTDDFSRYGYVYLMRHKSESFEKFKEFQNELWGYALETAAFTLTRVPSKSVDKTPYEIWTGKRPSLSFLKIWGCEVYVKRLQSDKLTPKSNKCFFVGYPKETKGYYLYNREEGKVFVARHGVFLKKEFISRKDSGSIVRLEEIQETPENASTSTQPQQAEQDVVQQVEQVVVEPVVEAPASRRSERIRRTPARYALLTIGQRDILLLDNDEPTTYEEAMVGPDSEKWPGAMKSEIESMHVNQVWNLVDPPDGVKAIECKWVFKKKTYVDGNVHIYKARLVAKGFRQIQGVDYDETFSPVAMLKSIQIVLAIAAYFDYEIWQMDVKTAFLNGNLDEDKSIYGLKQASRSWNIRFDEVVKALGFVKNEEEPCVYKKISGSALVFLILYVDDILLIGNDIPMLESVKTSLKNSFSMKDLGEAAYIMGIRIYRDRSKRLIGLSQSTYIDKVLKRFNMQDSKKGFLPMSHGINHGKNQCPQTTDERNKMSVIPYAWAIGSIMYAMLCTRIDVSYALSATSRYQSDPGESHWIAVKNILKYLRRTKDMFLVYGGQEELVVNGYIDASFQTDKDDFRLQSGFVFCLNGRAVSWKSVMTSASSPMNLYCDNSGAIVQAKEHRSHQKSKHILRRYHLIHEIVGRGDVKICKIHTDLNVADLLTKPLPQPKHEAHTRAMGIRYVHD

SEQ ID NO: 20006 - protein, 486 aa, Oryza sativa
  Clone ID: TF_OSC18140j.C1.p1.fg
MADNEKGNKVRSQDIGTSSSRVNEAPDTSCVAVVQHLINQNKLLIEILQQHRMPILNPSQMQPQVQLEAVQALTPQVSAPPTSQKAPHAMPHVDPKEASIICFMCDEQGHYARNCPQQKRKAPMRIEDEVRKMIITSTEWPPPGMTKHQRRNSFRGAQQLTEHLLANGGRVSDSEDSDQVSSDDEDEKSPQGFNQNKMERKACSRCGEIGHVASSCATTCFHCEEDRPPGECPMSRITCFFCEGTDHVPKDCQFSFLLTKKMANQPTSSNGEKHQGNTNPRQDYRFSLTPVPGQRNRNEKRKCRVREDICCFNCQGMGHFADKCPKPRNIAASTSVHATPCNQKLAPQRIVIHASQSSPIARVATAPTPASALPQGVNAQFQPQPSVDKTEASIGIVPLDVPAQQPRNQVQDEEPKQKHEIMNELDKFIEGSMLGLQVLSGTEAPSSSAATQSKSAKGSTRDKSGEEKIPFATGDRAKQFGVEKLS

SEQ ID NO: 20007 - protein, 713 aa, Oryza sativa
  Clone ID: TF_OSC7923j.C1.p2.np
LAPPPPRIPPLPSTPRAIKRGINPRVPLPRFPLFPLSLSLGFVRIKPVIIAGAINGGRNLRGRFPSSPAAFSPFRRYKNVARAPLFRFRRSPLTLAVEIVLAPCSSLSAIAAELRSAAAAAPLPPTRRPLRPLRRDAVDPVRRSASPVDRRSTVVIVIPSRAAVFLRSVRRFHRLRRLGVSRGPPVRFPLPSSLLGAAPPRRWSPAATIGARARSSRRPRRRGRPRARPRGCQVGPAVSRPRPRVRLTRGTHGADRRQPRAPGPPWTERLTRGPHFPWTRANEGYTSCGPMADNEKGNKVRSQDIGTSSSRVNEAPDTSCVAVVQHLINQNKLLIEILQQHRMPILNPSRMQPQVQLEAVQALTPQVSAPPTSQKAPHAMPHVDPKEASIICFMCDEQGHYARNCPQQKRKAPMRTEDEVRKMIITSTEWPPPGMTRRQRRNTFRGAPQLTEHLLANGGRVSDSEDSDQVSSDDEDEMERKACSRCGEIGHVASSCATICVHCEEDHPPDRCPTSRITCFFCEGTDHVPKDCQFSFLLTKKMANQPASSNGEKHQGNTNPRQDYSSSLTPVPGQRNRNEKRKCRVREDICCFNCQGMGHFADKCPKPRNIAAGTTVHATPCNQKLAPQRIVIHASRSSPIARVATAPIPMNALPQGVNAQFQPQQRIVVDGRSCVSPRPTPGRAKGNQPPEGDTQQKTVIRFNQQSEGSFSCE

SEQ ID NO: 20008 - protein, 467 aa, Oryza sativa
  Clone ID: TF_OSC400948j.C1.p2.fg
MADNEKGNKVRSQDIGTSSSRVNEAPDTSRVTLVQHLINQNRLLIEILQQHQTPMLNLNQIQPQVQLEAVQALTPQVSMPPASRRTHDDVPPVDPKEASNICFTCDEQVHYARERPQQKRKTPMRTEDEVRKMIITSTEWPPPGMTRRQRRNTFRGAPQLTEHLLANGGRVSDSEDSDQVSSDDEDEMERKACSRCGEIGHVASSCATICVHCEEDHPPDRCPTSRITCFFCEGTDHVPKDCQFSFLLTKKMANQPASSNGEKHQGNTNPRQDYSFSLTPVPGQRNRNEKRKCRVREDICCFNCQGMGHFADKCPKPRNIAAGTSVHATPCNQKLAPQRIVIHASRSSPIARVATAPIPMNALPQGVNAQFQPQPPADKTEASICVVPLEIPIQQLRNQVQDEEPECKKVIVCYNCSEEGHYSENCPQPRQNRPPHYRQFTRSRHSNRIVVTGANAVPVRPRDNQNP

SEQ ID NO: 20009 - protein, 180 aa, Oryza sativa
  unsure (1)..(180): unsure at all Xaa locations
  Clone ID: TF_OSC1772j.C1.p2.np
MARLYVGNLDPRVTSGELEDEFRVFGVLRSVWVARKPPGFAFIDFDDKRDAEDALRDLDGKNGWRVELSRNSSSRGGRDRHGGSEMKCYECGETGHFARECRLRMGSGKRRSRSRSRSRSPQYRKSPTYGRRSYSPRDRSPRRRSVSPVRGRSYSRSPRGRGGSPYADGXGIFCXFYNSR

SEQ ID NO: 20010 - protein, 1113 aa, Oryza sativa
  Clone ID: TF_OSC19101j.C1.p1.fg
MSPFSGASLARSLSPDTHPRHHRLRPSPNPPLLPLPPDPPASLASPTLEFFPPVGPSRQPPTLPSLGVPASDPAFVSRRYRVPGTGCPFRSAVSSPDLQNPMLDSSSAPNPRLSSRCQGSPKGELPGFKRLYSDVVTAPPQPPAAKSSDFIAVQPPSRFSGAVAKDIRILQSGRLLDLSTQNLSASAQGTGDIQVGENPWKEVKGKRRWRNHSAFTTPNNLEQMHSRKARFLQHMEGKCFRCLSTKHKIVDCREPFRCWRCLKFGHLASSCSKKFAYKSTLPPLKTHTEAFPALAPLCFPPRSFPSPPKSPIMDDLTARPLLDSVVISATGEIERNRERFSAHSLVAWQVGAQEGRVELNTFADDVPSAFNIRRADIQFTKFHPEDFFITCSNQAAKVIGRKCSIHYVEEYSRRRNYNRTFDLWIWTDEPRAIPRGGTFAITSADEEGLATDIPLPDLEPLRNPPPSEPKKGWTYNVLVHVDTLEDLLSRKARAYKWDYDVQDDGTLYKEYPLPCRAEPDPTRGPADDDEDKDRDNHSRSRHRSRSLWDRLRRRSSSRSREPDRRDGHCQDNENRGRPRNRERSEHRSRSCRSRDPSEGSEEVLTLLESHLDPMLHEATVQHSIYSPDTSSPRAVSPVFVPSFAVQGTSQEELAATQASPVQEFIAALSTPVQPPLLPAPETQARRPGRAKVTIPALSSAQRHSERLLRKRRAGAKLESFAQEILSKNFGIMDERSSFDHNIKKIYLQRYKKPLSPASLKTIAELVEKGGCKSIRLKASKKATVAPLGLNSKAKQDSVRCILQQHGATIVCLQETKLSSISDRIILNTLGQRFLRHCVSLPATGTRGGVLLACDENYFSISDVLLGTYSVSAVLTMRGEGLQWSITVVYRPQLEPDKINFLSELEALQTSMKSAWLIIGDFNLIYKASDKNNDRHNRRMMQRFRGLIDKLQVKELYLPGRRFSWAGEGINPTQTKIDRAFVTTDWDMMFDCSNLYPLSSACSDHAPLLLVGNEKMNRFPSFRFEAFWLKIPGFLDIVTDSWTNPILSTNRLAIIRLKLRRLAQDLKRWSRNHVGDIKLQLAVATEVIFQLEDWLMESGLYCQTLKIEFLLCQC

SEQ ID NO: 20011 - protein, 174 aa, Oryza sativa
  Clone ID: TF_OSC900378j.C1.p23.fg
MARLYVGNLDPRVTSGELEDEFRVFGVLRSVWVARKPPGFAFIDFDDKRDAEDALRDLDGKNGWRVELSRNSSSRGGRDRHGGSEMKCYECGETGHFARECRLRIGPGGLGSGKRRSRSRSRSRSPQYRKSPTYGRRSYSPRDRSPRRRSVSPVRGRSYSRSPRGRGGSPYADG

SEQ ID NO: 20012 - protein, 246 aa, Oryza sativa
  Clone ID: TF_OSC401508j.C1.p1.fg
MDQSTSKNKNSSNLQDPQNMGINQPMLLFEDPPQASRNKGRVQASLKPEDYTINLNHLKQYSSNERCHLTPAKRRINATCYRCGEEGHCALDCPKKKLGNGQVRNIPRHPKRKMRAGIPPKPMPHSLYPKPMYQQFRRQGTTPHWWKGKRERKASSLITYAELDISKMGIEIGDLPEEVEELQLWQRKRDGCCFSCGQFGHYAIGCTQDTNEEQETLPSQISPEEHRVLDPSKEIRRLRHVVVAER

SEQ ID NO: 20013 - protein, 269 aa, Oryza sativa
  Clone ID: TF_OSC15242j.C1.p1.np
MKTWTNRHRKKNKNSSNLQDPQNVGINQPMLPFEDPPQASRNKGRVQASLKPEDYTINLNHLNQYPANGSCHLTTARRKTNVTSFGCGEKGHYANKCPQRRLRVGPRRNLPWHPICNIRPGILPTPMPCSGNPKLPYQPFPRQRTTQHWWKGEQKRKASSLITYAELDLSKMGIEIGNLPEEVEELQLWQRKRDGCCFSCGQFGHYAIGCTQDTNEEQETLPSQINPEEDRVPDPSKEVSKIKACSRCGEIGHYGSNCVTQCPYCDEDH

SEQ ID NO: 20014 - protein, 1310 aa, Oryza sativa
  Clone ID: TF_OSC402160j.C1.p18.fg
MVDGAELEHLSTDRISAEYVTALRRGWTERHNVSADRIGAVFQDLSAIGSGAEVLHPLAEPRPAARPFFLPPQWLSAEAQRRRTISLLPSKKSKKSPLNRRILEGKLLEDIVARDDSFDLNRTLFYDEPNYEAFDDEGAMKSQSVKSLTVEEVIESQGMGVDVNMQKKKAVDANEGRNQESDRVEINVELQKEEAVEANKARRLESEGVEVNVELQKEEATEVNEARSQVVPIVGNHVDDDNEVADGSMGGGGEERTTDAQLASLVRFCFRDKIYTRRECEETLLMNGLSVDLLHQHSKEYDDTHEEEGYEVEYAVDSDDDHLVAKMSQEEREVFEKLVGRNPEVVQFEDVSDYELAVVDGGVTYNGIIDAMGEEPKNGLEFKSLELLQIWLQSYSISVHRPFHVKHSNASKKYTVACIEESCEWQVRARKTKDGRWRVTGVGKEHTCCSAEASGNHLQLTSKFIGNRLQPFVRAEPTLTHVAIVEAVEAIWHYRPSYGKAWRAKQVAMKNIWGDWDEAYVRLPTLLNAIKAKNPTMHYVVEPHPERSRPVDGVMRRVFGRAAWIFRPAWTLAGIATDPEDVEEMNEYDTHTRARATVKYGPIRDRVTRELMRSVNDVGVALGTPAGSENEVGILRSALQRLKQRSRMLAARLGCRSTDAVDPQPRLMWTQAGETSQQRAEEEGEEEYDEGEEEDGQSDEEEEEQPEEIGSSQLAGAPQPSQPSQGRPQRKRAPVDRYTPSTSGRRAHPATQHPSGGNLSAKSASTEMADLSARFFGAEMRLRIPRVAISAPNQMALRWPTSVPDFPQCELVELSMAKQSLVLTLIMLAPQVDKETRADVIKAGRGAGKRDPHGSDSGRAVHGGSGPRTGEERRTTRRPRDGRTDGPDLPKGRSDGGGSSRPMFNREKGKNVSGYASSNSSFQLNPPLASRELTRAHPWSIPSMLLGSQLPLVGSQDQNQYVFDRTFATQVNELPMPEEDVPFCHDCREQGHYALNCPWVYVKEAPSFGLAGQTSLNQPPHTKSSLQPSVQSREPNGENPWNPGKCFPPSLSYHVGSRTKQAKVKKSKNQKRKAPMRTEEEVRKMTITSTEWPPAGITIPRRQRGNTFRGARQLTQHLLSHGGRVSDSEGSDQVSSDDEDESPRHVGEEEMESKACTRCGEIGHIASMCLTLCPHCEEDHPPGECPTRKVTCFLCEGTNHVPKDCQLSVLLTKTAEIQRTTLRLSHQLVSSNSNIDDIIHNTNAPPAAPDSAINHSNNTFSTNHSLHRQPQQRIVVDGRSCVSPRPTLGRAKGNQPQEGDTKQKTIIRFN

SEQ ID NO: 20015 - protein, 469 aa, Oryza sativa
  Clone ID: TF_OSC419186j.C1.p1.np
MSWHRAGVLLLGSILPTCPGGSGRRGVGSVLLFMARMGWELCHVFRPYTVVMFNREKGKNVSGYTSSNSSFQLNPPLASRELTRAHPWSIPSMLLSSQLPLVRSQDQNQYVFDRAFAPQVNELPMPEEDVPFCHDCREQGHYALNCPWVYAKEAPSFGLAVQTSLNQPPHTKSSLQPSVQSREPNGENPLNPGKCFPPSLSYHVGSRTKQAKGKKSKNQKRKAPMRTEEEVRKMTITSTEWPPAGITIPRRQRGNTFRGARQLTQHLLSHGGRVSDSEGSDQVSSDDEDESPRHLDEEEMESKACTRCGEIGHIASMCLTLCPYCEEDHPPGECPTRKVTCFLCEGTNHVPKDCQLSVLLTKTAEIQRTTLRLSHQLVSSNSNIDDIIHSTNAPPAAPDSAINHSNNTFSTNHSLHRQPQQRIVVDGRSCVSPRPTPGRAKGNQPQEGDTKQKTVIRFNQQSEGSFSCE

SEQ ID NO: 20016 - protein, 1858 aa, Oryza sativa
  Clone ID: TF_OSC400902j.C1.p24.fg
MANKTLREFAAPSADNVAIGPQVNIGDVDFDLKSSLITIAQANPFCGEPNEGSNADLQQFLEICSTYNIKGVNPDTVRLRLFPFSLLGRAKQWFYVMRTSTPTIHPHFHNYNFMLLVHLVLAGSRLLAGTNTLVVGLIVHPSRFTTTSGVGVTIAKAQHPRIVVVGSPTSLHPIDLSLSSKDRDTLEHIRWYQSPSCSFFFDSLHSPPIAPPVRLTLDRDSATKASIHLLQRFVQVRRLPSPPVWHDENWLVRDRTQGLEEDVCITNEKLGHVERTQIDSNTKLTTLEASVATVNTSLDGIVWRLDEMARASHHGSEMDDHDYVGDSEDDADQRRHRFNRRGVAHRRPRREVRNNDDSFGKIKFTIPAFDGKYDPDAYLSWELVVDQKFACHDVPEDKRVRAATSEFTDFASVWWCEYRRTHINALPPTWDDLKQIMRARFVPSYYARDMLNKLQQLKHGGTSVEEYYQALQMGRTPWTARSGAAPTDRSSVSTSTSAPSNSNSNKAWPTPSTARSRASEVAEKPTKSASSVASTGRTRDVQCHRCKGFRHMQRDCPSKHVLVVKADGEYSSASDFDEDTLTLLVANNIASEDEKHIGADVADQYESLIVQRVLSAQMGKAEQNQRHNLFQTKCVVHKRSCCTIIDGASCRNLVSTEMVTKLALQMKPHPHPYYIQWFNNSGRIKVTQLVRLNFAIGSYCDFVDCDVVPMHACSLLLGRPWQYDKDTLHHGRTNQYSFMHNGKKIVLHPLTPEAVFENNVARAEKEKNVEHAKSENQIVAKEQVHHNLKGSQSNRRKDSVIKLNGPCLLTTKSDIVNLDTSDIVCYAFICKDALFSFENIPLSFPPAVTNLLQEYEDVFPKDVPPGLPPVRGIEHQNDLIPGASLPNRAPYQTNPEETKEIQRQVQDLLDKGNGIEVDQAKVEAIQSWPIPKTISQEAHGGGLMGHFGAKKMVDILAEVVRLHGVSNTIVSDRDTKFLSHFWRTLWAKLGTKLLFSTICHPQTDGQTEVVNRTLSTMVRAVLKKNIKMWEECLPHIEFAYNRSLHSTTKMCPFQIVYGLLPRAPIDLMPLPSSEKMNFDAKLLFSTTCHPQTDGQTELVNRTLSTMVRAVSKKNIKMWEECLPHIEFAYNRSLHSTTKMCPFQIVYGLLPRAPIDLMPLPSSEKMNFDAKQHAELMLKLHETTKENIERMNAKYKFAGDKGRRELNFEPGDLVWLHLRKERFPDLRKSKLTPRADGRFKVLAKINENAYKLDLLADYGVSLTINVADLKPYLGAEDELESRTIQMQEREDDEDINTNGTSTLPQVQLHGPITRDHARQLNYQEQWRLSNGERNRTGWIRTAAQHKLLTAATTSCELRFGRARTNTLVLGLIVHPSRFTTASRVRVTIVKAQHPWIVVVGSPMSLRPIDLSLSSKDRDILEHITMQTVLLSIPRTNALRHSSQNSSRWAKTNALRGRILSFQQTRDESIPEAWERLQELTPMSHDHLDAEAGGAFFSKTVQGAVDLIEKMVSNMGWSEERHQTRQRGMHTVKETELLAAKLDLLMKRLDDHEKWPQGTIKALDSHVTCEVCGGTGHSGNDCPETREEAIYMGNNNNGYRPQGGHGWNQPRPYYQGGNNNGNFSNQPSLRDLIFAQAKTTDALSRKLAANDKVLENINVKLDGFASAFQNQLSFNKMIETQLAQLASLVPANETGRIPGQPYSSIENVKAVMTRGGKSTRDPPYPNHAGTNGISKEVPSNDSADKEVPLEKTVPQEYCDTRLLLFPQRSRKPSVDEQFARFVEVIQKIHINVPLLDAMQVPTYAHYLNNILNNKRPLPTMEVVKPTEQCSNVILHKLPGKYDPQSDYPKISDSLMLDQTV

SEQ ID NO: 20017 - protein, 554 aa, Oryza sativa
  Clone ID: TF_OSC2463j.C1.p1.fg
MADNEKGNKVRSQDIGISSSRVNEAPDTSCVTLVQHLINQNQLLIEILQQHQTPILNLSQIQPQAQLEAVQALTPQVSMPPASRRTHGEVPHVDSKEASIICFMCDEQGLYARECPQQKRKTPMRTEDEVRKMSITSTEWPPPGMTKRQRRNTFRGAPQLTEHLLANGGRVSDSEDSDQVSSDDEDEKSPQGFNQNKMERKACSRCGEIGHVASSCATTCVHCEEDHPPDRCPTSRITCFFCEGTDHVPKDCQFSFLLTKKTANQPASSNGEKYQGNTNPHQDYSFSLTPVPGQRNQNEKRKCRVRKDICCFNCQGMGHFADKCPKPRNIAASTSVHATPCNQKLAPQRTVIHASRSSPTARVATAPTPASALPQDVTAQFQPQPSVDETEASIGIVPLDVPAQQPRNQVQDEEPEHKKVIRHAPVVEKLDTLLACVSHSALTMKKTIHQGSVPLASLSKELSSMEEVVSLPDLLQAEQRAINLRRAIPSRRPSSASNSNQKEASPMNDSNMQSYHIITEPIKDDAVTRTMPAISLQKQNEQLRLWFSVRYLSL

SEQ ID NO: 20018 - protein, 453 aa, Oryza sativa
  Clone ID: TF_OSC404799j.C1.p20.fg
MADNEKGNKVRSQDIGTSSSRVNEAPDTSCAAVVQHLINQNKLLIEILQQHRMPTLNPSQMQPQVQLEAVQALTPQVSAPPTSQKAPHAMPHVDSKEASIICFRCDEQGHYARNCPQQKRKAPMRTEDEVRKMIITSTEWPPPGMTKHQRRNSFRGAQQLTEHLLANGGRVSDSEDSDQVSSDDEGAKPPQGFNQNKIELKACSRCGEIGHVASSCASTCVHCEEDHPPDSFLLTKKMANQPASSNGEKHQGNTNPRQDSSFSLTPVPGQRNRNEKRKCRVREDICCFNCQGMGHFADKCPKPRNIAAGTSVHATPCNQKLAPQRIVIHASRSSPIARVATAPTPMSALPQGVNAQFQPQPPADKTEASICVVPLEVPIQQLRNQVQDEEPECKKVIVCYNCSEEGHYSKNCPQPRQNRPPHYRQFTRSRHSNRIVVTGANAVPVRPRVNQNP

SEQ ID NO: 20019 - protein, 602 aa, Oryza sativa
  Clone ID: TF_OSC401368j.C1.p29.gm
MSITGDNNNTGDKEKEPPVNSNRGNTTSNSSKWPFSGVLPDSIVDVYMHMPLGKDMWDALEAKFGVSDAGSDLYVMELFYDYKMVDGRSVLEQDHEIQMLAKELENNNCELSDKFVAGGIIAKLPPSWTDFATSLKHKRQEFSVTDLIGSLGVEEKARAKDNRGKKIEGGSSANLVQKKNPHASHNNNKKVKPDVKPKATTNFKKKGKRKAKGVCFVCGKPGHWAKNCPYRKDKKSANMVISEGGGTLGFLIVNSGVPDMSVGTITESRDATFFENEFSMKNAPSTSSQEPILSPEHFALIEHIDQTLEENPEEDNILATRKSKRQRTAKSFGDDYIVYLVDDTPRTIEEAYSSSDADYWKEAIRSEMDSIMSNGTWEVVERPYGCKPVGCKWVFKKKLRLDGTIEKYKARLVAKGTMSYGIHYAGYPKVLEGYSDSNWISDADEIKATSGGRLHSTGILDGSDETNLFETSSTEKDFNSGNGQPPFRAAVNPEADQPDTPADPTPSRPPSPGADVIKAGRGADMRAPPVHGPGRSGAPRGGRTDGPDLPKGRSDGGGSSRPVRVGTAQTGPATMARDGAAHMRQRRKTAADDDRPATESGG

SEQ ID NO: 20020 - protein, 1194 aa, Oryza sativa
  unsure (1)..(1194): unsure at all Xaa locations
  Clone ID: TF_OSC101037j.C1.p2.np
MRAQVSTRMPSFISSRSNMRHSPCCLMSVNDMYGRLNVIVNDLKGLGANYTDLEVAQKMLRALPEKYETLVTMLINSDKSRMTPASLLGKINTNDMYKLKKKEMEEASPSKKCIALQAEVEDKGKGKVNEANEDLEEEIALLARRFNDLLGRRKERGRGSNSNRRRNRRPNKTLSNLRCFECGEKGHFASKCPSKDDDGDKSSKKKSGGYKLMKKLKNSKKKKMAVVAIKEALSLFAPLCLMAKGSSKVTSLSDSESNDNCNDVSYDELVSMFEELHAYSEKKIVKFMALKKDHASLEVLYEELKTSHERLTISPEKLKEAHDNLLSTTQHEALIDVGISCDLLDDSATCHIAHVASSSISTSCDDLVDMSSSRSSSCVSICDVSLVVENNELKEQVAKLNKSLERCFKGKNTLDKILSEQWCILNKEGLGFIPKKGKKPSHCATRFVKSNGKYCSKCREVGHLVNDCPGGKPPKTCMFDSHYMLRKAHDGSIVARYVGSPILGGKKNAIWVPKALVSNLQGPKQVWVNYRTGGSHWVLDSGVNYRTGGSHWVLDSGCTQHDRAMFTTFEVGGNEQEKVTFGDNSKGKVIGLGFFLGYASNSKVYRVYNKNKGIVEETADVQFDETNGSQEGHENLDDVGDEGLMRAMKNMSIGDVKPIEVEDKPSTSTQDEPSTSAMPSQAXVEVEEEKAQDPPMPLRIHTALSKDHPIDQVLGDISKGVQTRSRVASICELYSFVSCLEPKHVDEAPCDPDWMNAMHEELNNFARNKVWTLVERPRDHNVIGTKWVFRNKQDENGLVVRNKVRLVAQGFTQVEGLDFGETFAPVARLEDIRILLTFASCFDIKLFQIDVKNFKIGKVDTTIFTKIIGDDFFVCQIYVDDIIFGSTNEVFCKEFGDMMSREFEMSMIRELSFFLGLQIKQLKDGTFVSQTKYIKDLLKRFSLEDAKPIKTPMATNGHFDLDEGGKPVDLKLYRSMIGSLLYLTASRPDIMFSVCMCARFQAAPKECHLVAVKRILRYLKHSCTIGLWYPKGAKFKLVGYSDSDYAGCKVDRKSTSGSCQMLGRSLVSWSSKKQNSVDLSTAEAEYVSAGSYCAQLLWMKQTLLDYGISFTKTTLLCDNDSAIKIANNPVQHSRTKHIDIRHHFLRHHVAKCDIVISHIRTEDQLADIFTKPLDETHFCKLRNELNVIDFSNVA

SEQ ID NO: 20021 - protein, 1701 aa, Oryza sativa
  unsure (1)..(1701): unsure at all Xaa locations
  Clone ID: TF_OSC13136j.C1.p2.np
MSNEVNHVGKAPMFNGTNYSTWKIKMSTHLKAMSFHIWSIVDVGFAINGTPLTEIDHRNLQLNAQAMNALFNSLSQEEFDRVSNLETAYEIWNKLAEIHEGTSEYKDAKLHFVKIQYETFSMLPHESVNDMYGRLNVIVNDLKGLGANYTDLEVAQKMLRALPEKYETLVTMLINSDKSRMTPASLLGKINTNDMYKLKKKEMEEASPSKKCIALQAEVEDKGKGKVNEANEDLEEEIALLARRFNDLLGRRKERGRGSNSNRRRNRRPNKTLSNLRCFECGEKGHFASKCPSKDDDGDKSSKKKSGGYKLMKKLKKEGKKIEAFIGEWDSNEESSASSGSEEEGGDDASSKKKKMAVVAIKEALSLFAPLCLMAKGSSKVTSLSDSESNDNCNDVSYDELVSMFEELHAYSEKKIVKFMALKKDHASLEVLYEELKTSHERLTISPEKLKEAHDNLLSTTQHEALIDVGISCDLLDDSATCHIAHVASSSISTSCDDLVDMSSSRSSSCVSICDVSLVVENNELKEQVAKLNKSLERCFKGKNTLDKILSEQWCILNKEGLGFIPKKGKKPSHCATRFVKSNGKYCSKCREVGHLVNDCPGGKPPKTCMFDSHYMLRKAHDGSIVARYVGSPILGGKKNAIWVPKALVSNLQGPKQVWIILAILVFFLHVKSIVAELFKKFKRAQNKFNCTLVKIRSDNGSEFKNTNIEDYCDDLGIKHELSATYSPQQNGVVVRKNRTLIEMARTMLDEYSVSDSFWVEAINTACHATNRLYLHRLLKKTSYELIVGRKPNITYFQVFGCKCYIYRKGDSLTKFESRCDEGFFLGYASNSKVYRVYNKNKGDEGLMRAMKNMSIGDVKPIEVEDKPSTSTQDEPSTSAMPSQAXVEVEEEKAQDPPMPLRIHTALSKDHPIDQVLGDISKGVQTRSRVASICELYSFVSCLEPKHVDEAPCDPDWMNAMHEELNNFARNKVWTLVERPRDHNVIGTKWVFRNKQDENGLVVRNKVRLVAQGFTQVEGLDFGETFAPVARLEDIRILLTFASCFDIKLFQIDVKSAFLNGEIAELVFVEQPPGFEDPKNPNHVYKLSKALYGLKQAPRAWYERLRDFLLSKDFKIGKVDTTIFTKIIGDDFFVCQIYVDDIIFGSTNEVFCKEFGDMMSREFEMSMIRELSFFLGLQIKQLKDGTFVSQTKYIKDLLKRFSLEDAKPIKTPMATNGHFDLDEGGKPVDLKLYRSMIGSLLYLTASRPDIMFSVCMCARFQAAPKECHLVAYPKGAKFKLVGYYPKGAKFKLVGYSDSDYAGCKVDRKSTSGSCQMLGRSLVSWSSKKQNSVDPTAEAEYVSAGSYCAQTEDQLADIFTKPLDETHFCKLRNELNVIDFSNVAXDGAPWLLLLHIVYLLLFALMLWIYFHLVLHCENGACHIRGSFALLHVLYFLLYVSKSTKSAKTTISWKMFQKVPYMFSKPHIARKMIFMKMPFDPLLKKLDSYFWLKXDLDPWHGTLGEARVVLRFAPIEGSFLVXFNSSNRRSDRRIRPVXPAVHARSDRPTGGRDSAARGGRYRANGAVVDQTEPMAVXPSRGRSDRQLNVVIHLVCXRVDXPRVKCIASICRASVALDXSSPRRVIACYSWRLPPPRRLVEELPGDLSEKIVEEARRRFVSGLEFTTFGVKEELPVIEAWVVLSVGRLPPCPPLDEGGVRWLRG

SEQ ID NO: 20022 - protein, 1426 aa, Oryza sativa
  Clone ID: TF_OSC400450j.C1.p1.gm
MGRSRLAHPLTKGACGGFVVERWSWARLNGGLVSLDWASPPREKMSNEVNHVGKAPMFNGTNYSTWKIKMSTHLKAMSFHIWSIVDVGFAINGTPLTEIDHRNLQLNAQAMNALFNSLSQEEFDRVSNLETAYEIWNKLAEIHEGTSEYKDAKLHFVKIQYETFSMLPHESVNDMYGRLNVIVNDLKGLGANYTDLEVAQKMLRALPEKYETLVTMLINSDKSRMTPASLLGKINTNDMYKLKKKEMEEASPSKKCIALQAEVEDKGKGKVNEANEDLEEEIALLARRFNDLLGRRKERGRGSNSNRRRNRRPNKTLSNLRCFECGEKGHFASKCPSKDDDGDKSSKKKSGGYKLMKKLKKEGKKIEAFIGEWDSNEESSASSGSEEEGGDDASSKKKKMAVVAIKEALSLFAPLCLMAKGSSKVTSLSDSESNDNCNDVSYDELVSMFEELHAYSEKKIVKFMALKKDHASLEVLYEELKTSHERLTMWILWLSGRSAASPLCRLVFATAIADNNNDFTDRPASVAAEWCLRLHGWPIMPPLLGVYDFTAGLPPSPPSGVYDFTAGLPRPPPTGASAYTAGLLCRRCWASTTSPTGRLVRRRLVSSPARLAYYAAAVGRLRLHRRRASVAAEWCLRLHGWPIMPPLLGVYDFTAGLPPSPPIGASAYTAGLLCRRCWASTTSPPACLRRRRVVPPPTRLAYYAAAVGRLRLHRRPASVAAEWCLRLHGWPIMPPLLGVYDFTAGLPPSPPIGASAYTAGLLCRRCWASTTSPPACLRRRRLVPPPTRLAYYAAAVGRLRLHRRPASVAADWCLRLHGWPIMPPLLGVYDFTAGLPPSPPSGVPAYTEWISQNITTGRLVRRRLVFSPARLAYYAAVVGRLRLHRPACLRRRRLVFPPARLAFMPPLLGVYVFTDRPPRPPPTGASACTAGLYAAVVGRLRLHRPAASSAADWCFRLHGWPLCRRCWASTSSPTGLPSPLPTGVSACTAGLYAAVVGRLSLHRPAASSAADWCFRLHGWPIMPPLLGVYVFTDRLAFAAADWCFRLHGWPLCRRCWASASSPTGLPSPPPTGVSACTAGLYADVVGRLRLHRPAASSAADWCFRLHGWPIMPPLLGVYVFTDRLAFAAADWCFRLHGWPLCRRCWASTSSPTGLPSPPPTGVSACTAGLYAAVVGRLRLHRPAASSAADWCFRLHGWPIMPPLLGVYVVTDRPPRPPPTVKVLFGFIKQLIGYNIIAFCHPSTVFRFGKSTRETMTKMIEALGFGVICSCVSICDVSLVVENNELKEQVAKLNKSLERCFKGKNTLDKILSEQWCILNKEGLGFIPKKGKKPSHCATRFVKSNGKYCSKCREVGHLVNDCPGGYASNSKVYRVYNKNKGIVEETADVQFDETNGSQEGHENLDDVGDEGLMRAMKNMSIGDVKPIE

SEQ ID NO: 20023 - protein, 1570 aa, Oryza sativa
  Clone ID: TF_OSC408405j.C1.p11.fg
MSFHIWSIVDVGFAITGTSLTEIDNRNLQLNAQAMNALFNSLSQEEFDRVSNLETAYEIWNKLAEIHEDTSEYKDAKLHFLKIQYETFSMLPHESVNDMYGRLNVIVNDLKGLGVNYTDLEVAQKMLRALPEKYETLVTMLINSDMSRMTPASLLGKINTNDMYKLKKKEMEEASPSKKCIALQAEVEDKGKGKVNEANEDLEEEIALLARRFNDLLGRRKERGRGSNSNRRRNRRPNKTLSNLRCFECGEKGHFASKCPSKDDDGDKSSKKKSGGYKLMKKLKKEGKKIEAFIGEWDSNEESSASSGSEEEGGDDASSKKKKMAVVAIKVTSLSDSESDDDCDDVSYDELVLYEELKTSHERLTISHEKLKEAHDNLISTTQLGALIDVGISCDLLDDSATRHIAHVASSSISTSCDDLVDMSSSSSSSCVSICDASLVVEKNELKEQMAKLNKSLERCFKGKNTLDKILSEQRCILNKEGLGFIPKKGKKPSHRATRFVKSNGKYCSKCREVGHLVNDCPGGKPPKTCMFDSHYMLRKAYDASIVARYVDYPILGGKKNAIWVPKALVSNLQVNYHTGGSHWVLDSGCTQHMTGDRAMFTTFEVGGNEQEKVTFGDNSKGKVIGLGKIAISNDLSIDNVSLVKSLNFNLLSVAQICDLGLSCAFFPQEVIVSSLLDKSCVFKGFRYGNLYLVDFNSSEANLKTCLVAKTSLGWLWHRRLAHVGMNQLSKLSKRDLVVGLKNVKFEKDKLCSACQAGKQVACSHPTKSIMSTSRPLELLHMDLFGPTTYKSIGGNSHCLVIVDDYSRYTWVFFLHDKSIVAELFKKFAKRVQNEFNCTIVKIISDNGSEFKNTNIEDYCDDLGIKHELSATYSPQQNGVMERKNRTLIEMAWTMLDEYGVSDFFWVEAINTACHATNRLYLHRLLKKTSYELIVGRKPNVAYFRVFGCKCYIYRKGVRLTKFESRCDEGFLLGYASKSKAYRVYNKNKGIVEETADVQFDETNGSQEGYENLDDVCDEGLMRAMKNMSIGDVKPIEVEDKPSTSTQDEPSTSATPSQAQVEVEEEKAQDPPMPPRIHTALSKDHPIDQVLGDISKGVQTRSRVASICEHYSFVSCLEPKHVDEALCDPDWMNAMHEELNNFARNKVWTLVERPRDHNVIGTKWVFRNKHDENGLVVRNKARLVAQGFTQVEDPKNPKHVYKLSKALYGLKQAPRAWYERLRDFLLSKDFKIGKVDTTLFTKIIGDDFFVCQIYVDDIIFGSTNEVFCKEFGDMMSREFEMSMIGELSFFLGLQIKQLKDGTFVSKTKYIKDLLKRFGLEDAKPIKTPMATNGYLDLDEGGKPVDLKLYRSMIGSLLYLTASRPDIMFSVCMCARFQAAPKECHLVAMKRILRYLKHSSTIGLWYPKGAKFKLVGYSDSDYAGCKVDRKSTSGSCQMLGRSLVSWSSKKQNSVALSTAEAEYVSVCSCCAQLLWMKQTLLDYGISFTKTPLLCDNDSAIKIANNPVQHSRTKHIDIRHHFLRDHVAKCDIVISHIRTEDQLADIFTKPLDETRFCKLRNELNVIDFSNVA

SEQ ID NO: 20024 - protein, 1641 aa, Oryza sativa
  unsure (1)..(1641): unsure at all Xaa locations
  Clone ID: TF_OSC900301j.C1.p6.np
IMCAHMSTYGLKIDGTKLKEEKTVNLCFHLKLIEALFNSLSQEEFDRVSNLETAYEIXNKLAEIHEGTSEYKDAKLHFLKIQYETFSMLPHXSVNDMYGRLNVIVNDLKGLGANYTDFEVAQKMLRALPEKYETLVTMLINSDMSRMTPASLLGKINTNDMYKLKKEMEEASPSKKCIALQAEVEDKGKGKVNKANEDLEEEIALFARRFNDHLGRRKERGRGSNSNRRRNRRPNKTLSNLRCFECGEKGHFASKCPSKDDDGDKSSKKKSGGYELMKKLKKERKKIEAFIGEWDSNEESLASSRSEEEGGDDASSKKKKMAVVTIKEAPSLFAPLCLMAKGSSKVTSLSDSESDDNCDDVSYDELVSMFEELHAYSEKEIKFKALKKDHASLEILYEELKTSHERLIISHEKLKEAHDNLLSTTQHGARIDVGISCDLLDDSATCYIAHVASSSISTSCDDLVDMPSSSSCVSICDVSLVVENNELKEQVAKLNKSLERCFKGKNTLDKILSEQRCILSKEGLGFILKKGKKPSHRATRFVKSNGKYCSKCREVGHLVNDCPGGKLSKTCMFDSHYMLRKAHDGSIVARYVGSPILGGKKNTIWVSKALISNLQGPKYVWIILAILGCFFHDKSIVAELFKKFAKRAQNEFNCTLLKIRSDDGSEFKNTNIEDYCDDLGIKHELSATYSPQQNGVVERKNRTLIEMARTMLNEYGVSDSFWVEAINTACHATNRLYLHRLLKKTSYELIVGRKPNVAYFRVFGCKCYIYXKDVRLTKFESRCDEGFLLGYASNTRVYNKNKGDEGLMRAMKNMSIGDVKPIEVEDKPSTSTQDEPSTSASPSQAQVEVEEEKAQDPPMSPRIHTALSKDHPIDQASGDISKGVQTRSRVASICEHYSFVSCLEPKHVDELCDPDWMNSMHEELNNFARNKVWTLVERPKDHNVIGTKWVFRNKQDENGLVVRNKARLVAQGFTQVEGLDFGETVAPVARLEVIRILLAFALCFDIKLFQMDKSVFLNGEIAELVFVEQPPGFKDPKNPNHVYKLSKALYGLKQAPRAWYERLRDFLLSRYTKSTLCRVHLQAIFPGSLKNLSQIGYVVFYFFRLNNHIINIDFNQADQIMIYIXFIALWYVSQTKYIKVSQTKYIKDLLKMFGLEDAKPIKTPMATNAHRSMIGSLLYLTASRPDIMFSVCICARFQAAPKECHLVAYPKGAYPKGAKFKLVGYSDSDYAGCKVDRKNTSGSCQMLAMPPHTRHGRREPTPNPISENEESSGDYVQSEDENMENVEGDEVEVSGDDNGSDGGDVNGSGDGEDDEASDDGSPLDPTIHFVLNLRNAQQYTILRHDQFRRPNDCNDPRFHTRFQKSVYEQVYANKAFTEHKWISWRHIGETPEFVDLQEMFWAVGIDRIVTMKQPFDEDLIRQFYATVWVSGDCDAMKWMSGTLRCSINRREFKELLHICFNNGDDLHDEHNHNPFMIDYFSQFYEEGGRHTYGKVGGLRAIPSVINRIVRATILPRCGNNDDIRGVAWHVIDAIMDDRRFDVINLMMKEIAISKGTIGQGVYYALYIMRLPPPRRLVEELPGDLSEKIMEEARCRFVSGLEFTTFGVKEELPVIEAWVVLFVGRLPPCPPLDEGGVRWLRG

SEQ ID NO: 20025 - protein, 690 aa, Oryza sativa
  unsure (1)..(690): unsure at all Xaa locations
  Clone ID: TF_OSC405422j.C1.p3.np
SAFIWTTLKERYDESKCDDVLFLEEPLEERSTSSPNCEEPQVTTFDDQDNHPTSTLSSTHNYVEGNELVSKVDDRPILPLDSNNTDNEIVIWHCVVDSYISPSTKYVCEDNMDKCSTSYSTCGTNLLKEKVNKHQWTSEESTSPRCSSSISEDYACFMSEDGDSEFDHLSKKDITMVIKLMEAIEKQQACTIKKNEEIMSLTEEHKKLKDFHSSLTMRYEKLENEFACATNSIACVASLEKQNQELKSQLDEITNKYVDLQERHDELLCSHENLVDSHAMLEVSHEVIIATVKSYEPHVQVDLTCTNPCCAQANISPSTIYDLDCVGKREKQIDHGLVCIAQPSQDNCEGMVKNLEEGSTVACTRIHQRDSKSINAYTKGRNQKMIKSSITCFKCKKVGHHARDCPWKKGNKLSKKKDIPHIKCFKCTEVGHFASRSPCTLDEQCKTSSERQTGNKQTEKQYRSKSRLCYNCRAKGHIGKNFPMGNIPKTSLSFDHNLLRNAKNDICATRVICSPHTSIKAIWVSKSLVTNLYGPNVVGDQNVLKFYSGTKGFGKTARFAMKLIYHHALEPGGSGKIPRRLREDSLVTRRIXARGSKFTRTCILKCYPSVXESRVXPQEVHDDQGGLLDQPQSTQVNLPQLSMKNMKTCFWKEDGANAKPDRVMALQEEHKHYQDVDCDQRVKHVRDGKA

SEQ ID NO: 20026 - protein, 467 aa, Oryza sativa
  Clone ID: TF_OSC403976j.C1.p1.fg
MADNEKGNKVRSQDVGTSSSRVNEAPDTSCVTLVQHLINQNRLLIEILQQHQTPILNLSQIQPQVQLEAVQALTPQVSMPPASRRTHGDVPHVDPKEASNICFMCDEQGHYARERPQQKRKTPMRTEDEVRKMIITSTEWPPPGMTRRQRRNTFRGAPQLTEHLLANGGRVSDSEDSDQVSSDDEDEMECKACSRCGEIGHVASSCATICVHCEEDHPPDRCPTSRITCFFCEGTDHVPKDCQFSLLLTKKMANQPASSNGEKHQGNTNPRQDHRFSLTPVPGQRNQNEKRKCRVREDICCFNCQGMGHFADKCPKPRNTAASTSVHATPCNQKLAPQRIVIHASRSSPIARVATAPTPMSALPQGVNAQFQPQPPADKTEASICVVPLEVPIQQLRDQVQDEEPECKKVIVCYNCSEEGHYSKNCPQPRQNRPPHYRQFTRSRHSNRIVVTGANAVPVRPRVNQNP

SEQ ID NO: 20027 - protein, 1532 aa, Oryza sativa
  Clone ID: TF_OSC100049j.C1.p2.fg
MVRCGGLCYARGIVTAPFRAPGLEWYIPGLEIDLYSRMPRYKPEYLFGVEGFVQELRTMSIAIGFGTAPFYAQIPHDRHEEKCRVKVTLNSNSEDIPSVMFEAGGKNYIHACQKVARIAIGELRDRYSDQLADTEYRYHPRQPQGKTVLAAQDREDRNRGKICKLEDKVDHLEKELAALKGEAPPQKARIRLTARKRALFVPRYQLAPKVRVVEKEVTPALADPPVVNMVLTRSNGNGPNNNNNNNNNNNGENPTLAQVLAQQAQLMNMMMQQLQNQQNQGNNHAPPQNKLAEFLRVRPPIFSSTTNPVEAGDWLHVIEKKLDLLQCTDQEKVSFASHQLHGPASEWWDHFRLHRTTAEPITWLEFTAAFRKTHIPSGVVSLKKREFRSLTQGSRSVTEYLHEFNRLAHYAPEEKLVDKAIRQEDKYNRMEQKKRRIAQFKTQQGNNQKPRLTLGPQSMPQGGSSSVVRPQRQFFNNNAGNNIRNQAPCPVAASTQQQPAKREQGSKPVVCFNCGDPGHYADKCPKPRRVKVVPTQGNSTAPASKARVNHVAAAEAQDAPDVILGTFLVNLVPATVLFDSGATHSFLSMSFAGNHGMEVEDLRRPMMVSTPSNQALSLQRSPSVRIEIQGVPFLANLILLESKDLDVILGMDWLARYKGVIDCANRKVTLTSNDGRVVTVYALSSESLRSRLNQITLEEIPIVREYPDVFPDDLPGMPPKRDIEFRIDLVPGTTPIHKRPYRMAANELAEVKRQVDDLLRKGYIRPSSSPWGAPVIFVEKKDHTQRMCVDYRALNDVTIKNKYPLPRIDDLFDQLKEEHEQHLRLALEKLREHQLYAKFSKCEFWLSEVKFLGHVISAGGVAVDPSNVESVTNWKQPKTVSEIRNFLGLAGYYRRFIKNFSKIAKPMTRLLQKDVKYKWSEECEQSFQELKNRLISAPILILPDPKKGFQVYCDASKFGLGCVLMQDEKVVAYASRQLRPHEKNYPTHDLELAAVVHALKIWRHYLFGTRTEVYTDHKSLKYIFTQPDLNMRQRRWLELIKDYDMGIHYHPGKANVVADALSRKGYCNATEGRQLPLELCKEFERLNLGIVSRGFVAALEAKPTLIDQVREAQINDPDIQEIKKNMRRGKAIGFLKDEQGTVWLGERICVPDNKDLKDAILKEAHDTLYSIHPGSTKMYQDLNEGFWWASMKREIAEYVAVCDVCQRVKAEHQKPAGLLQPLKIPEWKWEEIGMDFITGLPRTSSGHDSIWVIVDRLTKVAHFIPTDGQTERVNQILEDMLRACALDFGGSWDKNLPYAEFSYNNSYQASLQMAPYEALYGRKCRTPLLWDQTGERQVFGTDILREAEEKVKIIQERLRVAQSRHKSYADNRRRDLSFGEGDYVYLRITPFRGVHRFHTKEKLAPRFVGPYKIVNRRGEVAYQLELPQSLAGVHNVFHVSQLKKCLRVPTEETNLEQIEVQEDLTYIEKPIGILEIDERRTRNRVIRFCNVQWSNHSEEESTWEREDELKSAHPHLFASSSESRGRDSVKGG

SEQ ID NO: 20028 - protein, 1528 aa, Oryza sativa
  Clone ID: TF_OSC100172j.C1.p1.fg
MDEVGRRWTFSRANEGYTSCGPGSDRGSYLETEGIENDATTRYLVEMLWAMDESRAESVLAAQDREDRNRGKICKLEDKVDRLEKELAALKGEAPPQKARIRLTARKRALFVPRYQLAPKMVNTRSNGNGPNNPNNNNNGENPTLAQVLAQQTQLMNMMMQQFQNQQNQGNNHAPPQNKLAEFLRVRPPVFSSTTNPVEAGDWLHAIEKKLDLLQCTDQEKVSFASYQLHGPASEWWDHFRLNRTTAEPITWLEFTAAFRKTHIPSGVVSLKKKEFRSLTQGSRSVTEYLHEFNRLARYAPEDVRTDEERQEKFLEGLNDELSYPLMTGDYSDFQKLVDKAIRQEDKYNRMEQKKRRIAHFKAQQGSNQKPRLALGPQPMPQGGSSSVVRPQRQFFNNNAGNNIRNQAPRPVAAPAQQQPAKREQGSKPVVCFNCGDPGHYADKCPKPRRVKVVPAQSNSTVPASKARVNHVAAAEAQDAPDMILGTFPVNSVPATVLFDSGATHSFLSMSFAGNHGMEVEDLRRPLMVSTPGNQALSLQRSPSVRIEIKGVPFLANLILLESKDLDVILGMDWLARHKGVIDCANRKVTLTSNDGRVVTVNALSSESLRSRLNQITLEEIPIVREYSDVFPDDLPGMPPKRDIEFRIDLVPGTTPIHKRPYRMAANELAEVKRQVDDLLQKGYIRPSSSLWGAPVIFWEKKDHTQRMCVDYRALNDVTIKNKYPLPRIDDLFDQLKGATVFSKIDLRSGYHQLRIKEEDIPKTAFTTRYGLFECTVMSFGLTNAPAFFMNLMNKVFMEYLDKFVVVFIDDILIYSRTKEEHEEHLRLALEKLREHQLYAKFSKCEFWLSEVKFLGHVISAGGVAVDPSNVESVTNWKQPKTVSEIRSFLGLAGYYRRFIENFSKIAKPMTRLLQKDVKYKWSEECEQSFQELKSRLISAPILILPDPKKGFQVYCDASKLGLGCVLMQDGKVVAYASRQLRPHEKNYPTHDLELAAVVHALKIWRHYLFGTRTEVYTDHKSLKYIFTQPDLNMRQRRWLELSKDYDMGIHYHPGKANVVADALSRKGYCNATEGRQLPLELCKEFERLNLGIVSRGFVAALEAKPTLIDQVREAQINDPDIQEIKKNMRRGKAIGFLEDEHGTRVKAEHQKPAGLLQPLKIPEWKWEEIGMDFITGLPRTSSGHDSIWVIVDRLTKVAHFIPVKTTYSGSRLAKLYMARIVCLHGVPKKIVSDRGSQFTSNFWKKLQEEMGSKLNFSTAYHPQTDGQTERVNQILEDMLRACALDFGGSWDKNLPYAEFSYNNSYQASLQMAPYEALYGRKCRTPLLWDQTGERQVFGTDILREAEEKVKIIQERLRVAQSRHKSYADNRRRDLSFEEGDYVYLRVTPLRGVHRFHTKGKLAPRFVGPYKIVSRRGEVAYQLELPQSLAGVHNVFHVSQLKKCLRVPTEEANLEQIEVQEDLTYVEKPIRILETNERKTRNRVIRFCKVQWSNHSEEESTWEREDELKSAHPHLFASSSESRGRDSV

SEQ ID NO: 20029 - protein, 1882 aa, Oryza sativa
  unsure (1)..(1882): unsure at all Xaa locations
  Clone ID: TF_OSC101716j.C1.p1.np
DAITGNNLISSWFGMVYSWFGDRTVQPMPRYKPEYLFGVEGFVQELRTMSFVIGFGTAPFYAQIPHDRHEEKCRVKVTLNSNSEDIPSVMFEAGGRNYIHACQEVARIAIGELRDRYSDQLADTEYRYHPRQPQGSDRGSYLETEGIENDATTRHLVEMLWAMDESRAETVLAAQDREDWNRGKICKLEDKVDRLEKELAALKGEAPPQKARIRLTARKRALFVPRYQLAPKVRVVEKEVAPTLADPPVIIISDDEEEESKRNHSKIEWVATQDDEDEPNEPSIDLRCSEELDNGNGPNNNNNNNNNKNPTLAQVLAQQTQLMNMMMQQLQNQQNQGNNHAPPQNKLAEFLRVRPPIFSSTTNPVEAGDWLHAIEKKLDLLQCTDQEKVSFASHQLHGPASEWWDHFRLNRTTAEPITWLEFTAAFRKTHIPSGVVSLKKKEFRSLTQGSRSVTEYLHEFNRLARYAPEDVRNDEERQEKFLEGLNDELSYPLMTGDYSDFQKLVDKAIRQEDKYNRMEQKKRRIAQFKTQQGNNQKPRLTLGPQSVPQGGSSSVVRPQRQFFNNNAGNNIRNQAPRPVAAPTQQQPAKREQGNKPVVCFNCGDPGHYADKCPKPRRVKVVPVQSSSTALALKARVNHVAAAEAQDAPDVILGTFPVNLVPATVLFDSGATHSFLSMSFAGNHGMEVEDLRRPLMVSTPSNQALSLQRSPSVRIEIQGVPFLANLILLESKDLDVILGMDWLARHKGVIDCANRKVTLTSNDGRVVTVHVLSSESLRSRLNQITLEEIPIVREYPDVFPDDLPGMPPKRDIEFRIDLVPGTTPIHKRPYRMAANELAEVKRQVDDLLQKGYIRPSSSPWGAPVIFVEKKDHTQRMCVDYRALNDVTIKNKYPLPRIDDLFDQLKGATVFSKIDLRSGYHQLRIKEYGLFECTVMSFYGLFECTVMSFGLTNAPAFFMNLMNKVFMEYLDKFVVVFIDDILIYSRTKEEHEEHLRLALEKLREHQLYAKFSKCEFWLSEVKFLGHVISAGGVAVPSNVESVTNWKQPKTVSEIRSFLGLAGYYRRFIENFSKIAKPMTRLLQKDVKYKWSEXCEQSFQELKNRLISAPILILPDPKKGFQEYCDASKLGLGCVLMQDGKVVAYASRQLRPHEKNYPTHDLELAAVVHALKIWRHYLFGTRTEEFERLNLGIVSRGFVAALEAKPTLIDQVREAQINDPDIQEIKKNMRRGKAIGFMEDEQGTVWLGERICVPDNKDLKDAILKEAHDTLYSIHPGSTKMYQDLKERFWWASMKREIAEYVAVCDVCQRVKAEHQKPAGLLQPLKIPEWKWEEIGMDFITGLPRTSSGHDSIWVIVDRLTKVAHFIPVKTTYSGSRLAELYMARIVCLHGVPKKIVSDRGSQFTSNFWKKLQEEMGSKLNFSTAYHPQTDGQTERVNQILEDMLRACALDFGGSWDKNLPYAEFPYNNSYQASLQMAPYEALYGRKCRTPLLWDQTGERQVFGTDILREAEEKVKIIQERLRVAQSRHKSYADNRRRDLSFEEGDYVYLRVTPLRGVHRFHTKGKLAPRFVGPYKIVSRRGEVAYQLELPQSLAGVHNVFHVSQLKKCLRVPTEEANLEQIEVQEDLTYVEKPIRILEIDERRTRNRVIRFCKVQWSNHSEEESTWEREDELNRGIEFDSDGLFPSSPSSSPAAVGLRRRLRAPLKGPSSSLPAATLAFASRRRKCPSAPCAAAVPDVAVAREGRHRGPCAAAVPDVAVAREGRHRGRQVVAVLVCRFATVGDRRSIVAAVDPKSFAASSSSPSPSVDLPPSLWSPCRRSPASVRRPSRCRRSPASVRRPSRRAAAAGGDITADVIGAVRHSVFSGESVFAGEEFEEFQGQQGK

SEQ ID NO: 20030 - protein, 511 aa, Oryza sativa
  Clone ID: TF_OSC101716j.C1.p2.gm
MVNTRSNGNGPNNNNNNNNNNEGNPTLAQVLAQQTQLMNMMMQQLQNQQNQGNNHAPPQNKLAEFLRVRPPIFSSTTNPVEAGDWLHAIEKKLDLLQCTDQEKVSFASHQLHGPASEWWDHFRLNRTTAEPITWLEFTAAFRKTHIPSGVVSLKKKEFRSLTQGSRSVTEYLHEFNRLARYAPEDVRNDEERQEKFLEGLNDELSYPLMTGDYSDFQKLVDKAIRQEDKYNRMEQKKRRIAQFKTQQGNNQKPRLTLGPQSVPQGGSSSVVRPQRQFFNNNAGNNIRNQAPRPVAAPTQQQPAKREQGNKPVVCFNCGDPGHYADKCPKPRRVKVVPVQSSSTALALKARVNHVAAAEAQDAPDVILALEAKPTLIDQVREAQINDPDIQEIKKNMRRGKAIGFMEDEQGTPLKIPEWKWEEIDVAVAREGRHRGRQVVAVLVCRFATVGDRRSIVAAVDPKSFAASSSSPSPSVDLPPSLWSPHGSLRGTRLRSGGDKPTGVAGESMPCL

SEQ ID NO: 20031 - protein, 1096 aa, Oryza sativa
  Clone ID: TF_OSC102284j.C1.p1.fg
MWGCVLWVQWYTSDQSKTIRIAVPAVMAPGLEWYIPGLKIELCSRDGCSEWLGLCNRIPHDRHEEKCRVKVTLNSNSEDIPSVMFEAGGRNYIHACQEVARIAIGELRDRYSDQLADTEYRYHSRQPQGSDRGSYLETEGIENDATTRHLVEMLWAMDETRAETVLAAQDREDRNRGKICKLEDKVDRLEKELAALKGEAPPQKARICLTARKRALFVPRYQLAPKVRVVEKEVTPALADPPVVNMVVTRSNGNGPNNNNNNNNNGENPTLAQVLAQQAQLMNMMMQQLQNQQNQGNNHAPPQNKLAEFLRVRPPTFSSTTNPVEAGDWLHAIEKKLDLLQCTDQEKVSFASHQLHGPASEWWDHFRLNRTTAEPITWLEFTAAFRKMHIPSGVVSLKKKEFRSLTQGSRSVTEYLHEFNRLARYAPEDVRTDEEHQEKFLEGLNDELSYPLMTGDYHDFQKLVDKAIRQEDKYNRMEQKKRRIAQFKTQQGNNQRPHLTLGPQSMPQGGYSSVVRPQRQFFNNNAGNNIRNQVPRPVAASTQQQPAKREQGSKPVVCFNCGDPGHYADKCPKPRCVKVVPAQSNSTVSASKARVNHVAAAEAQGAPDVILGTFLVNSVPATVLFDSGATHSFLSMSFAGNHGMEVEDLRCPLMVSTPSNQALSLQRSPSVRIEIQGVPFLANLILLESKDLDVILGMDWLARHKGVIDCANRKVTLTSNDGRVVTVHALSSESLRSILNQITLEEIPIVREYPDVFSDDLPGMPPKRDIEFRIDLVPGTTPIHKRPYRMAANELAEVKRQVDDLLQKGIDDLFDQLKGATVFSKIDLRSGYHQLRIKEEDIPKTAFTTRYGLFECTVMSFGLTNAPAFFMNLMNKVFMEYLDKFVVVFIDDILIYSRTKEEHEEHLRLALEKLREHQLYAKFSKCEFWLSEVKFLGHVISAGGVAVDPSNVESVTNWKQPKTVSEIRSFLGLAGYYRRFIENFSKIAKPMTRLLQKDVKYKWSEECEQSFQELKNRLISAPILILPDPKKGFQVYCDASKLGLGCVLMQDGKVVAYASRQLRPHEKNYPTHDLELAAVVRALKIWRHYLFGTRTE

SEQ ID NO: 20032 - protein, 1536 aa, Oryza sativa
  Clone ID: TF_OSC10947j.C1.p2.fg
MSFVISLTLLTIVNDAITGNNLISSWFGMMPRYKPEYLFGVEGFVQELRTMSFVIGFGTAPFYAQIPHDRHEEKCRVKVTLNSNSEDIPSVMFEAGGRNYIHACQEVARIAIGELRDRYSDQLADTEYRYHPRQPQGSDRGNYLETEGIENDATTRHLVEMLWAMDESRAETVLAAQDREDRNRGKICKLEDKVDRLEKELAALKGEAPPQKARIRLTAMKRALFVPRYQLAPKMVNTRSNGNGPNNNNNNNNNSGENPTLAQVLAQQTQLMNMMMQQLQNQQNQGNNHAPPQNKLAEFLRLHGPASEWWDHFRLNRITAEPITWLEFTAAFRKTHIPSGVVSLKKKEFRSLTQGSRSVTEYLHEFNRLARYAPEDVRNDEERQEKFLEGLNDELSYPLMTGDYPDFQKLVDKAIRQEDKYNRMEQKKRRIAQFKTQQGNNQRPRLTLGPQSVPQGGSSSIVRPQRQFFNNNAGNNIRNQVPRPVAAPTQQQPAKREQGSKPVVCFNCGDPGHYADKCPKPRRVKVVPTQSNSTAPASKARVNHVAAAEAQDAPDVILGTFLVNLVPATVLFDSGATHSFLSMSFAGNHGMEVEDLRHPLMVSTPSNQALSLQRSPSVRIEIKGVPFLANLILLESKDLDVILGMDWLARHKGVIDCANRKVTLTSNDGRVVTVHALSSESLRSRLNQITLEEIPIVQEYPDVFPDDLPGMPPKRDIEFRIDLVPGTTPIHKRPYRMAANELAEVKRQVDDLLQKGYIRPSSSPWGAPVIFVEKKDHTQRMCVDYRALNDVTIKNKYPLPRIDDLFDQLKGATVFSKIDLRSGYHQLRIKEEDIPKTAFTTRYGLFECTVMSFGLTNAPAFFMNLMNKVCMEYLDKFVVVFIDDILIYSRTKEEHKEHLRLALEKLREHQLYAKFSKCEFWLSEVKFLGHVISAGGVAVDPSNVESVTNWKQPKTVSEIRSFLGLAGYYRRFIENFSKIAKPMTRLLQKDVKYKWSEECEQSFQELKNRLISAPILILPDPKKGFQDGKVVAYASRQLRPHEKNYPTHDLELAAVVHALKIWRHYLFGTRTEANVVADALSRKGYCNATEGRQLPLELCQEFERLNLGIVSRGFVAALEAKPTLIDQVREAQINDPDIQEIKKNMRRGKAIGFLEDEQGTVWLGERICVPDNKDLKDVILKEAHDTLYSIHPGSTKMYQDLKERFWWASMKREIAEYVAVCDVCQRVKAEHQKPAGLLQPLKIPEWKWEEIGMDFITGLPRTSSGHDSIWVIVDRLTKVAHFIPVKTTYSGSRLAELYMARIVCSHGVPKKIVSDRGSQFTSNFWKKLQEEMGSKLNFSTAYHPQTDGQTERVNQILEDMLRACALDFGGSWDKNLPYAEFSYNNSYQASIQMAPYEALYGRKCRTPLLWDQTGERQVFGTDILREAEEKVKIIQERLRVAQSRHKSYADNRRRDLSFEEGDYVYLRVTPFRGVHRFHTKGKLAPRFVGPYKIVSRRGEVAYQLELPQSLAGVHNVFHVSQLKKCLRVPTEEANLE

SEQ ID NO: 20033 - protein, 1678 aa, Oryza sativa
  Clone ID: TF_OSC11372j.C1.p1.fg
MPRYKPEYLFGVEGFVQELRTMSFVIGFGTAPFYAQIPHDRHEEKCRVRVTLNSNSEEVPSVMFEAGGRNYIHACQEVARIAIGELRDRYSDQLADTEYRYHPRQPQGSDRGSYLETEGIENDVTTKHLVEMLWAMDESRAETVLAAQDREDRNRGKICKLEDKVDRLEKELAALKGEAPPQKARIRLTARKRALFVPRYQLAPKMVNTRSNGNGPNNPNNNNNGENPTLAQVLAQQTQLMNMMMQQFQNQQNQGNNHAPPQNKLAEFLRVRPPVFSSTTNPVEASDWLHAIEKKLDLLQCTDQEKVSFASHQLHGPASEWWDHFRLNRTTAEPITWLEFTAAFRKTHIPSGVVSLKKKEFRSLSQGSRSVTEYLHEFNRLARYAPEDVRNDEERQEKFLGGLNDELSYPLMVGDYPDFQKLVDKAIRQEDKYNRMEQKKRRIAQFKTQQGNNQKPRLTLGPQPMPQGGSSSVVRPQRQFFNNNAGNNIRNQAPRPVAAPAQQQPAKREQGNKPVVCFNCGDPGHYADKCPKPRRVKVVPAQNNSAVPASKARVNHVAAAEAQDAPDVILGTFLVNSVPATVLFDSGATHSFLSTSFAGNHGMEVEDLRRPLMVSTPSNQALSLQRSPSVRIEIQGVPFLANLILLKSKDLDVILGMDWLARHKGVIDCANRKVTLNSYDGRVVTVHALSSESLRSRLNQITLEEIPIVREYPDVFPDDLPGMPPKRDIEFRIDLVPGTTPIHKRPYRMAANELAEVKRQVDDLLQKGYIRPSSSPWGAPVIFVEKKDHTQRMCVDYRALNDVTIKNKYPLPRIDDLFDQLKGATVFSKIDLRSGYHQLRIKEEDIPKTTFTTRYGLFECTVMSFGLTNAPAFFMNLMNKVFMEYLDKFVVVFIDDILIYSRTKEEHEEHLRLALEKLREHQLYAKFSKCEFWLSEVKFLGHVISAGGVAVDPSNVESVTNWKQPKTVSEIRSFLGLAGYYRRFIENFSKIAKPMTRLLQKDVKYKWSEECEQSFQELKSRLISAPILILPDPKKGFQVHCDASKLGLGCVLMQDGKVVAYASRQLRPHEKNYPTHDIELAAVVHALKIWHHYLFGTRTEVYTDHKSLKYIFTQPDLNMRQRRWLELIKDYDMGIHYHPGKANVVADALSRKGYCNATEGRQLPLELCKEFERLNLGIVDRGFVAALEAKPTLIDQVREAQINDPDIQEIKKNMRRGKAIGFLEDEHGTVWLGERICVPDNKDLKDAILKEAHDTLYSIHPGSTKMYQDLKERFWWASMKREIAEYVAVCDVCQRVKAEHQKPAGLLQPLKIPEWKWEEIGMDFITGLPRTSSGHDSIWVIVDRLTKVAHFIPVKTTYSGSRLAELYMARIVCLHGVPKKIVSDRGSQFTSNFWKKLQEEMGSKLNFSTAYHPQTDGQTERVNQILEDMLRACALDFGGSWDKNLPYAEFSYNNSYQASLQMAPYEALYGRKCRTPLLWDQTGERQVFGTDILREAEEKVKIIQERLRVAQSRHKSYADNRRRDLSFEEGDYVYLRVTPLRGVHRFHTKGKLAPRFVGPYKIVSRRGEVAYQLELPQSLAGVHNVFHVSQLKKCLRVPTEEANIEQIEVQEDLTYVEKPIRILETSERRTRNRVIRFCKVQWSNHSEEESTWEREDELKSAHPHLFASSSESRGRDSV

SEQ ID NO: 20034 - protein, 1566 aa, Oryza sativa
  unsure (1)..(1566): unsure at all Xaa locations
  Clone ID: TF_OSC13115j.C1.p5.np
MPPHSPRNLIEVLGFVRELRLMVFEVGYEVAPEYRQISHDPDEEKCHVRVTLASDREDLPSIKFEAGGRSYSHACQEAALVAIGELRQRFEEELDSSAFXYHPHKPHGQDYGTYICPDGEESATLMHVVHMLSAMDAVSVERDKAAHDRENWNRGKICKLESKVYRLQKELAELKGETPPPTPKLRLVARKRTCPPPRLQLASKIRVMEAVPDRAEPVIDIISDEEEEEDPEEREATPEEEDPSLRSDTRRVSRLARSLPXFAVLVSAYRQMVNTRTGSGSGSGSGATNNGGDPTLAQILAQQTQLINLLVQQAQNQQANNQNHPPPQNKLADFLRVRPPTFSSTTNPVEAGDWLHAVEKKLDLIQCTEQEKVSFASHQLHGPAAEWWDHFRQGRAEGEPITWQEFTAAFKKTHIPAGVVALKKREFRALNQGSRSVTEYLHDFNRLARYAPEDVRTDEERQEKFLEGLNDELSYALMSTDFRDFQQLVDKAIRQEDKYNRMEQKKRRAAQFKAQQGSNQRPRLVIGPQAPSYPQGGSSSVIRPQRQFYNNNSGNDNRNVVARPAATPAQNQPVRKEQGSKPVVCFNCGDPGHYADKCPKPRRVKNAPAPNNSNVPVPKARVNHVVAAEAQNAPYVVLGTFPVNSIPATVLFDSGATHSFLSKSFASNHGMEVVSLGRPLLVNTPGNQVFSTQYCPSATIEIEEVPFPSSLILLESKDLDVILGMDWLSRHRGVIDCVNRKVTLTSSNGETVSFFVSSPKSHGVNLNQVALQEIPIVQDYPDVFPEDLPGLPPKRDIEFRIDLVPGTNPIHKRPYRMAANELAEVKRQKDHTQRMCVDYRALNEVTIKNKYPLPRIDDLFDQLKGATVFSKIDLRSGYHQLRIREEDIPKTAFTTRYGLFECTVMSFGLTNAPAFFMNLMNKVFMEYLDKFVVVFIDDILIYSKTKEEHEEHLRLALEKLREHQLYAKFSKCEFWLSEVKFLGHVISSGGVAVDPSNVESVLSWKQPKTVSEIRSFLGLARYYRRFIENFSKIARPMTRLLQKEVKYKWTEDCERSFQELKKRLVTAPVLILPNSRKGFQVYCDASRHGLGCVLMQEGKVVAYASRQLRPHENNYPTHDLELAAVVHALKIWRHYLFGNRTEMYTDHKSLKYIFTQPDLNMRQRRWLELIKDYDMEIHYHPGKANVVADALSRKSYCNMSEGRRLPWKLCQEFEKLNLGIVSKGFVATLEAQPTLFDQVREAQVNDPDIQEIKKNMRRGKAIGYVEDEQGTVWLGERICVPENKELKDTIMKEAHETLYSIHPGSTKMYQDLKQQFWWASMRREIAEYVALCDVCQRVKAEHQKPAGLLQPLKIPEWKWEEIGMDFITGLPRTSAGHDSIWVVVDRLTKVAHFIPVKTTYTGNKLAELYMARVTDGQTERVNQILEDMLRACVLDFGGSWDKNLPYAEFSYNNSYQASLQMAPYEALYGIHDVFHVSQLKKCLRVPTEEADPDRIELQEDLTYVEKPVRILEVSERNTRNRVIRFCKVQWSNHSEEEATWEREDELKSAHPHLFVSSSESRGRDSV

SEQ ID NO: 20035 - protein, 744 aa, Oryza sativa
  Clone ID: TF_OSC13206j.C1.p1.fg
GSDRGSYLETEGIENDATTRHLVEMLWAMDESRAETVLAAQDREDRNRGKICKLEDKVDRLEKELAALKGEAPPQKARIRLTARKRALFVPRYQLAPKFPPVSLLVPCPCQMVITRSNGNGPNNPNNNNEGNPTLAQVLAQQTQLMNMMMQQLQNQQNQGNNHAPPQNKLAEFLRVRLPIFSSTTNPVEAGDWLHAIEKKLDLLQCTDQEKVSFASHQLHGPASEWWDHFRLNRTTAEPITWLEFTAAFRNTHIPSGVVSLKKKEFRSLTQGSRSVTEYLHEFNCLARYAPEDEDKYNRMEQKKRRIAQFKTQPGNNQRPRLTLGPQSMPHGGSSSVVRPRRQFFNNNAGNNIRNLAPRPVAVSTQQQPAKREQGSKPVVCFNCGDPGHYADKCPKPRRVKVVPAQSNSTAPASKARINHVAAAEAQDAPDVILGTFLVNSVPATVLFDSGATHSFLSMSFAGNHGMEVEDLRRPLMVSTPSNQALSLQRSPSVRIEIKGVPFLANLILLEPKDLDVILGMDWLARHKGVIDCANRKVTLTSNDGRVVTVHALSSESLRSRLNQITLEEIPIVREYPDVFPDDLPGMPPKRDIEFRIDLVPGTTPIHKRPYRMAANELAEVKRQVDDLLQKGYIRPSSSPWGAPVIFVGKKDHTQRMCVDYRALNDVTIKNRYPLPRIDDLFDQLKGATVFSKIDLRSGYHQLRIKEEDIPKTAFTARYGLFECTVMSFGLTNAPAFFMNFMNK

SEQ ID NO: 20036 - protein, 1267 aa, Oryza sativa
  Clone ID: TF_OSC13283j.C1.p1.fg
MPCYKPEYLFGVEGFVQELRTMSFVIGFGNAPFYAQIRHDRHEEKCRVKVTLNSNSEDIPSVMFEAGGRNYIHACQEVARIAIGELRDRYSDQLVDTEYRYHPRQPQGSDRGSYLETEGIENDVTTRHLVEMLWAMDESRAETVLAAQDREDRNRGKICKLEDKVDRLEKELAALKGEAPPQKARIRLTARKRALFVPRYQLAPKVRVVEKEVAPAQADPPVIIISSDEEEESKRINSKIEWVATQDDEDEPSIDLLCSEELEKLESLVVWESSVCNNETQLRSIKVKMVNTRSNGNGPNNPNNNINGENPTLAQVLAQQTQLMNMMMQQFQNQQNQGNNHAPPQNKLAEFLRVRPPVFSSTTNPVEASDWLHAIEKKLDLLQCTDQEKVSFASHQLHGPASEWWDHFRLNRTTAEPITWLEFTAAFRKTHIPSGVVSLKKKEFRSLTQGSRSVTEYLHEFNRLARYAPEDVRNDEERQEKFLGGLNDELSYPLMVGDYPDFQKLVDKAIRQEDKYNRMEQKKRRIAQFKTQQGNNQKPRLTLGPQSMPQGGSSSVVRPQRQFFNNNAGNNIRNQAPRPVAAPAQQQPAKREQGSKPVVCFNCGDPGHYADKCPKPQRVKVVPAQSNSAVPASKARVNHIAAAEAQGAPDVILGTFLVNSVPATVLFDSGATHSFLSMSFAGNHGMEVEDLRRPLMVSTPSNQALFLQRSPSVRIEIQGVPFLANLILLESKDLDVILGMDWLARHKGVIDCANRKVTLNSYDGRVVTVHALSSESLRSRLNQITLEEIPIVREYPDVFPDDLPGMPPKRDIEFRIDLVPGTTPIHKRPYRMAANELAEVKRQVDDLLQKGYIRPSSSPWGAPVIFVEKKDHTQRMCVDYRALNDVTIKNKYPLPRIDDLFDQLKDKFVVVFIDDILIYSRTKEEHEEHLRLALEKLREHQLYAKFSKCEFWLSEVKFLGHVISAGGVAVDPSNVESVTNWKQPKTVSEIRSFLGLAGYYRRFIENFSKIAKPMTRLLQKDVKYKWSEECERSFQELKSRLISAPILILPDPKKGFQVYCDASKLGLGCVLMQDGKVVAYASRQLRPHEKNYPTHDIELAAVVHALKIWRHYLFGTRTEVYTDHKSLKYIFTQPDLNMRQRRWLELIKDYDMGIHYHPGKANVVADALSRKGYCNATEGRQLPLELCKEFERLNLGIVGRGFVAALEAKPTLIDQVREAQINDPDIQEIKKNMRRGKAIGFLEDEHGTVWLGERICVCHVLINSSQN

SEQ ID NO: 20037 - protein, 474 aa, Oryza sativa
  Clone ID: TF_OSC14137j.C1.p1.fg
MPQGGSSSVVRPQRQFFNNNVGNNIRNQALRPVAAPTQQQPAKREQGSKPVVCFNCGDPGHYADKCPKPRRMKVVPTQSNSTVPASKARVNHVAAAEAQDAPDVILESKDLDVILGMDWLARHKGVIDCANRKVTLTSNDGRVVTVHALSSESLRSRLNQITLEEIPIVREYPDVFPDDLPGMPPKRDIEFRIDLVPGTTPIHKRPYRMAANELAEVKRHVDDLLQKGYIRPSSSPWGAPVIFVEKKDHTQRMCVDYRALNDVTIKNKYPLPRIDDLFDQLKGATVFSKIDLRSGYHQLRIKEEDIPKTAFTTRYGLFECTVMSFGLTNAPAFFMNLMNKVFMEYLDKFVVVFIDDILIYSRTKEEHEEHLRLALEKLREHQLYAKFSKCEFWLSEVKFLGHVISAGGVAVDPSNVESVTNWKQPKTVSEIRSFLGLAGYYRRFIENFSKIAKPMTRLLVTTGNNPTGVLTCVH

SEQ ID NO: 20038 - protein, 225 aa, Oryza sativa
  Clone ID: TF_OSC15745j.C1.p1.fg
KTHIPSGVVSLKKKEFRSLTQGSRSVTEYLHEFNRLARYAPEDVRNGEERQEKFLEGLNDELSYPLMTGDYHDFQKLVDKAIRQEDKYNRMEQKKRRIAQFKTQQGNNQKPRLTLRPQSMPHGGSSFVVRPQRQFFNNNAGNNIRNQAPRPVAAPTQQQPAKREQGSKPVVCFNCGDPGHYADKCPKPRRVKVVPTQSNSTVPASKARVNHVAAARGSRCSRCDF

SEQ ID NO: 20039 - protein, 474 aa, Oryza sativa
  Clone ID: TF_OSC15754j.C1.p1.fg
MPQGGSSSVVRPQRQFFNNNVGNNIRNQALRPVAAPTQQQPAKREQGSKPVVCFNCGDPGHYADKCPKPRRMKVVPTQSNSTVPASKARVNHVAAAEAQDAPDVILESKDLDVILGMDWLARHKGVIDCANRKVTLTSNDGRVVTVHALSSESLRSRLNQITLEEIPIVREYPDVFPDDLPGMPPKRDIEFRIDLVPGTTPIHKRPYRMAANELAEVKRQVDDLLQKGYIRPSSSPWGAPVIFVEKKDHTQRMCVDYHALNDVTIKNKYPLPRIDDLFDQLKGATVFSKIDLRSGYHQLRIKEEDIPKTAFTTRYGLFECTVMSFGLTNAPAFFMNLMNKVFMEYLDKFVVVFIDDILIYSRTKEEHEEHLRLALEKLREHQLYAKFSKCEFWLSEVKFLGHVISAGGVAVDPSNVESVTNWKQPKTVSEIRSFLGLAGYYRRFIENFSKIAKPMTRLLVTTGNNPTGVLTCVH

SEQ ID NO: 20040 - protein, 1732 aa, Oryza sativa
  unsure (1)..(1732): unsure at all Xaa locations
  Clone ID: TF_OSC15782j.C1.p1.np
VLRRRSSCRRRSGRPPSSSPSRRRPRPPLRSRRNPPELRRRRQPEDAXTGNNLISSWFGMVHSWFGDRTVQPMPRYKPEYLFGVEGFVQELRTMSFVIGFGTAPFYAQIRHDRHEERCRVKVTLNSNSEDIPSVMFEAGGRNYIHACQEVARIAIGELRDRYSDQLADTEYRYHPRQPQGSDRGSYLETEGIENDATTRHLVEMLWAMDESRAETVLAAQDREDRNRGKICKLEDKVDRLEKELAALKGEAPPQKARIRLTARKRTLFVPRYQLAPKIRVVEKEVAPANPPVIIISSDEEEESKRNHSKIEWVATQDDEDEPSIDLRCLEELDNGNGPNLNNPNNNNNGENPTLAQVLAQQTQLMNMMMQQFQNQQNQGNNHVPPQNKLAEFLRVRPPVFSSTTNPVEASDWLHAIEKKLDLLQCTDQEKVSFASHQLHGPASEWWDHFRLNRTTAEPITWLEFTAAFRKTHIPSGVVSLKKKEFRSLSQGSRSVTEYLHEFNRLARYAPEDVRNDEERQEKFLGGLNDELSYPLMVGDYPDFQKLVDKAIRQEDKYNRMEQKKRRIAQFKTQQGNNQKPRLTLGPQPMPQGGSSSVVRPQRQFFNNNAGNNIRNLAPRPVAVPAQQQPAKREQGNKPVVCFNCGDPGHYADKCPKPRRVKVVPAQNNSAVPTSKARVNHVAAAEAQDAPDVILGMFLVNSVPATVLFDSGATHSFLSMSFAGNHGMEVEDLRCPLMVSTPSNQALSLQRSPSVRIEIQGVPFLANLILLESKDLDVILGMDWLARHKGVIDCANRKVTLNSYDGRVVTVHALSSESLRSRLNQITLEEIPIVREYPDVFPDDLPGMPPKRDIEFRIDLVPGTTPIHKRPYRMAANELAEVKRQVDDLLQKGYIRPSSSPWGAPVIFVEKKDHTQRMCVDYRALNDVTIKNKYPLPRIDDLFDQLKGATVFSKIDLRSGYHQLRIKEYGLFECTVMSFGLTNAPAFFMNLMNKVFEYGLFECTVMSFGLTNAPAFFMNLMNKVFMEYLDKFVVVFIDDILIYSRTKEEHEEHLRLALEKLREHQLYAKFSKCEFWLSEVKFLGHIISAGGVAVDPSNVESVTNWKQPKTVSEIRSFLGLAGYYRRFIENFSKIAKPMTRLLQKDVKYKWSEECEQSFQELKSRLISAPILILPDPKKGFQVYCDASKLGLGCVLMQDGKVVAYASRQLRPHEKNYPTHDIELAAVVHALKIWRHYLFGTRTEEFERLNLGIVGRGFVAALEAKPTLIDQVREAQINDPDIQEIKKNMRRGKAIGFLEDEHGTVWLGERICVPDNKDLKDAILKEAHDTLYSIHPGSTKMYQDLKERFWWASMKREIAEYVAVCDVCQRVKAEHQKPAGLLQPLKIPEWKWEEIGMDFITGLPRTSSGHDSIWVIVDRLTKVAHFIPVKTTYSGSRLAELYMARIVCLHGVPKKIVSDRGSQFTSNFWKKLQEEMGSKLNFSTAYHPQTDGQTERVNQILEDMLRACALDFGGSWDKNLPYAEFSYNNSYQASLQMAPYEALYGRKCRTPLLWDQTGERQVFGTDILREAEEKVKIIQERLRVAQSRHKSYADNRRRDLSFEEGDYVYLRVTPLRGVHRFHTKGKLAPRFVGPYKIVSRRGEVAYQLELPQSLAGVHNVFHVSQLKKCLRVPTEEANIEQIEVQEDLTYVEKPIRILETNERRTRNRVIRFCKVQWSNHSEEESTWEREDELN

SEQ ID NO: 20041 - protein, 1742 aa, Oryza sativa
  unsure (1)..(1742): unsure at all Xaa locations
  Clone ID: TF_OSC15871j.C1.p1.np
RKSAQNLLSLSPGPIPTFPESPFSQEKNLKSSKASKATPGLEWYIPGLEIELYSRDGCSEWLGLYNRMPCYKPEYLFGVEGFVQELRTMSFAIGFGTTPFYAQIPHDRHEEKCRVKVTLNSNSEDIPSVMFEAGGRNYIHACQEVARIAIGELRDRYSDQLADTEYLYHPQPQGSDRGSYLETEGIENDATTKHLVEMLWAMDETRAETVLAAQDREDRNHGKICKLXDKVDRLEKELAALKGEAPPQKARIRLTARKRALFVPRYQLAPKMVLTRSNGNGPNNNNNNNNGENPTLAQVLAQQVQLMNIMMQQLQNQQNQGNNHAPPQNKLAEFLHVRPPTFSSTTNPVEAGDWLHAIEKKLDLLQCTDQEKVSFASHQLHGLASEWWDHFRLNRTTTEPITWLEFTAAFRKTHIPSGVVSLKKKEFRSLTQGSRSVTEYLHEFNRLARYAPEDVRTDEERHERFLEGLNDELSYPLMTGDYHDFQKLVDKAIRQEGKYNRMEQKKRRIAQFKAQQGNSQRPRLTLGPQSMRQGGSSSVVRPQRQFFNNNAGNNIRNQAPRPVAASTQQQPAKKEQGSKPVVCFNCGDPGHYADKCPKPRRVKVVPAQSNSTVPASKARVNHVAAAEAQGAPDVILGTFLVNLVPATVLFDSGATHSFLSMSFAGNHGMEVEDLRRPLMVSTPSNQALSLQRSPSVRIEIQGVPFLANLILLESKDLDVILGMDWLARYKGVIDCANRKVTITSNDGRVVTVHALSSEPLRSRLNQITLEEIPIVREYPDVFPDDLPGMPPKRDIEFRIDLVPGTTPIHKRPYRMAANELAEVKRQVDDLLQKGYIRPSSSPWGAPVIFVEKKDHTQRMCVDYRALNDVTIKNKYPLPRIDDLFDQLKGAIVFSKIDLRSGYHQLRIKEEDIPKTAFTTRYGLFECTVMSFGLTNAPAFFINLMNKVFMEYLDKFVVVFIDDILIYSRTKEEHEEHLRLALEKLREHQLYAKFSKCEFWLSEVKFLGHVISAGGVAVDPSNVESITNWNQPKTVSKIRSFLGLQEYNRFIENFSKIAKPMTRLLQKDVKYKWSECKQSFQELKNRLISAPILILPDPKKGFQVYCDASQLGLGCVLMQDGKVVAYASRQLRPHEKNYPTHDLELAAVIHALKIWRHYLFGTCIEVYTDHKSLKYIFTQPDLNMRQRRWLELIKDYDMGIQYHPGKANVVADALSRKGYCNATEGRQLPLELCKEFERLNLGIVRRGFVAALEAKPTLIDQVREAQINDPDIQEIKKNMRRGKAIGFLEDEQGTVWLGERICVPDNKDLKDAILKEAHDTLYSIHPGSTKMYQDLEERFWWASMKREIAEYVAVCDVCQRVKAEHQKPAGLLQPLKIPEWKWEEIGMDFITGLPRTSSGHDSIWVVVDRLTKVAHFIPVKTTYSGSWLAELYMARIVCLHGVPKKIVSDRGSQFTSNFWKKLQEEMGSKLNFSTAYHPXTDGQTERVNQILEDMLRACALDFGGSWDRNLPYAEFSYNNSYQASLQMAPYEALYGRKCRTPLLWDQTGERQVFGTDILREAEEKVKIIQERLRVAQSRHKSYADNRRRDLSFDEGDYVYLRVTPLRGVHRFHTKGKLVPHFVGPYKIVNRRGEVAYQLELPQSLAGVHNVFHVSQLKKCLRVPTEEANLEQIEVQEDLTYVQKPIRILEIEERRTRNRVIRFYKVQWSNHSEEESTWEREDELKSAHPHLFASSSESRGRDSV

SEQ ID NO: 20042 - protein, 1452 aa, Oryza sativa
  Clone ID: TF_OSC1652j.C1.p1.fg
MTRLLQKDVKYKWSEECEQSFQELKSRLISAPILILPDPKKGFQVYCDASKLGLGCVLMQDGKVVAYASRQLRPHEKNYPTHDIELAAVVHALKIWRHYLFGTRTEVYTDHKSLKYIFTQPDLNMRQRRWLELIKDYDMGIHYHPGKANVVADALSRKGYCNATEGRQLPLELCKEFERLNLGIVGRGFVAALEAKPTLIDQVREAQNNDPDIQEIKKNMRRGKAIGFLEDEHGTVWLGERICVPDNKDLKDAILKEAHDTLYSIHPGSTKMYQDLKERFWWASMKREIAEYVAVCDVCQRVKAEHQKPAGLLQPLKIPEWKWEEIGMDFITGLPRTSSGHDSIWVIVDRLTKVAHFIPTDGQTERVNQILEDMLRACALDFGGSWDKNLPYAEFSYNNSYQASLQMAPYEALYGRKCRTPLLWDQTGERQVFGTDILREAEEKVKIIQERLRVAQSRHKSYADNRRRDLSFEEGDYVYLRVTPLRGVHRFHTKGKLAPRFVGPYKIVSRRGEVAYQLELPQSLAGVHNVFHVSQLKKCLRVPTEEANIEQIEVQEDLTYVEKPIRILETTPGLEWYIPGLEIELCSRGGCSEWLGLYNRMPRYKPEYLFGVEGFVQELRTMSFVIGFGTAPFYTQIPHDRHEEKCRVKVTLNSNSEDIPSVMFEAGGRNYIHACQEVARIAIGELRDRYSDQLADTEYRYHPRQPQGSDRGSYLETEGIENYVTTRHLVEMLWAMDESRAETVLAAQDREDRNHGKICKLEDKVDRLEKELAALKGEAPPQKARIRLTARKRALFVPRYQLAPKMVNTRSNGNGPNNPNNNNGENPTLAQVLAQQTQLMNMMMQQFQNQQNQGNNHAPPQNKLAEFLRVRPPVFSSTTNPVEASDWLHAIEKKLDLLQCTDQEKVSFASHQLHGPASEWWDHFRLNRTTAEPITWLEFTAAFRKTHIPSGVVSLKKKEFRSLTQGSRSVTEYLHEFNRLARYAPEDVRNDEERQEKFLGGLNDELSYPLMVGDYPDFQKLVDKAIRQEDKYNRMEQKKRRIAQFKTQQGNNQKPRLTLGPQSMPQGGSSSVVRPQRQFFNNNAGNNIRNKAPRPVAAPVQQQPAKREQGSKPVVCFNCGDPGHYADKCPKPRRVKVVPAQSNSAVPVSKARVNHVAAAEAQDAPDVILGTFLVNSVPATVLFDSGATHSFLSMSFAGNHGMEVEDLRRPLMVSTPSNQALSLQRSPSVRIEIKGVPFLANLILLESKDLDVILGMDWLARHKGVIDCANRKVTLNSYDGRVVTVHALSSESLRSRLNQITLEEIPIVREYSDVFPDDLPGMPPKRDIEFRIDLVPGTTPIHKRPYRMAANELAEVKRQVDDLLQKGYIRPSSSPWGAPVIFVEKKDHTQRMCVDYRALNDVTIKNKYPLPRIDDLFDQLKGATVFSKIDLRSGYHQLESKRKIYLRQLLPL

SEQ ID NO: 20043 - protein, 1039 aa, Oryza sativa
  Clone ID: TF_OSC1666j.C1.p2.fg
MSNEKVPSNAPIAPQEGNAPQNSGSNKQPDASSEETWRTPSDPFPMEITQVAPRDDDPDYIPIEQAMVVRRRSKRKAERNRTEQEVEMDTATSAPERTETSTSAGGSGKKRCGERSKNKLPKETYNVIALDQDGKPVEPPIVRSKFSNACGTLVRTRCPINVKLWETVDDNIKTLLWNELQKYFVFPPGSEVRGRDYALKKMGDRWRQWKSDLNRDYVQKNLPPFTDYGHISQADWDTFVADHTTAEALALRKKMSYAGHVDQWREIEQRFAAAAENPTAFPRLFPDSQQPTQSAQQTTNVPSSVGSVQTTTFPVDSITGPPPCSLIVPIGRAGKTKEVAMGFAIPGRQFHNTAIPEDYARIQVAKTEPQTKPYPLDMWKYGSALQQRPEDRSLYGRAPGLEWYIPGLEIELCSRGGCSEWLGLYNRMPRYKPEYLFGVEGFVQELRTMSFVIGFGTAPFYTQIPHDRHEEKCRVKVTLNSNSEDIPSVMFEAGGRNYIHACQEVARIAIGELRDRYSDQLADTEYRYHPRQPQGSDRGSYLETEGIENYVTTRHLVEMLWAMDESRAETVLAAQDREDRNHGKICKLEDKVDRLEKELAALKGEAPPQKARIRLTARKRALFVPRYQLAPKMVNTRSNGNGPNNPNNNNGENPTLAQVLAQQTQLMNMMMQQFQNQQNQGNNHAPPQNKLAEFLRVRPPVFSSTTNPVEASDWLHAIEKKLDLLQCTDQEKVSYASHQLHGPASEWWDHFRLNRTTAEPITWLEFTAAFRKTHIPSGVVSLKKKEFRSLTQGSRSVTEYLHEFNRLARYAPEDVRNDEERQEKFLGGLNDELSYPLMVGDYPDFQKLVDKAIRQEDKYNRMEQKKRRIAQFKTQQGNNQKPRLTLGPQSMPQGGSSSVVRPQRQFFNNNAGNNIRNKAPRPVAAPVQQQPAKREQGSKPVVCFNCGDPGHYADKCPKPRRVKVVPAQSNSAVPVSKARVNHVAAAEAQDAPDVILGTFLVNSVPATVLFDSGATHSFLSMSFAGNHGMEVEDLRRPLM

SEQ ID NO: 20044 - protein, 976 aa, Oryza sativa
  Clone ID: TF_OSC17324j.C1.p1.fg
GGSSSIVRPQRQFFNNNAGNNIRNQVPRPVAAPTQQQPAKREQGSKPVVCFNCGDPGHYADKCPKPRRVKVVPTQSNSTAPASKARVNHVAAAEAQDAPDVILGTFLVNLVPATVLFDSGATHSFLSMSFAGNHGMEVEDLRHPLMVSTPSNQALSLQRSPSVRIEIKGVPFLANLILLESKDLDVILGMDWLARHKGVIDCANRKVTLISNDGRVVTVHALSSESLRSRLNQITLEEIPIVREYPDVFPDDLPGMPPKRDIEFRIDLVPGTTPIHKRPYRMAANELAEVKRQVDDLLQKGYIRPSSSPWGAPVIFVEKKDHTQRMCVDYRALNDVTIKNKYPLPRIDDLFDQLKGATVFSKIDLRSGYHQLRIKEEDIPKTAFTTRYGLFECTVMSFGLTNAPAFFMNLMNKVFMEYLDKFVVVFIDDILIYSRTKEEHEEHLRLALEKLREHQLYAKFSKCEFWLSEVKFLGHVISAGGVAVDPSNVESVTNWKQPKTVSEIRSFLGLAGYYRRFIENFSKIAKPMTRLLQKDVKYKWSEECEQSFQELKNRLISAPILILPDPKKGFQVYCDASKLGLGCVLMQDGKVVAYASRQLRPHEKNYPTHDLELAAVVHALKIWRHYLFGTRTEDYDMGIHYHPGKANVVADALSRKGYCNATEGRQLPLELCQEFERLNLGIVSREIKKNMRRGKAIGFLEDEQGTVWLGERICVPDNKDLKDVILKEAHDTLYSIHPGSTKMYQDLKERFWWASMKREIAEYVAVCDVCQRVKAEHQKPASLLQPLKIPEWKWEEIGMDFITGLPRTSSGHDSIWVIVDRLTKVAHFIPVKTTYSGSRLAELYMARIVCLHGVPKKIVSDRGSQFTSNFWKKLQEEMGSKLNFSTAYHPQTDGQTERVNQILEDMLRACALDFGGSWDKSLPYAEFSYNNSYQASLQMAPYEALYGRKCRTPLLWDQTGERQVFGTDILREAEEK

SEQ ID NO: 20045 - protein, 744 aa, Oryza sativa
  Clone ID: TF_OSC17993j.C1.p1.gm
MEPENSAAGFLSLRPPSLSPVAIKSIPELRSSVSATRRSLSPSESSPHRRTFSPPSPPCSGSPPSSLRTSSRLGVTSIGFAALPSTPSAPPFRPPTAGAPSSSSSRTAPPPLAASVVVSAALVVPGWDPAVSRPRPRVRLTRGTHGADRRQPRAPDAAASEDPLFVEVEAAPRPYKDRSSGLCCNALPYFHMSSGANEGYTSCGPEKVSFASHQLHGPASEWWDHFRLNRTTAEPITWLEFTAAFRKTHIPSGVVSLKKKEFRSLTQGSRSVTEYLHEFNRLARYAPEDVRNDEERQEKFLGGLNDELSYPLMVGDYPDFQKLVDKAIRQEDKYNRMEQKKRRIAQFKTQQGNNQKPRLTLGPQSMPQGGSSSVVRPQRQFFNNNAGNNIRNQAPRPVAAPAQQQPAKREQGSKPVVCFNCGDPGHYADKCPKPRRVKVVPVQNNSAVPASKARVNHVAAAEAQDAPDVVLVREYPDVFPDDLPANELAEVKRQVDDLLQKGYIRPSSSPWGAPVIFVEKKDHTQRMCVDYRALNDVTIKNKYPLPRIDDLFDQLKGATVFSKIDLRSGYYQLRIKEEDIPKTAFTTRYGLFECTVMSFGLTNAPAFFMNLMNKVFMEYLDKFGVVFIDDILIYSRTKEEHEEHLRLALEKLREHQLYAKFSKCEFWLSEVKFLGHVISAGGVAVDPSNVESVTNWKQPKTVSEIRSFLGLAGYYRRFIENFSKIAKPMTRLLQKDVKYKWSEE

SEQ ID NO: 20046 - protein, 1564 aa, Oryza sativa
  unsure (1)..(1564): unsure at all Xaa locations
  Clone ID: TF_OSC18197j.C1.p1.np
FGDRTVQPMPRYKPEYLFGVEGFVQELRTMSFVIGFGTAPFYAQIPHDRHEEKCRVKVTLNSNSEEVPSVMFEAGGRNYIHACQEVARIAIGELRDRYSDQLADTEYRYHPRQPQGSDRGSYLETEGIENDVTTKHLVEMLWAMDESRAETVLAAQDREDRNRGKICKLEDKVDRLEKELAALKGEAPPQKARIRLTARKRALFVPRYQLAPKVRVVEKEVAPAQADPPVIIISSDEEDESKRNHSKIEWVATQDDEDEPSIDLRCLEELDNGNGPNNPNNNNGENPTLAQVLAQQTQLMNMMMQQFQNQQNQGNNHAPPQNKLAEFLRVRPPVFSSTTNPVEASDWLHAIEKKLDLLQCTDQEKVSFASHQLHGPASEWWDHFRLNRTTAEPITWLEFTAAFRKKHIPSGVVSLKKKEFRSLSQGSRSVTEYLHEFNRLARYARKDVRNDEERQKKFLRELNDELSYPLMVGDYPDFQKLVDKAIRQEDKYNRMEQKKRRIAQFKTQQGNNQKPRLTLGPQPMPQGGSSSVVRPQRQFFNNNAGNNIRNQAPRPVAAPAQQQPAKREQGNKPVVCFNCGDPGHYADKCPKPRRVKVVSAQSNSAVPASKARVNHVAAAEAQDAPDVILGTFLVNSVPATVLFDSGATHSFLSMSFAGNHGMEVEDLRRPLMVSTPSNQALSLQRSPSVRIEIQGVPFLANLILLESKDLDVILGMDWLARHKGVIDCANRKVTLNSYDGRVVTVHALSSESLRSRLNQITLEEIPIVREYPDVFPDDLPGMPPKRDIEFRIDLVPGTTPIHKRPYRMAANELAEVKRQVDDLLQKGYIRPSSSPWGAPVIFVEKKDHTQRMCVDYRALNDVTIKNKYPLPRIDDLFDQLKGATVFSKIDLRSGYHQLRIKEYGLFECTVMSFGLTNAPAFFMNLQLRIKEYGLFECTVMSFGLTNAPAFFMNLMNKVFMEYLDKFVVVFIDDILIYSRTKEEHEELLRLALEKLREHQLYAKFSKCEFWLSEVKFLGHVISAGGVAVDPSNVESVTNWKQPKTVSEIRSFLGLAXYYRRFIENFSKIAKPMTRLLQKDVKYKWSEECEQSFQELKSRLISAPILILPDPKKGFQVYCDASKLGLGCVLMQDGKVVAYASRQLRPHEKNYPTHDIELAAVVHALKIWRHYLFGTHTEEFERLNLGIVGRGFVAALEAKPTLIDQVREAQINDPDIQEIKKNMRRGKAIGFLEDEQGTVWLGERICVPDNKDLKDAILKEAHDTLYSIHPGSTKMYQDLKERFWWASMKREIAEYVAVCDVCQRVKAEHQKPAGLLQPLKIPEWKWEEIGMDFITGLPRTSSGHDSIWVIVDRLTKVAHFIPVKTTYSGSRLAELYMARIVCLHGVPKKIVSDRGSQFTSNFWKKLQEEMGSKLNFSTAYHPQTDGQTERVNQILEDMLRACALDFSGSWDKNLPYAEFSYNNSYQASLQMAPYEALYGRKCRTPLLWDQTGERQVFGTDILREAEEKVKIIQERLRVAQSRHKSYADNRRKDLSFEEGDYVYLRDGTLYNLQNFQTRKSLCKRN

SEQ ID NO: 20047 - protein, 340 aa, Oryza sativa
  Clone ID: TF_OSC18999j.C1.p1.gm
SLTQGSRSVTEYLHEFNRLARYAPEDVRTDEERQEKFLEGLNDELSYPLMTGDYPDFQKLVDKAIRQEDKYNRMEQKKRRIAQFKTQQGSNQKPRLTLGHQSMPQGGSSSVVRPQRQFFNNNAGNNIRNQAPRPVAAPTQQQPAKREQGSKPVVCFNCGDPGHYADKCPKPRRVKVVPTQSNSTVPASKARVNHVAAAEAQDAPDVILVKFLGHVISAGGVAVDPSNVESVTNLKQPKTVSEIRCFLGLAGYYRSTLAPSSIEPPSPPLLQPCAAAVPVIVVAREDCRRGRQVAAVLVRLFVAAEDRRSTVAAVDPIFSAVSTSSPSPSVGLPPLLWSPI

SEQ ID NO: 20048 - protein, 1687 aa, Oryza sativa
  Clone ID: TF_OSC19032j.C1.p3.fg
MPRYKPEYLFGVDGFVQELRTMSFVIGFETAPFYAQIRHDRHEEKCRVKVTLNSNSEDIPSVMFEAGGRNYIHACQEVARIAIGELRDRYSDQLADTEYRYHPRQPQGSDRGSYLETEGIENDATTRHLVEMLWAMDESRAETVLAAQDREDRNRGKICKLEDKVDRLEKELAELKGEAPPQKARIRLTARKRALFVPRYQLAPKIRVVEKEVAPTLADPPVIIISDDEEEESKRNNSKIEWFSPVSLLVPCPCLMVNTRSNGNGPSNNNNGENPTLAQVLAQQTQLMNMMMQQLQNQGNNHASPQNKLAEFLRVRPPIFSSTTNPVEAGDWLHAIDKKLDLLQCTDQEKVSFASHQLHGPASEWWDHFRLNRTTAEPITWLEFTAAFRKTHIPSGVVSLKKKEFRSLTQGSRSVTEYLHEFNRLARYAPEDVRNDEERQEKFLEGLNDELSYPLMTGDYADFQKLVDKAIRQEDKYNRMEQKKRRIAQFKTQQGNNQRPRLTLGPQSMPQGGSSSVVRPQRQFFNNNAGNNIRNQAPRPVAAPTQQQPAKREQGSKSVVCFNCGDPGHYADKCPKPRRVKARVNHVAAAEAQDAPDVILGTFLVNSVHATVLFDSGATHSFLSMSFAGNHGMEVEDLRRPLMVSTPSNQALSLQRSPSVRIEIQGIPFLANLILLESKDLDVILGMDWLARYKGVIDCANRKVTLTSNDGRVVTVHALSSETLRSRLNQITLEEIPVVREYSDVFPDDLPGMPPKRDIEFRIDLVPGTTPIHKRPYRMAANELAEVKRQVDDLLQKGYIRPSSSPWGAPVIFVEKKDHTQRMCVDYRALNDVTIKNKYPLPRIDDLFDQLKGATVFSKIDLRSGYHQLRIKEEDIPKTAFTTRYGLFDVFMEYLDKFVVVFIDDILIYSRTKEEHEEHLCLALEKLREHQLYAKFSKCEFWLSEVKFLGHVISAGGVAIDPSNVESVTNWKQPKTVSEIRSFLGLAGYYRRFIENFSKIAKPMTRLLRKDVKYKWSEECERSFQELKNRLISAPILILPDPKKGFQVYCDASKLGLGCVLMQNGKVVAYASRQLRPHEKNYPTHDIELAVVVHALKIWRHYLFGTRTEVYTDHKSLKYIFTQPDLNMRQRRWLELIKDYDMGIHYHPGKANVVADALSRKGYCNATEGRQLPLELCKEFERLNLGIVSRGCVAALEAKPTLIDQVREAQINDPDIQEIKKNMRRGKAIGFLEDEQGTVWLGERICVPDNKDLKDAILQEAHDTLYSIHPGSTKMYQDLKERFWWASMKREIAEYVVVCDVCQRVKAEHQKPAGLLQPLKIPEWKWEEIGMDFITGLPRTSSGHDSIWVIVDRLTKVAHFIPVKTTYSRSRLAELYMARIVCLHGVPKKIVSDRGSQFTSNFWKKLQEEMGSKLNFSTAYHPQTDGQTERVNQILEDMLRACALDFGGSWDKNLPYAEFSYNNSYQASLQMAPYEALYGRKCRTPLLWDQTGERQVFGTDILREAEEKVKIIQERLRVAQSRHKSYADNRCRDLSFEEGDYVYLRVTPLRGVHRFHTKGKLAPRFVGPYKIVSRRGEVAYQLELPQSLAGVHNVFHVSQLKKCLRVPTEEANLEQIEVQEDLTYVEKPIRILETNERRTRNRVIRFCKVQWSNHSEEESTWEREDELKSAHPHLFASSSESRGRDSV

SEQ ID NO: 20049 - protein, 1269 aa, Oryza sativa
  Clone ID: TF_OSC19140j.C1.p2.fg
MMMQQLQNQQNQGNNHAPPQNKLAEFLRVRPPIFSSTTNPVEAGDWLHAIEKKLDLLQCTDQEKVSFASHQLHGPASEWWDHSRLNRITAEPITWLEFTAAFRKTHIPSGVVSLKKKEFRSLTQGSRSVTEYLHEFNRLARYALEDVRTDEERQEKFLEGLNDELSYPLMTGDYPDFQKLVDKAIRQEDKYNRMEQKKRRIAQFKTQQGNNQRPRLTLGPQSMPQGGSSSVVRPQRQFFNNNAGNNIRNQAPRPVAAPTQQQPAKREQGSKPVVCFNCGDPGHYADKCPKPRRVKAVPAQSNSTAPAPKARVNHVAATEAQGAPDVILGTFLVNLVPATVLFDSGATHSFLSMSFAGNHVMEVEDLRRPLMVNTPSNQALSLQRSPSVRIEILRSLFLANLILLESKDLDVILGMDWLARYKGVIDCANRKVTLTSDDGRVVTIHALSSESLRSRLNQITLEEIPIVREYPDVFPDDLPGMPPKRDIEFRIDLVPGTTPIHKRPYRMAANELAEVKRQVDDLLQKGYIRPSSSPWGAPVIFVEKKDHTQRMCVDYRALNDMTIKNKYPLPRIDDLFDQLKGATVFSKIDLRSGYHQLRIKEEDIPKTAFTTRYGLFECTVMSFGLTNAPAFFMNLMNKVFMEYLDKFVVVFIDDILIYSRTKEEHIEHLRLALEKLREHQLYAKFSKCEFWLSEVKFLGHVISAGGVAVDPSNVESVTNWKQPKTVSEIRSFLGLAGYYRRFIENFSKIAKPMTRLLQKDVKYKWSEECEQSFQELKNRLISAPILILPDPKKGFQVYCDASKLGLGCVLMQDGKVVAYASRQLRPHEKNYPTHDLELAAVVHALKIWHHYLFGTRTEVYTDHKSLNRGFVAALEAKPTLIDQVREAQINDPDIQEIKKNMRRGKAIGFLEDEQGTVWLGERICVPDNKDLKDAILKEAHDTLYSIHPGSTKIYQDLKERFWWASMKREIAEYVAVCDVCQRIKAEHQKPAGLLQPLKIPEWKWEEIGMDFITGLPRTSSGHDSIWVIVDRLTKVAHFIPVKTTYSGSRLAELYMARIVCLHGVPKKIVSDQGSQFTSKFWKKLQEEMGSKLNFSTAYHPQTDGQTERVNQILEDMLRACALDFGGSWDKNLPYAEFSYNNSYQASLQMAPYEALYGRKCRTPLLWDQTGERQVFGTDILREAEEKVKIIQERLRVAQSRHKSYADNRRRDLSFDAGDYVYLHVTPLRGVHRFHTKGKLAPRFVGPYKIVSRRGEVAYQLELPQFGRRP

SEQ ID NO: 20050 - protein, 540 aa, Oryza sativa
  Clone ID: TF_OSC19159j.C1.p1.gm
MMMQQLQNQQNQGNNHAPPQNKLAEFLRVRPPIFSSTTNPVEAGDWLHAIEKKLDLLQCTDQEKVSFASHQLHGPASEWWDHSRLNRITAEPITWLEFTAAFRKTHIPSGVVSLKKKEFRSLTQGSRSVTEYLHEFNRLARYALEDVRTDEERQEKFLEGLNDELSYPLMTGDYPDFQKLVDKAIRQEDKYNRMEQKKRRIAQFKTQQGNNQRPRLTLGPQSMPQGGSSSVVRPQRQFFNNNAGNNIRNQAPRPVAAPTQQQPAKREQGSKPVVCFNCGDPGHYADKCPKPRRVKAVPAQSNSTAPAPKARVNHVAATEAQVREYPDVFPDDLPERIHQTEFISMGSSSNFCGKERPYPEDLKGATVFSKIDLRSGYHQLRIKEEDIPKTAFTTSLAPPLSPPLQPCSAVAPVVAVARGGRHRGRRRVAVLVRPFAVAEDRRSIVAVVKPKVDAASSSTPSPSVDLPPPFWSLVSSPRRPLRPGALRSRRRAIVRRRACAPEPPQVVTSPLTSSSSSLVVRPWIGEEFEEFQGGDYDPGK

SEQ ID NO: 20051 - protein, 1293 aa, Oryza sativa
  Clone ID: TF_OSC20818j.C1.p1.np
MVHCGELCCAKGIVTISPFAAPGLEWYIPGLEIELYSRMSRYKPEYLFGVEGFVQKLRTMSFVIGFGTAPFYAQIPHDRHEEKCRVKVTLNSNSEDIPSVMFEAGGRNYIHACQEVARIAIGELRDRYSDQLADSEYRYHPRQPQGSDRGSYLETEGIENDATTKHLVEMLWAMDETRAETVLAAQDREDRNRGKICKLEDKVDRLEKELAALKGEAPPQKARIRLTARKRALFVPRYQLAPKVRVVEKEVTPALADPPVINMVLTRSNGNGPNNTNNNNNNGENPTLAQVLAQQTQLMNMMMQQLQNQQNQGNNHAPPQNKLAEFLRVRPPIFSSTTNPVEAGDWLHAIEKKLDMLQCTDQEKVSFASHQLHGPASEWWDHFRLNRTTAEPITWLEFTAAFRKTHIPSGVVSLKKKEFRSLTQGSRSVTEYLHEFNRLARYAPEDVHTDEERQEKFLEGLNDELSYPLMTGDYPDFQKLVDKAIRQEDKYNRMEQKKRRIAQFKTQQGNNQKPRLTLGPQSMPQGGFSSVVRPQRQFFNNNAGNNIRNQAPRPVAAPTQQQPAKKEQGSKLVVCFNCGDPGHYADKCPKPRRVKVVPAQSNSTAPASKARVNHVAAAEAQDAPDVILGTFLVNLVPATVLFDSGATHSFLSMSFAGNDGMEVEDLRRHLMVSTPSNQALSLQHSPSVRIEIQGVPFLANLILLESKDLDVILGMDWLARHKGVIDCANRKVTLTSNDGRVVTIHALSSESLRPSLNQITLEEIPTVREYPDVFPDDLPGMPTKRDIEFRIDLVPGTTPIHKRPYRMAANELAEVKRQVDDLLQKGYIRPSSFPWGAPVIFVEKKDHTQRMCVDYRALNDVTIKNKYPLPRIDDLFDQLKGATVFSKIDLRSRYHQLRIKEEDIPKTAFTTRYGLFECTVMSFGLTIAPAFFMNLMNKVFMEYLDKFVLVFIDDILIYSRTKEEHEEHLRLVLEKLREHQLYAKFSKCEFWLSEVKFLGHVISAGGVAVDPSNVESVTNWKQPKTVSEIRSFLGLAGYYRRFIENFSKIAKPRTRLLQKDVKYKWSEECEQSFQELKNRLISAPILILPDPKKGFQVYCDASKHGLGCVLMQDGKVVAYASRQLRPHEKNYPTHDLELAAVVHALKIWRHYLFGTRTEVYTDHKSLKYIFTQPDLNMRQRRWLELIKDYDMGIHYHPGKANVVADALSRKGYCNATEGRQLPLELCKEFERLNLGIVRRGFVAALEAKPTLIDQVREAQINDLDIQEIKKNMRRGKAIGFMEDEQGTVWLGER

SEQ ID NO: 20052 - protein, 1325 aa, Oryza sativa
  Clone ID: TF_OSC20854j.C1.p2.fg
MVITRSNGNGPNNPNNNNEGNPTLAQVLAQQTQLMNMMMQQLQNQQNQGNNHAPPQNKLAEFLRVRPPIFSSTTNPVEAGDWLHAIEKKLDLLQCTDQEKVSFASHQLHGPASEWWDHFRLNRTTAEPITWLEFTAAFRKTHIPSGVVSLKKKEFRSLTQGSRSVTEYLHEFNRLARYAPEDVRNDEERQEKFLEGLNDELSYPLMAGDYPDFQKLVDKAIRQEDKYNRMEQKKRRIAQFKTQPGNNQRPRLTLGPQSMPHGGSSSVVRPRRQFFNNNAGNNIRNQAPRPVAVSTQQQPAKREQGSKPVVCFNCGDPGHYADKCPKPRRVKVVPAQSNSTASASKARVNHVAAAEAQDAPDVILESKDLDVILGMDWLARHKGVIDCANRKVTLTSNDGRVVTVHALSSESLRSRLNQITLEEIPIVREYPDVFPDDLPGMPPKRDIEFRIDLVPGTTPIHKRPYRMAANELAEVKRQVDDLLQKGYIRPSSSPWGAPVIFVKKKDHTQRMCVDYRALNDVTIKNKYPLPRIDDLFDQLKGATVFSKIDLRSGYHQLRIKEEDIPKTAFTTRYGLFECTVMSFGLTNAPAFFMNLMNKVFMEYLDKFVVVFIDDILICSRTKEEHEEHLRLVLEKLREHQLYAKFSKCEFWLSEVKFLGHVISAGGVAVDPSNVESVTNWKQPKTVSEIRSFLGLAGYYRRFIENFSKIAKPMTRLLQKDVKYKWSEECEQSFQELKNRLISAPILILPDPKKGFQVYCDASKLGLGCVLMQDGKVVAYASRQLRPHEKNYPTHDIELAAVVHALKIWRHYLFGTRTEANVVADALSRKGYCNATEGRQLPLELCKEFERLNLGIVSRGFVAALEAKPTLIDQVREAQINDPDIQEIKKNMRRGKAIGFLEDEQGTVWLGERICVPDNKDLKDAILKEAHDTLYSIHPGSTKMYQDLKERFWWASMKREIAEYVAVCDVCQRVKAEHQKPAGLLQPLKIPEWKWEEIGMDFITSLPRTSSGHDSIWVIVDRLTKVAHFIPVKTTYSGSRLAELYMARIVCLHGVPKKIVSDRGSQFTSNFWKKLQEEMGSKLNFSTAYHPQTDGQTERVNQILEDMLRACALDFGGSWDKNLPYAEFSYNNSYQASLQMAPYEALYGQKCRTPLLWDQTGERQVFGTDILREAEEKVKIIQERLRVAQSRHKSYADNRRRDLSFEEGDYVYLRVTPLRGVHCFHTKGKLSPRFVGPYKIVSRRGEVAYQLELPQSLAGVHNVFHVSQLKKCLRVPTEEANLEQIEVQEDLTYVEKPIRILETDERRTRNQVIRFCKVQWSNHSEE

SEQ ID NO: 20053 - protein, 1754 aa, Oryza sativa
  Clone ID: TF_OSC22342j.C1.p3.fg
MKITSSKLIRPVPVQQDQSQENNSSGRKQQSTRLRSGGDKPTGVAGESIPLVFEGMTMIREWCTVHGSLRGTRLRSGGDKPTGVAGESMPLVFEGVIMIQEAPGLEWLIPGLEVELCSRDGCSEWLGLYNRMPRYKHEYLFGVEGFVQELRTMSFVIGFGTAPFYAQIPHDRHEEKCRVKVTLNSNSEDVPSVMFEAGGRNYIHACQEVARIAIGELRDRYSDQLADTEYRYHPRQPQGSDRGSYLEIEGIENDATTRHLVEMLWAMDESRAETVLAAQDREDRNRGKICKLEDKVDRLEKELAALKGEAPPQKARIRLTARKRALFVPRYQLAPKMVNTRSNGNGPNHPNNNNNGENPTLAQVLAQQTQLMNMMMQQFQNQQNQGNNHVPPQNKLAEFLRVRPPVFSSTTNPVEAGDWLHAIEKKLDLLQCTDQEKVSFASHQLHGPASEWWDHFRLNRINAEPITWLEFAAAFRKTHIPSGVVSLKKKEFRSLTQGSRSVTEYLHEFNRLARYAPEDVRNDEERQEKFLGGLNDELSYPLMGGSSSVVRPQRQFFNNNAGNNIRNQAPRPVAAPTQQQPTKREQGSKPVVCFNCGDPGHYADKCPKPRRVKVVPAQNNSAVPASKARVNHVAAAEAQDAPDVILGTFPVNSVPATVLFDSGATHSFLSMSFAGNNGMEVEDLRRPLMVSTPSNQALSLQCSPSVRIEIQGIPFLANLILLESKDLDVILGMDWLARHRGVIDCANRKVTLTSNDGRVVTVHALSSESLRSRLNQITLEEIPIVREYPDVFPDDLPGMPPKRDIEFRIDLVPGTTPIHKRPYRMAANELAEVKRQVDDLLQKGYIRPSSSPWGAPVIFVEKKDHTQRMCVDYRALNDVTIKNKYPLPRIDDLFDQLKGATVFSKIDLRSGYHQLRIKEEDIPKTAFTTRYGLFECTVMSFGLTNAPAFFMNLMNKVFMEYLDKFVVVFIDDILIYSRTKEEHEEHLRLALEKLREHQLYAKFSKCEFWLSEVKFLGHVISAGGVAVDPSNVESVTNWKQPKTVSEIRSFLGLAGYYRRFIENFSKIAKPMTRLLQKDVKYKWSEECEQSFQELKSRLISAPILILPDPKKGFQVYCDASKFGLGCVLMQDGKVVAYASRQLRPHEKNYPTHDLELAAVVHAFKIWRHYLFGTRTEVYTDHKSLKYIFTQPDLNMRQRRWLELIKDYDMGIHYHPGKANVVADALSRKSYCNATEGRQLPLELCKEFERLNLGIVSRGFVTALEAKPTLIDQVREAQINDPDIQEIKKNMRRGKAIGFLEDEQGTIWLGERICVPDNKDLKDAILKEAHDTLYSIHPGSTKMYQDLKERFWWASMKREIAEYVAVCDVCQRVKAEHQKPAGLLQPLKIPEWKWEEIGMDFITGLPRTSSGHDSIWVIVDRLTKVAHFIPVKTTYSESRLAELYMARIVCSHGVPKKIVSDRGSQFTSNFWKKLQEEMGSKLNFSTAYHPQTDGQTERVNQILEDMLRACALDFGGNWDKNLPYAEFSYNNSYQASIQMAPYEALYGRKCRTPLLWDQTGERQVFGTDILREAEEKVKIIQERLRVAQSRHKSYADNRRRDLSFEEGDYVYLRVTPFRGVHRFHTKGKLAPRFVGPYKNVSRRGEVAYQLELPQSLAGVHNVFHVSQLKKCLRVPTEEANLEQIEVQEDLTYVEKPIRILETNERRTRNRVIRFCKVQWSNHSEEESTWEREDELKSAHPHLFASSSESRGRDSV

SEQ ID NO: 20054 - protein, 1709 aa, Oryza sativa
  unsure (1)..(1709): unsure at all Xaa locations
  Clone ID: TF_OSC23002j.C1.p1.np
PLFSLSSAQIPSFPESPFSQKKSLKSSKASKATPGLEWYIPGLEIELCSRGGCSEWLGLYNRMPRYKPEYLFGVEGFVQELRTMSFVIRFGTAPFYAQIPHDRHEEKCRVKVTLNSNSEDIPSVMFEAGGRNYIHACQEVARIAIGELRDRYSDQLADTEYRYHPRQPQGSDRGSYLETEGIENDATTKHLVEMLWAMDESRAETVLAAQDREDRNRGKICKLEDKVDRLEKELAALKGEAPPQKARIRLTARKRALFVPRYQLAPKMVNTRSNGNGPNNPNNNNNGENPTLAQVLAQQTQLMNMMMQQFQNQQNQGNNHAPPQNKLAEFLRVRPPVFSSTTNPVEASDWLHAIEKKLDLLQCTDQEKVSFASHQLHGPASEWWDHFRLNRITAEPITWLEFTAAFRKTHIPSGVVSLKKKEFRSLTQGSRSVTEYLHEFNRLARYAPEDVRNDEERQEKFLGGLNDELSYPLMVGDYPDFQKLVDKAIRQEDKYNRMEQKKRRIAQFKTQQGNNQKPRLTLGPQPMPQGGSSSVVRPQRQFFNNNAGNNIRNQAPRPVAAPAQQQPAKREQGNKPVVCFNCGDPGHYADKCPKPRRVKVVPVQNNSAVPASKARVNHVAAAEAQDAPDVILGTFLVNSVPATVLFDSGATHSFLSMSFAGNHGMEVEDLRRPLMVSTPSNQALSLQRSPSVRIEIQGVPFLANLILLESKDLDVILGMDWLARHKGVIDCANKKVTLTSYDGRVVTVHALSSESLRSRLNQITLEEIPIVREYPDVFPDDLPGMPPKRDIEFRIDLVPGTTPIHKRPYRMAANELAEVKRQVDDLLQKGYIRPSSSPWGAPVIFVEKKDHTQRMCVDYRALNDVTIKNKYPLPRIDDLFDQLKGATVFSKIDLRSGYHQLRIKEEDIPKTAFTTRYGLFECTVMSFGLTNAPAFFMNLMNKVFMEYLDKFVVVFIDDILIYSRTKEEHEEHLRLALEKLREHQLYAKFSKCEFWLTEVKFLGHVISAGGVAVDPSNVESVTNWKQPKTVSEIRSFLGLAGYYRRFIENFSKIAKPMTRLLQKDVKYKWSEECERSFQELKSRLISAPILILPDPKKGFQVYCDASKLGLGCVLMQDGKVVAYASRQLRPHEKNYPTHDIELAAVVHALKIWRHYLFGTRTEVYTDHKSLKYIFTQPDLNMRQRRWLELIKDYDMGIHYHPGKANVVADALSSKGYCNATEGRQLPLELCKEFERLNLEIVSRGFVAALEAKPTLIDQVREAQINDPDIQEIKKNMRRGKAIGFLEDEQGTVWLGERICVPDNKDLKDAVLKEAHDTLYSIHPGSTKMYQDLKERFWWASMKREIAEYVAVCDVCQRVKAEHQKPAGLLQPLKIPEWKWEEIGMDFITGLPRTSSGHDSWVIVDRLTKVAHFIPVKTTYSGSRLAELYMARIVCLHGVPKKIVSDRGSXFTSNFWKKLQEEMGSKLNFSTAYHPQTDGQTERVNQILEDMLRACALDFGGSWDKNLPYAEFSYNNSYQASLQMAPYEALYGRKCRTPLLWDQTGERQVFGTDILREAEEKVKIIQERLRVAQSRHKSYADNRRRDLSFEEGDYVYLRVTPLRGVHRFHTKGKLAPRFVGPYKIVSRRGEVAYQLELPQSLAGFHNVFHVSQLKKCLRIPTEEANIEQIEVQEDLTYVEKPIRILETNERRTRNRVIRFCKVQWSNHSEE

SEQ ID NO: 20055 - protein, 766 aa, Oryza sativa
  Clone ID: TF_OSC23131j.C1.p2.fg
MVNTRSNGNGPSNNNNGENPTLAQVLAQQTQLMNMMMQQLQNQQNQGNNHVPPQNKLAEFLRVRPPVFSSTTNPVEAGDWLHAIEKKLDLLQCTDQEKVSFASHQLQGPASEWWDHFRLNRITAEPITWLEFTAAFQKTHIPSGVVSLKKKEFRSLTQGSRSVTEYLHEFNRLARYAPEDVRNGEERQEKFLEGLNDELSYPLMTGDYHDFQKLVDKAIRQEDKYNRMEQKKRRIAQFKTQQGNNQKPRLTLRPQSMPHGGSSFVVRPQRQFFNNNAGNNIRNQAPRPVAAPTQQQPAKREQGSKPVVCFNCGDPGHYADKCPKPRRVKVVPTQSNSTVPASKARVNHVAAAEAQDAPDVILGTFLVNSVPATVLFDSGATHSFLSMSFAGNHGMEVEDLRRPLMVSTPSNQALSLHRSPSVRIEIQGVPFLANLILLESKDLDVILGMDWLARHKGVIDCANRKVTLTSNDGRVVTVYALSSESLRSRLNQITLEEIPIVREYPDVFPDDLPGMPPKRDIEFRIDLVPGTTPIHKRPYRMAANELAEVKRHVDDLLQKGYIRPSSSPWGAPVIFVEKKDHTQRMCVDYRALNDVTIKNKYPLPRIDDLFDQLKGATVFSKIDLRSGYHQLRIKEEDIPKTAFTTRYGLFECTVMSFGLTNAPAFFMNLMNKVFMEYLDKFVVVFIDDILIYSRTKEEHEEHLRLALEKLREHQLYAKFSKCEFWLSEVKFLGHVISAGGVAVDPSNVESVTNWKQPKTVSEIPVF

SEQ ID NO: 20056 - protein, 771 aa, Oryza sativa
  unsure (1)..(771): unsure at all Xaa locations
  Clone ID: TF_OSC24830j.C1.p1.np
MPRYKPEYLFGVEGFVQELRSMSFVIGFGTAPFYAQIPHDRHEEKCRVKVTLNSNSEDIPLVMFEAGGRNYIHACQEVARIAIGELRDRYSDQLADTEYRYHPRQPQGSDRGSYLETEGIENDATTKHLVEMLWAMDESRAETVLAAQDREDRNRGKICKLEDKVDRLEKELAALKGEAPPQKARIRLTARKRALFVPRYQLAPKVRVVEKEVAPAQADPPVIIISSDEEEESKRNNSKIEWVATQDDKDEPSIDLRCLEELEXLFPVSLLVPCPCQVNTRSNGNGPNNPNNNNGENPILAQVLAQQTQLMNMMMQQFQNQENQGNNHAPPQNKLAEFLRVRPPVFSSTTNPVEASDWLHAIEKKLDLLQCTDQEKVSFASHQLHGPASEWWDHFRLNRTTAEPIIWLEFTAAFRKTHIPSGVVSLKKKEFRSLTQGSRSVTEYLHEFNRLARYPEDVRNDEERQEFLGGLNDELSYPLMVGDYPDFQKLVDKAIRQEDKYNRMEQKKRRIAQFKTRQGNNQKPHLTLGPQPMPQGGSSSVVRPQRQFFNNNAGNNIRNQGPRPVAAPAQQQPVKREQGSKPVVCFNCGDPGHYADKCPKPRRVKVVPAQNNSAVPASKARVNHVAAAEAQDAPDVILGTFLVNSVPATVLFDSGATHSFLSMSFVGNHGMEVEDLRRPLMVSTPSNQALSLQRSPSVRIEIQGVPFLANLILLESKDLDVILGMDWLARHKGVIDCANKKVTLTSYDGRVVTVHALSSESLRSRLNQITL

SEQ ID NO: 20057 - protein, 1298 aa, Oryza sativa
  Clone ID: TF_OSC25097j.C1.p1.fg
TTNPVEAGDWLHAIEKKLDLLQCTDQEKASFASHQLHGPASEWWDHFRLNRTTAEPITWLEFTAAFRKTHIPSGVVSLKKKEFRSLTQGSRSVTEYLHEFNRLARYAPEDVRNDEERQEKFLEGLNDELSYPLMTGDYSDFQKLVDKAIRQEDKYNRMEQKKRRIAQFKTQQGNNQRPRLTLGPQSMPHGGSSSVVRPQRQFFNNNAGNNIRNQALRPVAAPTQQQPAKREHGSKPVVCFNCGDPGHYADKCPKPRRMKVVPVQSNSTAPASKARVNHVAAAEAQDAPDVILGTFLVNLVPATVLFDSGATHSFLSMSFAGNHGMKVEDLRRPLMVSTPSNQALSLQGSPSVRIEIKGVPFLANLILLESKDLDVILGMDWLARHKGVIDCANRKVTLTSNDGRVVTVHALSSESLRSRLNQITLEEIPIVREYPDVFPDDLPGMPPKRDIEFRIDLVPGTTPIHKRPYRMAANELAEVKRQKDHTQRMCVDYRALNDVTIKNKYPLPRIDDLFDQLKGATVFSKIDLRSGYHQLRIKEEDIPKTAFTTRYGLFECTVMSFGLTNAPAFFMNLMNQVFMEYLDKFVVVFIDDILIYSRTKEEHEEHLRLALEKLREHQLYAKFSKCEFWLSEVKFLGHVISAGGVAVDPSNVESVTNWKQPKTVSEIRSFLGLAGYYRRFIENFSKIAKPLTRLLQKDVKYKWSEECEQSFQELKSSLISAPILILPDPKKGFQVYCDASKLGLGCVLMQDGKVVAYASRQLGPHEKNYPTHDIELAAVVHALKIWRHYLFGTRTEVYTDHKSLKYIFTQPDLNMRQRRWLELIKDYDMGIHYHPGKANVVADALSRKGYCNATEGRHLPLELCKEFERLNLGIVSIGFVAALEAKPTLIDQVREAQINDPDIQDIKKNRRRGKAIGFLEDEHGTVWLGERICVPDNKDLKDAILKEAHDTLYSIHPGSTKMYQDLKERFWWASMRREIAEYVAVCDVCQRVKAEHQKPAGLLQPLKIPEWKWEEIGMDFITGLPRTSSGHDSIWVIVDRLTKVAHFIPVKTTYSGSRLAELYMARITDGQTERVNQILEDMLRACALDFGGSWDKNLPYAEFSYNNSYQASLQMAPYEALYGQKCRTPLLWDQTGERQVFGTDILREAEEKSRHKSYADNRRRDLSFEEGDYVYLHVTPFRGVHRFHTKGKLAPRFVGPYKIVSRRGEVAYQLELPQSLAGIHNVFHVSQLKKCLRVPTEEANLERIEVQEDLTYVEKPIRILEIDERRTRNRVIRFCKVQWSNHSQKSQLGNEKMN

SEQ ID NO: 20058 - protein, 805 aa, Oryza sativa
  Clone ID: TF_OSC26717j.C1.p1.fg
PGLEWYIPGLEIELCSRDGCSEWLGLYNRMPRYKPEYLFGVEGFVQELRTMSFVIGFGTAPFYAQIPHDRHEEKCRVKVTLNSNSEDIPSVMFEAGGRNYIHACQEVARIAIGELRDRYSDQLADTEYRYHPRQPQGSDRGSYLETEGIENDATTRHLVEMLWAMDESRAETVLAAQDREDRNRGKICKLEDKVDRLEKELAALKGEAPPQKARIRLTARKRALFVPRYQLAPKMVNTRSNGNGPNNPNNNNNGENPTLAQVLAQQTQLMNMMMQQFQNQQNQGNNHAPPQNKLAEFLRVRPPVFSSTTNPVEASDWLHAIEKKLDLLQCTDQEKVSFASHQLHGPASEWWDHFRLNRITAEPITWLEFTAAFRKTHIPSGVVSLEKKEFSARRSFLGGLNDELSYPLMVGDYPDFQKLVDKAIRQEDKYNCMEQRKRRIAHFKAQQGSNQKPRLTLGPQPMSQGGSSSVVRPQRQFFNNNAGNNIRNQAPRPVAAPVQQQPAKREQGSKPVVCFNCGDPGHYADKCPKPRRVKVVPAQSNSAVPASKARVNHVAAAEAQDAPDVILGTFLVNSVPATVLFDSGATHSFLSMSFAGNHGMEVEDLRRPLMVSTPSNQALSLQRSPSVRIEIKGVPFLANLILLESKDLDVILGMDWLARHKDDLPGMPPKRDIEFRIDLVPGTTPIHKRPYRMAANELAEVKRQVDDLLQKGYIRPSSSPWGAPVIFVEKKDHTQRMCVDYRALNDVTIKNKYPLPRIDDLFDQLKGATVFSKIDLRSGYHQLRIKEEDIPKTAFTTRYGLFEGL

SEQ ID NO: 20059 - protein, 1306 aa, Oryza sativa
  Clone ID: TF_OSC27739j.C1.p1.fg
MYRGGIEAHAPGLEWYIPGLEIELCSRGGCSEWLGLYNRMPCYKPEYLFGVEGFVQELRTMSFVIGFGNAPFYAQIRHDRHEEKCRVKVTLNSNSEDIPSVMFEAGGRNYIHACQEVARIAIGELRDRYSDQLVDTEYRYHPRQPQGSDRGSYLETEGIENDVTTRHLVEMLWAMDESRAETVLAAQDREDRNRGKICKLEDKVDRLEKELAALKGEAPPQKARIRLTARKRALFVPRYQLAPKVRVVEKEVAPAQADPPVIIISSDEEEESKRINSKIEWVATQDDEDEPSIDLLCSEELEKLESLVVWESSVCNNETQLRSIKVKMVNTRSNGNGPNNPNNNINGENPTLAQVLAQQTQLMNMMMQQFQNQQNQGNNHAPPQNKLAEFLRVRPPVFSSTTNPVEASDWLHAIEKKLDLLQCTDQEKVSFASHQLHGPASEWWDHFRLNRTTAEPITWLEFTAAFRKTHIPSGVVSLKKKEFRSLTQGSRSVTEYLHEFNRLARYAPEDVRNDEERQEKFLGGLNDELSYPLMVGDYPDFQKLVDKAIRQEDKYNRMEQKKRRIAQFKTQQGNNQKPRLTLGPQSMPQGGSSSVVRPQRQFFNNNAGNNIRNQAPRPVAAPAQQQPAKREQGSKPVVCFNCGDPGHYADKCPKPQRVKVVPAQSNSAVPASKARVNHIAAAEAQGAPDVILGTFLVNSVPATVLFDSGATHSFLSMSFAGNHGMEVEDLRRPLMVSTPSNQALSLQRSPSVRIEIQGVPFLANLILLESKDLDVILGMDWLARHKGVIDCANRKVTLNSYDGRVVTVHALSSESLRSRLNQITLEEIHIVREYPDVFPDDLPGMPPKRDIEFRIDLVPGTTPIHKRPYRMAANELAEVKRQVDDLLQKGYIRPSSSPWGAPVIFVEKKDHTQRMCVDYRALNDVTIKNKYPLPRIDDLFDQLKDKFVVVFIDDILIYSRTKEEHEEHLRLALEKLREHQLYAKFSKCEFWLSEVKFLGHVISAGGVAVDPSNVESVTNWKQPKTVSEIRSFLGLAGYYRRFIENFSKIAKPMTRLLQKDVKYKWSEECERSFQELKSRLISAPILILPDPKKGFQVYCDASKLGLGCVLMQDGKVVAYASRQLRPHEKNYPTHDIELAAVVHALKIWRHYLFGTRTEVYTDHKSLKYIFTQPDLNMRQRRWLELIKDYDMGIHYHPGKANVVADALSRKGYCNATEGRQLPLELCKEFERLNLGIVGRGFVAALEAKPTLIDQVREAQINDPDIQEIKKNMRRGKAIGFLEDEHGTVWLGERICVCHVLINSSQN

SEQ ID NO: 20060 - protein, 1693 aa, Oryza sativa
  Clone ID: TF_OSC27749j.C1.p1.fg
MPRFKPEYLFGVEGFVQELRTMSFVIGFGTAPFYAQIRHDRHEEKCRVKVTLNSNSEDIPSVMFEAGGRNYIHACQEVARIAIGELRDRYSDQLADTEYRYHPRQPQGSDRGSYLETEGIENDATTRHLVEMLWAMDESCAETVLAAQDREDWNRGKICKLEDKVDRLEKELAALKGEAPPQKARIRLTARKRALFVPRYQLAPKIRVVEKEVAPAQADPPVIIISSDEEEESKRNNSKIEWAAIKDEEDEPNEPSIDLLCSEELEFACVCVGLACDLHQWWDMVNTRSNGNGPNLNNLNNNNNGENPTLAQVLTQQTQLMNMMMQQLQNQQNQGNNHAPPQNKLAEFLRVRPPIFSSTTNPVEAGDWLHAIEKKLDLLQCTDQEKVSFASHQLHGPASEWWDHFRLNRTTAEPITWLEFTAAFRKTHIPSGVVSLKKKEFRSLTQGSRSVTEYLHEFNRLARYAPEDVRNDEERQEKFLEGLNDELSYPLMTGDYSDFQKLVDKAIRQEDKYNRMEQKKHRIAHFKAQQGNNQRPRLTLGPQSMPHGGSSSVVRPQRQIFNNNVGNNIRNQVPRPVAAPTQQQPAKREQGSKPVVCFNCGDPGHYADKCPKPRRVKVVPAQSNSTVPASKARVNHVAAAEAQDAPDVILGTFPVNSVPATVLFDSGATHSFLSMSFAGNHGMEVEDLRRPLMVSTPSNQALSLHRSPSVRIEIQGVPFLANLILLESKDLDVILGMDWLARHNGVIDCANRKVTLTSHDGQVVTVHALSTESLRSRLNQITLGEIPIVREYPDVFPDDLPGMPPKRDIEFRIDLVPGTTPIHKRPYRMAANELAEVKRQVDDLLQKGYIRPSSSPWGAPVIFVEKKDHTQRMCVDYRALNDVTIKNKYPLPRIDDLFDQLKGATVFSKIDLRSGYHQLRIKEEDIPKTAFTTRYGLFECTVMSFGLTNAPAFFMNLMNKVFMEYLDKFVVVFIDDILIYSRTKEEHEEHLRLALEKLREHQLYAKFSKCEFWLSEVKFLGHVISAGGVAVDPSNVESVTNWKQPKTVSEIRSFLGLAGYYRSFIENFSKIVKPMTRLLQKDVKYKWSEDCEQSFQELKNRLVSAPILILPDPKKGFQVYCDASKLGLGCVLMQDGKVVAYASRQLRPHEKNYPTHDLELAAVVHALKIWRHYLFGTRTEMYTDHKSLKYIFTQPDLNMRQRRWLELIKDYDMGIHYHPGKANVVADALSRKGYCNVTEGRQLPLELCKEFERLNLGIVSRGFVAALEVKPTLIDQVRKAQINDSDIQEIKKNMRRGKAIGFLEDEQGTRVKAEHQKPAGLLQPLKIPEWKWEEIDMDFITGLPRTSSSHDSIWVIVDRLTKVAHFIPVKTTYSGSRLAELYMARIVCLHGVPKKIVSDRGSQFTSNFWKKLQEEMGSKLNFSTAYHPQTDGQTERVNQILEDMLRACALDFGGSWDKNLPYAEFSYNNSYQASLQMAPYEALYGRKCRTPLLWDQTGERQVFGTDILREAEEKVKIIQERLRVAQSRHKSYADNRRRDLSFEEGDYVYLRVTPLRGVHRFQTKGKLAPRFVGPYKIVSRRGEVAYQLELPQSLAGVHNVFHVSQLKKCLRVPTEEANLEQIEVQEDLTYVEKPIRILETSERRTRNRVIRFCKVQWSNHSEEESTWEREDELKSAHPYLFASSSESRGRDSV

SEQ ID NO: 20061 - protein, 1426 aa, Oryza sativa
  unsure (1)..(1426): unsure at all Xaa locations
  Clone ID: TF_OSC27749j.C1.p2.np
MVNTRSNGNGPNLNNLNNNNNGENPTLAQVLTQQTQLMNMMMQQLQNQQNQGNNHAPPQNKLAEFLRVRPPIFSSTTNPVEAGDWLHAIEKKLDLLQCTDQEKVSFASHQLHGPASEWWDHFRLNRTTAEPITWLEFTAAFRKTHIPSGVVSLKKKEFRASGKFLEGLNDELSYPLMTGDYSDFQKLVDKAIRQEDKYNRMEQKKHRIAHFKAQQGNNQRPRLTLGPQSMPHGGSSSVVRPQRQIFNNNVGNNIRNQVPRPVAAPTQQQPAKREQGSKPVVCFNCGDPGHYADKCPKPRRVKVVPAQSNSTVPASKARVNHVAAAEAQDAPDVILGTFPVNSVPATVLFDSGATHSFLSMSFAGNHGMEVEDLRRPLMVSTPSNQALSLHRSPSVRIEIQGVPFLANLILLESKDLDVILGMDWLARHNGVIDCANRKVTLTSHDGQVVTVHALSTESLRSRLNQITLGEIPIVREYPDVFPDDLPGMPPKRDIEFRIDLVPGTTPIHKRPYRMAANELAEVKRQVDDLLQKGYIRPSSSPWGAPVIFVEKKDHTQRMCVDYRALNDVTIKNKYPLPRIDDLFDQLKGATVFSKIDLRSGYHQLRIKEEDIPKTAFTTRYGLFECTVMSFGLTNAPAFFMNLMNKVFMEYLDKFVVVFIDDILIYSRTKEEHEEHLRLALEKLREHQLYAKFSKCEFWLSEVKFLGHVISAGGVAVDPSNVESVTNWKQPKTVSEIRSFLGLAGYYKWSEDCYKWSEDCEQSFQELKNRLVSAPILILPDPKKGFQVYCDASKLGLGCVLMQDGKVVAYASRQLRPHEKNYPTHDLELAAVVHALKIWRHYLFGTRTEMYTDHKSLKYIFTQPDLNMRQRRWLELIKDYDMGIHYHPGKANVVADALSRKGYCNVTEGRQLPLELCKEFERLNLGIVSRGFVAALEVKPTLIDQVRKAQINDSDIQEIKKNMRRGKAIGFLEDEQGTVXLGERICVPDNKDLKDAILKEAHDTLYSIHPGSTKMYQDLKERFWWASMKREIAEYVAVCDVCQRVKAEHQKPAGLLQPLKIPEWKWEEIDMDFITGLPRTSSSHDSIWVIVDRLTKVAHFIPVKTTYSGSRLAELYMARIVCLHGVPKKIVSDRGSQFTSNFWKKLQEEMGSKLNFSTAYHPQTDGQTERVNQILEDMLRACALDFGGSWDKNLPYAEFSYNNSYQASLQMAPYEALYGRKCRTPLLWDQTGERQVFGTDILREAEEKVKIIQERLRVAQSRHKSYADNRRRDLSFEEGDYVYLRVTPLRGVHRFQTKGKLAPRFVGPYKIVSRRGEVAYQLELPQSLAGVHNVFHVSQLKKCLRVPTEEANLEQIEVQEDLTYVEKPIRILETSERRTRNRVIRFCKVQWSNHSEEESTWEREDELKSAHPYLFASSSESRGRDSV

SEQ ID NO: 20062 - protein, 1619 aa, Oryza sativa
  Clone ID: TF_OSC29666j.C1.p1.gm
PKQPGNDIDVYLRPLVEDLKQLWKKEGVPVWDEDKQEEFNLRALLFVTINDWPALSNLSGQSNKGYKACTHCMDETESTYLKHCRKVVYMGHRRFLAANHPVRKKGKHFEHKADHRTKPKHRSGKTMFAMVKDLKVVFGKGPGSQHIESEDGHAAMWKKNSIFWELPYWEFLDVRHAIDVMHLTKNLCVNLLGFLGVYGKSKDTLEARNDLKHMEQRGDLHPEPKEKGSHYLSPASYTLSKAEKESMFECLESIKVPSGYSTNIKRIISTKEKKFTNLKSHDCHVLMTQLLPVIIRGILPDNVRATITKLCAFMNAISQKVIDPDRLEALQNEVVQCLVSFELIFPPSFFNIMTHLLCHLVKEIRILGPMYLHNMFPFKRYMGVLKKYVRNRARPEASIAKGYGTEEVIEFCVEFIEDLRPIGVLESRHEGRLRGKGTLGRKAIMTVDNNLFCKAHFTVLQHSSLVAPYIEEHLALVRARNIGKSDAWITRHHIDTFPAWLRQHLMGNESINQQLAFLARGPSGSIATFQGYDINGYTFYTRAQDMKSTNQNSFVRVDAMGHDGTTATYYGAIEDIWELDYGPLKVPLFRCQWVRLTGGGVMIDDSGMTTVDLNKVGYSDEPFVLANDVTQVFFVKDMSSKGKKGRGPDEPKRQVVLPGKRKIVGVEDKTDEDYDQLDGDHKEGTIVRRKYVRSTVTADPCAAVVSAVAVAREDHRRARQVVAVLVHHFAVAGDHQSSIAVIDPKVSAASSSSPSPPVGLPPPFWSPVSSPRCPLRLGALRLRPSAAVRRRACAVRAVSSAEPPPLSVTSPLTSSGSSAMPRFKPEYLFGVEGFVQELRTMSFAIGFGTAPFYAQILHDRHEEKCRVKVTLNSNSEEVPSVMFEAGGRNYIHACQEVARIAIGELRDRYSNQLADTEYRYHPRQPQGSDRGSYLETEGIENNATTRHLVEMLWAMDESRAETVLAAQDREDRNRGKICKLEDKMDRLEKELAALKGEAPPQKARIRLTARKRALFVPRYQLAPKVRVVEKEVAPTLADPPVIIISDDEEEESKRNHSKIEWVATQDDEDEPNEPSIDLRCSEELDTTNPVEAGDWLHAIEKKLDLLQCTDQEKVSFASHQLHGPASEWWDHFRLNRITAEPITWLEFTAAFRKTHIPSGVVSLKKKEFRSLTQGSRSVTEYLHEFNRLARYAPEDVRNDEERQEKFLEGLNDELSYPLMTGDYSDFQKLVDKAIRQEDKYNRMEQKKRRMAHFKAQQGSNQKPRLTLGPQSVPQGGSSSVVRPQRQFFNNNAGNNIRNQVPRPVAASTQQQPAKREQGSKPVVCFNCGDPGHYADKCPKPRRVKVVPAQSNSTVPVPKARVNHVAAAEAQDAPDVILVREYPDVFPDDLPANELAEVKRTVDDLLLKGYIRPSSSPWGAPVIFVEKKDHTQRMCVDYRALNDVTIKNKYPLPRIDDLFDQLKGATVFSKIDLRSGYHQLRIKEEDIPKTAFTTRYGIHNVFHVSQLKKCLRVPEEQASPDHIEIQEDLTYVEKPTRILETSERRTRNKVIRFCKVQWSHHSEEEATWEREDELKATHPHLFASSSESRVAAVALTEPARTSATIRLPPIVAEAPFPSHA

SEQ ID NO: 20063 - protein, 1290 aa, Oryza sativa
  Clone ID: TF_OSC29996j.C1.p1.fg
VRNDEERQEKFLEGLNDELSYPLMTGDYYDFQKLVDKAIRQEDKYNRMEQKKRRIAQFKTQQGNNQKPRLTLGPQSMPQGGSSSVVRPQRQFFNNNAGNNIRNQALRPVAVSTQQQPAKKEQGSKPVVCFNCGDPGHYADKCPKPRRVKVVPAQSNSTAPASKARVNHVAAAEAQDAPDVILGTFLVNSVPATVLFDSGATHSLLSMSFAGNHGMEVEDLRRPLMVSTPSNQALSLQRSPSVRIEIQGVSFLANLILLESKDLDVILGMDWLARHKGVIDCANRKVTLTSNDGRVVTVHALSSESLRSRLNQITLEEIPIVREYPDVFPDDLPGMPPKRDIEFRIDLVPGTTLIHKRPYRMAANELAEVKRQVDDLLQKGYIRPSSSPWGAPVIFVEKKDHTQRMCVDYRALNDVTIKNKYPLPRIDDLFDQLKGATIFSKIDLRSGYHQLRIKEEDIPKTTFTTRYGLFECTVMSFGLTNAPAFFMNLMNKVFMEYLDKFVVVFIDDILIYSRTKEEHEEHLRLALEKLREHQLYAKFSKCEFWLSEVKFLGHVISAGGVAVDPSNVESVTNWKQPKTVSEIRSFLGLAGYYRRFIENFSKIAKPMTRLLQKDVKYKWSEECEQSFQELKNRLISAPILILPYPKKGFQVYCDASKLGLGCVLMQDGKVVAYASRQLRPHEKNYPTHDLELAAVVHALKIWRHYLFGTRTEVYTDHKSLKYIFTQSDLNMRQRRWLELIKDYDMGIHYHPGKANVVADALSRKGYCNATEGRQLPLELCKEFERLNLGIVSRGFIAALEAKPTLIDQVREAQINDPDIQEIKKNMRRGKAISFLEDEQGTVWLGERICVPDNKDLKDAILKEAHDTLYSIHPGSTKMYQDLKERFWWASMKREIAEYVAVCDVCQRVKAEHQKPAGLLQPLKIPEWKWEEIGMDFITGLPRTSSGHDSIWIIVDRLTKVAHFIPVKTTYSGSRLAELYMARIVCLHGVPKKIVSDRGSQFTSNFWKKLQEEMGSKLNFSTAYHPQTDGQTERVNQILEDMLRACALDFGGSWDKNLPYAEFLYNNSYQASLQMAPYEALYGRKCRTPLLWDQTGERQVFGTDILREAEEKVKIIQERLRVAQSRHKSYADNRRRDLSFEEGDYVYLRVTPLRGVHRFHTKGKLAPRFVGPYKIISRRGEVAYQLELPQSLAGVHNVFHVSQLKKCLRVPTEEANLEQIEVQEHLTYVEKPIRILEIDERRTRNRVIHFCKVQWSNHSEEESTWEREDELKSAHPHLFASSSESRGRDSV

SEQ ID NO: 20064 - protein, 1299 aa, Oryza sativa
  unsure (1)..(1299): unsure at all Xaa locations
  Clone ID: TF_OSC29996j.C1.p2.np
SLCYGVSARVQSSYSLCSGRCAQXXRAPGKFLEGLNDELSYPLMTGDYYDFQKLVDKAIRQEDKYNRMEQKKRRIAQFKTQQGNNQKPRLTLGPQSMPQGGSSSVVRPQRQFFNNNAGNNIRNQALRPVAVSTQQQPAKKEQGSKPVVCFNCGDPGHYADKCPKPRRVKVVPAQSNSTAPASKARVNHVAAAEAQDAPDVILGTFLVNSVPATVLFDSGATHSLLSMSFAGNHGMEVEDLRRPLMVSTPSNQALSLQRSPSVRIEIQGVSFLANLILLESKDLDVILGMDWLARHKGVIDCANRKVTLTSNDGRVVTVHALSSESLRSRLNQITLEEIPIVREYPDVFPDDLPGMPPKRDIEFRIDLVPGTTLIHKRPYRMAANELAEVKRQVDDLLQKGYIRPSSSPWGAPVIFVEKKDHTQRMCVDYRALNDVTIKNKYPLPRIDDLFDQLKGATIFSKIDLRSGYHQLRIKEEDIPKTTFTTRYGLFECTVMSFGLTNAPAFFMNLMNKVFMEYLDKFVVVFIDDILIYSRTKEEHEEHLRLALEKLREHQLYAKFSKCEFWLSEVKFLGHVISAGGVAVDPSNVESVTNWKQPKTVSEIRSFLGLAGYYKWSEECEQSFQEYKWSEECEQSFQELKNRLISAPILILPYPKKGFQVYCDASKLGLGCVLMQDGKVVAYASRQLRPHEKNYPTHDLELAAVVHALKIWRHYLFGTRTEVYTDHKSLKYIFTQSDLNMRQRRWLELIKDYDMGIHYHPGKANVVADALSRKGYCNATEGRQLPLELCKEFERLNLGIVSRGFIAALEAKPTLIDQVREAQINDPDIQEIKKNMRRGKAISFLEDEQGTVWLGERICVPDNKDLKDAILKEAHDTLYSIHPGSTKMYQDLKERFWWASMKREIAEYVAVCDVCQRVKAEHQKPAGLLQPLKIPEWKWEEIGMDFITGLPRTSSGHDSIWIIVDRLTKVAHFIPVKTTYSGSRLAELYMARIVCLHGVPKKIVSDRGSQFTSNFWKKLQEEMGSKLNFSTAYHPQTDGQTERVNQILEDMLRACALDFGGSWDKNLPYAEFLYNNSYQASLQMAPYEALYGRKCRTPLLWDQTGERQVFGTDILREAEEKVKIIQERLRVAQSRHKSYADNRRRDLSFEEGDYVYLRVTPLRGVHRFHTKGKLAPRFVGPYKIISRRGEVAYQLELPQSLAGVHNVFHVSQLKKCLRVPTEEANLEQIEVQEHLTYVEKPIRILEIDERRTRNRVIHFCKVQWSNHSEEESTWEREDELKSAHPHLFASSSESRGRDSV

SEQ ID NO: 20065 - protein, 402 aa, Oryza sativa
  Clone ID: TF_OSC30786j.C1.p1.fg
NKLAEFLRVRPPIFSSTTNPVEAADWLHAIEKKLDLLQCTDQEKVSFASHQLHGPASEWWDHFRLNRTTAEPITWLEFTAAFRKTHIPSGVVSLKKKEFRSLTQGSRTVTEYLHEFNRLARYAPENVRNDEERQEKFLEGLNDELSYPLMTGDYSDFQKLVDKAIRQEDKYNRMEQKKRQIAQFKTQQGNNQRPRLTLGPQSMPHGGSSSVVRPQRQFFNNNVGNNIRNQVPRPVAAPTQQQPAKREQGSKPVVCFNCGDPGHYADKCPKPRRVKVVPVQSNSTAPASEARVNHVAAAEAQDAPDVILGTFLVNSVPATVLFDSGATHSFLSMSFAGNHGMEVEDLRRPLMVSTPSNQALSLQRSPSVRIEIKGVPFLANLILLESKDLDVILGMDWLARHK

SEQ ID NO: 20066 - protein, 629 aa, Oryza sativa
  Clone ID: TF_OSC31037j.C1.p5.gm
MVNTRSNGNGPNNPNNNNNGENPTLAQVLAQQTQLMNMMMQQFQNQQNQGNNHAPPQNKLAEFLRVRPPVFSSTTNPVEASDWLHAIEKKLDLLQCTDQEKVSFASHQLHGPASEWWDHFRLNRTTAEPITWLEFTAAFRKTHIPSGVVSLKKKEFRSLSQGSRSVTEYLHEFNRLARYAPEDVRNDEERQEKFLGGLNDELSYPLMVGDYPDFQKLVDKAIRQEDKYNCMEQRKRRIAHFKAQQGSNQKPRLTLGPQSMPQGGSSSVVRPQRQFFNNNVGNNIRNQAPRPVAAPAQQQPAKREQGNKPVVCFNCGDPGHYADKCPKPRRVKVVPAQNNSAVSASKARVNHVAAAEAQDAPDVILVREYPDVFPDDLPERIHQTEFITMGSSGYYRRFIENFSKIAKPMTRLLQKDVKYKWSEESLEAKPTLIDQVREAQINDPDIQEIKKNMRRGKAIGFLEDEHGTPCSAVAPAVAVAREDRRHARQVAAVLVRPFAAVGTRRSFVAVDNPKRRRSPVSVRRPSRLLRRAAAVVGDVIVDVIGILSREPHGSLPGTRLRSGGDKPTGVAGESIPCFIRGNSGRDIDSQSDVVILEIGADELGAVIRYDADVQKGAGFEWLSSGRTPC

SEQ ID NO: 20067 - protein, 2316 aa, Oryza sativa
  Clone ID: TF_OSC31039j.C1.p1.fg
KFVVVFIDDILIYSRTKEEHEEHLRLALEKLREHQLYAKFSKCEFWLSEVKFLGHVISAGGVAVDPSNVESVTNWKQPKTVSEIRSFLGLAGYYRRFIENFSKIAKPMTRLLQKDVKYKWSEECEQSFQELKSRLISAPILILPDPKKGFQVYCDASKLGLGCVLMQDGKVVAYASRQLRPHEKNYPTHDIELAAVVHALKIWRHYLFGTRTEVYTDHKSLKYIFTQPDLNMRQRRWLELIKDYDMGIHYHPGKANVVADALSRKGYCNATEGRQLPLELCKEFERLNLGIVGRGFVAALEAKPTLIDQVREAQINDPDIQEIKKNMRRGKAIGFLEDEHGTRVKAEHQKPAGLLQPLKIPEWKWEEIGMDFITGLPRTSSGHDSIWVIVDRLTKVAHFIPVKTTYSGSRLAELYMARIVCLHGVPKKIVSDRGSQFTSNFWKKLQEEMGSKLNFSTAYHPQTDGQTERVNQILEDMLRACALDFGGSWDKNLPYAEFSYNNSYQASLQMAPYEALYGRKCRTPLLWDQTGERQVFRTDILREAEEKVKIIQERLRVAQSRHKSYADNRRRDLSFEEGDYVYLRVTPLRGVHRFHTKGKLAPRFVGPYKIVSRRGEVAYQLELPQSLAGVHNVFHVSQLKKCLRVPTEQANLDQIEVQEDLTYVEKPIRILETTPGLEWYIPGLEIELCSRGGCSEWLGLYNRMPRYKPEYLFGVEGFVQELRTMSFVIGFGTAPFYAQIPHDSHEEKCRVKVTLNSNSEDIPSVMFEAGGRNYIHACQEVARIAIGELRDRYSDQLADTEYRYHPRQPQGSDRGSYLETEGIENDVTTKHLVEMLWAMDESRAETVLAAQDREDRNRGKICKLEDKVDRLEKELAALKGEAPPQKARIRLTARKRALFVPRYQLAPKMVNTRSNGNGPNNPNNNNNGENPTLAQVLAQQTQLMNMMMQQFQNQQNQGNNHAPPQNKLAEFLRVRPPVFSSTTNPVEASDWLHAIEKKLDLLQCTDQEKVSFASHQLHGPASEWWDHFRLNRTTAEPITWLEFTAAFRKTHIPSGVVSLKKKEFRSLSQGSRSVTEYLHEFNRLARYAPEDVRNDEERQEKFLGGLNDELSYPLMVGDYPDFQKLVDKAIRQEDKYNCMEQRKRRIAHFKAQQGSNQKPRLTLGPQSMPQGGSSSVVRPQRQFFNNNVGNNIRNQAPRPVAAPAQQQPAKREQGNKPVVCFNCGDPGHYADKCPKPRRVKVVPAQNNSAVSASKARVNHVAAAEAQDAPDVILGTFLVNSVPATVLFDSGATHSFLSMSFAGNHGMEVEDLRRPLMVSTPSNQALSLQRSPSVRIEIQGVPFLANLILLESKDLDVILGMDWLARHKGVIDCANRKVTLNSYDGRVVTVHALSSESLRSRLNQITLEEIPIVREYPDVFPDDLPGMPPKRDIEFRIDLVPGTTPIHKRPYRMAANELAEVKRQVDDLLQKGYIRPSSSPWGAPVIFVEKKDHTQRMCVDYRALNDVTIKNKYPLPRIDDLFDQLKGATVFSKIDLRSGYHQLRIKEEDIPKTAFTTRYGLFECTVMSFGLTNAPAFFMNLMNKVFMEYLDKFVVVFIDDILIYSRTKEEHEEHLRLALEKLREHQLYAKFSKCEFWLSEVKFLGHVISAGGVAVDPSNVESVTNWKQPKTVSEIRSFLGLAGYYRRFIENFSKIAKPMTRLLQKDVKYKWSEECEQSFQELKSRLISAPILILPDPKKGFQVYCDASKLGLGCVLMQDGKVVAYASRQLRPHEKNYPTHDIELAAVVHALKIWRHYLFGTRTEVYTDHKSLKYIFTQPDLNMRQRRWLELIKDYDMGIHYHPGKANVVADALSRKGYCNATEGRQLPLELCKEFERLNLGIVGRGFVAALEAKPTLIDQVREAQINDPDIQEIKKNMRRGKAIGFLEDEHGTRVKAEHQKPAGLLQPLKIPEWKWEEIGMDFITGLPRTSSGHDSIWVIVDRLTKVAHFIPVKTTYSGSRLAELYMARIVCLHGVPKKIVSDRGSQFTSNFWKKLQEEMGSKLNFSTAYHPQTDGQTERVNQILEDMLRACALDFGGSWDKNLPYAEFSYNNSYQASLQMAPYEALYGRKCRTPLLWDQTGERQVFRTDILREAEEKVKIIQERLRVAQSRHKSYADNRRRDLSFEEGDYVYLRVTPLRGVHRFHTKGKLAPRFVGPYKIVSRRGEVAYQLELPQSLAGVHNVFHVSQLKKCLRVPTEQANLDQIEVQEDLTYVEKPIRILETSERRTRNRVIRFCKVQWSNHSEEESTWEREDELKSAHPHLFASSSESRGRDSV

SEQ ID NO: 20068 - protein, 106 aa, Oryza sativa
  Clone ID: TF_OSC31560j.C1.p1.hg
PQPMPQGGSSSVVRPQRQFFNNNAGNNIRNQAPRPVAAPAQQQPAKREQGSKPVVCFNCGDPGHYADKCPKPRRVKVVPAQNNSAVPASKARVNHVAAAEAQMLQM

SEQ ID NO: 20069 - protein, 1546 aa, Oryza sativa
  Clone ID: TF_OSC31871j.C1.p1.fg
MGSYESTVWSEVQHSPFVGSYGRRQVFEPHIVREAEVKVKLIQERLRVAQSRHKSYANNRRRDLSFEKGDYVYLRVTPLRGVHRFHTKAKLAPRFVGPYKIVSRTGEVAYQLELPQSLAGVHNVFHVSQLKKCLRVPTEEANIEQIEVQEDLTYVEKPIRILETTPGLEWYIPGLEIELCSRGGCSEWLGLYNRMPRYKPEYLFGVEGFVQELRTMSFVIGFGTAPFYTQIPHDRHEEKCRVKVTLNSNSEDIPSVMFEAGGRNYIHACQEVARIAIGELRDRYSDQLADTEYRYHPRQPQGSDRGSYLETEGIENYVTTRHLVEMLWAMDESRAETVLAAQDREDRNHGKICKLEDKVDRLEKELAALKGEAPPQKARIRLTARKRALFVPRYQLAPKMVNTRSNGNGPNNPNNNNGENPTLAQVLAQQTQLMNMMMQQFQNQQNQGNNHAPPQNKLAEFLRVRPPVFSSTTNPVEASDWLHAIEKKLDLLQCTDQEKVSFASHQLHGPASEWWDHFRLNRTTAEPITWLEFTAAFRKTHIPSGVVSLKKKEFRSLTQGSRSVTEYLHEFNRLARYAPEDVRNDEERQEKFLGGLNDELSYPLMVGDYPDFQKLVDKAIRQEDKYNRMEQKKRRIGQFKTHQGNIQKPRLTLGPQSMPQVGSSSVVRPQRQFFINNAANNIRNKAPRPVAAPVQQQPAKREQGSKPVVCFNCGDPGHYADKCPKPRRVKVVPAQSNSAVPVSKARVNHVAAAEAQDAPDVILGTFLVNSVPATVLFDSGATHSFLSMSFAGNHGMEVEDLRRPLMVSTPSNQALSLQRSPSVRIEIKGVPFLANLILLESKDLDVILGMDWLARHKGVIDCANRKVTLNSYDGRVVTVHALSSESLRSRLNQITLEEIPIVREYSDVFPDDLPGMPPKRDIEFRIDLVPGTTPIHKRPYRMAANELAEVKRQVDDLLQKGYIRPSSSPWGAPVIFVEKKDHTQRMCVDYRALNDVTIKNKYPLPRIDDLFDQLKGATVFSKIDLRSGYHQLRIKEEDIPKTAFTTRYGLFECTVMSFGLTNAPAFFMNLMNKVFMEYLDKFVVVFIDDILIYSRTKEEHEEHLRLALEKLREHQLYAKFSKCEFWLSEVKFLGHVISAGGVAVDPSNVESVTNWKQPKTVSEIRSFLGLAGYYRRFIENFSKIAKPMTRLLQKDVKYKWSEECEQSFQELKSRLISAPILILPDPKKGFQVYCDASKLGLGCVLMQDGKVVAYASRQLRPHEKNYPTHDIELAAVVHALKIWRHYLFGTRTEVYTDHKSLKYIFTQPDLNMRQRRWLELIKDYDMGIHYHPGKANVVADALSRKGYCNATEGRQLPLELCKEFERLNLGIVGRGFVAALEAKPTLIDQVREAQNNDPDIQEIKKNMRRGKAIGFLEDEHGTVWLGERICVPDNKDLKDAILKEAHDTLYSIHPGSTKMYQDLKERFWWASMKREIAEYVAVCDVCQRVKAEHQKPAGLLQPLKIPEWKWEEIGMDFITGLPRTSSGHDSIWVIVDRLTKVAHFIP

SEQ ID NO: 20070 - protein, 1720 aa, Oryza sativa
  Clone ID: TF_OSC400036j.C1.p50.np
LSSLSSAQIPSFPESPFSQKKSLKSSKASKATPGLEWYIPGLEIELCSRGGCSEWGLYNRMPRYKPEYLFGVEGFVQELRTMSFVIGFGTAPFYAQIPHDRHEEKCRVKVTLNSNSEDIPSVMFEAGGRNYIHACQEVARIAIGELRDRYSDQLADTEYRSHPRQPQGSDRGSYLETEGIENDATTKHLVEMLWAMDESRAEIVLAAQDREDRNRGKICKLEDKVDRLEKELAALKGEAPPQKARIRLTARKRALFVPRYQLAPKMVNTRSNGIGPNNPNNNNNGENPTLAQVLAQQTQLMNMMMQQLQNQQNQGNNHAPPQNKLAEFLRVRPPVFSSTTNPVEASDWLHAIEKKLDLLQCTDQEKVSFASHQLHGPASEWWDHFRLNRTTAEPITWLEFTAAFRKTHIPSGVVSLKKKEFRSLTQGSRSVTEYLHEFNRLARYAPEDVRNDEERQEKFLGGLNDELSYPLMVGDYPDFQKLVDKAIRQEDKYNCMEQRKRRIAHFKAQQGNNQKPRLTLGPQSMPHGGSSSVVRPQRQFFNNNAGNNIRNQAPRPVAAPAQQQPAKREQGNKPVVCFNCGDPGHYADKCPKPRRVKVVPAQNNSAVPASKARVNHVAAAEAQDAPDVILGMFPVNSVPATVLFDSGATHSFLSMSFAGNHGMEVEDLRRPLMVSTLSDQALSLQRSPSVRIEIQGVPFLANLILLESKDLDVILGMDWLTRHKGVIDCANKKVTLTSNVGRVVTVHALSSESLRSRLNQITLEEIPIVREYPDVFPDDLPGMPPKRDIEFRIDLVPGTTPIHKRPYRMAANELAEVKRKVDDLLQKGYIRPSSSPWGAPVIFVEKKDHTQRMCVDYRALNDVTIKNKYPLPRIDDLFDQLKGATVFSKIDLRSGYHQLRIKEEDIPKTAFTTRYGLFECTVMSFGLTNAPAFFMNLMNKVFMEYLDKFVVVFIDDILIYSRTKEEHEEHLRLALEKLREHQLYAKFSKCEFWLSEVKFLGHVISAGGVAVDPSNVESVTNWKQPKTVSEIRSFLGLAGYYRRFIENFSKIAKPMTQLLQKDVKYKWSKECERSFQELKSRLISAPILILPDPKKGFQVYCDASKLGLGCVLMQDGKVVAYASRQLRPHEKNYPTHDIELAAVVHALKIWRHYLFGTRTEVYTDHKSLKYIFTQPDLNMRQRRWLELIKDYDMGIHYHPGKTNVVADALSRKGYCNATEGRQLPLDLCKEFERLNLGIVGRGFVAALEAKPTLIDQVREAQINDPDIQEIKKNMRRGKAIGFLEDEQGTVWLGERICVPDNKDLKDAILKEAHDTLYSIHPGSTKIYQDLKERFWWASMKREIAEYVAVCDVCQRVKAEHQKPAGLLQPLKIPGWKWEEIGMDFITGLPRTSSGHDSIWVIVDRLTKVAHFIPVKTTYSGSRLAELYMARIVCLHGVPKKIVSDRGSQFTSNFWKKLQEEMGSKLNFSTAYHPQTDGQTERVNQILEDMLRACALDFGGSWDKNLPYAEFSYNNSYQASLQMAPYEALYGRKCRTPLLWDQTGERQVFGTDILREAEEKVKIIQERLRVAQSRHKSYADNRRRDLSFEEGDYVYLRVTPLRGVHRFHTKGKLAPRFVGPYKIVSRRGEVAYQLELPQSLAGVHNVFHVSQLKKCLRVPTEEANLDQISERRTRNRVIRFCKVQWSNHSEEESTWEREDELKSAHPHLFASSSESRGRDSV

SEQ ID NO: 20071 - protein, 1636 aa, Oryza sativa
  Clone ID: TF_OSC400074j.C1.p16.fg
MSFMISLTLLTTVNDAITGNSLISSWFGMMPRYKPEYLFGVEGFVQELRTISFVIGFGTAPFYAQIPHDRHEEKCRVKVTLNSNSEDIPSVMFEAGGRNYIHACQEVARIAIGELRDRYSDQLADTEYRYHPRQPQGSDRGSYLETEGIENDATTRHLVEMLWAMDESRAETVLAAQDREDRNRGKICKLEDKVDRLEKELAALKGEAPPQKARIRLTARKRALFVPRYQLAPKFPPVSLLVPCPCQMVNTRSNGNGPSNNNNEGNPTLAQVLAQQTQLMNMMMQQLQNQQNQGNNHAPPHNKLAEFLRVRPPIFSSTTNPVEAGDWLHAIEKKLDLLQCTDQEKASFASHQLHGPASEWWDHFRLNRTTAEPITWLEFTAAFRKTHIPSGVVSLKKKEFRSLTQGSRSVTEYLHEFNRLARYAPEDVRNDEERQEKFLEGLNDELSYPLMTGDYSDFQKLVDKAIRQEDKYNRMEQKKRRIAQFKTQQGNNQRPRLTLGPQSMPHGGSSSVVRPQRQFFNNNAGNNIRNQALRPVAAPTQQQPAKREHGSKPVVCFNCGDPGHYADKCPKPRRMKVVPVQSNSTAPASKARVNHVAAAEAQDAPDVILGTFLVNLVPATVLFDSGATHSFLSMSFAGNHGMKVEDLRRPLMVSTPSNQALSLQRSPSVRIEIKGVPFLANLILLESKDLDVILGMDWLARHKGVIDCANRKVTLTSNDGRVVTVHALSSESLRSRLNQITLEEIPIVREYPDVFPDDLPGMPPKRDIEFRIDLVPGTTPIHKRPYRMAANELAEVKRQKDHTQRMCVDYRALNDVTIKNKYPLPRIDDLFDQLKGATVFSKIDLRSGYHQLRIKEEDIPKTAFTTRYGLFECTVMSFGLTNAPAFFMNLMNQVFMEYLDKFVVVFIDDILIYSRTKEEHEEHLRLALEKLREHQLYAKFSKCEFWLSEVKFLGHVISAGGVAVDPSNVESVTNWKQPKTVSEIRSFLGLAGYYRRFIENFSKIAKPLTRLLQKDVKYKWSEECEQSFQELKSSLISAPILILPDPKKGFQVYCDASKLGLGCVLMQDGKVVAYASRQLGPHEKNYPTHDIELAAVVHALKIWRHYLFGTRTEVYTDHKSLKYIFTQPDLNMRQRRWLELIKDYDMGIHYHPGKANVVADALSRKGYCNATEGRHLPLELCKEFERLNLGIVSIGFVAALEAKPTLIDQVREAQINDPDIQDIKKNRRRGKAIGFLEDEHGTVWLGERICVPDNKDLKDAILKEAHDTLYSIHPGSTKMYQDLKERFWWASMRREIAEYVAVCDVCQRVKAEHQKPAGLLQPLKIPEWKWEEIGMDFITGLPRTSSGHDSIWVIVDRLTKVAHFIPVKTTYSGSRLAELYMARITDGQTERVNQILEDMLRACALDFGGSWDKNLPYAEFSYNNSYQASLQMAPYEALYGQKCRTPLLWDQTGERQVFGTDILREAEEKSRHKSYADNRRRDLSFEEGDYVYLHVTPFRGVHRFHTKGKLAPRFVGPYKIVSRRGEVAYQLELPQSLAGVHNVFHVSQLKKCLRVPTEEANLEQIEVQEDLTYVEKPIRILEIDERRTRNRVIRFCKVQWSNHSEEESTWEREDELKSAHPHLFASSSESRGRDSV

SEQ ID NO: 20072 - protein, 1567 aa, Oryza sativa
  Clone ID: TF_OSC400179j.C1.p21.fg
MAMRRRRAVAGDDNQRQAMPRYKPEYLFGVEGFVQELRTMSFVIGFGTVLFYAQIPHDRHEEKCRVKVTLNSNSEDIPSVMFEAGGRNYIHACQEVARIAIGELRDRYSDQLADTEYRYHPRQPQGSDRGSYLETEGIENDATTRHLVEMLWAMDETRAETVLAAQDREDRNRGKICKLEDKVDRLEKELAALKGEAPPQKARIRLTARKRALFVPRYQLALKMVNTRASGSGNNNNEGNPTLAQVLAQQAQLMNMMMQQLQNQQNQGNNHAPPQNKLAEFLRVRPPTFSSTTNPVEAGDWLHAIEKKLDLLQCTDQEKVSFASHQLHGPASEWWDHFRLNRTTAEPITWLEFTAAFRKTHIPSGVVSLKKKEFRSLTQGSRSVTEYLHEFNRLTRYAPEDVRTDEERQEKFLEGLNDELSYPLMTGDYPDFQKLVDKAIRQEDKYNRMEQKKRRIAQFKTQQGNNQKPRLTLGPQSMPQGGSSSVVRPQRQFFNNNAGNNIRNQAPRPVAVSTQQQPAKREQGSMPVVCFNCGDPGHYADKCPKPRRVKVVPAQSNSTAPASKARVNHVAAAEAQGAPDVILGTFLVNSVSATVLFDSGATHSFLSMSFAGNHGMEVEDLRRPLMVSTPSNQALSLQRSPSVRIEIKGVPFLANLILLESKDLDVILWMDWLARHKGVIDCANRKVTLTSNDGRVVTVHALSSESLRPSLNQITLEEIPIVREYPDVFPDDLPGMPPKRDIEFRIDLVPGTTPIHKRPYRMAANELAEVKRQVDDLLQKGYIRPSSSPWGAPIIFVEKKDHTQRMCVDYRALNDVTIKNKYPLPRIDDLFDQLKGATVFSKIDLRSGYHQLRIKEEDIPKTAFTTRYGLFECTVMSFGLTNAPAFFMNLMNKVFMEYLDKFVVVFIDDILIYSRTKEEHEEHLRLALEKLREHQLYAKFSKFEFWLSEVKFLGHVISAGGVAVDPSNVESVTNWKQPKTVSEIRSFLGLAGYYRRFIENFSKIAKPMTRLLQKDVKYKWSEECEQSFQELKNRLISAPILILPDPKKGFQVYCDASKLGVGCVLMQDGKVVAYASRQLRPHEKNYPTHDLELAAVVHALKIWHHYLFGTRTEVYTDHKSLKYIFTQPDLNMRQRRWLELIKDYDMGIHYHPGKANVVADALSRKGYCNATEGRQLPLELCKEFERLNLGIVSRGFVAALEAKPTLIDQVREAQINDPDIQEIKKNMRRGKAIGFLEDEQGTVWLGERICVPDNKDLKDAILKEAHDTLYSIHPGSTKMYQDLKERFWWASMKHEIAEYVAVCDVCQRVKAEHQKPAVDRLTKVAHFIPVKTTYSGSRLAELYMARIVCLHGVPKKIVSDRGSQFTSNFWKKLQEETDEQTERVNQILEDMLRACALDFGGSWDKNLPYAEFSYNNSYQASLQMAPYEALYGRKCRTPLLWDQTGERQVFGTDILREAEEKPCAAAVPVVAVAREGRHRGRQVVAVLVRPFAVAVDRRSTVAAVDPIFSAASTSTPSPSVDLPPLLWSPIPTFPESPFSQEKNLKSSKASKASHTDPKQPFEHVDPI

SEQ ID NO: 20073 - protein, 608 aa, Oryza sativa
  Clone ID: TF_OSC400398j.C1.p3.gm
MPRYKPEYLFGVEGFVQELRTMSFVIGFGTAPFYAQIAHDRHEEKCRVKVTLNSNSEDIPSVMFEAGGRNYIHACQEVARIAIGELRDRYSDQLADTEYRYHPRQPQGSDRGSYLETEGIENDVTTKHLVEMLWAMDESRAETVLAAQDREDWNRGKICKLEDKVDRLEKELAALKGEAPPQKARIRLTARKRALFVPRYQLAPKVRVVEKEVAPAQADPPVIIISSDEEEESKRNNSKIEWVATQVDKDEPSIDLRCLEELETTAEPITWLEFTAAFRKTHIPSGVVSLKKKEFRSLTQGSRSVTEYLHEFNRLARYAPEDVRNDEERQEKFLGGLNDELSYPLMVGDYPDFQKLVDKAIRQEDKYNHMEQKKRRIAHFKAQQGNNQKPRLTLGPQSMPQGGSSSVVRPQRQFFNNNAGNNIRNQAPRPVAAPAQQQPAKREQGSKPVVCFNCGDPGHYADKCPKPRRVKVVPAQNNSAVPASKARVNHVAAAEAQDAPDVIFLVNSVPATVLFDSANELAEVKRQVDDLLQKGYIRPSSSPWGAPPSPSLGKTTVVLAKSSPSSFAPSPSPEITGAASPSSTRRFPPLPPCRRRRPLVFRRRLGHR

SEQ ID NO: 20074 - protein, 999 aa, Oryza sativa
  Clone ID: TF_OSC400446j.C1.p26.fg
MDISRTNEGYTSCGPVIEMSWHRAGVLLLGAQSCLPVPEVPAVGGVGSVLLSMARMGWKLCHVSRPNAVVPAKREQGSKPVVCFNCGDPGHYADKCPKPRRVKVVPAQSNSTAPASKARVNHVAAAEAQDAPDVILGTFLVNSVPATVLFDSGATHSFLSMSFAGNHGMEVEDLRRPLMVSTPNNQALSLQRSPSVRIEIKGVPFLANLILLESKDLDVILGMDWLARHKGVIDCANRKVTLTSNDGRVVTVHALSSESLRSRLNQITLEEIPIVREYSDVFPDDLPGMPPKRDIEFRIDLVPGTTPIHKRPYRMAANELAEVKRQVDDLLQKGYIRPSSSPWGAPVIFVEKKDHTQRMCVDYRALNDVTIKNKYPLPRIDDLFDQLKGATVFSKIDLRSGYHQLRIKEEDIPNTTFTTRYGLFECTVMSFGLTNAPAFFMNLMNKVFMEYLDKFVVVFIDDILIYSRTKEEHEEHLRLALEKLREHQLYAKFSKCEFWLSEVKFLGHVISAGGVAVDPSNVESVTNWKQPKTVSEIHRFLGLAGYYRRFIENFSKIAKPMTRLLQKDSFQELKSRLISAPILILPDPKKGFQVYCDASKLGLGCVLMQDGKVVAYASRQLRPHEKNYPTHDLELAAVVHALKIWRHYLFGTRTEVYTDHKSLKYIFTQPDLNMRQRRWLELIKDYDMGIHYHPGKANVVADALSRKGYCNATEGRQLPLELCKEFERLNLGIVSRGFVAALEAKPTLIDQVREAQINDPDIQEIKKNMRRGKAIGFLEDEHGTVWLGERICVPDNKDLKDAILKEAHDTLYSIHPGSTKMYQDLKERFWWASMKREIAEYVAVCDVCQRVKAEHQKPAGLLQPLKIPEWKWEEIGMDFITGLPRTSSGHDSIWVIVDRLTKVAHFIPVKTTYSGSRLAELYMARIVCLHGVPKKIVSDRGSQFTSNFWKKLQEEMGSKLNFSTAYHPQTDGQKDRIRTGLRASVAKHYRTSTCLVGKA

SEQ ID NO: 20075 - protein, 1409 aa, Oryza sativa
  Clone ID: TF_OSC400591j.C1.p10.fg
MPRYKPEYLFGVEGFVQELRTMSFAIGFGTAPFYAQIPHDRHEEKCRVKVTLNSNSEDIPSVMFEAGGRNYIHACQEVARIAIGELRDRYSDQLADMEYRYHPRQPQGSDRGSYLETEGIENDATTRHLVEMLWAMDESRAETVLAAQDREDRNRGKICKLEDKVDRLEKELAALKGEAPPQKARIRLTARKRALFVPRYQLAPKVRVVEKEVTPALADPPVVNMVNTRSNGNGPNNNNNNNNGENPTLAQVLAQQTQLMNMMMQQLQNQQNQGNNHAPPQNKLAEFLRVRPPTFSSTTNPVEAGDWLHAIEKKLDLLQCTDQEKVSFASHQLHGPASEWWDHFRLNRTTAEPITWLEFTAAIRKTHIPSGVVSLKKKEFRSLTQGSRSVTEYLHEFNRLARYAPEDRQFFNNNAGNNIRNQAPHPVAASTQQQPAKREQGSKPVVCFNCGDPGHYADKCPKPRRVKVVPTQSNSTVPASKARVNHVAAAEAQDAPDVILGTFLVNLVPATVLFDSGATHSFLSMSFAGNHGMEVEDLRRPLMVSTPSNQALSLQRSPSVKIEIKGVPFLANLILLESKDLDVILGMDWLARHKGVIDCANRKVTLTSNDGRVVTVHAMSSESLRSRLKQITLEEIPIVREYPDVFPDDLPGMPPKRDIEFRIDLVPGTTPIHKRPYRMAANELAEVKRQVDDLLQKGYIRPSSSPWGAPVIFVEKKDHTQRMCVDYRALNDVTIKNKYPLPRIDDLFDQLKGATVFSKIDLRSGYHQLRIKEEDIPKTAFTTRYGLFECTVMSFGLTNAPAFFMNLMNKVFMEYLDKFVVVFIDDILIYSRTKEEHEEHLRLALEKLREHQLYAKFSKCEFWLSEVKFLGHVISAEGVAVDPSNVESVTNWKQPKTVPEIRSFLGLAGYYRRFIENFSKIAKPMTRLLQKDVKYKWSEECEQSFQELKNRLISAPILILPDQKKGFQVYCDASKLGLGCVLMQDGKVVAYASRQLRPHEKNYPTHDLELAAVVHALKIWRHYLFGTRTEVYTDHKSLKYIFTQPDLNMRQRRWLELIKDYDMGIHYHPRKANVVADALSRKGYCNATEGRQLPLELCKEFERLNLGIVSRGFVAALEAKPTLIDQVREAQINDPDIQEIKKNMRRGKAIGFLEDEHGAVWLGERICVPDNKDLKDAILKEAHDTLYSIHPGSTKMYQDLKERFWWASMKREIAEYVAVCDVCQRVKAEHQKPAGLLQPLKIPEWKWEEIGMDFITGLPRTSSGHDSIWVIVDRLTKVAHFIPVKTTYSGSRLAELYMARIVCLHGVPKKIVSDRGSQFTSNFWKKLQEEMGSKLNFSTAYHPQTDGQTERVNQVLEDMLRACALDFGGSWDKNLPYAEFSYNNSYQASLQMEIVGFEFESDSSLSSEP

SEQ ID NO: 20076 - protein, 1822 aa, Oryza sativa
  Clone ID: TF_OSC400610j.C1.p8.fg
MTSVMTVGAGGGGELRRDGSGGGTVDPAQAWQIRQRRDGSDAVASGSGELGRWRIPSFPESPFSQKKSLKSSKASKATPGLEWYIPGLEIELCSRGGCSEWLGLYNRMPRYKPEYLFGVEGFVQELRTMSFVIGFGTAPFYAQIPHDRHEEKCRVKVTLNSNSEDIPSVMFEAGGRNYIHACQEAARIAIGELRDRYSDQLADTEYRYHPRQPQGSDRDSYLETEGIENDATTKHLVEMLWAMDESRAETVLAAQDREDRNRGKICKLEDKVDRLEKELAALKGEAPPQKARIRLTARKRALFVPRYQLAPKVHVMEKEVAPAQADPPVIIISSDEEEESKRNNSKIEWMVNTRSNGNGPNNPNNNNNGENPTLAQVLAQQTQLMNMMMQQFQNQQNQGNNHAPPQNKLAEFLRVRPPVFSSTTNPVEASDWLHAIEKKLDLLQCTDQDKVSFASHQLHGPASEWWDHFRLNRTTAEPITWLEFTAAFRKTHIPSGVVSLKKKEFRSLTQGSRSVTEYLHEFNRLARYAPEDVRNDEERQEKFLGGLNDELSYPLMVGDYPDFQKLVDKAVRQEDKYNRMEQKKRRIAQFKTQQGNNQKPRLTLGPQSVPQGGSSSVVRPQRQFFNNNAGNNIRNQAPRPVAVPAQQQPAKREQGNKPVVCFNCGDPGHYADKCPKPRRVKVVPAQNNSAVPASKARVNHVAAAEAQGAPDVILGTFLVNSVPATVLFDSGATHSFLSMSFAGNHGMEVEDLRRPLMVSTPSNQALSLQRSPSVRIEIQGVPFLANLILLESKDLDVILGMDWLARHKGVIDCANKKVTLTSYDGRVVTVHALSSESLRSRLNQITLEEIPIVREYPDVFPDDLPGMPPKRDIEFRIDLVPGTTPIHKRPYRMAANELAEVKRQVDDLLQKGYIRPSSSPWGAPVIFVEKKDHTQRMCVDYRALNDVTIKNKYPLPRIDDLFDQLKGATVFSKIDLRSGYHQLRIKEEDIPKTSFTTRYGLFECTVMSFGLTNAPAFFMNLMNKVFMEYLDKFVVVFIDDILIYSRTKEEHEEHLRLALEKLREHQLYAKFSKCEFWLSEVKFLGHVISAGGVAVDPSNVESVTNWKQPKTVSEIRSFLGLAGYYRRFIENFSKIAKPMTRLLQKDVKYKWSEECEQSFQELKSRLISAPILILPDPKKGFQVYCDASKLGLGCVLMQDGKVVAYASRQLRPHEKNYPTHDIELAAVVHALKIWRHYLFGTRTEVYTDHKSLKYIFTQPDLNMRQRRWLELIKDYDMGIHYHPGKANVVVDALSGKGYCNATEGRQLPLELCKEFERLNLGIVGRGFVAALEAKPTLIDQVREAQINDPDIQEIKKNMRRGKAIGFLEDEQGTVWLGERICVPDNKDLKDAVLKEAHDTLYSIHPGSTKMYQDLKERFWWASMKREIVEYVAVCDVCQRVKAEHQKPAGLLQPLKIPEWKWEEIGMDFITGLPRTSSGHDSIWVIVDRLTKVAHFIPVKTTYSGSRLAELYMARIVCLHGVPKKIVSDRGSQFTSNFWKKLQEEMGSKLNFSTAYHPQTDGQTERVNQILEDMLRACALDFGGSWDKNLPYAEFSYNNSYQASLQMAPYEALYGRKCRTPLLWDQTGERQVFGTDILREAEEKVKVIQERLRVAQSRHKSYADNRRRDLSFEEGDYVYLRVTPLRGVHRFHTKGKLAPRFVGPYKIVSRRGEVAYQLELPQSLAGVHNVFHVSQLKKCLRVPTEEANIEQIEVQEDLTSVEKPIRILETNERRTRNRVIRFCKVQWSNHSEEESTWEREDELKSAHPHLFASSSKSRGRDSV

SEQ ID NO: 20077 - protein, 1725 aa, Oryza sativa
  unsure (1)..(1725): unsure at all Xaa locations
  Clone ID: TF_OSC400652j.C1.p1.np
MSFVISLTLLTIINDLYSRDGLYSRDGCSEWLGLYNRMPRYKPEYLFGVEGFVQELRTMSFAIGFGTAPFYAQIPHDRHEEKCRVKVTLNSNSEDVPSVMFEARGRNYHACQEVARIAIGELRDRYSDQLADTEYRYHPRQPQGSDRGSYLETEGIENDATTRHLVEMLWAVDETRAETVLAAQDREDRNRGKICKLEDKVDRLEKELAALKGEAPPQKARIRLTARKRALFVPRYQLAPKFSPVSLLVSCPCQMVLTHSNGNGPQNNNNNNNNGENPTLAQVLAQQTQLMNMMMQQLQNQQNQGNNHAPPQNKLAEFLRVRPPIFSSTTNPVEAGDWLHAIEKKLDLLQCTDQEKVSFASHQLHGPASEWWDHFRLNRTIAEPITWLEFTAAFRKTHIASGVVSLKKKEFRSLTQGSRSVTEYLHEFNRLARYAPEDVRNDEERXEKFLEGLNDELSYSLMTGDYLDFQKLVDKAIRQEDKYNRMEQKKRRIAQFKTQQGNNQRPGFTLGPPSMPQGGFLSVVCPQGQFFNNNAGNNIRNQAPRPVAASTQQQPAKKEQGSKPVVCFNCGDPGHYADKCPKPRRVKVVPAQSNSTAPAPKARVNHVAAAEAQGAPDVILGTFLVNLVPATVLFDSGATHSFLSMSFAGNHGMEVEDLRRPLMVSPSNQALSLQRSPSVRIEIKGVPFLANLILLESKDLDVILRMDWLARHKGVIDCANRKVTLTSNDGRVVTVHALSSEFLRSRLNQILEEIPIVREYPDVFPDDLPGMPPKRDIEFRIDLVPGTTPIHKRPYRMAANELAEVKRQVDDLLQKGYIRPSSSPWGAPVIFVEKKDHTQRMCVDYRALNDVTIKNKYPLPRIDDLFDQLKGATVFSKIDLRSGYHQLRIKEEDIPKTAFTTRYGLFECTVMSFGLTNAPAFFMNLMNKVFMEYLDKFVVVFIDDILIYSRTKEEHEEHLRLALEKLRGHQLYAKFSKCEFWLSEVKFLGHVISAGGVAVDPSNVESVTNWKQPKTVSEIRSFLGLTGYYRRFIENFSKIAKPMTRLLQKDVKYKWSEECEQSFQELKNRLISAPILILPDPKKGFXVYCDASKLGLGCVLMQDGKVVAYASRQLRPHEKNYPTHDLELAAVVHALKIWRHYLFGTRTEVYTDHKSLKYIFTQPDLNMRQRRWLELIKDYDMGIHYHPGKANVVADALSRKGYCKATEGXQLPLELCQEVERLNLGIVRRGFVAALEAKPTLIDQVREAQINDPDIQEIKKNMRGGKAIGFLEDEQGTVWLGERICVPDNKDLKDAILKEAHDTLYSIHPGSTKMYQDLKERFWWASMKREIAEYVAVCDVCQRVKAEHQKPAGLLQPLKIPEWKWEEIGMDFITGLPRTSTGHDSIWVIVDRFIKVAHFIPVKTTYSGSQLAELYMARIVCLHGVPKKIVSDRGSQFTSNFWKKLQEEMGSKLNFSTAYHPETDGQTERVNQILEDMLRACALDFGGSWDKNLPYAEFLYNNSYQASLQMAPYEALYGRKCRTPLLWDQTGERQVFGMDILREAEEKVKIIQEGLRVAQSRHKSYADNRRRDLSFEEGDYVYLRVTPLRGVHRFHTKKLAPRFVGPYKIVSRSGEVAYQLELPQSLAGVHNVFHVSQLKKCLRVPTEEANLEQIEVQEDLTYVEKPIRILEIDERRTRNRVIRFCKVQWSNHSEEESTWEREDELKSAHPHLFASSSESRGRDSV

SEQ ID NO: 20078 - protein, 1734 aa, Oryza sativa
  unsure (1)..(1734): unsure at all Xaa locations
  Clone ID: TF_OSC400655j.C1.p23.np
PFSLSSAQIPSFPESPFSPEKSLKSSKASKATPGLEWYIPGLEIELCSRDGCLEWLGLYNRMPRYKPEYLFGVEGFVQELRTMSFVIGFGTAPFYAQIPHDRHEEKCRVKVTLNSNSEDIPSVMFEAVGRNYIHACQEVARIAIGEYSDQLADTEYRYHPRQPQGSDRGYLETEGIENDATTRHLVEMLWAMDESRAETVLAAQDREDRNRGKICKLEDKVDCLEKELAALKGEAPPQKARIRLTARKRALFVPRYQLAPKMVNTRSNGNGPNNPNNNNNGENPTLAQVLAQQTQLMNMMMQQLQNQQNQGNNHAPPQNKLAEFLRVRPPIFSSTTNLVEAGDWLHAIEKKLDLLQCTDQEKVSFASHQLHGPASEWWDHFRLNRTTAEPITWLEFTAAFRKTHIPSGVVSLKKKEFRSLTQGSRSVTEYLHEFNRLARYAPEDVRNDEERQEKFLEGLNDELSYPLMTGDYSDFQKLVDKAIRQEDKYNRMEQKKRRIAQFKTQQGNNQKPRLTLGPQSVPQGGSSSVVRPQRQFFNNNAGNNIRNQAPRPVAAPTQQQPAKREQGSKPVVCFNCGDPGHYADKCPKPRRVKVVPAQSNSTVPASKARVNHVAAAEAQDAPDVILGTFLVNSVPATVLFDSGATHSFLSMSFVGNHGMEVEDLRRPLMVSTPSNQALSLQRSPSVRIEIQGIPFLANLILLESKDLDVILGMDWLARHKGVIDCANRKVTLTSNDGQVVTVHALSSEFLRSRLNQITLEEIPIVREYPDVFPDDLPGMPPKRDIEFRIDLVPGTTLIHKRPYRMAANELAEVKRQVDDLLQKGYIRPSSSPWGAPVIFVEKKDHTQRMCVDYRALNDVTIKNKYPLPRIDDLFDQLKGATIFSKIDLRSGYHQLRIKEEDIPKTAFTTRYGLFECTVMSFGLTNAPAFFMNLMNKVFMEYLDKFVVVFIDDILIYSRTKEEHEEHLRLALEKLREHQLYAKFSKCEFWLSEVKFLGHVISAGGVAVDPSNVESITNWKQPKTVSEIRSFLGLAGYYRRFIENFSKIAKPMTRLLQKDVKYKWSEECEQSFQELKNRLISAPILILPDPKKGFQVYCDASKLGLGCVLMQDGKVVAYASRQLRPHEKNYPTHDLELAAVVHALKIWRHYLFGTRTEVYTDHKSLKYIFTQPDLNMRQRRWLELIKDYDMRIHYHPGKANVVADALSRKGNCNATEGRQLPLELCKEFERLNLGIVSRGFVTALEAKPTLIDQVRKAQINDPDIQEIKKNMRRGKAIGFLEDEHGTVWLGEKICVPDNKDLKDAILKEAHDTLYSIHPGSTKMYQDLKERFWWASMKREIAEYVAVCDVCQRVKAEHQKPAGLLQPLKIPEWKWEEIGMDFITGLPRTSSGHDSIWVIVDRLTKVAHFIPVKTTYSGSRLAELYMARIVCLHGVPKKIVSDRGSQFTSNFWKKLQEEMGSKLNFSTAYHPQTDGQTERVNQILKDMLRACALDFGGSWDKNLPYAEFSYNNSYQASLQMAPYEALYGRKCRTPLLWDQTGECQVFGTDILREAEEKVKIIQERLRVAQSRHKSYADNRRRDLSFEEGDYVYLRVTPLRGVHRFHTKGKLAPRFVGPYKIVSRRGEVAYQLELPQSLAGVHNVFHVSQLKKCLRVPTEEANLEQIEVQEDLTYVEKPIRILEIDERRTRNRVIRFCKVQWSNHSEEESTWEREDELKSAHPHLFASSSESRGXDSV

SEQ ID NO: 20079 - protein, 1735 aa, Oryza sativa
  Clone ID: TF_OSC400676j.C1.p13.fg
MRRPSRPLRRAAAAVGDVIADVIGVVRPPGLEWYIPGLEIELCSRDGCSEWLGLYNRMPRYKPEYLFGVEGFVQELRTMSFAIGFGTAPFYAQIPHDRHEEKCRVKVTLNSNSEEVPSVMFEAGGRNYVHACQEVARIAIGELRDSYSDQLADTEYRYHPRQPQGSDRGSYLETEGIENDATTRHLVEMLWAMDESRAETVLAAQDREDRNRGKICKLEDKVDRLEKELAALKGEAPPQKARIRLTARKRALFVPRYQLAPKMVNTRSNGNGPNNPNNNNNGENPTLAQVLAQQTQLMNMMMQQLQNQQNQGNNHAPPQNKLAEFLRVRPPIFSSTTNPVEAGDWLHAIEKKLDLLQCTDQEKVSFASHQLHGSASEWWDHFRLNRTTAEPITWLEFTAAFRKTHIPSRVVSLKKKEFRSLTQGSRSVTEYLHEFNRLARYAPEDVRNDEERQEKFLGGLNDELSYPLMVGDYPDFQKLVDKAIRQEDKYNCMEQRKRRIAHFKAQQGSNQKPRFTLGPQSMPQGGSSSVVRPQRQFFNNNAGNNIRNQAPRPVAAPTQQQPAKREQGSKPVVCFNCGDPGHYADKCPKPRRVKVVPAQSNSAVPASKARVNHVAAAEAQDAPDVILGTFPVNSVPATVLFDSGATHSFLSMSFAGNHGMEVEDLRHPLMVSTPSNQALSLQRSPSVRIEIKGVPFVANLILLESKDLDVILGMDWLARHRGVIDCANRKVTLTSNDGRVVTVHALSSESLRSRLNQITLEEIPIVREYPDVFPDDLPGMPPKRDIEFRIDLVPGTTPIHKRPYRMAANELAEVKRQVDDLLQKGYIRPSSSPWGAPVIFVEKKDHTQRMCVDYRALNDVTIKNKYPLPRIDDLFDQLKGATVFSKIDLRSGYHQLRIKEEDIPKTAFTTRYGLFECTVMSFGLTNAPAFFMNLMNKVFMEYLDKFVVVFIDDILIYSRTKEEHEEHLRLALEKLREHQLYAKFSKCEFWLSEVKFLGHVISAGGVAVDPSNVESVTNWKQPKTVSEIRSFLGLAGYYRRFIENFSKIAKPMTRLLQKDVKYKWSEECEQSFQELKSRLISAPILILPDPKKGFQVYCDASKLGLGCVLMQDGKVVAYASRQLRPHEKNYPTHDLELAAVVHALKIWCHYLFGTRTEVYTDHKSLKYIFTQPDLNMRQRRWLELIKDYDMGIHYHPGKANVVADALSRKGYCNATEGRQLPLELCKEFERLNLGIVSRGFVAALEAKPTLIDQVREAQINDPDIQEIKKNMRRGKAIGFLEDEQGTVWLGERICVPDNKDLKDAILKEAHDTLYSIHPGSTKVYQDLKERFWWASMKREIAEYVAVCDVCQRVKAEHQKPAGLLQPLKIPEWKWEEIGMDFITGLPRTSSGHDSIWVIVDRLTKVAHFIPVKTTYSGSRLAELYMARIVCLHGVPKKIVSDRGSQFTSNFWKKLQEEMVSKLNFSTAYHPQTDGQTERVNQILEDMLRACALDFGGSWDKNLPYAEFSYNNSYQASLQMAPYEALYGRKCRTPLLWDQTGERQVFGTDILREAEEKVKIIQERLRVAQSRHKSYADNRRRDLSFEEGDYVYLRVTPFRGVHRFHTKGKLAPRFVGPYKIVSRRGEVAYQLELPQSLAGVHNVFHVSQLKKCLRVPTEEANLEQIEVQEDLTYVEKPIRILATSERRTRNRVIRFCKVQWSNHSEEESTWEREDELKSAHPHLFASSSESRGRDSV

SEQ ID NO: 20080 - protein, 1575 aa, Oryza sativa
  Clone ID: TF_OSC400686j.C1.p2.fg
MRVHTHMPRYKPEYLFGVEGFVQELRTMSFAIGFGTAPFYAQIPHDHHEKKCRVKVTLNSNSEDIPSVMFEAGGRNCIHACQEVARIAIGELHDRYSDQLADTEYRYHPRQPQGSDRGSYLETEGIENDATTRHLVEMLWAMDETRAETVLAAQDREDRNRGKICKLEDKVDRLEKELAALKGEAPPQKSRIRLTARKRALFVPRYQLAPKVRVVEKEVTPALADPPVVNMVLTRSNGNGPNNNNNNNNNNGENPTLAQVLSQQAQLMNMMMQQLQNQTTAEPITWLEFTTAFRKTHIPSGVVSLKKKEFRSLTQGSRSVAEYLHEFNRLAHYAPEDVRTDEERQERFLEGLNDELSYPLMTGDYSDFQKLVDKAIRQEDKYNRMEQKKRRIAKFKAQQGNSQRPRLTLGPQSMPQGGSSSVARPQRQFFNNNAVNNIRNQAPRPVAASTQQQPAKREQGSKPVVCFNCGDPGHYADKCPKPRRVKVVPVQSNSTVPASKARVNHVAAAEAQDAPDVILGTFLVNLVPTTVLFDSGATHSFLSMSFAGNHGMEVEDLRRPMMVSTPSNQALSLQRSPSVKIEIQGVPFLANLILLESKDLDVILGMDWLARYKGVIDCANRKVTITSNDGRVVTVHALSSESLRSRLNQITLEEIPIVREYPDVFPDDLPGMPPKRDIEFRIDLVPGTTPIHKRPYRMAANELAEVKRQVDDLLQKGYIRPSSSPWGAPVIFVEKKDHTQRMCVDYRALNDVTIKNKYPLPRIDDLFDQLKGATVFSKIDLRSGYHQLRIKEEDIPKTALIEEHEEHLRLALEKLREHQLYAKFSKCEFWLSEVKFLGHVISAGGVAVDPSNVESVTNWKQPKTVLEIRSFLGLAGYYRRFIENFSKIAKPMTRLLQKHVKYKWSEECEQSFQELKNRLITAPILILPDLKKGFQVYCDASKLGLGCVLMQDGKVVAYASRQLRPHEKNYPTHDLELAAVVHALKIWRHYLFGTRTEVYTDHKSLKYIFTQPDLNMRQRRWLELIKDYDMGIHYHPGKANVVADALSRKGYCNATEGRQLPLELCKEFERLNLEIVSRGFVAALEAKPTLIDQVREAQINDLDIQEIKKNMRRGKAIGFLEDEQGTVWLGERICVPNNKDLKDAILKEAHDTLYSIHPGSTKMYQDLKERFWWASMKREIAEYVAVCDVCQRVKAEHQKPAGLLQPLKIPEWKWEEIGMDFITGLPRTSSGHDSIWVIVDRLTKVAHFIPVKTTYSGSRLAELYMARIVCLHGVPKKIVSDRGSQFTSNFWKKLQEEMGSKLNFSTAYHPQTDGQTERVNQILEDMLRACALDFGGSWDKNLPYAEFSYNNSYQASLQMAPYEALYGRKCRTPLLWDQTGERQVFGTDILREAEEKVKIIQERLRVAQSHHKSYADNRRRDLSFDEGDYVYLRVTPLRGVHRFHTKGKLAPRFVGPYKVVSRRGEVAYQLELPQSLAGVHNVFHVSQLKKCLRVPTEEANLEQIEVQEDLTYVEKPIRILETNERRTRNRVIRFCKVQWSNHSEEESTWEREDELKSAHPYLFASSSESRGRDSV

SEQ ID NO: 20081 - protein, 809 aa, Oryza sativa
  Clone ID: TF_OSC400718j.C1.p122.gm
MKIGMLGVGQDSAVLSIKDDGAPNKLPSTPQALASQSPPPFQPCSAAVPDAAVAREDRRRHRRCVAVLVRPFAAAEDRRSTLVTVDPKSFAASSSSPSPSVDLPPPFWSPMPRYKPEYLFGVEGFVQELRTMSFAIGFGTAPFYAQIPHDRHEEKCRVKVTLNSNSEEVPSVMFEAGGRNYIHACQEVARIAIGELRDRYSDQLADTEYRYHPRQPQGSDRGSYLETEGIENDATTRHLVEMLWAMDESRAETVLAAQDREDRNRGKICKLEDKVDRLEKELAALKGEAPPQKARIRLTARKRALFVPRYQLAPKVRVVEKEVAPAQADPPVIIISDEEEEESKRNHSKIEWVATQDDEDEPNEPSIDLRCSEELDTTNPVEAGDWLHAIEKKLDLLQCTDQEKVSFASHQLHGPASEWWDHFRLNRITAEPITWLEFTAAFRKTHIPSGVVSLKKKEFRSLTQGSRSVTEYLHEFNRLARYAPEDVRNDEERQEKFLGGLNDELSYPLMVGDYPDFQKLVDKAIRQEDKYNCMEQRKRRIAHFKAQQGSNQKPRLTLGPQSMPQGGSSSVVRPQRQFFNNNAGNNIRNQAPRPVAAPTQQQPAKREQGSKSVVCFNCGDPGHYADKCPKPRRVKVVPAQNNSTVPASKARVNHVAAAEAQDAPDVILVREYPDVFPDDLPGYYRRFIENFSKIAKPMTRLLQKDVKYKWSEESPQALASQSPPPLQPCSAAVPDAAVAREDRRRDRRCVAVLVRPFAAAEDRRSTLVTVDPKSFAASSSSPSPSVDLPPPFWSPVSSPRRPLRAGALR

SEQ ID NO: 20082 - protein, 1884 aa, Oryza sativa
  Clone ID: TF_OSC400719j.C1.p1.np
MPRYKPEYLFGVEGFVQELRTMSFVIGFGTVPFYAQIRHDRHEEKCRVKVTLNSNSEDIPSVMFEAGGRNYIHACQEVARIAIGELRDRYSDQLADTEYRYHPRQPQGSDRTEGIENDATTRHLVEMLWAMDESRAETVLAAQDREDRNRGKICKLEDKVDRLEKELAALKGEAPPQKARIRLTARKRALFVPRYQLAPKVRVVEKEVAPADPPVIIISSDEEEESKRNCSKIEWVATQDDEDEPNEPSIDLRCSEELDNGNGPNLNNPNNNNNGENPTLAQVLAQQTQLMNMMMQQLQNQQNQGNNHAPPQNKLAEFLRVRPPVFSSTTNPVEAGDWLHAIEKKLDLLQCTDQEKVSFASHQLHGPASEWWDHFRLNRTTAEPITWLEFTAAFRKTHIPSGVVSLKKKEFRSLTQGSRSVTEYLHEFNRLARYAPEDVRNDEERQEKFLEGLNDELSYPLMTEDYSDFQKLVDKAIHQEDKYNRMEQKKRRIAHFKAQQGNNQKPRLTLGPQSMPHGGSSSVVRPQHQFFNNNAGNNIRNQAPRPVAASTQQQPAKREQGSKPVVCFNCGDPGHYADKCPKPRHVKVVPAQSNSAVPASKARVNHVAAAEAQDAPDVILGTFLVNSVPATVLFDSGATHSFLSMSFAGNHGMEVEDLRCPLMVSTPSNQALSLQRSPSVRIEIQGVPFLANLILLESKDLDVILGMDWLARHKGVIDCANRKVTLTSNDGRVVTVHALSSEFLRSRLNQITLEEIPIVRGYPDVFPDDLPGMPPKRDIEFRKDLVPGTTPIHKRPYRMAANELAEVKRQVDDLLQKGYIRPSSSPWGAPVIFVEKKDHTQRMCVDYRALNDVTIKNKYPLPRIDDLFDQLKGATVFSKIDLRSGYHQLRIKEYGLFECTVMSYGLFECTVMSFGLTNAPAFFMNLMNKVFMEYLDKFVVVFIDDILIYSKTKEEHEEHLRLALEKLREHQLYAKFSKCEFWLSEVKFLGHVISAGGVAVDPSNVESVTNWKQPKTVSEIRSFLGLAGYYRKFIENFSKIAKPMTRLFQKDVKYKWSEECEQSFQELKNRLISAPILILPDPKKGFQVYCDASKLGLGCVLMQDGKVVAYASRQLRPHEKNYPTHDLELAAVVHALKIWRHYLFGTRTEEFERLNLGIVSIGFVAALEAKPTLIDQVREAQTNDPDIQEIKKNMRRGKAIGFLEDEHGTVWLGERICVPDNKDLKDAILKEAHDTLYSIHPGSTKMYQDLKERFWWASMKREIAEYVAVCDVCQRVKAEHQKPAGLLQPLKIPEWKWEEIGMDFITGLPKTSLGHDSIWVIVDRLTKVAHFIPVKTTYSGSRLAELYMARIVCLHGVPKKIVSDRGSQFTSNFWKKLQEEMGSKLNFSTAYHPQTDGQTERVNQILEDMLRACALDFGGSWDKNLPYAEFSYNNSYQASLQMAPYEALYGRKCRTPLLWDQTGERQVFGTDILREAEEKVKIIQERLRVAQSRHKSYADNRRRDLSFEEGDYVYLRVTPLRGVHRFHTKGKLVPRFVGPYKIVSRRGEVAYQLELPQSLAEVHNVFHVSQLKKCLRVPTEEANLEQIEVQEDLTYVEKPIRILETNERRTRNRVIRFCKVQWSNHSEEESTWEREDELNEGFEFVSDSSFPNLPSSSPVAVGLRLRLRAPLKGSPWSPLPAATLAFASRRRSRPSAPCAAVVPAVAIAREGRRRVRRRVSRPSAPCAAVVPAVAIAREGRRRVRRRVAVLVRPFAVAEDRRSVIAAVDPKSFAASSSSPSPSVDLPPPFASSRRRSPASMRRPSRPSCPPFASSRRRSPASMRRPSRPSCPSRRRRGDVIADAIKFVLHSVVSGESVFTGEEFEEFQGQQGKGRGCRWTDGVQQ

SEQ ID NO: 20083 - protein, 1630 aa, Oryza sativa
  Clone ID: TF_OSC400724j.C1.p22.fg
MVGCEHMVLMVVLMTIKDRFASYCCETFIVPTTSQRGQRLYLLYSVIHYSAPDCETARSPWGSLGSPCLVYKGVIMIQERCAVMGYVVQGVLSRLLSEMPPHSPRNLIEVLGFVRELRLMAFEVGYEVAPEYRQISHDPDEEKCRVRVTLASDSEDLPSFKFEAGGRSYCHACQEAALVAIGELRQRFEEELDSSAFQYHPHKPHGQDYGTYICPDGEESATLMHAVHMLSAMDAVSVERDKAAHDRENWNQGKICKLKSKVYRLQKELAELKGETPPPTPKLRLTARKRTCPPPRLQLASKIRVMGEAVPDHAEPVIDIISDEEEEEDPEEREPATPEEEDPSLRSDARRKAEGEPITWQEFTAAFKKTHIPSGVVALKKREFRALNQGSRSVTEYLHDFNRLARYAPEDVRTDEERQEKFLEGLNDELSYALMSTDFRDFQQLVDKAIRQEDKYNRMEQKKRRAAQFKAQQGSNQRPRLVTGPQAPSYPQGGSSSVVRPQRQFYNNNTGNRGNDNRNVVARPAATPAQNQPVRKEQGSKPVVCFNCGDPGHYADKCPKPRRVKNAPAPNNSNVPAPKARVNHVAAAEAQNAPDVVLGTFPVNSIPATVLFDSGATHSFLSKSFASNHGMEVVSLGRPLLVNTPGNQVFSTQYCPSVTIEIEEVPFPSSLILLESKDLDVILGMDWLSRHRGVIDCANRKVTLTSSNGETVSFFVSSPKSHGVILNQVALQEIPIVQDYPDVFPEDLPGMPPKRDIEFRIDLVPGTNPIHKRPYRMAANELAEVKKQVDDLLQKGYIRPSTSPWGAPVIFVEKKDHTQRMCVDYRALIEVTIKNKYPLPRIDDLFDQLEGATVFSKIDLRSGYHQLRIREEDIPKTAFTIRYGLFECTVMSFGLTNAPAFFMNLMNKVFMEYLDKFVVVFIDDILIYSKTKEEHEEHLRLALEKLREHQLYAKFSKCEFWLSEVKFLGHVISSGGVAVDPSNVELVLSWKQPKTVSEIRSFLGLAGYYRRFIENFSKIARPMTRLLQKEVKQLRPHENNYPTHDLELAAVVHALKIWRHYLFGNRTEIYTDHKSLKYIFTQPDLNMRQRRWLELIKDYDMEIHYHPGKANVVADALSRKSYCNMSEGRRLPWELCQEFEKLNLGIVSKGFVAALEAKPTLFDQVREAQVNDPDIQEIKKNMRRGKAIGFVEDEQGTVWLGERICVPENKELKDTIMKEAHETLYSIHPGSTKMYQDLKQQFWWASMRHEIAEYVALCDVCQRVKAEHQKPAGLLQPLKIPEWKWEEIGMDFITGLPRTSAGHDSIWVVVDRLTKVAHFIPVKTTYTGNKLAELYMARVVCLHGVPKKIVSDRGSQFTSKFWQKLQLELGTRLNFSTAYHPQIDGQTERVNQILEDMLRACVLDFGGSWDNNLPYAEFSYNNSYQASLQMSPNEALYDRKCRTPLLWDQTGERQVFGTDILREAEEKVKIVQERLRIAQSRQKSYADNRCRDLAFEEGDCVYLRVTPLRGVHRFQTKGKLAPRFVGPFKIVSRRGEVAYQLELPPSMAGIHDVFHVSQLKKCLRVPTEETDPDRIELQEDLTYVEKPVRILEFPTFRRRAFPLRKVPKRLRKPKASHTDPKQPFEHVEPV

SEQ ID NO: 20084 - protein, 1680 aa, Oryza sativa
  Clone ID: TF_OSC400724j.C1.p24.fg
MVGSPGLEWYIPGLEIELYSRDGCPEWLGLYNRMPRYKPEYLFGVEGFVQELRTMSFVIGFGTVPFYAQIRHDRHEEKCRVKVTLNSNSEDIPSVMFEAGGRNYIHACQEVARIAIGELRDRYSDQLADTEYRYHPRQPQGKTVLAAQDREDRNRGKICKLEDKVDRLEKELAALKGEAPPQKARIRLTARKRALFVPRYQLAPKMVNTRSNRNGPNLNNPNNNNNGENPTLAQVLAQQTQLMNMMMQQLQNQQNQGNNHAPPQNKLAEFLRVRPPVFSSTTNPVEAGDWLHAIEKKLDLLQCTDQEKVSFASHQLHGPASEWWDHFRLNRTTAEPITWLEFTAAFRKTHIPSGVVSLKKKEFRSLTQGSRSVTEYLHEFNRLARYAPEDVRNDEERQEKFLEGLNDELSYPLMTEDYSDFQKLVDKAIHQEDKYNRMEQKKRRIAHFKAQQGNNQKPRLTLGPQSMPHGGSSSVVRPQHQFFNNNAGNNIRNQAPRPVAASTQQQPAKREQGSKPVVCFNCGDPGHYADKCPKPRHVKVVPAQSNSAVPASKARVNHVAAAEAQDAPDVILGTFLVNSVPATVLFDSGATHSFLSMSFAGNHGMEVEDLRCPLMVSTPSNQALSLQRSPSVRIEIQGVPFLANLILLESKDLDVILGMDWLARHKGVIDCANRKVTLTSNDGRVVTVHALSSEFLRSRLNQITLEEIPIVRGYPDVFPDDLPGMPPKRDIEFRKDLVPGTTPIHKRPYRMAANELAEVKRQVDDLLQKGYIRPSSSPWGAPVIFVEKKDHTQRMCVDYRALNDVTIKNKYPLPRIDDLFDQLKGATVFSKIDLRSGYHQLRIKEEDIPKTAFTTRYGLFECTVMSFGLTNAPAFFMNLMNKVFMEYLDKFVVVFIDDILIYSKTKEEHEEHLRLALEKLREHQLYAKFSKCEFWLSEVKFLGHVISAGGVAVDPSNVESVTNWKQPKTVSEIRSFLGLAGYYRKFIENFSKIAKPMTRLFQKDVKYKWSEECEQSFQELKNRLISAPILILPDPKKGFQVYCDASKLGLGCVLMQDGKVVAYASRQLRPHEKNYPTHDLELAAVVHALKIWRHYLFGTRTEVYTDHKSLKYIFTQPDLNMRQRRWLELIKDYDMGIHYHPGKANVVADALSRKGYCNATEGRQLPLELCKEFERLNLGIVSIGFVAALEAKPTLIDQVREAQTNDPDIQEIKKNMRRGKAIGFLEDEHGTVWLGERICVPDNKDLKDAILKEAHDTLYSIHPGSTKMYQDLKERFWWASMKREIAEYVAVCDVCQRVKAEHQKPAGLLQPLKIPEWKWEEIGMDFITGLPKTSLGHDSIWVIVDRLTKVAHFIPVKTTYSGSRLAELYMARIVCLHGVPKKIVSDRGSQFTSNFWKKLQEEMGSKLNFSTAYHPQTDGQTERVNQILEDMLRACALDFGGSWDKNLPYAEFSYNNSYQASLQMAPYEALYGRKCRTPLLWDQTGERQVFGTDILREAEEKVKIIQERLRVAQSRHKSYADNRRRDLSFEEGDYVYLRVTPLRGVHRFHTKGKLVPRFVGPYKIVSRRGEVAYQLELPQSLAEVHNVFHVSQLKKCLRVPTEEANLEQIEVQEDLTYVEKPIRILETNERRTRNRVIRFCKVQWSNHSEEESTWEREDELKSAHPYLFASSSESRGRDSV

SEQ ID NO: 20085 - protein, 1634 aa, Oryza sativa
  Clone ID: TF_OSC400726j.C1.p7.fg
MVGSPGLEWNIPGVEIELCSRGGCSEWLGLYNRMPRYKPEYLFGVEGFVQELRSMSFVIGFGTAPFYAQIPHDRHEEKCRVKVTLNSNSEDIPLVMFEAGGRNYIHACQEVARIAIGELRDRYSDQLADTEYRYHPRQPQGSDRGSYLETEGIENDATTKHLVEMLWAMDESRAETVLAAQDREDRNRGKICKLEDKVDRLEKELAALKGEAPPQKARIRLTARKRALFVPRYQLAPKMVNTRSNGNGPNNPNNNNGENPILAQVLAQQTQLMNMMMQQFQNQENQGNNHAPPQNKLAEFLRVRPPVFSSTTNPVEASDWLHAIEKKLDLLQCTDQEKVSFASHQLHGPASEWWDHFRLNRTTAEPIIWLEFTAAFRKTHIPSGVVSLKKKEFRSLTQGSRSVTEYLHEFNRLARYAPEDVRNDEERQEKFLGGLNDELSYPLMVGDYPDFQKLVDKAIRQEDKYNRMEQKKRRIAQFKTQQGNNQKPHLTLGPQPMPQGGSSSVVRPQRQFFNNNAGNNIRNQGPRPVAAPAQQQPVKREQGSKPVVCFNCGDPGHYADKCPKPRRVKVVPAQNNSAVPASKARVNHVAAAEAQDAPDVILGTFLVNSVPATVLFDSGATHSFLSMSFVGNHGMEVEDLRRPLMVSTPSNQALSLQRSPSVRIEIQGVPFLANLILLESKDLDVILGMDWLARHKGVIDCANKKVTLTSYDGRVVTVHALSSESLRSRLNQITLEEISIVREYPDVFPDDLPGMPPKRDIEFRIDLVPGTTPIHKRPYRMAANELAEVKRQVDDLLQKGYIRPSSSPWGAPVIFVEKKDHTQRMCVDYRALNDVTIKNKYPLPRIDDLFDQLKGATVFSKIDLRSGYHQLRIKEEDIPKTAFTTRYGLFECTVMSFGFTNAPAFFMNLMNKVFMEYLDKFVVVFIDDILIYSRTKEEHEEHLRLALEKLREHQLYAKFSKCEFWLSEVKFLGHVISAGGVTVDPSNVESVTNWKQPKTVSEIRSFLGLAGYYRRFIENFSKIAKPMTRLLQKDVKYKWSEECEQSFQELKSRLISAPILILPDPKKGFQVYCDASKLGLGCVLMQDGNVVAYASRQLRPHEKNYPTHDIELAAVVHALKIWRHYLFGTRTEVYTDHKSLKYIFTQPDLNMRQRRWLELIKDYDMGIHDHPGKANVVADALSRKGYCNATEGRQLPLELCKEFERLNLGIVGRGFIAALEAKPTLIDQVREAQINDPDIQEIKKNMRRGKAIGFLEDEQGTVWLGERICVPDNKDLKDAVLKEAHDTLYSIHPGSTKMYQDLKERFWWASMKREIAEYVAVCDVCQRVKAEHQKPAGLLQPLKIPEWKWEEIGMDFITGLPRTSSGHDSIWVIVDRLTKVAHFIPVKTTYSGSRLAELYMARIVCLHGVPKKIVSDRGSQFTSNFWKKLQEEMGSKLNFSTAYHPQTDGQTERVNQILEDMLRACALDFGGSWDKNLPYAEFSYNNSYQASLQMASYEALYGRKCRTPLLWDQTGERQVFGTDILREAEEKVKIIQERLRVAQSRHKSYADNRRRDLSFEEGDYVYLRVTPLRGVHRFHTKGKLAPRFVGPYKIVSRRGEVAYQLELPQSLAGVHNVFHVSQLKKMFKCTYRRS

SEQ ID NO: 20086 - protein, 1734 aa, Oryza sativa
  Clone ID: TF_OSC400760j.C1.p1.fg
MGLRHRLLAPIKGSPSPPLPVATLAFVSRRRKRPSAPCFAVVPVVAVARGDRHRGRHRVAVLVRPFAVAVDRRSIAVVVKPKDPAAFSSTPPPSVHLPPSFWSSIPTFPESPFSQEKNLKSSKATPGLEWYIPGLEIELYSRDGCSEWLGLYNRMPCYKPEYLFGVEGFVQELRTMSFAIGFGTTPFYAQIPHDRHEEKCRVKVTLNSNSEDIPSVMFEAGGRNYIHACQEGSDRGSYLETEGIENDATTKHLVEMLWAMDETRAETVLAAQDREDRNHEKELAALKGEAPPQKARIRLTARKRALFVPRYQLAPKVRVVEKEVTPALANPPVVNMVLTRSNGNGPNNNNNNNNGENPTLAQVLAQQVQLMNIMMQQLQNQQNQGNNHAPPQNKLAEFLHVRPPTFSSTTNPVEAGDWLHAIEKKLDLLQCTDQEKVSFASHQLHGLASEWWDHFRLNRTTTEPITWLEFTAAFRKTHIPSGVVSLKKKEFRSLTQGSRSVTEYLHEFNRLARYAPEDVRTDEERHERFLEGLNDELSYPLMTGDYHDFQKLVDKAIRQEGKYNRMEQKKRRIAQFKAQQGNSQRPRLTLGPQSMRQGGSSSVVRPQRQFFNNNAGNNIRNQAPRPVAASTQQQPAKKEQGSKPVVCFNCGDPGHYADKCPKPRRVKVVPAQSNSTVPASKARVNHVAAAEAQGAPDVILGTFLVNLVPATVLFDSGATHSFLSMSFAGNHGMEVEDLRRPLMVSTPSNQALSLQRSPSVRIEIQGVPFLANLILLESKDLDVILGMDWLARYKGVIDCANRKVTITSNDGRVVTVHALSSEPLRSRLNQITLEEIPIVREYPDVFPDDLPGMPPKRDIEFRIDLVPGTTPIHKRPYRMAANELAEVKRQVDDLLQKGYIRPSSSPWGAPVIFVEKKDHTQRMCVDYRALNDVTIKNKYPLPRIDDLFDQLKGAIVFSKIDLRSGYHQLRIKEEDIPKTAFTTRYGLFECTVMSFGLTNAPAFFINLMNKVFMEYLDKFVVVFIDDILIYSRTKEEHEEHLRLALEKLREHQLYAKFSKCEFWLSEVKFLGHVISAGGVAVDPSNVESITNWKQPKTVSEIRSFLGLAGYYRRFIENFSKIAKPMTRLLQKDVKYKWSEECKQSFQELKNRLISAPILILPDPKKGFQVYCDASQLGLGCVLMQDGKVVAYASRQLRPHEKNYPTHDLELAAVIHALKIWRHYLFGTCIEVYTDHKSLKYIFTQPDLNMRQRRWLELIKDYDMGIQYHPGKANVVADALSRKGYCNATEGRQLPLELCKEFERLNLGIVRRGFVAALEAKPTLIDQVREAQINDPDIQEIKKNMRRGKAIGFLEDEQGTVWLGERICVPDNKDLKDAILKEAHDTLYSIHPGSTKMYQDLEERFWWASMKREIAEYVAVCDVCQRVKAEHQKPAGLLQPLKIPEWKWEEIGMDFITGLPRTSSGHDSIWVTDGQTERVNQILEDMLRACALDFGGSWDRNLPYAEFSYNNSYQASLQMAPYEALYGRKCRTPLLWDQTGERQVFGTDILREAEEKVKIIQERLRVAQSRHKSYADNRRRDLSFDEGDYVYLRVTPLRGVHRFHTKGKLVPHFVGPYKIVNRRGEVAYQLELPQSLAGVHNVFHVSQLKKCLRVPTEEANLEQIEVQEDLTYVQKPIRILEIEERRTRNRVIRFYKVQWSNHSEEESTWEREDELKSAHPHLFASSSESRGRDSV

SEQ ID NO: 20087 - protein, 676 aa, Oryza sativa
  Clone ID: TF_OSC400772j.C1.p46.gm
MVNTRASGSGNNNNGENPTLAQVLAQQTQLMNMMMQQLQNQQNQGNNHAPPQNKLAEFLRVRPPIFSSTTNPVEAGDWLHAIEKKLDLLQCTDQEKVSFASHQLHGPASEWWDHFRLNRTTAEPITWLEFTAAFRKTHIPSGVVSLKKKEFRSLTQGSRSVTEYLHEFNRLARYAPEDVRNDEERQEKFLEGLNDELSYPLMTGDYPDFQKLVIKAIRQEDKYNSMEQKKRRIAQFKTQQGNNQKPRLTLGPQSMPQGGSSSVVRPQRQFFNNNAGNNIRNQAPRPVAASTQQQPAKREQGSKPVVCFNCGDPGHYADKCPKPRRVKVVPAQSNSTVPASKARVNHVAAAEAQDAPDDPRCRRYPSPLSPSLLVAGSALAPCRFAPPSSPPLQPCAAVAPVIVVAREGRHRGRRHVAVLVRSFAVAVDRRSTVAAVDPIFSAASISPPVPSVDLPPLLWSPVSSPRHALRPGALRSRRRAVVRRRACAARAAAGGDVTADVIVAVCREPHGSLRSTRLRSGGDKPTGVAPVIVVAQEGRHHGRRHVAVLVRSSAVAVDRRSTVAAVDPIFSAASISPPVPSVDLPPLLWSPVSSPRHALRPGALRSRRRAVVRRRACAARAAAGGDVTADVIVAVCQNDDDDVSDDVSTGGDSGGSDGASSPANDGARTRTEDTNG

SEQ ID NO: 20088 - protein, 799 aa, Oryza sativa
  Clone ID: TF_OSC400806j.C1.p3.gm
MVNTRSNGNGPNNPNNNNNGENPTLAQVLAQQTQLMNMMMQQLQNQQNQGNNHVPPQNKLAEFLHVRPPVFSSTTNPVEAGDWLHAIEKKLDLLQCTDQEKVSFASHQLHGPASEWWDHFRLNRTTAEPITWLEFTAAFRKTHIPSGVVSLKKKEFRSLTQGSRSVTEYLHEFNRLARYAPEDVRNDEERQEKFLEGLNDELSYPLMTGDYSDFQKLVDKAIRQEDKYNRMEQKKCRIAHFKAQQGNNQKPRLTLGSQSMPQGGSSSVVRPQRQFFNNNAGNNIRNQAPRPVAAPAQQQPVKREQGSKPVVCFNCGDPGHYADKCPKPRRVKVVPAQSNSTAPASKARVNHVAAAEAQDAPDVILVREYSDVFPDDLPANELAEVKRQVDDLLQKGYIRPSSSPWGAPVIFVEKKDHTQRMCVDYRALNDVTIKNKYPLPRIDDLFDQLKGATVFSKIDLRSGYHQLRIKEEDIPKTAFTTRYGLFECTVMSFGLTNAPAFFMNLMNKVFMEYLDKFVVVFIDDILIYSRTKEEHEEHLRLALEKLREHQLYAKFSKCEFWLSEVKFLGHVISAGGVAVDPSNVESVTNWKQPKTVSEIRSFLGLAGYYRRFIENFSKIAKPMTRLLQKDVKYKWSEEYVAVAREGRHRGRRRVAVLVRPFAVAGDHRSSVAVDNPKVSAASFSSPSSSVVRPPPFWSPVCSPRRPLRAGALRLRPSAAVRRRACAARAVRSAEPPPLSVTSPLTSSGSSARGSLRGTRLRSGGDKPTGVAGSPCLVYKGVIMIQEEEEFFNEADGVEE

SEQ ID NO: 20089 - protein, 1491 aa, Oryza sativa
  Clone ID: TF_OSC400809j.C1.p1.fg
MQARAARAAAAGDDVTADVIVALSPPGLEWYIPGLEIELCSRDGCSEWLGLYNRMPRYKPEYLFGVEGFVQELRTIFLMIVMKRSAESKVTLNSNSEDIPSVMFEAGGRNCIHACQEVARIAIGELRDRYSDQLADTEYRYHPRQPQGSDRGNYLETEGIENDATTRHLVEMLWAMDESRAETVLAAQDHEDRNRGKICKLEDKVDRLEKELAALKGEAPLQKARIRLTARKRALFVPRYQLAPKVRVVEKEVAPTLADPPVIIISEDEEEESKRNHSKFPPVSLLVPCPCQMVNTRSNGNGPSNHNNEGNPTLAQVLAQQTQLMNMMMQQLQNQQNQGNNHAPPQNKLAEFLHVRPPIFSSTTNPVEAGDWLHAIEKKLDLLQCTDQEKVSFASHQLHGPASEWWDHFRLNRTTAEPITWLEFTAAFRKTHISSGVVSLKKKEFRSLTQGSRSVTEYLHEFNRLARYAPEDVRNVEERQEKFLEGLNEELSYPLMTGDYSDFQKLVDKAIRQEDKYNRMEQKKRRIAQFKTQQGNNQKPRLTLGPQSMPHGGSSSVVRPQRQFFNNNAGNNIRNQAPRPVAAPAQQQPAKREQGSKPVVCFNCGDPGHYADKCPKPRRVKVVPAQSNSAVPASKARVNHVAAAEAQDAPDVILGTFLVNLVPATVLFDSGATHSFLSMSFAGNHGMEVEDLRRPLMVSTPSNQALSLQRSPSVRIEIQGVPFLANLILLESKDLDVILGMDWLARHKGVIDCANRKVTLTSNDGRVVTVHALSSASLRSRLNQITLEEIPIVREYPDVFPDDLPGMPPKRDIEFRIDLAPGTTPIHKRPYRMAANELAEVKRQVDDLLQKGYIRPSSSPWGAPVIFVEKKDHTQRMCVDYRALNDVTIKNKYPLPRIDDLFDQLKGATVFSKIDLRSGYHQLRIKEEDIPKTVFTTRYGLFECTVMSFGLTNAPAFFMNLMNKVFMEYLDKFVVVFIDDILIYSRTKEEHEEHLRLALEKLREHQLYAKFSKCEFWLSEVKFLGHVISAGGVAVDPSNVESVTNWKQPKTVLEIRSFLGLAGYYRRFIENFSKIAKPMTRLLQKDVKYKWSEECEQSFQELKNRLISAPILILPEPKKGFQVYCDASKLGLGCVLMQDGKMVAYASRQLRPHEKNYPTHDLELAAVVHALKIWRHYLFGTRTEVYTDHKSLKYIFTQPDLNMRQRRWLELIKDYDMGIHYHPGKANVVADALSRKGYCNATEGRQLPLELCKEFERLNLGIVSRGFVAALEAKPTLIDQVREAQINDPDIQEIKKNMRRGKAIGFLEDEHGTVWLGERICVPDNKDLKDAILKEAHDTLYSIHPGSTKMYQDLKERFWWASMKREIAEYVAVCDVCQRVKTDGQTERVNKILEDMLRACALDFGGSWDKNLPYAEFSYNNSCQASLQMAPYEALYGRKCRTPLLWDQTGEHQVFGTDILREAEEKVKIIQERLRVAQSRHKSYADNRLEI

SEQ ID NO: 20090 - protein, 1696 aa, Oryza sativa
  Clone ID: TF_OSC400903j.C1.p48.fg
MPRYKPEYLFGVEGFVQELRTMSFVIGFGTAPFYAQIRHDRHEEKCRVKVTLNSNSEEVPSVMFEAGGRNYIHACQEVARIATGELRDSYSDQLADTEYRYHPRQPQGSDRGSYLETEGIENDVTTRHLVEMLWAMDESRAETVLAAQDREDRNRGKICKLEDKVDRLEKELAALKGEAPPQKARIRLTARKRALFVPRYQLAPKIRVVEKEVAPANPPVIIISSDEEEEPKRNNSKFEWMVNTRSNGNGPNNPNSNNNGENPTLAQVLAQQTQLMNMMMQQFQNQQNQGNNHAPPQNKLAEFLRVRPPVFSSTTNPVEASDWLHAIEKKLDLLQCTDQEKVSFASHQLHGPASEWWDHFRLNRTTAEPITWLEFTAAFRKTHIPSGVVSLKKKEFRSLSQGSRSVTEYLHEFNRLARYAPEDVRNDEERQEKFLGGLNDELSYLLMVGDYPDFQKLVDKAIRQEDKYNRMEQKKRRIAQFKTQQGNNQKPRLTLGPQPMPQGGSSSVVRPQRQFFNNNAGNNIRNQAPRPVAVPAQQQPAKREQGNKPVVCFNCGDPGHYADKCPKPRRVKVVPAQNNSAVPASKARVNHVAAAEAQDAPDVILGTFLVNSVPATVLFDSGATHSFLSMSFAGNHGMEVEDLRRPLMVSTPSNQALSLQRSPSVRIEIQGVPFLANLILLESKDLDVILGMDWLARHKGVIDCANRKVTLNSYDGRVVTVHALSSESLRSRLNQITLEEIPIVREYPDVFPDDLPGMPPKRDIEFRIDLVPGTTPIHKRPYRMAANELAEVKRQVDELLQKGYIRPSSSPWGAPVIFVEKKDHTQRMCVDYRALNDVTIKNKYPLPRIDDLFDQLKGATVFSKIDLRSGYHQLRIKEEDIPKTAFTTRYGLFECTVMSFGLTNAPAFFMNLMNKVFMEYLDKFVVVFIDDIPIYSRIKEEHEEHLRLALEKLREHQLYAKFSKCEFWLSEVKFLGHVISAGGVAVDPSNVESVTNWKQPKTVSEIRSFLGLAGYYRRFIENFSKIAKPMTRLLQKDVKYKWSEECEQSFQELKSRLISAPILILPDPKKGFQVYCDASKLGLGCVLMQDGKVVAYASRQLRPHEKNYPTHDIELAAVVHALKIWRHYLFGTRTEVYTDHKSLKYIFTQPDLNMRQRRWLELIKDYDMGIHYHPGKANVVADALSRKGYCNATEGRQLPLELCKEFERLNLGIVGRGFVAALEAKPTLIDQVREAQINDPDIQEIKKNMRRGKAIGFLEDEHGTVWLGERICVPDNKDLKDAILKEAHDTLYSIHPGSTKMYQDLKERFWWQRVKAEHQKPAGLLQPLKIPEWKWEEIGMDFITGLPRTSSGHDSIWVIVDRLTKVAHFIPVKTTYSGSRLAELYMARIVCLHGVPKKIVSDRGSQFTSNFWKKLQEEMGSKLNFSTAYHPQTDGQTERVNQILEDMLRACALDFGGSWDKNLPYAEFSYNNSYQASLQMAPYEALYGRKCRTPLLWDQTGERQVFGTDILREAEEKVKIIQERLRVAQSRHKSYADNRRRDLSFEEGDYVYLRVTPLRGVHRFHTKGKLAPRFVGPYKIVSRRGEVAYQLELPQSLAGVHNVFHVSQLKKCLRVPTEEANIEQIEVQEDLTYVEKPIRILETSERRTRNRVIRFCKVQWSNHSEEESTWEREDELKSAHPHLFASSSESRGRDSV

SEQ ID NO: 20091 - protein, 819 aa, Oryza sativa
  Clone ID: TF_OSC400935j.C1.p41.gm
MVNTRSNGNGPNLNNPNNNNNGENPTLAQVLAQQTQLMHMMMQQFQNQQNQGNNHAPPQNKLAEFLRVRPPVFSSTTNPVEASDWLHAIEKKLDLLQCTDQEKVSFASHQLHGPASEWWDHFRLNRTTAEPITWLEFTAAFRKTHIPSGVVSLKKKEFRSLTQGSRSVTEYLHEFNRLARYAPEDVRNDEERQEKFLGGLNDELSYPLMVGDYPDFQKLVDKAIRQEDKYNRMEQKKRRIAQFKTQQGNNQKPRLTLGPQSMPQGCSSSVVRPQRQFFNNNAGNNIRNQAPRPVAVPAQQQPAKREQGNKPVVCFNCGDPGHYADKCPKPRRVKVVPAQNNSAVPASKARVNHVAAAEAQDAPDVILVREYPDVFPDDLPANELAEVKRQVDDLLQKGYIRPSSSPWGAPVIFVEKKDHTQRMCVDYRALNDVTIKNKYPLPRIDDLFDQLKGATVFSKIDLRSGYHQLRIKEEDIPKTAFTTRYGLFECTVMSFGLTNAPAFFMNLMNKVFMEYLDKFVVVFIDDILIYSRTKEEHEEHLRLALEKLREHQLYAKFSKCEFWLSEVKLLGHVISAGGVAVDPSNVESVTNWKQPKTVSEIRSFLGLAGYYRRFIENFSKIAKPMTRLLQKDVKYKWSEESLEAKPTLIDQVREAQINDPDIQEIKKNMRRGKAIGFLEDEHGTVWLGERICVPDNKDLKDAILKEAHDTLYSIHPGSTKMYQDLKERFWWPSPSLGKVAVVVAKSSPSSSALSLPSETAGASSPSSSRRPPPFQPRRRRRPLVVRRRFGRRPSAVNRRGPDQSRPSDLDRINLGRPFA

SEQ ID NO: 20092 - protein, 1267 aa, Oryza sativa
  Clone ID: TF_OSC400948j.C1.p1.fg
MPCYKPEYLFGVEGFVQELRTMSFVIGFGNAPFYAQIRHDRHEEKCRVKVTLNSNSEDIPSVMFEAGGRNYIHACQEVARIAIGELRDRYSDQLVDTEYRYHPRQPQGSDRGSYLETEGIENDVTTRHLVEMLWAMDESRAETVLAAQDREDRNRGKICKLEDKVDRLEKELAALKGEAPPQKARIRLTARKRALFVPRYQLAPKVRVVEKEVAPAQADPPVIIISSDEEEESKRINSKIEWVATQDDEDEPSIDLLCSEELEKLESLVVWESSVCNNETQLRSIKVKMVNTRSNGNGPNNPNNNINGENPTLAQVLAQQTQLMNMMMQQFQNQQNQGNNHAPPQNKLAEFLRVRPPVFSSTTNPVEASDWLHAIEKKLDLLQCTDQEKVSFASHQLHGPASEWWDHFRLNRTTAEPITWLEFTAAFRKTHIPSGVVSLKKKEFRSLTQGSRSVTEYLHEFNRLARYAPEDVRNDEERQEKFLGGLNDELSYPLMVGDYPDFQKLVDKAIRQEDKYNRMEQKKRRIAQFKTQQGNNQKPRLTLGPQSMPQGGSSSVVRPQRQFFNNNAGNNIRNQAPRPVAAPAQQQPAKREQGSKPVVCFNCGDPGHYADKCPKPQRVKVVPAQSNSAVPASKARVNHIAAAEAQGAPDVILGTFLVNSVPATVLFDSGATHSFLSMSFAGNHGMEVEDLRRPLMVSTPSNQALSLQRSPSVRIEIQGVPFLANLILLESKDLDVILGMDWLARHKGVIDCANRKVTLNSYDGRVVTVHALSSESLRSRLNQITLEEIPIVREYPDVFPDDLPGMPPKRDIEFRIDLVPGTTPIHKRPYRMAANELAEVKRQVDDLLQKGYIRPSSSPWGAPVIFVEKKDHTQRMCVDYRALNDVTIKNKYPLPRIDDLFDQLKDKFVVVFIDDILIYSRTKEEHEEHLRLALEKLREHQLYAKFSKCEFWLSEVKFLGHVISAGGVAVDPSNVESVTNWKQPKTVSEIRSFLGLAGYYRRFIENFSKIAKPMTRLLQKDVKYKWSEECERSFQELKSRLISAPILILPDPKKGFQVYCDASKLGLGCVLMQDGKVVAYASRQLRPHEKNYPTHDIELAAVVHALKIWRHYLFGTRTEVYTDHKSLKYIFTQPDLNMRQRRWLELIKDYDMGIHYHPGKANVVADALSRKGYCNATEGRQLPLELCKEFERLNLGIVGRGFVAALEAKPTLIDQVREAQINDPDIQEIKKNMRRGKAIGFLEDEHGTVWLGERICVCHVLINSSQN

SEQ ID NO: 20093 - protein, 2011 aa, Oryza sativa
  unsure (1)..(2011): unsure at all Xaa locations
  Clone ID: TF_OSC400968j.C1.p4.np
AXTDNNLISSWFGMVHSWFGDRTVQPMPRYKPEYLFGVEGFVQELRTMSFVIGFGTAPFYAQIPHDRHEEKCRVRVTLNSNSEEVPSVMFEAGGRNYIHACQEVARIAIGELRDRYSDQLADTEYRYHPRQPQGSDRGSYLETEGIENDVTTKHLVEMLWAMDESRAETVLAAQDREDRNRGKICKLEDKVDRLEKELAALKGEAPPQKARIRLTARKRALFVPRYQLAPKVRVVEKEVAPAQADPPVIIISSDEEEESKRNNSKIEWVATQDDEDEPSIDLRCLEELDNGNGPNNPNNNNNGENPTLAQVLAQQTQLMNMMMQQFQNQQNQGNNHAPPQNKLAEFLRVRPPVFSSTTNPVEASDWLHAIEKKLDLLQCTDQEKVSFASHQLHGPASEWWDHFRLNRTTAEPITWLEFTAAFRKTHIPSGVVSLKKKEFRSLSQGSRSVTEYLHEFNRLARYAPEDVRNDEERQEKFLGGLNDELSYPLMVGDYPDFQKLVDKAIRQEDKYNRMEQKKRRIAQFKTQQGNNQKPRLTLGPQPMPQGGSSSVVRPQRQFFNNNAGNNIRNQAPRPVAAPAQQQPAKREQGNKPVVCFNCGDPGHYADKCPKPRRVKVVPAQNNSAVPASKARVNHVAAAEAQDAPDVILGTFLVNSVPATVLFDSGATHSFLSTSFAGNHGMEVEDLRRPLMVSTPSNQALSLQRSPSVRIEIQGVPFLANLILLKSKDLDVILGMDWLARHKGVIDCANRKVTLNSYDGRVVTVHALSSESLRSRLNQITLEEIPIVREYPDVFPDDLPGMPPKRDIEFRIDLVPGTTPIHKRPYRMAANELAEVKRQVDDLLQKGYIRPSSSPWGAPVIFVEKKDHTQRMCVDYRALNDVTIKNKYPLPRIDDLFDQLKGATVFSKIDLRSGYHQLRIKEYGLFECTVMSFGLTNAPAFYGLFECTVMSFGLTNAPAFFMNLMNKVFMEYLDKFVVVFIDDILIYSRTKEEHEEHLRLALEKLREHQLYAKFSKCEFWLSEVKFLGHVISAGGVAVDPSNVESVTNWKQPKTVSEIRSFLGLAGYYRRFIENFSKIAKPMTRLLQKDVKYKWSEECEQSFQELKSRLISAPILILPDPKKGFQVHCDASKLGLGCVLMQDGKVVAYASRQLRPHEKNYPTHDIELAAVVHALKIWHHYLFGTRTEEFERLNLGIVDRGFVAALEANPTLIDQVREAQINDPDIQEIKKNMRRGKAIGFLEDEHGTVWLGERICVPDNKDLKDAILKEAHDTLYSIHPGSTKMYQDLKERFWWASMKREIAEYVAVCDVCQRVKAEHQKPAGLLQPLKIPEWKWEEIGMDFITGLPRTSSGHDSIWVIVDRLTKVAHFIPVKTTYSGSRLAELYMARIVCLHGVPKKIVSDRGSQFTSNFWKKLQEEMGSKLNFSTAYHPQTDGQTERVNQILEDMLRACALDFGGSWDKNLPYAEFSYNNSYQASLQMAPYEALYGRKCRTPLLWDQTGERQVFGTDILREAEEKVKIIQERLRVAQSRHKSYADNRRRDLSFEEGDYVYLRVTPLRGVHRFHTKGKLAPRFVGPYKIVSRRGEVAYQLELPQSLAGVHNVFHVSQLKKCLRVPTEEANIEQIEVQEDLTYVEKPIRILETSERRTRNRVIRFCKVQWSNHSEEESTWEREDELNFGIEFDSDRFPLSKPRFPSPLPAVGLRRRLRAPLKGPPVSPLPVATFAFASRRRKSPSAPCAAVVSAVAPCAAVVSAVAVAREDRRRARQVVAVLVRPFAVAGDHRSSFAAVDPKSFAASSSSPSPSVGLPPPFRSPCRRSPCRRSPASVRRSSRLLRRAAAAVGDVTADVIGVVRHSVVSGESVFAEEEFEEFQGQQGKSPYVALCDVCQRVKAEHQKPAGLLQPLKIPEWKWEEIGMDFITGLPRTSAGHDSIWVVVDRLTKVAHFIPVKTTYTGHKLAELYMARVTDGQTERVNQILEDMLRACVLDFGGSWDKNLPYAEFSYNNSYQASLQ

SEQ ID NO: 20094 - protein, 2155 aa, Oryza sativa
  Clone ID: TF_OSC400983j.C1.p2.fg
MAEERESFERFFRGTLNFYGISLHHLNPNSIVHIANFIHACEAFLGIRPHFALFRRIFFLKPQPNKSKPCVVGGAGFQLRGTLSQKYFSMPFKTSNKGWHANWFYVQNPEPALPEYSCLPPVCQDTWNSLPMGDEAAQAVELMERMLKLKEQGLQGKQITRHFIKSRLAPIKERSRTAFEFDGKHDPNREDPDSLDFKVMKERMYKIFSNAIVVSYSHLLPVVPYNAFNPPPPEFTLMKSDPPITQHRTPCGKTSQTSGGPKIRSDSHPTTTQSANQSDFRKRKLVLSDDDDAEKAGSKGVTGKHPRQANPKKKTSSRPMPKIRKSSRKPSDIDPSRKDSEPTGMETGFSKETEPTAGDRLSDEQPATDNVGPSNEPPTGNQSAEARVDANQEPPTGNQSGTERNKDILEVEAQVDNPPKKDANVDLGSSSPAKVQGPARPRPEIITAPGLEWYIPGLEIELCSRGGCSEWLGLYNRMPRYKPEYLFGVEGFVQELRTMSFVIGFGTAPFYAQIPHDRHEEKCRVKVTLNSNSEDIPSVMFEAGGRNYIHACQEVARIAIGELRDRYSDQLADTEYRYHPRQPQGSDRGSYLETEGIENDATTKHLVEMLWAMDESHAETVLAAQDREDRNRGKICKLEDKVDRLEKELAALKGEAPPQKARIRLTARKRALFVPRYQLAPKMVNTRSNGNGPNNPNNNNNGENPTLAQVLAQQTQLMNMMMQQFQNQQNQGNNHAPPQNKLAEFLRVRPPVFSSTTNPVEASDWLHAIEKKLDLLQCTDQEKVSFASHQLHGPASEWWDHFRLNRTTAEPITWLEFTAAFRKTHIPSGVVSLKKKEFRSLTQGSRSVTEYLHEFNRLARYAPEEVRNDEERQEKFLGGLNDELSYPLMVGDYPDFQKLVDKAIRQEDKYNRMEQKKRRIAQFKTQQGNNQKPRLTLGPQPMPQGGSSSVVRPQRQFFNNNAGNNIRNQAPRPVAAPAQQQPAKREQGSKPVVCFNCGDPGHYADKCPKPRRVKVVPAQNNSAIPASKARVNHVTAAEAQDAPDVILGTFLVNSVPATVLFDSGATHSFLSMSFAGNHGMEVEDLRRPLMVSTPSNQALSLQRSPSVRIEIQGVPFLANLILLESKDLDVILGMDWLARHKGVIDCANKKVTLTSYDGRVVTVHALSSESLRSRLNQITLEEIPIVREYPDVFPDDLPGMPPKRDIEFRIDLVPGTTPIHKRPYRMAANELAEVKRQVDDLLQKGYIRPSSSPWGAPVIFVEKKDHTQRMCVDYRALNDVTIKNKYPLPRIDDLFDQLKGATVFSKIDLRSGYHQLRIKEEDIPKTAFTTRYGLFECTVMSFGLTNAPAFFMNLMNKVFMEYLDKFVVVFIDDILIYLRTKEEHEEHLRLALEKLREHQLYAKFSKCEFWLSEVKFLGHVISAGGVAVDPSNVESVTNWKQPKTVSEIRSFLGLAGYYRRFIENFSKIAKPMTRLLQKDVKYKWSEECEQSFQELKSRLISAPILILPDPKKGFQVYCDASKLGLGCVLMQDGKVVAYASRQLRPHEKNYPTHDIELAAVVHALKIWRHYLFGTRTEVYTDHKSLKYIFTQPDLNMRQRRWLELIKDYDMGIHYHPGKANVLADALSRKGYCNATEGRQLPLELCKEFERLNLGIVGRGFVAALEAKPTLIDQVREAQINDPDIQEIKKNMRRGKAIGFLEDEQGTVWLGERICVPDNKDLKDAVMKEAHDTLYSIHPGSTKMYQDLKERFWWASMKREIAEYVAVCDVCQRVKAEHQKPAGLLQPLKIPEWKWEEICMDFITGLPRTSSGHDSIWVIVDRLTKVAHFIPVKTTYSGSRLAELYMARIVCLHGVPKKIVSDRGSQFTSNFWKKLQEEMGSKLNFSTAYHPQTDGQTERVNQILEDMLRACALDFGGSWDKNLPYAEFSYNTSYQASLQMAPYEALYGRKCRTPLLWDQTGERQVFGTDILRKAEEKVKVIQERLRVAQSRHKSYADNRRRDLSFEEGDYVYLRVTPLRGVHRFHTKGKLAPRFVGPYKIVSRRGEVAYQLELPQSLAGVHNVFHVSQLKKCLRVPTEEANIEKIEVQEDLTYVEKPIRILETNERRTRNRVIRFCKVQWSNHSEEESTWEREDELKSAHSHLFASSSESQGRDSV

SEQ ID NO: 20095 - protein, 1541 aa, Oryza sativa
  Clone ID: TF_OSC400991j.C1.p11.fg
MVVQNGWAYATGCRATSLSTCLVLRDLSRSCIPHDRHEEKCRVKVTLNSNSEDIPSVMFEAGGRNYIHACQEVARIAIGELRDRYSDQLADTEYRYHSRQPQGSDRGSYLETEGIENDATTRHLVEMLWAMDETRAETVLAAQDREDRNRGKICKLEDKVDRLEKELAALKGEAPPQKARICLTARKRALFVPRYQLAPKVRVVEKEVTPALADPPVVNMVVTRSNGNGPNNNNNNNNNGENPTLAQVLAQQAQLMNMMMQQLQNQQNQGNNHAPPQNKLAEFLRVRPPTFSSTTNPVEAGDWLHAIEKKLDLLQCTDQEKVSFASHQLHGPASEWWDHFRLNRTTAEPITWLEFTAAFRKMHIPSGVVSLKKKEFRSLTQGSRSVTEYLHEFNRLARYAPEDVRTDEEHQEKFLEGLNDELSYPLMTGDYHDFQKLVDKAIRQEDKYNRMEQKKRRIAQFKTQQGNNQRPHLTLGPQSMPQGGYSSVVRPQRQFFNNNAGNNIRNQVPRPVAASTQQQPAKREQGSKPVVCFNCGDPGHYADKCPKPRCVKVVPAQSNSTVSASKARVNHVAAAEAQGAPDVILGTFLVNSVPATVLFDSGATHSFLSMSFAGNHGMEVEDLRCPLMVSTPSNQALSLQRSPSVRIEIQGVPFLANLILLESKDLDVILGMDWLARHKGVIDCANRKVTLTSNDGRVVTVHALSSESLRSILNQITLEEIPIVREYPDVFSDDLPGMPPKRDIEFRIDLVPGTTPIHKRPYRMAANELAEVKRQVDDLLQKGIDDLFDQLKGATVFSKIDLRSGYHQLRIKEEDIPKTAFTTRYGLFECTVMSFGLTNAPAFFMNLMNKVFMEYLDKFVVVFIDDILIYSRTKEEHEEHLRLALEKLREHQLYAKFSKCEFWLSEVKFLGHVISAGGVAVDPSNVESVTNWKQPKTVSEIRSFLGLAGYYRRFIENFSKIAKPMTRLLQKDVKYKWSEECEQSFQELKNRLISAPILILPDPKKGFQVYCDASKLGLGCVLMQDGKVVAYASRQLRPHEKNYPTHDLELAAVVRALKIWRHYLFGTRTEVYTDHKSLKYIFTQPDLNMRQRRWLELIKDYDMGIHYHPGKVNVVADALRRKGYCNATEGRQLPLELCKEFERLNLGIVSRGFVAALEAKPTLIDQIREAQINDPDIQEIKKNMRRGRAIGFLEDEQGTVWLGERICVPDNKDLKDAILKEAHDTLYSIHPGSTKMYQDLKERFWWASMKREIAEYVAVCDVCQRVKAEHQKPAGLLQPLKIPEWKWEEIGMDFITGLPRTSSGHDSIWVIVDRLTKVAHFIPVKTTYSGSRLAELYMARIVCLHGVPKKIVSNRGSQFTSNFWKKLQEEMGSKLNFSTAYHPQTDGQTERVNQILEDMLRACALDFGGSWDKNLPYAEFSYNNSYQASLQMAPYEALYGRKCRTPLLWDQTGERQVFGTDILREAEEKVKIIQERLRVAQSRHKSYADNRRRDLSFDERDYVYLRVTPLRGVHRFHTKGKLAPRFVGPYKIVSRRGEVAY

SEQ ID NO: 20096 - protein, 786 aa, Oryza sativa
  Clone ID: TF_OSC401051j.C1.p104.gm
MPCYKPEYLFGVEGFVEELRTMSFVIGFGNAPFYAQIRHDRHEEKCRVKVTLNSNSEDIPSVMFEAGGRNYIHACQEVARIAIGELRDRYSDQLADTEYRYHPRQPQGSDRGSYLETEGIENDVTTRHLVEMLWAMDESRAETVLAAQDREDRNRGKICKLEDKVDRLEKELAALKGEAPPQKARIRLTARKRALFVPRYQLAPKVRVVEKEVAPANPPVIIISSDEEEEPKRNNSKFEWVAIKDEEDEPNEPSIDLLCSEELDTTNPVEAGDWLHAIEKKLDLLQCTNQEKVSFASHQLHGPASEWWDHFRLNRITAEPITWLEFTAAFRKTHIPSGVVSLKKKEFRSLTQGSRSVTEYLHEFNRLARYAPEDVRNDEERQEKFLGGLNDELSYPLMVGDYPDFQKLVDKAIRQEDKYNRMEQKKRRIAQFKTQQGNNQKPRLTLGPQPMPQGGSSSVVRPQRQFFNNNAGNNIRNQAPRPVAAPAQQQPAKREQGSKPVVCFNCGDPGHYADKCPKPRRVKVVPVQNNSAVPASKARVNHVAAAEAQDAPDVILVREYPDVFPDDLPERIHQTEFITMGSSGYYRRFIENFSKIAKPMTRLLQKDVKYKWSEESLEAKPTLIDQVREAQINDPDIQEIKKNRRRGKAIGFLEDEHGTPCSAVAPAVAAAREDRRRHRQVAAVLVRPFAAVGTRRSIVAVVNPKVAAASFSSPSPSVPFPPPFWSPVCSPRCPLRAGALRWCRGAAVRRRVSAARAVFFAEPPPSSVTSSLTSSGSYPVSRSWTD

SEQ ID NO: 20097 - protein, 1865 aa, Oryza sativa
  Clone ID: TF_OSC401057j.C1.p1.fg
MAEIDSIYHVAVADRMLTSAMTTPPAAARDLMVAGDLGHGGAIRGHYRDEGNSPVHDTTTDGDSGEEDRRRGRQVAAVLIRPFAVAEDHRSTVAAVDPISAAASSSSSSPSVPLPPSLWSPIPSFPESPFSPKKSLKSSKAGKETPGLEWYIPGLEIELCSRDGCSEWLGLYNRMPRYKPEYLFGVEGFVQELRTMSFVIGIGTAPFYAQIPHDRHEEKCRVKVTLNSNSEDIPSVMFEAGGRNYIHACQEVARIAIGELRDRYSDQLADTEYRYHPRQPQGSDRGSYLETEGIENDATTRHLVEMLWAMDESRAETVLAAQDREDRNRGKICKLEDKVDRLEKELAALKGEAPPQKARIRLTARKRALFVPRYQLAPKFPPVSLLVPCPCQMVNTRSNGNGPNNPNNNNNGENPTLAQVLAQQTQLMNMMMQQLQNQQNQGNNHAPPQNKLAEFLRVRPPTFSSTTNPVEAGDWLHAIEKKLDLLQCTDQEKVSFASHQLHGPASEWWDHFRLNRTTAEPITWLEFTAAFRKTHIPSGVVSLKKKEFRSLTQGSRSVTEYLHEFNRLACYAPEDVRNDEERQEKFLEGLNDELSYPLMTGDYSDFQKLVDKAIRQEDKYNRMEQKKRRMAQFKTQQGNNQRPRLTLGPQSMPHGGSSSVVRPQRQFFNNNAGNNIRNQAPRPVAVPTQQQPAKREQGSKPVVCFNCGDPGHYADKCPKPRRVKVVPAQSNSAVPASKARVNHVAAAEAQDAPDVILGTFLVNSVPTTVLFDSGVTHSFLSMSFAGNHGMEVEDLRRPLMVSTPSNQALSLQRSPSVRIEIKGVPFLANLILLESKDLDVILGMDWLARHKGVIDCANRKVTLTSNDGRVVTVHALSSESLRSRLNQITLEEIPIVQEYPDVFPDDLPGMPPKRDIEFRIDLVPGTTPIHKRPYRMAANELAEVKRQVDDLLQKGYIRPSSSPWGAPVIFVEKKDHTQRMCVDYRALNDVTIKNKYPLPRIDDLFDQLKGATVFSKIDLRSGYHQLRIKEEDIPKTAFTTRYGLFECTVMSFGLTNAPAFFMNLMNKVFMEYLDKFVVVFIDDILIYSRTKEEHEEHLRLALEKLREHQLYAKFSKCEFWLSEVKFLGHVISAGGVAVDPSNVESVTNWKQPKTVSEIRSFLGLAGYYRRFIENFSKIARPRTRLLQKDVKYKWSEECEQSFQELKNRLISAPILILPDPKKGFQVYCDASKLGLGCVLMQDGKVVAYASRQLRPHEKNYPTHDLELAAVVHALKIWRHYLFGTRTEVYTDHKSLKYIFTQPDLNMRQRRWLELIKEYDMGIHYHPGKANVVADALSRKGYCNATEGRQLPLELCKEFERLNLGIVSRGFVATLEAKPTLIDQVREAQINDPDIQEIKKNMRRGKAIGFLEDEHGTVWLGERICVPDNKDLKDAILKEAHDTLYSIHPGSTKMYQDLKERFWWASMKREIAEYVAVCDVCQRVKAEHQKPAGLLQPLKIPEWKWEEIGMDFITGLPRTSSGHDSIWVIVDRLTKVAHFIPVKTTYSGSRLAELYMARIVCLHGVPKKIVSDRGSQFTSNFWKKLQEEMGSKLNFSTAYHPQTDGQTERVNQILEDMLRACALDFGGSWDKNLPYAEFSYNNSYQASLQMAPYEALYGRKCRTPLLWDQTGERQVFGTDILREAKEKVKIIQERLRVAQSRHKSYADNRRRDLSFEEGDYVYLRVTPLRGVHRFHTKGKLAPRFVGPYKIVSRRGEVAYQLELPQSLAGVHNVFHVSQLKKCLRVPIEEANLEQIEVQEDLTYVEKPIRIMEIDERKTRNRVIRFCKVQWGNHSEEESTWEREDELKSAHPHLFASSSESRGRDSV

SEQ ID NO: 20098 - protein, 1406 aa, Oryza sativa
  Clone ID: TF_OSC401068j.C1.p1.fg
MNFRVDLGRDIEASDWLHAIEKKLDLLPCTDQEKVSFASHQLHGPASEWWDHFRLNRTTAEPITWLEFTAAFRKTHIPSGVVSLKKKEFRSLTQGSRSVTEYLHEFNRLARYAPEDVRNDEERQEKFLGGLNDELSYPLMVGDYPDFQKLVDKAIRQEDKYNRMEQKKRRIAQFKTQQGNNQKSRLTLGPQSMPQGGSSSVVRPQRQFFNNNAGNNIRNQAPRPVAAPAQQQPAKREQGSKPVVCFNCGDPGHYADKCPKPRRVKVVPAQSNSAVPASKARVNHVAAAEAQDAPDVILGTFLVNSVPATVLFDSGATHSFLSMSFAGNHGMEVEDLRRPLMVSTPSNQALSLQRSPSVRIEIQGVPFLANLILLESKDLDVILGMDWLARHKGVIDCANRKVTLNSYDGRVVTVHALSSESLRSRLNQITLEEIPIVREYPDVFPDDLPGMPPKRDIEFRIDLVPGTTPIHKRPYRMAANELAEVKRQVDDLLQKGYIRPSSSPWGAPVIFVEKKDHTQRMCVDYRALNDVTIKNKYPLPRIDDLFDQLKGATVFSKIDLRSGYHQLRIKEEDIPKTAFTTRYGLFECTVMSFGLTNAPAFFMNLMNKVFMEYLDKFVVVFIDDILIYSQTKEEHEEHLRLALEKLREHQLYAKFSKCEFWLSEVKFLGHVISAGGVAVDPSNVESVTNWKQPKTVSEIRSFLGLAGYYRRFIENFSKIAKPMTRLLQKDVKYKWSEECERSFQELKSRLISAPILILPDPKKGFQVYCDASKLGLGCVLMQDGKVVAYASRQLRPHEKNYPTHDIELAAVVHALKIWRHYLFGTRTEVYTDHKSLKYIFTQPDLNMRQRRWLELIKDYDMGIHYHPGKANVVADALSRKGYCNATEGRQLPLELCKEFERLNLGIVGRGFVAALEAKPTLIDQVREAQINDPDIQEIKKNMRRGKAIGFLEDEHGTVWLGERICVPDNKDLKDAILKEAHDTLYSIHPGSTKMYQDLKERFWWASMKREIAEYVAVCDVCQRVKAEHQKPAGLLQPLKIPEWKWEEIGMDFITGLPRTSSGHDSIWVIVDRLTKVAHFIPVKTTYSGSRLAELYMARIVCLHGVPKKIVSDRGSQFTSNFWEKLQEEMGSKLNFSTAYHPQTDGQTERVNQILEDMLRACALDFGGSWDKNLPYAEFSYNNSYQASLQMAPYEALYGRKCRTPLLWDQTGERQVFGTDILREAEEKVKIIQERLRVAQSRYKSYADNRRRDLSFEEGDYVYLRVTPLRGVHRFQTKGKLAPRFVGPYKIVSRRGEVAYQLELPQSLAGVHNVFHVSQLKKCLRVPTEEANIDQIEVQEDLTYVEKPIRILETNERRTRNRVIRFCKVQWSNHSEEESTWEREDELKSAHPLLFASSSESRGRDSV

SEQ ID NO: 20099 - protein, 1253 aa, Oryza sativa
  Clone ID: TF_OSC401143j.C1.p24.gm
MAATGNHRGTGALPPAGRADVAAFGRDEWPPRGARPSAAHALGVKAFFLSVGRVDAVASEDPLYVEVEADLRRILTDLVHPSVSHADRRSTVDPVHPSRAAAFLRSDVSWPGLGEAGRYTRRLPSAVPAWPPSGAPRGCRVGPGCQPPTPLGAADAWDPRRRPVRARVRPVHRGPWGCRVGPTPVDPANEGYTSCGPVVDMSWHRAGVLLLGAQSCLPVPEVPAVASCALASPSPPPLQPCSAAVPDVAVAREDRRRGRQVVAVLVRPFAVAGDRRSFVAVDNPKVSAVSSSSPSSFVVFPPPFWSPVCSPRRPLRAGALRLRPRAAVRRRACAARAVRSAEPPPLSVTSLPTSSGSSAVSRPEYLFGVEGFVQELRTMSFAIGFGTAPFYAQIPHDRHEEKCRVKVTLNSNSEEVPSVMFEAGGRNYVHACQEVARIAIGELRDSYSDQLADTEYRYHPRQPQGSDRGSYLETEGIENDATTRHLVEMLWAMDESRAETVLAAQDREDRNRGKICKLEDKVDRLEKELAALKGEAPPQKARIRLTARKRALFVPRYQLAPKVRVVEKEVAPSQADPPVIIISDEEEESKRNNSKIEWVATQDDEDEPNEPSIDLRCLEELDFPPVSLLVPCSCQMVNTRSNGNGPNNPNNNNNGENPTLAQVLAQQTQLMNMMMQQLQNQQNQGNNHAPPQNKLAEFLRVRPPVFSSTTNPVEAGDWLHAIEKKLDLLQCTDQEKVSFASHQLHGSAFEWWDHFRLNRTTAEPITWLEFTAAFRKTHIPSGVVSLKKKEFRSLTQGSRSVTEYLHEFNRLARYAPEDVRNDEEHQEKFLGGLNDELSYPLMVGDYPDFQKLVDKAIRQEDKYNCMEQRKRRIAHFKAQQGSNQKPRFTLGPQSMPQGGSSSVVRPQRQFFNNNAGNNIRNQAPRPVAAPTQQQPAKREQGSKPVVCFNCGDPGHYADKCPKPRRVKVVPAQSNSAVPASKARVNHVAAAEAQDAPDVILDDILIYSRTKEEHEEHLRLALEKLREHQLYAKFSKCEFWLSEVKFLGHVISAGGVAVDPRYYRRFIENFSKIAKPMTRLLQKDVKYKWSEESPCALASPSPPPLQPCSAAVPDVAVAREDRRRGRQVVAVLVRPFAVAGDRRSFVAVDNPKVSAVSSSSPSSFVVFPPPFWSPVCSPRRPLRAGALRLRPRAAVRRRACAARAVRSAEPPPLSVTSLPTSSGSSAVSRYLSADRFGAEMANLSANGLALSFGT

SEQ ID NO: 20100 - protein, 417 aa, Oryza sativa
  Clone ID: TF_OSC401143j.C1.p4.fg
MSWQRVGALLLGAQSRLPVPGVPAVGGIRSVLLSMARMGWKLCHVFRLYTVVMFNREKGKNVSRHASSNSSFQLHPPLASRELTRVHPWSIPSMLLGSQLPLVGSQDQNQYVFDRAFATQVNELPMPEEDVPFCQDCREQGHYALNCPWVYTKEAPSFGLAGQASLNQPPRTKSSLQPSVQSREPNEENPLNPGNCFPPSLSYHVGSRTKHAKGKKSKNQKRKAPMRTEEEVRKMTITSTEWPPAGITIPRRQRGNTFRGARQLTQHLLSHGGRVSDSEGSDQVSSDYEYESPRRLGEEEMELKACTRCGEIGHIASMCLTLCPHCEEDHPPGECPTRKVTCFLCEGTNHVPKDCQLSVLLTKTAEIQRTTLRLSHQLVSSNSNLDDIIHSTNAPPAAPDSAINHSNNTFSTNHSLH

SEQ ID NO: 20101 - protein, 1779 aa, Oryza sativa
  Clone ID: TF_OSC401275j.C1.p46.fg
MIDYDDEIAHQTVVEWAMLKRLDTNSSVATNDNDKDAHQHLHSRSTMKIPSFPESPFSQKKSLKSSKASKATPGLECYIPGLEIELCSRGGCSEWLGLYNRMPRYKPEYLFGVEGFVQELRTMSFVIGFGTAPFYAQIPHDRHEEKCRVKVTLNSNSEDIPSVMFEAGGRNYIHACQEVARIAIGELRDRYSDQLADTEYRYHPRQPQGSDRGSYLETEGIENDATTKHLVEMLWAMDESRAETVLAAQDREDRNRGKICKLEDKVDRLEKELAALKGEAPPQKARIRLTARKRALFVPRYQLAPKMVNTRSNGNGPNNPNNNNNGENPTLAQVLAQQTQLMNMMMQQFQNQQNQGNNHAPPQNKLAEFLRVRPPVFSSTTNPVEASDWLHAIEKKLDLLQCTDQDKVSFASHQLHGPASEWWDHFRLNRTTAEPITWLEFTAAFRKTHIPSGVVSLKKKEFRSLTQGSRSVTEYLHEFNRLARYAPEDVRNDEECQEKFLGGLNDELSYPLMVGDYPDFQKLVDKAIRQEDKYNRMEQKKRRIAQFKTQQGNNQKPRLTLGPQSVPQGGSSSVVRPQRQFFNNNAGNNIRNQAPRPVAVPAQQQPAKREQGNKPVVCFNCGDPGHYADKCPKPRRVKVVPAQNNSAVPASKARVNHVAAAEAQGAPDVILGTFLVNSVPATVLFDSGATHSFLSMSFAGNHGMEVEDLRRPLMVSTPSNQALSLQRSPSVRIEIQGVPFLANLILLKSKDLDVILGMDWLARHKGVIDCANRKVTLNSYDGRVVTVHALSSESLRSRLNQITLEEIPIVREYPDVFPDDLPGMPPKRDIEFRIDLVPGTTPIHKRPYRMAANELAEVKRQVDDLLQKGYIRPSSSPWGAPVIFVEKKDHTQRMCVDYRALNDVTIKNKYPLPRIDDLFDQLKGATVFSKIDLRSGYHQLRIKEEDIPKTAFTTRYGLFECTVMSFGLTNAPAFFMNLMNKVFMEYLDKFVVVFIDDILIYSRTKEEHEEHLRLALEKLREHQLYAKFSKCEFWLSEVKFLGHVISAGGVAVDPSNVESVTNWKQPKTVSEIRSFLGLAGYYRRFIENFSKIAKPMTRLLQKDVKYKWSEECEQSFQELKSRLISAPILILPDPKKGFQVYCDASKLGLGCVLMQDGKVVAYASRQLRPHEKNYPTHDIELAAVVHALKIWRHYLFGTRTEVYTDHKSLKYIFTQPDLNMRQRRWLELIKDYDMGIHYHPGKANVVVDALSRKGYCNATEGRQLPLELCKEFERLNLGIVGRGFVAALEAKPTLIDQVREAQINDPDIQEIKKNMRRGKAIGFLEDEQGTVWLGERICVPDNKDLKDAVLKEAHDTLYSIHPGSTKMYQDLKERFWWASMKREIAEYVAVCDVCQRVKAEHQKPAGLLQPLKIPEWKWEEIGMDFITGLPRTSSGHDSIWVIVDRLTKVAHFIPVKTTYSGSRLAELYMARIVCLHGVPKKIVSDRGSQFTSNFWKKLQEEMGSKLNFSTAYHPQTDGQTERVNQILEDMLRACALDFGGSWDKNLPYAEFSYNNSYQASLQMAPYEALYGRKCRTPLLWDQTGERQVFGTDILREAEEKVKVIQERLRVAQSRHKSYADNRRRDLSFEEGDYVYLRVTPLRGVHRFHTKGKLAPRFVGPYKIVSRRGEVAYQLELPQSLAGVHNVFHVSQLKKCLRVPTEEANIEQIEVQEDLTYVEKPIRILETNERRTRNRVIRFCKVQWSNHSEEESTWEREDELKSAHPHLFASSSESRGRDSV

SEQ ID NO: 20102 - protein, 1166 aa, Oryza sativa
  Clone ID: TF_OSC401329j.C1.p57.gm
MAAAHGEVPVEADPRALLFSPPPSPSPLVAGVVLAPCALASLSPPPLQPCAAVVPAVAVTREGRRRHRQVAAVLVRPFAAVGDRRSIVAVVKPKVAAASSSSPSPSVGRPPSPWSSVSSPCRPLPVGVLRLRPSAAVRRRVSAARAVFFAEPPPPSVTSSLASSSPSPMPCYKPEYLFGVEGFVQELRTMSFVIGFGTAPFYAQIRHDRHEEKCRVKVTMNSNSEDIPSAMFEAGGRNYIHACQEVARIAIGELRDSYSDQLADTEYRYHPRQPQGSDRGSYLETEGIENDATTRHLVEMLWAMDESRAETVLAAQDREDRNRGKICKLEDKVDRLEKELAALKGEAPPQKARIRLTARKRALFVPRYQLAPKIRVVEKEVAPANPPVIIISSDEEEEPKRNNSKFEWEKVSFASHQLHGPASEWWDHFRLNRTTAEPITWLEFTAAFRKTHIPSGVVSLKKKEFRSLTQGSRSVTEYLHEFNRLARYAPEDVRNDEERQEKFLGGLNDELSYPLMVGDYPDFQKLVDKAIRQEDKYNRMEQKKRRIAQFKTQQGNNQKPRLTLGPQSMPQGGSSSVVRPQRQFFNNNAGNNIRNQAPRPVAAPAQQQPAKREQGNKPVVCFNCGDPGHYADKCPKPRRVKVVPAQNNSAVPASKARVNHVATAEAQDAPDVILVREYPDVFPDDLPANELAEVKRQVDDLLQKGYIRPSSSPWGAPVIFVEKKDHTQRMCVDYRALNDVTIKNKYPLPRIDDLFDQLKGATVFSKIDLRSGYHQLRIKEEDIPKTAFTTRYGLFECTVMSFGLTNAPAFFMNLMNKVFMEYLDKFVVVFIDDILIYSRTKEEHEEHLRLALEKLREHQLYAKFSKCEFWLSEVKFLGHVISAGGVAVDPSNVESVTNWKQPKTVSEIRSFLGLAGYYRRFIENFSKIAKPMTRLLQKDVKYKWSEESLEAKPTLIDQVREAQINDPDIQEIKKNMRRGKAIGFLEDEHGTDPRALLFSPPPSPSLLVAGVVLAPCALASLSPPPLQPCAVAVTREGRRRHRQVAAVLVRPFAAVGDRRSIVAVVKPKVAAASSSSPSPSVGRPPSPWSSVSSPCRPLPVGVLRLRPSAAVRRRVSAARAVFFAEPPPPSVTSSLASSSPSPVSRRGLVRSRPSDLDRINLGRPFA

SEQ ID NO: 20103 - protein, 1480 aa, Oryza sativa
  Clone ID: TF_OSC401340j.C1.p13.fg
MPRYKPEYLFGVEGFVQELRTMSFAIGFGTAPFYAQIPHDRHEEKCGVKVTLNSNSEDIPSVMFEAGGRNYIHTCQEVARIAIGELRDRYSDQLADTEYRYHPRQPQGSDRGSYLKTEGIENDATTRHLVEMLWAMDESRVETVLAAQDREDRNRGKICKLEDKVDRLEKELAALKGEAPPQKARVRLTARKRALFVHRYQLAPKMVLTRSNGNGLNNNNNNNNNNGENPTLAQVLAQQAHLMNMMMQQLQNQQNQGNNHAPPQNKLAEFLRVRPPTFSSTTNPVEAGLLLNLSLGLTAAFRKTHIPSGVVSLKKKEFRSLTQGSRSVTEYLHEFNRLARYAPEDVRTDEERQEKFLEGLNDELSYPLMTGDYPDFQKLVDKAIRQEDKYNRMEQKKRRIAHFKTQQGNNQRPRLTLGPQSMPQGGSSSVVRPQRQFFNNNAGNNIRNQAPRPVAASTQQQPAKKEQGSNPVVCFNCGDPGHYADKCPKPRRVKVVPAQSNSTAPASKARVNHVAAAEAQDAPDVILGTFLVNLVPATVLFDSGATHSFLSMSFAGNHGMEVEDIRRPLLVSTPSNQALSLQRSPSVRIEIQGVPFLANLILLESKDLDVILGMDWLARYKDDLPGMPPKRDIEFRIDLVPGTTPIHKRPYRMAANELAEVKRQVDNLLQKGYIRPSSSPWGAPVIFVEKKDHTQRMCVDYRALNDVTIKNKYPLPRIDDLFDQLKGATVFSKIDLRSGYHQLRIKEEDIPKTAFTTRYGLFECTVMSFGLTNAPAFFMNLMNKVFMEYLDKFVVVFIDDILIYSRTREEHEEHLRLALEKLREHQLYAKFISEIRSFLGLAGYYRRFIENFSKIAKPMTRLLQKDVKYKWSEECEQSFQELKNRLISAPILILPDPKKGFQVYCDASKLGLGCVLMQDGKVVAYASHQLRPHEKNYPTHDLELAAVVHALKIWRHYLFGTRTELPLELCKEFERLNLGIVSRGFVAALEAKPTLIDQVREAQINDSDIQEIKKNMRRGKAIGFLEDEQGTVWLGERICVPDNKDLKDAILKEAHDTLYSIHPGSTKMYQDLKERFWWASMKREIAEYVAVCDVCQRVKAEHQKPAGLLQPLKIPEWKWEEIGMDFITGLPRMSSGHDSIWVIVDRLTKVAHFIPVKTTYSGSRLAELYMARIVCLHGVPKKIVSDRGSQFTSNFWKKLQEEMGSKLNFSTAYHPQADGQTERVNQILEDMLRACALDFGGSWDKNLPYAELSYNNSYQASLQMAPYEALYGRKCRTPLLWDQKGERQVFGTDILREAEEKVKIIQERLRVAQSRHKSYADNRRRDLSFEEGDYVYLRVTPLRGVHRVHTKGKLAPRFVGPYKIVSRRGEVAYQLELPQSLAGVHNVFHVSQLKKCLRVPTEEANLEQIEVQEDLTYVEKPIRILEIDERRTRNRVIRFCKVQWSNHSEEESTWEREDELKSAHPHLFASSSESRGRDSV

SEQ ID NO: 20104 - protein, 1779 aa, Oryza sativa
  unsure (1)..(1779): unsure at all Xaa locations
  Clone ID: TF_OSC401449j.C1.p1.np
AAAREDRRRHRQVAAVLVLAAVGTRRSFVAVDNPKVAAASFSSPSSSVIPSFPESPFSQKKSLKSSKASKATPGLEWYIPGLEIELCSRGGCSEWLGLYNRMPRYKPEYLFGVEGFVQELRTMSFVIGFGTAPFYAQIPHDRHEEKCRVKVTLNSNSEEVPSVMFEAGGRNYIHACQEVARIAIGELRDRYSDQLADTEYRYHPRQPQGSDRGSYLETEGIENDVTTKHLVEMLWAMDESRAETVLAAQDREDRNRGKICKLEDKVDRLEKELAALKGEAPPQKARIRLTARKRALFVPRYQLAPKMVNTRSNGNGPNNPNNNNNGENPTLAQVLAQQTQLINMMMQQFQNQQNQGNNHAPPQNKLAEFLRVRPPVFSSTTNPVEASDWLHAIEKKLDLLQCTDQEKVSFASHQLHGPASEWWDHFRLNRTTAEPITWLEFTAAFRKTHIPSGVVSLKKKEFRSLTQGSRSVTEYLHEFNRLARYAPEDVRNDEERQEKFLGGLNDELSYPLMVGDYPDFQKLVDKAIRQEDKYNRMEQKKRRIAQFKTQQGNNQKPRLTLGPQSMPQGGSSSVVRPQRQFFNNNAGNNIRNQAPRPVAAPAQQQPAKREQGNKPVVCFNCGDPGHYADKCPKPRRVKVVPAQNNSAVPASKARVNHVAAAEAQDAPDVILGTFLVNSVPATVLFDSGATHSFLSMSFAGNHGMEVEDLRRPLMVSTPSNQALSLQRSPSVRIEIQGVPFLANLILLESKDLDVILGMDWLARHKGVIDCANRKVTLNSYDGRVVTVHALSSESFRSRLNQITLEEIPIVREYPDVFPDDLPGMPPKRDIEFRIDLVPGTTPIHKRPYRMAANELAEVKRQVDDLLQKGYIRPSSSPWGAPVIFVEKKDHTQRMCVDYRALNDVTIKNKYPLPRIDDLFDQLKGATVFSKIDLRSGYHQLRIKEEDIPKTAFTTRYGLFECTVMSFGLTNAPAFFMNLMNKVFMEYLDKFVVVFIDDILIYSXTKEEHEEHLRLALEKLREHQLYAKFSKCEFWLSEVKFLGHVISAGGVAVDPSNVESVTNWKQPKTVSEIRSFLGLAGYYRRFIENFSKIAKPMTRLLQKDVKYKWSEECEQSFQELKSRLISAPILILPDPKKGFQVYCDASKLGLGCVLMQDGKVVAYASRQLRPHEKNYPTHDIELAAVVHALKIWRHYLFGTRTEVYTDHKSLKYIFTQPDLNMRQRRWLELIKDYDMGIHYHPGKANVVADALSRKGYCNATEGRQLPLELCKEFERLNLGIVGKGFVAALEAKPTLIDQVREAQINYPDIQEIKKNMRRGKAIGFLEDEHGTVWLGERICVPDNKDLKDAILKEAHDTLYSIHPGSTKMYQDLKERFWWASMKREIAEYVAVCDVCQRVKAEHQKPAGLLQPLKIPEWKWEEIGMDFITGLPRTSSGHDSIWVIVDRLTKVAHFIPVKTTYSGSRLAELYMARIVCLHGVPKKIVSDRGSQFTSNFWKKLQEEMGSKLNFSTAYHPQTDGQTERVNQILEDMLRACALDFGGSWDKNLPYAEFSYNNSYQASLQMAPYEALYGRKCRTPLLWDQTGERQVFGTDILREAEEKVKIIQERLRVAQSRHKSYADNRRRDLSFEEGDYVYLRVTPLRGVHRFHTKGKLAPRFVGPYKIVSRRGEVAYQLELPQSLAGVHNVFHVSQLKKCLRVPTEEANIEQIEVQEDLTYVEKPIRILETNERRTRNRVIRFCKVQWSNHSEEESTWEREDELKSAHPHLFASSSESRGRDSV

SEQ ID NO: 20105 - protein, 1578 aa, Oryza sativa
  Clone ID: TF_OSC401523j.C1.p2.fg
MMMDRGGVWMEGKRCRGRPCRCDAGGDGGGVADRCTARRDGRPNNSGEADGEVRGDVPAKPRAGRGGGRCGVAEGGDGDVGRRSGAATGAAGGDVDEEEGEAGAGDGVPAMFGRGGGDTGDEGGVVEPRKVVNTRSNGNGPNNPNNNNNEENPTLAQVLAQQTQLMNMMMQQLQNQQNQGNNHAPPQNKLAEFLRVRPPIFSSTTNPVEAGDWLHAIEKKLDLLQCTDQEKVSFASHQLHGPAFEWWDHFRLNRTTTEPITWLEFTAAFRKTHIPSGVVSLKKKEFRSLTQGSRSVTEYLHEFNRLARYAPEDVRNDEERQEKFLEGLNDELSYPLMTGDYSDFQKLVDKAIRQEDKYNRMEQKKRRIAQLKTQQGNIQKPRLTLGPQSMPQGGSSSIVRPQRQFFNNNAGNNIRNQAPRPVAAPAQQQPVKREQGSKPVVCFNCGDPGHYADKCPKPRRVKVVPAQSNSAVPASKARVNHVAAAEAQDAPDVILGTFLVNSVPATVLFDSGATHSFLSMSFAGNHGMEVEDLRRPLMVSTPSNQALSLQRSPSVRIEIQGVPFRANLILLESKDLDVILGMDWLARYKGVIDCANRKVTLTSNDGRVVTVHALSSESLRSRLNQITLEEIPIVREYPDVFPDDLPGMPPKRDIEFRIDLVLGTTPIHKRPYRMAANELAEVKRQVDDLLQKGYIRPSSSLWGAPVIFVEKKDHTQRMCVDYRALNDVTIKNKYPLPRIDDLFDQLKGATVFSKIDLRSGYHQLRIKEEDIPKTAFTTRYGLFECTVMSFGLTNAPVFFMNLMNKVFMEYLDKFVVVFIDDILIYSRTKEEHEEHFRLALEKLREHQLYAKFSKCEFWLSEVKFLGHVISAGGVAVDPSNVESVTNWKQPKTVSEIRSFLGLAGYYRRFIENFSKITKPMTRLLQKDVKYKWSEECEQSFQELKNRLISAPILILPDPKKGFQVYCDASKLGLGCVLMQDGKVVAYASRQLRPHEKNYPTHDLELAAVVHALKIWRHYLFGTRTEVYTDHKSLKYIFTQPDLNMRQRRWLELIKDYDMGIHYHPGKANVVADALSRKGYCNATEGRQLPLELCKEFERLNLGIVSRGFVAALEAKPTLIDQVRETQINDPDIQEIKKNMRRGKSIGFLEDEQGTVWLGERICFPDNKDLKNAILKEAHDTLYSIHPGSTKMYQDLKERFWWASMKREIAEYVAVCDICQRVKAEHQKPAGLLQPLKIPEWKWEEIGMDFITGLPRTSSGHDSIWVIVDRLTKVAHFIPVKTTYFGSRLAELYMARIVCLHGVPKKIVSDRGSQFTSNFWKKLQEEMGSKLNFSTAYHPQTDGQTERVNQILEDMLRACALDFGGSWDKNLPYAEFSYNNSYQASLQMAPYEALYGRKCRTPLLWDQTGERQVFGTDILREAEEKVKIIQERLRVAQSRHKSYADNRRRDLSFEEGDYVYLRVTPLRGVHRFHTKGKLAPRFVGPYKIVSRRGEVAYQLELPQSLAGVHNVFHVSQLKKCLRVPTEEANLEQIEVQEDLTYVEKPIRILEIDERRTRNRVIRFCKVQWSNHSEEESTWE

SEQ ID NO: 20106 - protein, 1330 aa, Oryza sativa
  Clone ID: TF_OSC401566j.C1.p14.fg
MVRCGGLCYARGIVTAPFRAPGLEWYIPGLEIELCSRDGCSEWLGLYNRMPRYKPEYLFGVEGFVQELRTMSFAIGFGTAPFYAQIPHDRHEEKCRVKVTLNSNSEDIPSVMFEAGGRNYIHACQEVARIAIGELRDRYSDQLADTEYRYHPRQPQGSDRGSYLETEGIENDATTRHLVEMLWAMDETRAETVLAGQDREDRNRGKICKLEDKVDRLEKELAALKGEAPPQKARIHLTARKRALFVPRYQLAPKVRVVEKEVTPAPADPPVVNNKLAEFLRVRPPIFSSTTNPVEAGDWLHAIEKKLDLLQCTDQEKVSFASHQLHGPASEWWDHFRLNRTTAEPITWLEFTAAFRKTHIPSGVVSLKKKEFRSLTQGSRSVTEYLHEFNRLARYAPEDVRTDEERQEKFLEGLNNELSYPLMTGDYPDFQKLVDKAIRQEDKYNRMEQKKRRIAQFKTQQGNNQRPRLTLGPQSMPQGGSSSVVRPQCQFLNNNAVNNIRNQAPRPVVASTQQQPAKREQGSKPVVCFNCGDPGHYADKCPKPRRVKVVPAQSNSTAPASKARVNHVAAAEAQDAPDVILGTFLVNLVPATVLFDSGATHSFLSMSFAGNHGMEVENFRRPMMVSTPSNQALYLQRSPSVRIEIQGIPFLANLILLESKDLDVILGMDWLARYKGVIDCANRKVTLTSDDGRVVTVHALSSESLRSRLNQITLEEIPIVREYPDVFPDDLPGMPPKRDIEFRIDLVPGTTPIHKRPYRMAANELAEVKRQVDDLLQRGYIRPSSSPWGAPVIFVEKKDHTQRMCVDYRALNDVTIKNKYPLPRIDDLFDQLKGATVFSKMDLRSGYHQLRIKEEDIPKTAFTTRYGLFECTVMSFGLTNAPAFFMNLMNKVLMEYLDKFVVVFIDDILIYSRTREEHEEHLRFALEKLREHQLYAKFSCVLMQDGKVVAYASRQLRPHEKNYPTHDLELATVVHALKIWRHYLFGTRTEVYTDHKSLKYIFTQPDLNMRQRRWLELIKDYDMGIHYHPGKANVVADALSRKGYCNATEGRQLPLELCKEFERLNLEIVSRAFVAALEAKPTLIDQVREAQINDPDIQEIKKNMRRGKAIGFLEDEQGTVWLGERICVPDNKDLKDAILKEAHDTLYSIHPGSTKMYQDLKERFWWASMKREIAEYVAVCDVCQRVKAEHQKPAGLLQPLKIPEWKWEEIGMDFITGLPRTSSGHDSIWVIVDRLTKVAHFIPVKTTYSGSRLAELYMARIVCLHGVPKKIVSDRGSQFTSNFWKKLQEEMGSKLNFSTAYHPQTDGQTERVNQILEDMLRACALDFGGS

SEQ ID NO: 20107 - protein, 751 aa, Oryza sativa
  Clone ID: TF_OSC401688j.C1.p7.gm
MVNTRSNGNGLNNLNNNNPNNNNGENPTLAQEKVSFASHQLHGPASEWWDHFRLNRTTAEPITWLEFTAAFRKTHIPSGVVSLKKKKFRSLTQGSRSVTEYLHEFNRLARYAPEDVRNDEERQEKFLGGLNDELSYPLMVGDYPDFQKLVDKAIRQEDKYNRMEQKKRRIAQFKTQQGNNQKPRLTLGPQPMPQGGSSSVVRPQRQFFNNNAGNNIRNQAPRPVAAPAQQQPAKREQGSKPVVCFNCGDPGHYADKCPKPRRVKVVPAQNNSAVPASKARVNHVAAAEAQDAPDVILVREYPDVFPEDLPERIHQTEFITMGSSGYYRRFIENFSKIAKPMTRLLQKDVKYKWSEESLEAKPTLIDQVREAQINDPDIQEIKKNMRRGKAIGFLEDEHGTVWLGERICVPDNKDLKDAILKEAHDTLYSIHPGSTKMYQDLKERFWWATVAVAREGRRRHRQVAAVLVRPFAAVGTRRSFVAVDNPKMPRYKPEYLFGVEGFVQELRTMSFVIGFGTALFYAQIRHDRHEEKCRVKVTLNSNSEEVPSVMFEAGGRNYIHACQEVARIAIGELRDRYSDRLADTEYRYHPRQPQGSDRGSYLETEGIENDATTRHLVEMLWAMDESRAETVLAAQDREDRNRGKICKLEDKVDRLEKELAALKGEAPPQKARIRLTARKRALFVPRYQLAPKIRVVEKEVAPANPPVIIISSDEEEEPKRNNSKFEWVAIKDEEDEPNEPSIDLLCSEELE

SEQ ID NO: 20108 - protein, 994 aa, Oryza sativa
  Clone ID: TF_OSC401832j.C1.p3.gm
MVNTRSNGNGPNLNNPNNNNNGENPTLAQVLAQQTQLMNMMMQQLQNQQNQGNNHAPPQNKLAEFLRVRPPIFSSTTNPVEASDWLHALEKKLDLLQCTDQEKVSFASHQLHGPASEWWDHFRLNRTTAEPITWLEFTAAFRKTHIPSGVVSLKKKEFRSLTQGSRSVTEYLHEFNRLARYAPEDVRNDEERQEKFLEGLNDELSYPLMTGDYSDFQKLVDKAIRQEDKYNRMEQKKRRIAQFKIQQGNNQKPRLILGHQSMPHGGSSSVVRPQRQFFNNNAGNNNRNQAPRLIAASTQQQPAKREQGSKLVVCFNCGDPGHYADKCPKPRRVKVVPAQSNSTAPVSKARVNHVAAAEAQDALDVILDDLPANELAEVKRQVDDLLQKGYIRPSSSPWGAPVIFVEKKDHTQRMCVDYRALNDVTIKNKYPLPRIDDLFDQLKGATIFSKIDLRSGYHQLRIKEEDIPKTAFTTKYGLFECTVMSFGLTNAPAFFMNLMNKVFMEYLDKFVVVFIDDILIYSRTKEEHEEHLRLALEKLREHQLYAKFSKCEFWLFEVKFLGHVISAGGVAVDSSNVESVTNWKQPKTVSEIRSFLGLAGYYRRFIENFSKIAKPMTRLLQKDVKYKWSEEWRDIDQVREAQINDPDIQEIKKNMRRGKAIGFLEDEHGTPCAAVAPAVAVAREGRRRVRRRVAVLVLPFATAEDRRSVIAVVDPKSFAASSSSPSPSVDLPPSFWSPRRLETIPFFVADITVPAAGRHPARSGRGGTDLAVAAAATGATPLATGAGWREAPPPPSLRSLLATAQAAARWRRKKEREGVAGLVASGAVPGVGRRKSVTVDAVRSLQRWELHGCGSMEAVAMTTDPEAGPPFATPYGGSGWWRRANGVARRPVAGAGATREGGDNGQPKKENRWGPTAAGMEMMAGMEGGGEDGDSGPDPVAPESGRSGVRQARSGGGAAEFAGSWRWWWQRLDSGDNRWLANGSIGCRLLWQRR

SEQ ID NO: 20109 - protein, 1504 aa, Oryza sativa
  Clone ID: TF_OSC401836j.C1.p9.fg
MVVQNGWAYATGVYTHMPRYKPEYLFGVEGFVQELRTMSFVVGFGTAPFYAQIPHDRHEEKCRVKVTLNSNSEDIPSVMFEAGGRNYIHSCQEVARIAIGELRDRYSDQLADTEYRYHPRQPQGSDRGSYLETEGIENDATTTHLVEMLWAMDESRAETVLAAQDREDWNRGKICKLEDKVDRLEKELAALKGEAPPQKVRIRLTARKRALFVPRYQLAPKVRVVEKEVAPADPPVVNMVNTRSNGNGPNPNNPNNNNNGENPTLAQVLAQQTQLMHMMMQQLQNQQNQGNNHAPPQNKLAEFLRVRPPIFSSTTNPVEAADWLHAIEKKLDLLQCTDQEKVSFASHQLHGPASEWWDHFRLNRTTAEPITWLEFTAAFRKTHIPSGVVSLKKKEFRSLTQGSRTVTEYLHEFNRLARYAPENVRNDEERQEKFLEGLNDELSYPLMTGDYSDFQKLVDKAIRQEDKYNRMEQKKRQIAQFKTQQGNNQRPRLTLGPQSMPHGGSSSVVRPQRQFFNNNVGNNIRNQVPRPVAAPTQQQPAKREQGSKPVVCFNCGDPGHYADKCPKPRRVKVVPVQSNSTAPASEARVNHVAAAEAQDAPDVILGTFLVNSVPATVLFDSGATHSFLSMSFAGNHGMEVEDLRRPLMVSTPSNQALSLQRSPSVRIEIKGVPFLANLILLESKDLDVILGMDWLARHKGMIDCANRKVTLSSNDGRVVTVHALSSESLRSRLTQVTLEEIPIVREYPDVFPDDLPGMPPKRDIEFRIDLVPGTTPIHNRPYRMAANELAEVKRQVDDLLQKGYIRPSSSLWGAPVIFVEKKDHTQRMCVDYRALNDVTIKNKYPLPRIDDLFDQLKDKFVVVFIDDILIYSRTKEEHEEHLRLALEKLREHQLHAKFSKYEFWLSEVKFLGHKDVKYKWSVECEQSFQELKSRLISAPILILPDPKKGFQVYCDASKLGLGCVLMQDGKVVAYASRQLRLHEKNYPTHDLELAAVVHALKIWHHYLFGTRTEVYTDHKSLKYIFTQPDLNMRQRRWLELIKDFDMGIHYHPGKANVVADALSRKSYCNATEGRQLPLELCKEFERLNLGIVRRGFVAALEAKSTLIDQVREAQINDPDIQEIKKNMRRGKAIGFLEDEQGTVWLGERICVPDNKDLKDAILKEAHDTLYSIHPGSTKMYQDRKERFWWASMKREIAEYVALCDVCQRVKAEHQKPAGLLQPLKIPEWKWEEIGMDFITGLPRTSSGHDSIWVIVDRLTKVAHFIPVKTTYSGSRLAELYMARIVCLHGVPKKIVSDRGSQFTSNFWKKLQEEMGSKLNFSTAYHPQTDGQTERVNQILEDMLRACALDFGGSWDKNLPYAEFSYNNSYQASLQMAPYEALYGRKCRTPLLWDQTGERQVFGTDILREAEEKVKIIQERLRVAQSRHKSYADNHRRDLSCILREIMCIFVSRLFEEFIVFTPKENWHRVLWDLIRLSVEEEKLLISWSYLNLWQESIMCSMCRN

SEQ ID NO: 20110 - protein, 456 aa, Oryza sativa
  Clone ID: TF_OSC401920j.C1.p4.np
EGAAGERRKRAEEAKRAPFVPKHRRSPVSLRRPSCRAAEPPPPVVTSSLTSSSPSPVSRGSGNNNNEDNPTLAQVLAQQTQLMNMMIQQMQNQLNQGNNNAPPPQNKLANFLRVRPPTFSSTTNPVEAGDWLHTIEKKLDLLQCTDQEKVSFASHQLHGPASEWWDHFRLNRTTAEPITWLEFTAAFRKTHIPSGVVSLKRKEFRSLTQGSRSVTEYLHEFNRLARYAPEDVRTDEERQEKFLEGLNDELSYPLMTGDYHDFQKLVDKAIRQEDKYNRMEQKKRRIAQFKTQQGNNQKPRLTLGPQSMPQGGSSSVVRPQRQFFNNNAGNNIRNQAPRPVAASTQQQPAKREQGSKPVVCFNCGDPGHYADKCPKPRRVKVVPAQSNSTAPAPKARVNHVAAAEAQDAPDVILGTFLVNLVPATVLFDSGATHSFLSMSFAGNHGIEVEFMKFPLW

SEQ ID NO: 20111 - protein, 1012 aa, Oryza sativa
  Clone ID: TF_OSC401925j.C1.p12.gm
MDDRECGAHLSGPSPTSSRRQRIPQPPHRSLPHLLGHVAHPKVSFAVAVAVGLRRRLRAPLKGSPPCSAVAPAVAAAREDRRRHRQVAAVLVRPFAAVGTRRSFVAVDNPKRRRSPVSVRRPSRPLRRAAAAVGDVIAGVIKAVRRGSGDRPPFVVASHSFLAAVRRRPSVPAESSGSDRGSYLETEGIENDATTKHLVEMLWAMDESRAETVLAAQDREDRNRGKICKLEDKVDRLEKELAALKGEAPPQKARIRLTARKRALFVPRYQLAPKVRVVEKEVAPAQADPPVIIISSDEEEESKRNNSKIEWEKVSFASHQLHGPASEWWDHFRLNRTTAEPITWLEFTAAFRKTHIPSGVVSLKKKEFRSLSQGSRSVTEYLHEFNRLARYAPEDVRNDEERQEKFLGGLNDELSYPLMVGDYPDFQKLVDKAIRQEDKYNRMEQKKRRIAQFKTQQGNNQKPRLTLGPQPMPQGGSSSVVRPQRQFFNNNAGNNIRNQAPRPVAAPAQQQPAKREQGNKPVVCFNCGDPGHYADKCPKPRRVKVVPAQNNSAVPASKARVNHVAAAEAQDAPDVILVREYPDVFPDDLPANELAEVKRQVDDLLQKGYIRPSSSPWGAPVIFVEKKDHTQRMCVDYRALNDVTIKNKYPLPRIDDLFDQLKGATVFSKIDLRSGYHQLRIKEEDIPKTAFTTRYGLFECTVMSFGLTNAPTFFMNLMNKVFMEYLDKFVVVFIDDILIYSRTKEEHEEHLRLALEKLREHQLYAKFSKCEFWLSEVKFLGHVISAGGVAVDPSNVESVTNWKQPKTVSEIRSFLGLAGYYRRFIENFSKIAKPMTRLLQKDVKYKWSEESLEAKPTLIDQVREAQINDPDIQEIKKNMRRGKAIGFLEDEHGTPKVSFAVAVAVGLRRRLRAPLKGSPPCSAVAPAVAAAREDRRRHRQVAAVLVRPFAAVGTRRSFVAVDNPKRRRSPVSVRRPSRPLRRAAAAVGDVIAGVIKAVRQEEFYNEADGVED

SEQ ID NO: 20112 - protein, 1402 aa, Oryza sativa
  Clone ID: TF_OSC404471j.C1.p39.gm
MASKRILKELKDLQKDPPTSCSAGPAGEDMFHWQATIMGPPDSPYAGGVFLVNIHFPPDYPFKPPKVSFKTKVFHPNINSNGSICLDILKEQWSPALTISKVLLSICSLLTDPNPDDPLVPEIAHMYKTDRPKRERAAAARRRRRSKSSARRRRDPPGRLSAGCHAVVEGCLSVPPLDRPLPLRPASWPLVPPAKSPRDLPHRPGCPAGRRHCSTTPPAATAHDAEAGSERRRAGRLSAWPAVLRRQPPPLDPAIAAQRAHYRGPLPPPPSPFKRLPASPSPPSLQPCAAVAPAVAVAREDRRRGRQVAAVLVRLFAAVGDRRSFIAVDNPKVSAVSSSSPSSFVVPPPSLWSPMPRYKPEYLFGVEGFVQELRTMSFVIGFGNAPFYTQIPHYRHEEKCRVKVTLNSNSEEVPSVMFEAGGRNYIHACQEVARIAIGELRDRYSDQLADTEYRYHPRQPQGSDRGSYLETEGIENDATTRHLVEMLWAMDESRAETVLAAQDREDRNRGKICKLEDKVDRLEKELAALKGEAPPQKARVRLTARKRALFVPRYQLAPKVRVVEKEVAPTLADPPVIIISDDEEEGSKRTRSKIEWVATQDDEDEPNEPSIDLRCSEELDNGNGPNNPNNNNGENPTLAQVLAQQTQLMNMMMQQLQNQQNQGNNHVPPQNKLAEFLRVRPPVFSSTTNPVEAGDWLHAIEKKLDLLQCTDQEKVSFASHQLHGPASEWWDHFRLNRITAEPITWLEFAAAFRKTHIPSGVVSLKKKEFRSLTQGSRSVTEYLHEFNRLARYAPEDVRNDEERQEKFLEGLNDELSYPLMTGDYPDFQKLVDKAIRQEDKYNRMEQKKRRIAHFKAQQGSNQKPRLTLGPQPMPQGGSSSVVHPQRQFFNNNAGNNIRNQAPRPVAASTQQQPAKREQGSKLVVCFNCGDPGHYADKCPKPRRVKVVPAQNNSTVPASKARVNHVAAAEAQDAPDVILVREYPDVFPDDLPERIHQTKFVTMGSSSYFCGKERPYPENLKGATVFSKIDLRSGYHQLRIKEEDISKTAFTTRALAPCALASPSPPSLQPCAAVAPAVAVAREDRRRGRQVAAVLVRLFAAVGDRRSFVAVDNPKVSAVSFSSPSSFVVPPPSLWSPMPRYKPEYLFGVEGFVQELRTMSFVIGFGNAPFYTQIPHYRHEEKCRVKVTLNSNSEEVPSVMFEAGGRNYIHACQEVARIAIGELRDRYSDQLADTEYRYHPRQPQGSDRGSYLETEGIENDATTRHLVEMLWAMDESRAETVLAAQDREDRNRGKICKLEDKVDRLEKELAALKGEAPPQKARVRLTARKRALFVPRYQLAPKVRVVEKEVAPTLADPPVIIISDDEEEGSKRTRSKIEWVATQDDEDEPNEPSIDLRCSEELE

SEQ ID NO: 20113 - protein, 835 aa, Oryza sativa
  Clone ID: TF_OSC405035j.C1.p5.gm
MGESGLKQEMVNAASPTTMQTQAAPCAAAVPDVAVAREDRRRGRQVVAVLVRLFVAAEDRRSTVAAVNPKSAAASSSSPSPSVPLPPSLWSPMPRYKPEYLFGVEGFVQELRTMSFVIGFGTAPFYAQIPHDRHEEKCRVKVTLNSNSEDIPSVMFEAGGRNYIHACQEVARIAIGELRDRYSDQLADTEYRYHPRQPQGSDRGSYLETEGIENDATTRHLVEMLWAMDETRAETVLAAQDHEDRNRGKICKLEDKVDRLEKELAALKGEAPPQKARVRLTARKRVLFVPRYQLAPKVRVVEKEVAPTLADPPVIIISDDEEEESKRNHSKIEWVATQDDEDEPNEPSIDLRCSEGLDTTNPVEAGDWLHAIEKKLDLLQCTDQEKVSFASHQLHGTASEWWDHFRLNRTTVEPITWLEFTAAFRKTHIPSGVVSLKKREFRSLTQGSRSVTEYLHEFNRLARYAPEDVRNDEERQEKFLEGLNDELSYPLMTGDYPDFQKLVDKAIRQEDKYNRMEQKKRRIAQFKAQQGNSQKPRLTLEPQSMPQGGSSSVVRPQRQFFNNNAGNNIRNQAPRPVVAPTQQQPAKREQGSKPVVCFNCGDPGHYADKCPKPRRVKVVPAQSNFTAPAPKARVNHVAAAEAQDAPDVILVKFLGHVISAGGVAVDPSNVESVTNWKQPKTVSEIRSFLGLAGYYRRFIENFSKIAKPMTRLLQKDVKYKWSEEYVAVAREDRRRGRQVVAVLVRLFVAAEDRRSTVAAVNPKSAAASSSSPSPSVPLPPSLWSPMVGALCQSLAWSLTNANDVDALYEPFSLKEDCFVLSILHGNHQFREVETC

SEQ ID NO: 20114 - protein, 563 aa, Oryza sativa
  Clone ID: TF_OSC406028j.C1.p24.gm
MVNTRSNGNGPNNNNNNNNGENPTLAQVLAQQTQLMNMMMQQLQNQQNQGNNHAPPQNKLAEFRRVRPPIFSSTTNPVEAGDWLHAIEKKLDLLQCTDQEKVSFASHQLHGTASEWWDHFRLNRTTVEPITWLEFTAAFRKTHIPSGVVSLKKREFRSLTQGSRSVTEYLHEFNRLARYAPEDVRNDEERQEKFLEGLNDELSYPLMTGDYPDFQKLVDKAIRQEDKYNRMEQKKRRIAQFKAQQGNSQKPRLTLEPQSMPQGGSSSVVRPQRQFFNNNAGNNIRNQAPRPVVAPTQQQPAKREQGSKPVVCFNCGDPGHYADKCPKPRRVKVVPAQSNFTAPAPKARVNHVAAAEAQDAPDVILVREYPDVFPDDLPVKFLGHVISAGGVAVDPSNVESVTNWKQPKTVSEIRSFLGLAGYYRRFIENFSKIAKPMTRLLQKDVKYKWSEEYVAVAREDRRRGRQVVAVLVRLFVAAEDRRSTVAAVNPKSAAASSSSPSPSVPLPPSLWSPMVGALCQSLAWSLTNANDVDALYEPFSLKEDCFVLSILHGNHQFREVETC

SEQ ID NO: 20115 - protein, 1334 aa, Oryza sativa
  Clone ID: TF_OSC409249j.C1.p3.gm
VPHGLLYPPPPSPSPLVVGIALASCALALPPPPPLQPCAAVVPAVAVAREGHRRDRQVVTVVVRPFAAAEDRRSVIAVVDPKSFAVSSSSPSPSVDLPSPFWSPVSSPCRPLCLGAFRLCPRAAVRRRACAARAVRPAEPPPPSVTSPLTSSKPSAMPRYKPEYLFGVEGFVQELRTMSFVIGFGTAPFYAQIRHDRHEERCRVKVTLNSNSEDIPSVMFEAGGRNYIHACQEVARIAIGELRDRYSDQLADTEYRYHPRQPQGSDRSSYLETEGIENDVTTRHLVEMLWAMDESRAETVLAAQDREDWNRGKICKLEDKVDRLEKELAALKGEAPPQKARIRLTARKRALFVPRYQLAPKVRVVEKEVAPADPPVVNVSDDEEEPKHTHSKIEWVATQDDEEEPNEPSIDLRCSEELDNGNGPNNPNNNNGENPTLAQVLAQQTQLMHMMMQQLQNQQNQGNNHATPQNKLAEFLRVRPPVFSSTTNPVETGDWLHAIEKKLDLLQCTDQEKVSFASHQLHGPASEWWDHFRLNRTTAEPITWLEFTTAFRKTHIPSGVVSLKKKEFRSLTQGSRSVTEYLHEFNRLARYAPEDVHNDEERQEKFLEGLNDELSYPLMTGDYSDFQKLVDKAIHQEDKYNRMEQKKRRIAQFKTQQGNNQKPRLTLGPQSMPPGGSSSVVRPQRQFFNNNAGNNIRNQVPRPVVAPTQQQPAKREQGSKPVVCFNCGDPGHYADKCPKPRRVKVVPAQSNSTAPVSKARVNHVAAAEAQDAPDVILVREYSDVFPDDLPANELAEVKRQVDDLLQKGYIRPSSSPWGAPVIFVEKKDHTQRMCVDYRALNDVTIKNKYPLPRIDDLFDQLKGATVFSKIDLRSGYHQLRIKEEDIPKTAFTTRYGLFECTVMSFGLTNAPAFYMNLMNKVFMEYLDKFVVVFIDDILIYSRTKEEHEEHLRLALEKLREHQLYAKFSKCEFWLSEVKFLGHVISAGGVAVDPSNVESVTNWKQPKTVSEIRSFLGLAGYYRRFIENFSKIAKPMTRLLQKDVKYKWSEESVAVAREGHRRDRQVVAVLVRPFAAAEDRRSVIAVVDPKSFAVSSSSPSPSVDLPSPFWSPVSSPCRPLCLGAFHLCPRAAVRRRACAARAVRPAEPPLPSVTSPLTSSRPSARGSLRGTRLRSGGDKPTGVAGESMPCYKGVIMIQEGALQWIVLYKGYCHNSFPRYRGGIEAHGDMIHGNAELADDALERALDAVIGFSSSFRPNRTTPSRTLAPPGSPRRPLQDTPRKPIQWRSDLGDRHRVLQLHSIASIIDSILSADVIPGVVPCRHGASPSLWLCRHP

SEQ ID NO: 20116 - protein, 918 aa, Oryza sativa
  Clone ID: TF_OSC410860j.C1.p1.gm
MPRYKPEYLFGVEGFVQELRTMSFVIGFGTAPFYAQIPHDRHEEKCRVKVTLNSNSEEVPSVMFEAGGRNYIHACQEVARIAIGELRDRYSDQLADTEYRYHPRQPQGSDRGSYLETEGIENDVTTKHLVEMLWAMDESRAETVLAAQDREDRNRGKICKLEDKVDRLEKELAALKGEAPPQKARIRLTARKRALFVPRYQLAPKVRVVEKEVAPAQADPPVIIISSDEEEESKRNHSKIEWVATQDDEDEPSIDLRCLEELDTTNPVEASDWLHAIEKKLDLLQCTDQEKVSFASHQLHGPASEWWDHFRLNRTTAEPITWLEFTAAFRKTHIPSGVVSLKKKEFRSLSQGSRSVTEYLHEFNRLARYAPEDVRNDEERQEKFLGGLNDELSYPLMVGDYPDFQKLVDKAIRQEDKYNRMEQKKRRIAQFKTQQGNNQKPRLTLGPQSMPQGGSSSVVRPQRQFFNNNAGNNIRNQAPRPVAAPAQQQPAKREQGNKPVVCFNCGDPGHYADKCPKPRRVKVVPAQNNSAVPASKARVNHVAAAEAQDAPDVILVREYPDVFPDDLPANELAEVKRQVDDLLQKGYIRPSSSPWGAPVIFVEKKDHTQRMCVDYRALNDVTIKNKYPLPRIDDLFDQLKGATVFSKIDLRSGYHQLRIKEEDIPKTAFTTRYGLFECTVMSFGLTNAPAFFMNLMNKVFMEYLDKFVVVFIDDILIYSRTKEEHEEHLRLALEKLREHQLYAKFSKCEFWLSEVKFLGHVISAGGVAVDPSNVESVTNWKQPKTVSEIRSFLGLAGYYRRFIENFSKIAKPMTRLLQKDVKYKWSEESLEAKPTLIDQVREAQINDPDIQEIKKNMRRGKAIGFLEDEQGTPCSAVAPAVAAAREDRRRHRQVAAVLVRPFAAVGTRRSFVAVDNPK

SEQ ID NO: 20117 - protein, 1550 aa, Oryza sativa
  Clone ID: TF_OSC412750j.C1.p1.fg
PGLEWYIPGLEIELCSRDGCSDWLGLYNRMPRYKPEYLFGVEGFVQELRTMSFAIGFGTAPFYAQIPHDHHEKKCRVKVTLNSNSEDIPSVMFEAGGRNCIHACQEAARIAIGELRDRYSDQLADTEYRYHPRQPQGSDRGSYLETEGIENDATTRHLVEMLWAMDESRAETVLAAQDREDRNRGKICKLEDKVDRLEKELAILKGEAPPQKARIRLTARKRALFVPRYQLAPKVRVVEKEVAPALADPPVIIISDDEEEESKHNHSKIEWVATQDDEDEPNEPSIDLRCSEELDGITTNPVEAGDWLHAIEKKLDLLQCTDQEKVSFASHQLHGPASEWWDHFRLNRTTAEPITWLEFTAAFRKTHIPSGVVSLKKKEFRSLTQGSRSVTEYLHEFNRLARYAPEDVRNDEERQEKFLEGLNDELSYPLMTGDYHDFQKLVDKAIRQEDKYNRMEQKKRRIAQFKTQQGNNQKSRLTLGPQSMPQGGSSSVVRPQRQFFNNNAGNNIRNQAPRPVTAPTQQQPAKREQGSKPVVCFNCGDPGHYADKCPKPRRMKVVPAQNNSTVPASKARVNHVAAAEAQDAPDVILDDLPGMPPKRDIEFRIDWVPGTTPIHKRPYRMAANELAEVKRQVDDLLQKGYIRPSSSPWGAPVIFVEKKDHTQRMCVDYRALNDVTIKNKYPLPRIDDLFDQLKGATVFSKIDLRSGYHQLRIKEEDIPKTAFTTRYGLFECTVMSFGLTNAPTFFMNLMNKVFMEYLDKFVVVFIDDILIYSRTREEHEEHLRLALEKLREHQLYTKFSKCEFWLSEVKFLGHVISAGGVAVDPSNVESVTNWKQPKTVSEIHSFLGLAGYYRRFIENFSKIAKPMTRLLQKDVKYKWSEECEQSFQELKNRLISAPILILPDPKKGFQVYCDASKLGLGCVLMQDGKVVAYASRQLRPHEKNYPTHDLELAAVVHALKIWRHYLFGTRTEVYTDHKSLKYIFTQPDLNMRQRRWSELIKDYDMGIHYHPGKANVVADALSRKGYCNATEGRQLPLELCKEFERLNLGIVSRGFVAALEAKPTLIDQVREAQINDPDIQEIKKNMRRGKAIGFLEDEHGTVWLGERICVPDNKDLKDAILKEAHDTLYSIHPGSTKMYQDLKERFWWASMKREIAEYVAVCDICQRVKAEHQKPAGLLQPLKIPEWKWEEIGMDFITGLPRTSSGHDSIWVIVDRLTKVAHFIPVKTTYSGSRLAELYMARIVCLHGVPKKIVSDRGSQFTSNFWKKLQEEMGSKLNFSTAYHPQTDGQTERVNQILEDMLRACALDFGGSWDKNLPYAEFSYNNSYQASLQMAPYEALYGRKCRTPLLWDQTGERQVFGTDILREAEEKVKIIQERLRVAQSRHKSYADNRRRDLSFEEGDYAYLRVTPLRGVHRFHTKGKLAPRFVGPYKIVSRRGEVAYQLELPQSLAGVHNVFHVSQLKKCLRVPTEEANLEQIEVQEDLTYVEKPIRILEIDERRTRNRVIRFCKVQWSNHSEEESTWEREDELKSAHPYLFASSSESRGRDSV

SEQ ID NO: 20118 - protein, 3395 aa, Oryza sativa
  Clone ID: TF_OSC412948j.C1.p13.fg
MVNTRSNGNGPNNPNNNNNGENPTLAQVLAQQTQLMNMMMQQFQNQQNQGNNHAPPQNKLAEFLRVRPPVFSSTTNPVEASDWLHAIEKKLDLLQCTDQEKVSFASHQLHGPASEWWDHFRLNRTTAEPITWLEFTAAFRKTHIPSGVVSLKKKEFRSLSQGSRSVTEYLHEFNRLARYAPEDVRNDEERQEKFLGGLNDELSYPLMVGDYPDFQKLVDKAIRQEDKYNRMEQKKRRIAQFKTQQGNNQKPRLTLGPQPMPQGGSSSVVRPQRQFFNNNAGNNIRNQAPRPVAAPAQQQPAKREQGNKPVVCFNCGDPGHYADKCPKPRRVKVVSAQSNSAVPASKARVNHVAAAEAQDAPDVILGTFLVNSVPATVLFDSGATHSFLSMSFAGNHGMEVEDLRRPLMVSTPSNQALSLQRSPSVRIEIQGVPFLANLILLESKDLDVILGMDWLARHKGVIDCANRKVTLNSYDGRVVTVHALSSESLRSRLNQITLEEIPIVREYPDVFPDDLPGMPPKRDIEFRIDLVPGTTPIHKRPYRMAANELAEVKRQVDDLLQKGYIRPSSSPWGAPVIFVEKKDHTQRMCVDYRALNDVTIKNKYPLPRIDDLFDQLKGATVFSKIDLRSGYHQLRIKEEDIPKTAFTTRYGLFECTVMSFGLTNAPAFFMNLMNKVFMEYLDKFVVVFIDDILIYSRTKEEHEELLRLALEKLREHQLFIENFSKIAKPMTRLLQKDVKYKWSEECEQSFQELKSRLISAPILILPDPKKGFQVYCDASKLGLGCVLMQDGKVVAYASRQLRPHEKNYPTHDIELAAVVHALKIWRHYLFGTHTEVYTDHKSLKYIFTQPDLNMRQRRWLELIKDYDMGIHYHPGKANVVADALSRKGHCNATEGRQLPLELCKEFERLNLGIVGRGFVAALEAKPTLIDQVREAQINDPDIQEIKKNMRRGKAIGFLEDEQGTVWLGERICVPDNKDLKDAILKEAHDTLYSIHPGSTKMYQDLKERFWWASMKREIAEYVAVCDVCQRVKAEHQKPAGLLQPLKIPEWKWEEIGMDFITGLPRTSSGHDSIWVIVDRLTKVAHFIPVKTTYSGSRLAELYMARIVCLHGVPKKIVSDRGSQFTSNFWKKLQEEMGSKLNFSTAYHPQTDGQTERVNQILEDMLRACALDFSGSWDKNLPYAEFSYNNSYQASLQMAPYEALYGRKCRTPLLWDQTGERQVFGTDILREAEEKVKIIQERLRVAQSRHKSYADNRRRDLSFEEGDYVYLRVTPFRGVHRFHTKEKLAPRFVGPYKIVSRRGEVAYQLELPQSLAGIHNVFHVSQLKKCLRVPTEEANIEQIEVQEDLTYVEKPIRILETTPGLEWYIPSLEIELCSRGGCSEWLGLYNRGSHTCKRLEFWIEIPGVTGKISLLDSVSDQSGENRISAPFGLPNAAESYFKTISIELASNHSGEIASSPTSPDQDDGAYPPILMKLPDDLAAVSITTASPSRRPRRKSASTPTSPSFREVGVILQPLGTVSTDQLDGYYSSPTVDSRPTDIVEYDEFSSRYNDPDLDDFDGSLDDNYTPLYFGVFMADNETEEQCQARETEARRETERRRLEEEHQAQEQERLRREQQERERTAKEAEDRRQRALEAGRRARDLIGQQDVEGTPVFRTPQQNAVAAITLLDTLLKENELNQSDHVVNILNQTKTMIAASVPVNSESVHTPTGSRVPHSRSHDYRHLSLSITGAGSNRRSRGHDERSVHSPPDHHRERRVERPRSPPRRRPVDLRDTIIQRRAARGHHHAPDRHDDDLDGVAAFTDDLRRVDWPAGFKPTGIEKYDGTTNPESWLTVYGLAIRAAGGDSKAMANYLPVALADSARSWLHGLPRGTIGSWAELRDHFIANFQGTFERPGTQYDLYNVIQKSGESLRDYIRRFSEQRNKISDITDDVIIAAFTKGIRHEELVGKFGRKPPKTVKLMFEKANEYAKAEDAVTASKQSGPSWKPNKGTPAKGGGGSNNHKDRKRKPEELVATATHSSRQRSRVNTFDKIMNSQCPHHPNSNHVAKDCFVYKQFAEQYTKTTRKNSDEEQSTSRKKDDGDTPAGFQDHRKELNHIFSGPLAYESKRKQKLTEREINAVQPDTPQYLRWSEIAIKFDRSDHPDRVVHPGRYPLVLDPVVRNVKLRRTLIDGGSALNILFAKTLDDMQIPRSELKPSNAPFHGVIPGLSATPLGQITLPVTFGTRENFRTENISFEVADFETTYHAILGRPALAKFMAVPHYTYMMTKMPGPRGVLSLRSDIKQAVTCDKESCDMAQTREMASAREDIRLAAATASEGEVPATKISKSGESEAKTKKIPLDPSDSTKTANNKDIFAWKPSDMPGIPREVIEHSLYVKEDAKPIKQRLRRFAQDRKDAIKEELTKLLAAGFIKEVLHPDWLANPVLVRKKTGQWRMCVDYTDLNKSCPKDPFGLPRIDQVVDSTAGCELLSFLDCYSGYHQIRLKESDCLKTSFITPFGAYCYVTMPFGLKNAGATYQRMIQRCFSTQIGRNVEAYVDDVVVKTKQKDDLISDLEETFASIRAFRMKLNPEKCTFGVLSGKLLGFMVSHRGIQANPEKITAILNMKPPSTQKDVQKLTGCMAALSRFVSRLGERGMPFFKLLKKTDDFQWGPDAQKAFEDFKKLLTEPPVLASPHPQEPLLLYIAAASQVVSTVLVVEREEEGHVQKVQRSIYFVSEVLADSKTRYPQVQKLLYGILITTRKLSHYFQSHSVTVVTSFPLGDILHNHEANGRIAKWALELMSLDISFKPRISIKSQALADFVAEWTECQEDTPAEKMEHWTMHFDGSKRLSGTGAGVVLISPTGERLSYVLWIHFSASHNVAEYEALLHGLRIAISLGIKRLIVRGDSQLVVNQVMKEWSCLDDNMMAYRQEVRKLEDKFDGLELSHVLRHNNEAADRLANFGSKREVAPSDVFVEHLYTPTVPHKDTTQIAGTHDVALVEADWREPLIRFLTSQELPQDKDEAERISRRSKLYVMHEAELYKKSPSGILQRCVSLEEGRQLLKDIHSGICGNHAAARTIVGKAYRQGFFWPTAVSDADKIVRTCEGCQFFARQIHLPAQELQTIPLSWPFAVWGLDMVGPFKKAVGGYTHLFVAIDKFSKWIEAKPVVTITADNARDFFINIVHRFGVPNRIITDNGRQFTGGVFKDFCEDFGIKICYASVAHPMSNGQVERANGMILQGIKARVFDRLKPYAGKWVKQLPSVLWSLRTTPSRATGQSPFFLVYGAEAMLPSEVEFESLRFRNFREERYEEDRVDDLHRLEEVREAALIQSARYLQGLRRYHNRNVRSRAFLVGDLVLRKIQTTRDRHKLSPLWEGPFIISEVTRPGSYRLKREDGTLVDNSWNIEHLRRFYA

SEQ ID NO: 20119 - protein, 1770 aa, Oryza sativa
  Clone ID: TF_OSC413683j.C1.p8.fg
MVRCGGLCYARGIVTAPFRAPGLEWYIPGLEIDLYSRMPHYKPEYLFGVEGFVQELRTMSFAIGFGTAPFYAQIPHDRHEEKCRVKVTLNSNSEDIPSVMFEAGGRNYIHACQEVARIAIGELRDRYSDQLADTEYRYHPRQPQGSDRGSYLETEGIENDATTRHLVEMLWAMDETRAETVLAAQDREDRNRGKICKLEDKVDRLEKELAALKGEAPPQKARVRLTARKRALFVPRYQLAPKVRVVEKEVTPALADPPVVNWWDVSACVCLLLSVRKLMVLTRSNGNGPNNNNNNNNNNNGENPTLAQVLAQQAQLMNMMMQQLQNQQNQGNNHAPPQNKLAEFLRVRPPIFSSTTNPVEAGDWLHAIEKKLDLLQCTDQEKVSFASHQLHGPASEWWDHFRLNRTTAEPITWLEFTAAFRKTHIPSGVVSLKKKEFRSLNQGSRSVTEYLHEFNRLARYALEDVRTDEERQERFLEGLNDELSYPLMTGDYPDFQKLVDKAIRQEDKYNRMEQKKRRIAQFKTQQGNNQRLRLTLGPQSMPQGGSSSVVRPQRQFFNNHAGNNIRNQAPRPVAASTQQQPAKREQGSKPVVCFNCGDPGHYADKCPKPRRVKIVPVQSNSTAPASKARVNRVAVAEAQGAPDVILGTFLVNLVPATVLFDSGATHSFLSMSFAGNHGMEVEDLRRPLMVSTPCNQALSLQRSPSVRIEIQGVPFLANLILLESKDLDVILGMDWLARYKGVIDCANRKVTLTSNEGQVVTVYALSSESLRSRLNQITLEEIPIVREYPDVFPDDLPGMPPKRGIEFRIDLVPGTTPIHKRPYRMAANELAEVKRQVDDLLQKGYIRPSSSPWGAPVIFVEKKDHTQRMCVDYRALNDVTIKNKYPLPRIDDLFDQLKGATVFSKIDLRSGYHQLRIKEEDIPKTAFTTRYGLFECTVMSFGLTNAPAFFMNLMNKVFMEYLDKFVVVFIDDILIYSRTKEEHEEHLRLALEKLREHQLYAKFSKCEFWLSEVKFLGHVISAGGVAVDPSNVESVTNWKQPKTVSEIRSFLGLAGYYRRFIENFSKIAKPMTRLLQKDVKYKWSEECEQSFQELKDRLISAPILILPDPKKGFQVYCDASKFGLGCVLMQDGKVVAYASRQLRPHEKNYPTHDLELDAVVHALKIWRHYLFGTRTEVYTDHKSLKYIFTQPDLNMRQRRWLELIKDYDMGIHYHPGKANVVADTLSRKGYCNATEGRQLPLELCKEFERLNLGIVSRGFVAALEAKPTLIDQVREAQINDPDIQEIKKNMRRGKAIGFLEDEQGTVWLGERICVPDNKDLKDAILKEAHDTLYSIHPGSTKMYQDLTEGFSWASMKREIAEYVAVCDVCQRVKAEHQKPAGLLQPLKIPEWKWEEIGMDFITGLPRTSSGHDSIWVIVDRLTKVAHFIPVKTTYSGSRLAELYMARIVCLHGVPKKIVSDRGSQFTSNFWKKLQEEMGSKLNFSTAYHPQTDGQTERVNQVLEDMLRACALDFGGSWDKNLPYAEFSYNNSYQASLQMAPYEALYGRKCRTPLLWDQTGERQVFGTDILREAEEKVKIIQERLRVAQSRHKSYADNRRRDLSFGKGDYVYLRVTPFRGVHRFHTKGKLAPRFVGPYKIVSRRGEVAYQLELPQSLAGVHNVFHVSQLKVFKAVAVARGGRHRGRQVVAVLVRPFVVAEDRRSTVAAVDPIFSAASTSSPSPSVDLPPPFWSPIPMFPESPFSQEKNLKSSKASKASHTDPKQPFEHVDPD

SEQ ID NO: 20120 - protein, 1008 aa, Oryza sativa
  Clone ID: TF_OSC414224j.C1.p3.gm
MPRYKPEYLFGVEGFVQELRTMSFVIGFGTAPFYAQIPHDRHEEKCRVKVTFNSNSEDIPSVMFEAGGRNYIHVCQEVARIAIGELRDRYSDQLADTEYRYHPRQPQGSDRGSYLETEGIENDATTKHLVEMLWAMDESRAETVLAAQDREDRNRGKICKLEDKVDRLEKELAALKGEAPPQKARIRLTARKRALFVPRYQLAPKVRVVEKEVAPAQADPPVIIISSDEEEESKRINSKIEWVATQDDKDKPSIDLRCLEELDTTNPVEASDWLHAIEKKLDLLQCTDQEKVSFASHQLHGPASEWWDHFRLNRTTAEPITWLEFTAAFRKTHIPSGVVSLKKKEFRSLTQGSRSVTEYLHEFNRLARYAPEDVRNDEERQEKFLGGLNDELSYPLMVGDYPDFQKLVDKAIRQEDKYNRMEQKKRRIAQFKTQQGNNQKPRLTLGPQPMPQGGSSSVVRPQCQFFNNNAGNNIRNQAPRPVAALAQQQPAKREQGSKPVVCFNCGDPGHYADKCPKPRRVKVVPAQNNSAVPASKARVNHVAAAEAQDAPDVILVREYPDVFPDDLPALEAKPTLIDQVREAQINDPDIQEIKKNMRRGKAIGFLEDEQGTVWLGERICVPDNKDLKDALLKEAHDTLYSIHPGSTKMYQDLKERFWWATVAVAREDHRRARQVVAVLVRPFAVAGDRRSFVAVDNPKVSAVSSSSSSSSVVFPPPFWSPVCSPRRPLRAGALRLRPGAAVRRQACAARAVRSAEPPPLSVTSPLTSSGSSAGIPAPTPPPYLAVVSRSSSSPPSPPPPPPPHLWGEQGQAMMERNKENAAKKKYHHYLGSGGYSVAMPKWEEMEASLLERGIEPATANWPERSKFWYYAQGGTLNPADGSLVFGDQIREAAHRLTDAMEASSQGTFRPDRERVELSLALQTPEHQGRTRGKGVIPWKIGFKEDIHTYRSRMRSKRDTLAKIADLEFRVSSYERIIQVEVARKVDERMAAHQSHDPQPTIPPAMVSP

SEQ ID NO: 20121 - protein, 1652 aa, Oryza sativa
  Clone ID: TF_OSC415905j.C1.p6.fg
MSFVISPTLLTIVNDAIFGNNLISSWFGMMPRYKPEYLFGVEGFVQELRTMSFAIGFGTAPFYAQIPHDRHEEKCRVKVTLNSNSEDIPSVMFEAGGRNYIHACQEVARIAIGELRDRYSDQLADTEYRYHPRQPQGSDRGSYLETEGIENDATTRHLVEMLWAMDESRAETVLAAQDREDRNRGKICKLEDKVDRLEKELATLKGEAPPQKARIRLTARKRALFVPRYQLAPKMVNTRSNGNGPNNPNNNNNGENPTLAQVLAQQTQLMNMMMQQLQNQQNQGNNHAPPQNKLAEFLRVRPPTFSSTTNPVEAGDWLHAIEKKLDLLQCTDQEKVSFASPQLHGPASEWWDHFRLNRTTAEPITWLEFTAAFRKTHIPSGVVSLKKKEFRSLTQGSRSVTEYLHEFNRLARYAPEDVRNDEERQEKFLEGLNDELSYPLMTGDYHDFQKLVDKAIRQEDKYNRMEQKKRRIAQFKTQQGNNQKPRLTLGPQSMPQGGSSSVVRPQRQFFNNNAGNNIRNQAPRPVAAPAQQQPAKREQGSKPVVCFNCGDPGHYADKCPKPRRVKVVPAQSNSTAPAPKARVNHVAAAEAQDAPDVILEDLRRPLMVSTPSNQALSLQRSPSVRIEIKGVPFLANLILLESKDLDVILGMDWLARHKGVIDCANRKVTLTRNDGRVVTVHALSSEFLRSRLNQIILEKIPIVREYPDVFPDDLPSMPPKRDIEFRIDLVPGTTPIHKRPYRMAANELAEVKRQVDNLLQKGYIRPSSSPWGAPVIFVEKKDHTQRMCVDYRALNDVTIKNKYPLPRIDDLFDQLKGATVFSKIDLRSGYHQLRIKEEDIPKTAFTTRYGLFECTVMSFGLTNAPAFFMNLMNKVFMEYLDKFVVVFIDDILIYSRTKEEHEEHLRLALEKLREHQLYAKFSKCEFWLSEVKFLGHVISAGGVAVDPSNVESVTNWKQPKTVSEIRSFLGLAGYYRRFIENFSKIAKPMTRLLQKDVKYKWSEECEQSFQELKNRLISAPILILPDPKKGFQVYCDASKLGLGCVLMQDGKVVAYASRQLRPHEKNYPTHDLELAAVVHALKIWRHYLFGTRTEVYTDHKSLKYIFTQPDLNMRQRRWLKLIKDYDMGIHYHPGKANVVADALSRKGYCNATEGRQLPLELCKEFERLNLGIVSRGFVAALEAKPTLIDQVREAQINDPDIQEIKKNMRRGKAIGFLEDEHGTVWLGERICVPDNKDLKDAILKEAHNTLYSIHPGSTKMYQDLKERFWWASMKREIAEYVAPLKIPEWKWEEIGMDFITGLPRTSSGHDSIWVIVDRLTKVAYFIPVKTTYSGSRLAELYMARIVCLHGVPKKIVSDRGSQFTSNFWKKLQEEMGSKLNFSTAYHPQTDGQTERVNQILEDMLRACALDFGGSWDKNLPYAEFSYNNSYQASLQMAPYEALYGRKCRTPLLWDQTGERQVFGTDILREAEEKVKVIQERLRVAQSRHKSYADNRRRDLSFEEGDYVYLRVTPLRGVRRFHTKGKLAPRFVGPYKIVSRRGEVAYQLELPQSLAGVHNVFHVSQLKKCLRVPTEEANLEQIEVQEDLTYVERPIRILEIDERRTRNRVIRFCKVQWSNHSEEESTWEREDELKSAHPHLFASSSESRGRDSV

SEQ ID NO: 20122 - protein, 1880 aa, Oryza sativa
  Clone ID: TF_OSC416072j.C1.p1.fg
MGSKLNFRTAYHPQTDGQTERVNQILEDMLRACALDFGGSWDKNLPYAEFSYNNSYQASLQMAPYEALYGRKCRTPLLWDQTGERQVFGMDILREAEEKVKIIQERLRVAQSRHKSYADNRRRDLSFEEGDYVYLRVTPLRGVHRFHTMGKLAPRFVGPYKIVSRRGEVAYQLELPQSLAGVHNVFHVSQLKKCLRVPTEEANIEQIEVQEDLTYIEKPIRILETTPGLEWYIPGLEIELCSRGGCSEWLGLYNRMPRYKPEYLFGVEGFVQELRTMSFVIGFGTAPFYAQIRHDHHEEKCRVKVTLNSNSEEVPSVMFEAGGRNYIHACQEVARIAIGELRDRYSDQLADTEYRYHPRQPQGSDRGSYLETEGIENDVTTKHLVEMLWAMDESRAETVLAAQDREDRNRGKICKLEYKVDRLEKELAALKGEAPPQKARIRLTARKRALFVPRYQLAPKMVNTRSNGNGPNNPNNNNNGENPTLAQVLAQQTQLMNMMMQQLQNQQNQGNNHAPPQNKLAEFLRVRPPVFSSTTNPVEASDWLHAIEKKLDLLQCTDQEKVSFASHQLHGPASEWWDHFRLNRTTAEPITWLEFTAAFRKTHIPSGVVSLKKKEFRSLSQGSRSVTEYLHEFNRLARYAPEDVRNDEERQEKFLGGLNDELSYPLMVGDYPDFQKLVDKAIRQEDKYNRMEQKKRRIAQFKTQQGNNQKPRLTLGPQPMPQGGSSSVVRPQRQFFNNNAGNNIRNQAPRLVAAPVQQQPAKREQGNKPVVCFNCGDPGHYADKCPKPRRVKVVPAQNNSAVPASKARVNHVAAAEAQDAPDVILGMFLVNSVPATVLFDSGATHSFLSMSFAGNHGMEVEDLRRPLMVSTPSNQALSLQRSPSVRIEIQGVPFLANLILLESKDLDVILGMDWLARHKGVIDCANRKVTLNSYDGRVVTVHALSSESLRSRLNQITLEEIPIVREYPDVFPDDLPGMPPKRDIEFRIDLVPGTTPIHKRPYRMAANELAEVKRQVDDLLQKGYIRPSSSPWGAPVIFVEKKDHTQRMCVDYRALNDVTIKNKYPLPRIDDLFDQLKGATVFSKIDLRPGYHQLRIKEEDIPKTAFTTRYGLFECTVMSFGLTNAPAFFMNLMNKVFMEYLDKFVVVFIDDILIYSRTKEEHEEHLRLALEKLREHQLYAKFSKCEFWLSEVKFLGHVISAGGVAVDPSNVESVTNWKQPKTVSEIRSFLGLAGYYRRFIENFSKIAKPMTRLLQKDVKYKWSEECERSFQELKSRLISAPILILPDPKKGFQVYCDASKLGLGCVLMQDGKVVAYASRQLRPHEKNYPTHDIELAAVVHALKIWRHYLFGTRTEVYTDHKSLKYIFTQPDLNMRQRRWLELIKDYDMGIHYHPGKANVVADALSRKGYCNATEGRQLPLELCKEFERLNLGIVDRGFVAALEAKPTLIDQVREAQINDPDIQEIKKNMKRGKAIGFLEDEHGTVWLGERICVPDNKDLKDAILKEAHDTLYSIHPGSTKMYQDLKERFWWASMKREIAEYVAVCDVCQRVKAEHQKPAGLLQPLKIPEWKWEEIGMDFITGLPRTSSGHDSIWVIVDRLTKVAHFIPVKTTYSGSRLAELYMARIVCLHGVPKKIVSDRGSQFTSNFWKKLQEEMGSKLNFRTAYHPQTDGQTERVNQILEDMLRACALDFGGSWDKNLPYAEFSYNNSYQASLQMAPYEALYGRKCRTPLLWDQTGERQVFGMDILREAEEKVKIIQERLRVAQSRHKSYADNRRRDLSFEEGDYVYLRVTPLRGVHRFHTMGKLAPRFVGPYKIVSRRGEFAYQLELPQSLAGVHNVFHVSQLKKCLRVPTEEANIEQIEVQEDLTYIEKPIRILET

SEQ ID NO: 20123 - protein, 1656 aa, Oryza sativa
  unsure (1)..(1656): unsure at all Xaa locations
  Clone ID: TF_OSC416688j.C1.p1.np
RKSAQNLSSLSSAQIPSFPESPFSQKKSLKSSKASKATPGLEWYIPGLEIELCSWDGCSEWLGLYNRMPRYKPEYLFGVEGFVQELRTMSFVIGFGTAPFYAQIPHDRHEEKCRVKVTLNSNSEDIPSVMFEAGGRNYIHACQEVARIAIGELRDRYSDQLADTEYRYHPRQPQGSDRGSYLETEGIENDATTKHLVELLWAMDESRAETVLAAQDREDRNRGKICKLEDKVDRLEKELAALKGEAPPQKARIRLTARKRALFVPRYQLAPKMVNTRSNGNGPNNPNNNNNGENPTLAQVLAQQTQLMNMMMQQFQNQQNQGNNHAPPQNNLAEFLRVRPPVFSSTTNPVEASDWLHAIEKKLDLLQCTDQEKVSFASHQLHGPASEWWDHFRLNRTTAEPVTWLEFTAAFRKTHIPSGVVSLKKKEFRSLTQGSRSVTEYLHEFNCLARYAPEDVRNDEERQEKFLGGLNDELSYPLMVGDYPDFQKLVDKAIRQEDKYNRMEQKKRRIAQFKTQQGNNQKPRLTLGPQPMPQGGSSSIVRPQRQFFNNNAGNNIRNQAPRPVAAPAQQQPAKREQGSKPVVCFNCGDPGHYADKCPKPRRVKVVPAQNNSAVPASKARVNHVAAAEAQDAPDVILGTFLVNSVPATVLFDSGATHSFLSMSFAGNHGMEVEDLRRPLMVSTPSNQALSLQRSPSVRIEIQGVPFLANLILLESKDLDVILGMDXLARHKGVIDCANKKVTLTSYDGRVVTVHALSSESLRSRLNQITLEEIPIVREYPDVFPDDLPGMPPKRDIEFRIDLVPGTTPIHKRPYRMAANELAEVKRQVDDLLQKGYIRPSSSPWGAPVIFVEKKDHTQRMCVDYRALNDVTIKNKYPLPRIDDLFDQLKGATVFSKIDLRSGYHQLRIKEEDIPKTAFTTRYGLFECTVMSFGLTNAPAFFMNLMNKVFMEYLDKFVVVFIDDILIYSRTKEEHEEHLRLALEKLREHQLYAKFSKCEFWLSEVKFLGHVISSGGVAVDPSNVESVTNWKQPKTVSEIRSFLGLAGYYRRFIENFSKIAKPMTRLLQKDVKYKWSEECERSFQELKSRLISAPILILPDPKKGFQVYCDASKLGLGCVLMQDGKVVAYASRQLRPHEKNYPTHDIELAAVVHALKIWRHYLFGTRTEVYTDHKSLKDIFTQPDLNMRQRRWLELIKDYDMRIHYHPGKANVVADALSRKGYCNATEGRQLPLELCKEFERLNLGIVSRGFVAALEAKPTLIDQVREAQINDPDIQEIKKNMRRGKAIGFLEDEQGTVWLGERICVPDNKDLKDAVLKEAHDTLYSIHPGSTKMYQDLKERFWWASMKREIAEYVAVCDVCQRVKAEHQKPVGLLQPLKIPEWKWEEIGMDFITGLPRTSSGHDSIWVIVDRLTKVAHFIPVKTTYSGSRLAELYMARIVCLHGVPKKIVSDRGSQFTSKFWKKLQEEMGSKLNFSTAYHPQTDGQTERVNQILEDMLRACALDFGGSWDKNLPYAEFSYNNSYQASLQMAPYEALYGRKCRTPLLWDQTGERQVFGTDILREAEEKVKIIQERLRVAQSRHKSYADNRRRDLSFEEGDYVYLRVTPLRGVHRFHTKGKLAPRFVGPYKIVSRRGEVAYQLELPQSLAGVHNVFHVS

SEQ ID NO: 20124 - protein, 1744 aa, Oryza sativa
  Clone ID: TF_OSC417326j.C1.p1.np
PPSLSSRPSPAIPSFPESPFLQKKSLKSSKASKATPGLEWYIPGLEIELCSRGGCSEWLGLYNRMPCYKPEYLFGVEGFVQELRTMSFVIGFGTAPFYAQIRHDRHEEKCRVKVTMNSNSEDIPSAMFEAGGRNYIHACQEVARIAIGELRDSYSDQLADTEYRYHPRQPQGSDRGSYLETEGIENDATTRHLVEMLWAMDESRAETVLAAQDREDRNRGKICKLEDKVDRLEKELAALKGEAPPQKARIRLTARKRALFVPRYQLAPKMVNTRSNGNGPNLNNPNNNNNGENPTLAQVLAQQTQLMHMMMQQFQNQQNQGNNHAPPQNKLAEFLRVRPPVFSSTTNPVEASDWLHAIEKKLDLLQCTDQEKVSFASHQLHGPASEWWDHFRLNRTTAEPITWLEFTAAFRKTHIPSGVVSLKKKEFRSLTQGSRSVTEYLHEFNRLARYAPEDVRNDEERQEKFLGGLNDELSYPLMVGDYPDFQKLVDKAIRQEDKYNRMEQKKRRIAQFKTQQGNNQKPRLTLGPQSMPQGGSSSVVRPQRQFFNNNAGNNIRNQAPRPVAAPAQQQPAKREQGNKPVVCFNCGDPGHYADKCPKPRRVKVVPAQNNSAVPASKARVNHVATAEAQDAPDVILGTFLVNSVPATVLFDSGATHSFLSMSFAGNHGMEVEDLRRPLMVSTPSNQALSLQRSPSVRIEIQGVPFLANLILLESKDLDVILGMDWLARHKGVIDCANRKVTLNSYDGRVVTVHALSSESLRSRLNQITLEKIPIVREYPDVFPDDLPGMPPKRDIEFRIDLVPGTTPIHKRPYRMAANELAEVKRQVDDLLQKGYIRPSSSPWGAPVIFVEKKDHTQRMCVDYRALNDVTIKNKYPLPRIDDLFDQLKGATVFSKIDLRSGYHQLRIKEEDIPKTAFTTRYGLFECTVMSFGLTNAPAFFMNLMNKVFMEYLDKFVVVFIDDILIYSRTKEEHEEHLRLALEKLREHQLYAKFSKCEFWLSEVKFLGHVISAGGVAVDPSNVESVTNWKQPKTVSEIRSFLGLAGYYRRFIENFSKIAKPMTRLLQKDVKYKWSEECEQSFQELKSRLISAPILILPDPKKGFQVYCDASKLGLGCVLMQDGKVVAYASRQLRPHEKNYPTHDIELAAVVHALKIWRHYLFGTRTEVYTDHKSLKYIFTQPDLNMRQRRWLELIKDYDMGIHYHPGKANVVADALSRKGYCNVTEGRQLPLELCKEFERLNLGIVGRGFVAALEAKPTLIDQVREAQINDPDIQEIKKNMRRGKAIGFLEDEHGTVWLGERICVPDNKDLKDAILKEAHDTLYSIHPGSTKMYQDLKERFWWASMKREIAEYVAVCDVCQRVKAEHQKPAGLLQPLKIPEWKWEEIGMDFITGLPRTSSGHDSIWVIVDRLTKVAHFIPVKTTYSGSRLAELYMARIVCLHGVPKKIVSDRGSQFTSNFWKKLQEEMGSKLNFSTAYHPQTDGQTERVNQILEDMLRACALDFGGSWDKNLPYAEFSYNNSYQASLQMAPYEALYGRKCRTPLLWDQTGERQVFGTDILREAEEKVKIIQERLRVAQSRHKSYADNRRRDLSFEEGDYVYLRVTPLRGVHRFHTKGKLAPRFVGPYKIVSRRGEVAYQLELPQSLAGVHNVFHVSQLKKCLRVPTEEANIEQIEVQEDLTYVEKPIRILETSERRTRNRVIRFCKVQWSNHSEEESTWEREDELKSAHPYLFVSSSESRGRDSV

SEQ ID NO: 20125 - protein, 1673 aa, Oryza sativa
  Clone ID: TF_OSC419125j.C1.p3.fg
MVWYTSDQSKTIRIAVPAVMGGSNNVFPPGLEWYIPGLEIELCSRDGCSEWLGLYNRMPRYKPEYLFGVEGFVQELRTMSFVIGFGTAPFYAQIPHDRHEEKCRVKVTLNSNSEEVPSVMFEAGGRNYIHACQEVARIAIGELRDRYSDQLADTEYRYHPRQPQGSDRGSYLETEGIENDATTRHLVEMLWAMDESRVETVLAAQDREDRNRGKICKLEDKVDRLEKELAALKGEAPPQKARIRLTARKRALFVPRYQLAPKGWDVSACVCLLLSVRKLFPPVSLLVPCPCQMVNTRSNGNGPNNNNNNNNGENPTLAQVLAQQTQLMNMMMQQLQNQQNQGNNHAPPQNKLAEFLRVRPPVFSSTTNHVEAGDWLHAIEKKLDLLQCTDQEKVSFASHQLHGPASEWWDHFRLNRITAEPITWLEFTAAFRKTHIPSGVVSLKKKEFRSLTQGSRSVTEYLHEFNRLARYAPEDVRNDEERQEKFLEGLNDELSYPLMTGEYSDFQKLVDKAIRQEDKYNRMEQKKRRIAHFKAQQGNNQKPRLTLGPQSMPHGGSSSVIRPQRQFFNNNAGNNIRNQVPRPVAAPTQQQPAKREQGSKPVVCFNCGDPGHYADKCPKPRRVKVVSTQSNSTVPASKARVNHVAAAEAQDAPDVILGTFPVNSVPATVLFDSGATHSFLSMSFAGNHGMEVEDLRRPLMVSTPSNQALSLQRSPSVRIEIKGVPFLANLILLESKDLDVILGMDWLARHKGVIDCANRKVTLTSNDGRVVTVHALSSESLRSRLNQITLEEIPIVREYPDVFPDDLPGMPPKRDIEFRIDLVPGTTPIHKRPYRMAANELAEVKRQVDDLLQKGYIRPSSSPWGAPVIFCGKERSYPEDLKSATVFSKIDLRSGYHQLRIKEEDIPKTAFTTRYGLFECTVMSFGLTNAPAFFMNLMNKVFMEYLDKFVVVFIDDILIYSRTKEEHEEHLRLALEKLREHQLYAKFSKCEFWLSEVKFLGHVISAGGVAVDPSNVESVTNWKQPKTVSEIHSFLGLAGYYRRFIENFSKIAKPMTRLLQKDVKYKWSEECEQSFQELKSRLISAPILILPDPKKGFQVYCDASKLGLGCVLMQDGKVVAYASRQLRPHEKNYPTHDLELAAVVHALKIWRHYLFGTRTEVYTDHKSLKYIFTQPDLNMRQRRWLELIKDYDMGIHYHPGKANVVADALSRKGYCNATEGQQLPLELFKEFERLNLGIVSRGFVAALEAKPTLIDQVREAQINDPDIQEIKKNMRRGKAIGFLEDEQGTRVKAEHQKPAGLLQPLKIPEWKWEEIGMDFITGLPRTSSGHDSIWVIVDRLTKVAHFIPVKTTYSGSRLAELYMARIVCLHGVPKKIVSDRGNQFTSNFWKKIQEEMGSKLNFSTAYHPQTDEQTERVNQILEDMLRACALDFGGSWDKNLPYAEFSYNNSYQASLQMAPYEALYDRKCRTPLLWDQMGERQVFGTDILREAEEKVKIIQERLRVAQSRHKSYADNRRRDLSFEEGDYVYLRVTPLRGVHRFHTKGKLAPRFVGPYKIVSRRGEVAYQLELPQSLAGVHNVFHVSQLKKCLRVPTEEANLEQIEVQEDLTYVEKPIRILEIDERRTRNRVIRFCKVQWSNHSEEESTWEREDELKSAHPHLFASSSESRGRDSV

SEQ ID NO: 20126 - protein, 1283 aa, Oryza sativa
  Clone ID: TF_OSC5437j.C1.p1.fg
PGLEWYIPGLEIELCSRDGCSERLGLCNRMPRYKPEYLFGVEGFVQELCTMSFAIGFGTAPFYAQIPHDRHEEKCRVKVTLNSNSDEIPSVMFEAGGRNYIHACQEVARIAIGELRDRYCDQLADTEYRYHPRQPQGSDRGSYLETEGIENDATTRHLVEMLWAMDETRAETVLAAQDREDRNRGKICKLEDKVDRLEKELAALKGEAPPQKARVRLTARKRALFVPRYQLAPKMVLTRSNGNGPNNNNNNNNNNGENPTLAQVLAQQTQLMNIMMQQLQNQQNQGNNHAPPQNKLAEFLRVRPPTFSSTTNPVEAGDWLHAIEKKLDLLQCTDQEKVSFASHQLHGPASEWWDHFRLNRTTTEPITWLEFTAAFRKTHIPSGVVSLKKKEFRSLTQGSRSVTEYLHEFNRLARYAPEDVRTDEERQEKFLEGLNDELSYPLMTGDYPDFQKLVDKAIRQEDKYNRMEQKKRQIAQFMAQQGNSQRPRLTLGPQSMPQGGSSSVVRPQRQFFNNNAGNNLRNQAPRPVAAPTQQQPAKREQGSKPVVCFNCGDPGHYADKCPKPRRVKVVPAQSNSTAPASKARVNHVAAAEAQDAPDVILGTFLVNLVPATVLFDSGATHSFLSMSFAGNHGMEVEDLRRPLMVSTPSNQALSLQRSPSVRIEIQGVPFLANLILLESKDLDVILGMDWLARYKGVIDCANRKVTLTSNDGRVVTVHALSSESLRSRLNQITLEEILVVREYPDVFPDDLRGMPPKRDIEFRIDLVPGTIPIHKRPYRMAANELAKVKRQVDERTTVAIGVIRGFVAALEAKLTLIDQVREAQINDPDILEIKKNMRRGKAIGFLEDEQGTVWLGERICVPDNKDLKDAILKEAHDTLYSIHPGSTKMYQDLKERFWWRVKEEHQKPAGLLQSLKIPEWKWEEIGMDFITGLPRTSSGHDSIWVIVDRLTNVAHFIPVKTTYSGSRLAELYMARIVCLHGVPKKIVSDRGSQFTSNFWKKLQEEMGSKLNFSTAYHPQTDGQTERVNQILEDMLRACTLDFGGSWDKNLPYAEFSYNNSYQASLQMAPYEALYIRKCRTPLLWDQTGERQVFGTDILREVEEKVKIIQERLRVAQSRHKSYADNRRRDLSFEEGDYVYLRVTPLRGVHRFHTKGKLAPRFVGPYKIVSRRGEVAYQLELPQSLAGVHNVFHVSQLKKCLRVPIEEANLEQIEVQEDLTYVERPIRILEIDERRTRNRVIRFCKVQWSNHSEEESTWEREDELKSAHPHLFASSSESRGRDSV

SEQ ID NO: 20127 - protein, 787 aa, Oryza sativa
  Clone ID: TF_OSC5659j.C1.p1.gm
MTSAVTSPPAAVARRLGLACSPANDGTAARTEGTNGRAAPPLQPPSSVAVATIGIARSSPSPSTASPPPKTAGAPPSPSTRRPPPLLPHGRRRPLLFRRGFGHRALAPSSLEPPSPPSLQPCAAAVPVIAVAREDHRRGRQVAAVLVRPFAVAEDRRSTVAVVKPKSSAVSTSSPSPSVGLPPLLWSSASMRVRAAEPPPPVVRQGEEKPGRTSSFVAGRRSSPLPVKPSRRRRSSRRRPSSFVVWLKGEYRWVRLVVLHVYMSSKFAADHPISGEVANPGRPLMIRAEQPSPPSPPLAATAISTTNPVEAGDWLHAIEKKLDLLQCTDQEKVSFASHQLHGPASEWWDHFRLNRTTAEPITWLEFTAAFRKTHIPSGVVSLKKKEFRSLTQGSRSVTEYLHEFNRLARYAPEDKLVDKAIRQEDKYNRIEQKKRRIAQFKTQQGNSQRPRLTLGPQSMPQGGSSSVVRPQRQFFNNNAGNNIRNQALRPVAASTQQQPAKREQGRKPVVCFNCGDPGHYADKCPKPRRVKVVPAQSNSTAPAPKARVNHVAAAEAQDAPDVILERIHQTEFISMGSSGYFCGKERPYPEDLKGATVFSKIDLRSGYHQLRIKEEDIPKTAFTTRYGLFECTVMSFGLTNAPAFFMNLMNKVFMEYLDKFVVVFIDDILMIGARIRDTDFLQGDDILWINFRGIYELYQLDALDVSIMSCWILMEIQRARRRRVFDTGFIDPRRVNVTMLDQYPQETEDNLVHLLKAQHYKTFILLPYNIEFHWVLLLFDLSACTVN

SEQ ID NO: 20128 - protein, 1730 aa, Oryza sativa
  unsure (1)..(1730): unsure at all Xaa locations
  Clone ID: TF_OSC5663j.C1.p2.np
MSFVISLTPLIIIKELCSRDGLCSRDGCSERLGLCNRMPRYKPEYLFGVEGFVQELCTMSFAIGFGTAPFYAQIPHDRHEEKCRVKVTLNSNSDEIPSVMFEAGGRNYIHACQEVARIAIGELRDRYCDQLADTEYRYHPRQPQGSDRGSYLETEGIENDATTRHLVEMLWAMDETRAETVLAAQDREDRNRGKICKLEDKVDRLEKELAALKGEAPPQKARVRLTARKRALFVPRYQLAPKFSPVSLLVPCPCQMVLTRSNGNGPNNNNNNNNNNGENPTLAQVLAQQTQLMNIMMQQLQNQQNQGNNHAPPQNKLAEFLRVRPPTFSSTTNPVEAGDWLHAIEKKLDLLQCTDQEKVSFASHQLHGPASEWWDHFRLNRTTTEPITWLEFTAAFRKTHIPSGVVSLKKKEFRSLTQGSRSVTEYLHEFNRLARYAPEDVRTDEERQEKFLEGLNDELSYPLMTGDYPDFQKLVDKAIRQEDKYNRMEQKKRQIAQFMAQQGNSQRPRLTLGPQSMPQGGSSSVVRPQRQFFNNNAGNNLRNQAPRPVAAPTQQQPAKREQGSKPVVCFNCGDPGHYADKCPKPRRVKVVPAQSNSTAPASKARVNHVAAAEAQDAPDVILGTFLVNLVPATVLFDSGATHSFLSMSFAGNHGMEVEDLRRPLMVSTPSNQALSLQRSPSVRIEIQGVPFLANLILLESKDLDVILGMDWLARYKGVIDCANRKVTLTSNDGRVVTVHALSSESLRSRLNQITLEEIPIVREYPDVFPDDLPGMPPKRDIEFRIDLVPGTTPIHKRPYRMATNEFAEVKRQVDDLLQKGYIRPSSSPWGAPVIFVEKKDHTQRMCVDYRALNDVTIKNKYPLPRIDDLFDQLKGATIFSKIDLRSGYHQLRIKEEDIPKTAFTTRYGLFECTVMSFGLTNAPTFFMNLMNKVFMEYLDKFVVVFIDDILIYSRTKEEHEEHLRLALEKLREHQLYAKFSKCEFWLSEVKFLGHVISAGGVAVDPSNVESVTNWKQPKTVSEIRSFLGLAGYYRRFIENFSKIAKPMTRLLQKDVKYKWSEECEQSFQELKDRLISAPILILPDPKKGFQVYCDASKLGLGCVLMQDGKVVAYASRQLRPHEENYPTHDLKLAAVVHALKIXRHYLFGTRTEVYTDHKSLKYIFTQPDLNMRQRRWLELIKDYDMGIHYHPGKANVVADALSRKGYCNATKGRQLPLELCKEFERFNLGIASRGFVAALEAKPILIDQVREAQINDPDILEIKKNMRRGKAIGFLRDEQGTVWLGEKICVPDNKDLKDAILKEAHDTLYSIHLGSTKMYQDLKERFWWASMKREIAEYVAVCDVCQRVKAEHQKPAGLLQPLKIPEWKWEEIGMDFITGLPRTSSGHDSIWVIVDRLTKVAHFIPVNTTYSGSRLAELYMARIVCLHGVPKKIVSDRGSQFTSNFWKKLQEEMGSKLNFSTAYHPQTDGQTERVNQILEDMLRACTLDFGGSWDKNLPYAEFSYNNSYQASLQMAPYEALYIRKCRTPLLWDQTGERQVFGTDILREVEEKVKIIQERLRVAQSRHKSYADNRRRDLSFEEGDYVYLRVTPLRGVHRFHTKGKLAPRFVGPYKIVSRRGEVAYQLELPQSLAGVHNVFHVSQLKKCLRVPIEEANLEQIEVQEDLTYVERPIRILEIDERRTRNPVIRFCKVQWSNHSEEESTWEREDELKSAHPHLFASSSESRGRDSV

SEQ ID NO: 20129 - protein, 729 aa, Oryza sativa
  unsure (1)..(729): unsure at all Xaa locations
  Clone ID: TF_OSC5862j.C1.p5.np
RRSSRRRPNGNGPNNNNNNNNGENPTLAQVLAQQTQLMNMMMQQLQNQQNQGNNYAPPQNKLAEFLRVRPPIFSSTTNPVEAGDWLHAIEKKLDLLQCTDQEKVSFASHQLHGPASEWWDHFRLNRTTAEPITWLEFTAAFRKTHIPSGVVSLKKKEFRSLTQGSRSVTEYLHEFNRLARYAPEDVRTDEERQEKFLAGLNDELSYPLMTGDYPDFXKLVDKAIRQEDKYNRIEQKKRRIAQFKTQQGNSQRPRLTLGPQSMPQGGSSSVVRPQRQFFNNNAGNNIRNQALRPVAASTQQQPAKREQGRKPVVCFNCGDPGHYADKCPKPRRVKVVPAQSNSTAPAPKARVNHVAAAEAQDAPDVILGTFLVNLVPATVLFDSGATHSFLSMSFAGNHGMEVEDLRRPLMVSTPSNQALSLQRSLSVRIEIQGVPFLANLILLESKDLDVILGMDWLARYKGVIDCANRKVTLTSNDGRVVTVHALSSESLRSRLNQITLEEIPIVREYPDVFPDDLPGMPPKRDIEFRIDLVPGTTPIHKRPYRMAANELAEVKRQVDDLLQKGYIRPSSSPWGAPVIFVEKKDHTQRMCVDYRALNDVTIKNKYPLPRIDDLFDQLKGATVFSKIDLRSGYHQLRIKEYGLFECTVMSFGLTNAPAFFMNLMLRIKEYGLFECTVMSFGLTNAPAFFMNLMNKVFMEYLDKFVVVFIDDILMIGASNEKKTRKIWLA

SEQ ID NO: 20130 - protein, 640 aa, Oryza sativa
  Clone ID: TF_OSC5862j.C1.p6.gm
RAAPPLQPPSSVAVATIGIARSSPSPSTASPPPKTAGAPPSPSTRRPPPLLPHGRRRPLLFRRGFGHRALAPSSLEPPSPPSLQPCAAAVPVIAVAREDHRRGRQVAAVLVRPFAVAEDRRSTVAVVKPKSSAVSTSSPSPSVGLPPLLWSSASMRVRAAEPPPPVVRQGEEKPGRTSSFVAGRRSSPLPVKPSRRRRSSRRRPSSFVVWLKGEYRWVRLVVLHVYMSSKFAADHPISGEIRFEWFKLLNFSKIKIYCRPGCSRAEQPSPPSPPLAATAISTTNPVEAGDWLHAIEKKLDLLQCTDQEKVSFASHQLHGPASEWWDHFRLNRTTAEPITWLEFTAAFRKTHIPSGVVSLKKKEFRSLTQGSRSVTEYLHEFNRLARYAPEDEDKYNRIEQKKRRIAQFKTQQGNSQRPRLTLGPQSMPQGGSSSVVRPQRQFFNNNAGNNIRNQALRPVAASTQQQPAKREQGRKPVVCFNCGDPGHYADKCPKPRRVKVVPAQSNSTAPAPKARVNHVAAAEAQDAPDVILGYHQLRIKEEDIPKTAFTTRYGLFECTVMSFGLTNAPAFFMNLMNKVFMEYLDKFVVVFIDDILMIGARIRDTDFLQGDDILWINFRGIYELYQLDALDVSIMSCWIL

SEQ ID NO: 20131 - protein, 1757 aa, Oryza sativa
  Clone ID: TF_OSC6233j.C1.p1.np
ACQSSSSSGRNPSFAPPSCRRRRFPNIPSFPESPFSQKKSLKSSKASKATPGLEWYIPGLEIELCSRDGCSEWLGLYNRMPRYKPEYLFGVEGFVQELRTMSFVIGFGTAPFYAQIPHDRHEEKCRVKVTLNSNSEEVPSVMFEAGGRNYIHACQEVARIAIGELRDRYSDQLADTEYRYHPRQPQGSDRGSYLETEGIENDVTTKHLVEMLWAMDESRAETVLAAQDREDRNRGKICKLEDKVDRLEKELAALKGEAPPQKAWIRLTARKRALFVPRYQLAPKMVNTRSNGNGPNNPNNNNNGENPTLAQVLAQQTQLMNMMMQQFQNQQNQGNNHAPPQNKLAEFLRVRPPVFSSTTNPVEASDWLHAIEKKLDLLQCTDQEKVSFASHQLHGPASEWWDHFRLNRTTDEPITWLEFTAAFRKTHIPSGVVSLKKKEFRSLTQGSRSVTEYLHEFNRLARYAPEDVRNDEERQEKFLGGLNDELSYPLMVGDYPDFQKLVDKAIRQEDKYNRMEQKKRRIAQFKTQQGNNQKPRLTLGPQPMSQGGSSSVVRPQRQFFNNNAGNNIRNQAPRPVAAPAQQQPAKREQGNKPVVCFNCGDPGHYADKCPKPRRVKVVPTQNNSAVPASKARVNHVAAAEAQDAPDVILGTFLVNSVPATVLFDSGATHSFLSMSFAGNHGMEVEDLRRPLMVSTPSNQALSLQRSPSVRIEIQGVPFLANLILLKSKDLDVILGMDWLARHKGVIDCANKKVTLNSYDGRVVTVHALSSESLRSRLNQITLEEIPIVREYPDVFPDDLPGMPPKRDIEFRIDLVPGTTPIHKRPYRMAANELAEVKRQVDDLLQKGYIRPSSSPWGAPVIFVEKKDHTQRMCVDYRALNDVTIKNKYPLPRIDDLFDQLKGATVFSKIDLRSGYHQLRIKEEDIPKTAFTTRYGLFECTVMSFGLTNAPAFFMNLMNKVFMEYLDKFVVVFIDDILIYSRTKEEHEEHLRLALEKLREHQLYAKFSKCEFWLSEVKFLGHVISAGGVAVDPSNVESVTNWKQPKTVSEIRSFLGLAGYYRRFIENFSKIAKPMTRLLQKDVKYKWSEECERSFQELKSRLISAPILILPDPKKGFQVYCDASKLGLGCVLMQDGKVVAYASRQLRPHEKNYPTHDIELAAVVHALKIWRHYLFGTRTEVYTDHKSLKYIFTQPDLNMRQRRWLELIKDYDMGIHYHPGKANVVADALSRKGYCNATEGRQLPLELCKEFERLNLGIVGRGFVATLKAKPTLIDQVREAQINDPDIQKIKKNMRRGKAIGFLDDEHGTVWLGERICVPDNKDLKDAILKEAHDTLYSIHPGSTKMYQDLKERFWWASMKREIAEYVAVCDVCQRVKAEHQKPAGLLQPLKIPEWKWEEIGMDFITGLPRTSSGHDSIWVIVDRLTKVAHFIPVKTTYSGSRLAELYMARIVCLHGVPKKIVSDRGSQFTSNFWKKLQEEMGSKLNFSTAYHPQTDGQTERVNQILEDMLRACALDFGGSWDKNLPYAEFSYNNSYQASLQMAPYEALYGRKCRTPLLWDQTGERQVFGTDILREAEEKVKIIQERLRVAQSRHKSYADNRRRDLSFEEGDYVYLRVTPFRGVHRFRTKGKLAPRFVGPYKIVSRRGEVAYQLELPQSLAGVHNVFHVSQLKKCLRVPTEEANIEQIEVQEDLTYVEKPIRILETSERRTRNRVIRFCKVQWSNHSEEESTWEREDELESAHPQLFASSSESRGRDSV

SEQ ID NO: 20132 - protein, 607 aa, Oryza sativa
  Clone ID: TF_OSC6318j.C1.p1.fg
MPRYKPEYLFGVEGFVQELRTMSFAIGFGTAPFYAQIPHDRHEEKCRVKVTLNSNSEDIPSEMFEAGGRNYIHACQEVARIAIGELRDSYSDQLADTEYRYHPRQPQGSDRGSYLETEGIENDATTRHLVEMLWAMDETRAETMLAVQDREDRNRGKICKLEDKVDRLEKELAALKGEAPPQKARIRLTARKRALFVPRYQLAPKVRVVEKEVTPALADPPVVNMVLTRSNGNGPNNNNNNNNGENPTLAQVLAQQAQLMNMMMQQLQNQQNQLNQGNNNAPPPQNKLAEFLRLHAIEKKLDLLQCTDQEKVSFASHQLHGPASEWWDHFRLNRTTAEPITWLEFTAAFRKTHIPSGVVFLKKKEFRSLTQGSRSVTEYLHEFNRLARYAPEDVRNDEERQEKFLEGLNDELSYPLMTGDYPDFQKLVDKAIRQEDKYNRMEQKKRRIAHFKAQQGNTSTQQQPAKKEQGSKPVVCFNCGDPGHYADKCPKPRRVKVVPAQSNSTAPASKARVNHVAAAEAKDAPDVILGTFFVNSVPATVLFDSGATHSLLSMSFAGNHGMEVEDLRRPLMVSTPSNQALSLQRSPSVRIEIQEVPFLANLILLES

SEQ ID NO: 20133 - protein, 1966 aa, Oryza sativa
  unsure (1)..(1966): unsure at all Xaa locations
  Clone ID: TF_OSC6410j.C1.p3.np
ANSNLASNQQARRXAASXQQQRTFSVFTVRRRRFSRRRRSGRPPSCSPSRRRPRPPLRRRQRSSELRRRRQAEDAXTGNNLFSSWFGMVYSWFGDRTVQPMPRYKPEYLFGVEGFVQELRTMSFVIGFGTAPFYAQIPHDRHEEKCRVKVTLNSNSEDIPSVMFEAGGRNYIHACQEVARIAIGELRDRYSDQLADTEYRYHPRQPQGSDRGSYLETEGIENDATTKHLVEMLWAMDESRAETVLAAQDREDRNRGKICKLEDKVDRLEKELAALKGEAPPQKARIRLTARKRALFVPRYQLAPKVRVVEKEVAPAQADPPVIIISSDEEEESKRNNSKIEWVATQDDKDEPSIDLRCLEELDNGNGPNNPNNNNNGENPTLAQVLAQQTQLMNMMMQQFQNQQNQGNNHAPPQNKLAEFLRVRPPVFSSTTNPVEASDWLHAIEKKLDLLQCTDQEKVSFASHQLHGPASEWWDHFRLNRTTAEPITWLEFTAAFRKTHIPSGVVSLKKKEFRSLTQGSRSVTEYLHEFNRLARYAPEDVRNDEERQEKFLGGLNDELSYPLMVGDYPDFQKLVDKAIRQEDKYNRMEQKKRRIAQFKTQQGNNQKPRLTLGPQPMPQGGSSSVVRPQRHFFNNNAGNNIRNQAPRPVAAPAQQQPAKREQGSKPVVCFNCGDPGHYADKCPKPRRVKVVPAQNNSAVPASKARVNHVAAAEAQDAPDVILGTFLVNSVPATVLFDSGATHSFLSMSFAGNHGMEVEDLRRPLMVSTPSNQALSLQRSPSVRIEIQGVPFLANLILLESKDLDVILGMDWLARHKGVIDCANKKVTLTSYDGRVVTVHALSSESLRSRLNQITLEEIPIVREYPDVFPDDLPGMPPKRDIEFTIDLVPGTTPIHKRPYRMAANELAEVKRQVDDLLQKGYIRPSSSPWGAPVIFVEKKDHTQRMCVDYRALNDVTIKNKYPLPRIDDLFDQLKGATVFSMIDLRSGYHQLRIKEYGLFECTVMSFGLTYGLFECTVMSFGLTNAPAFFMNLMNKVFMEYLDKFVVVFIDDILIYSRTKEEHEEHLRLALEKLREHQLYAKFSKCEFWLSEVKFLGHVISAGGVAVDPSNVESVTNWKQPKTVSEIRSFLGLAGYYRRFIENFSKIAKPMTRLLQKDVKYKWSEECEQSFQELKSRLISAPILILPDPKKGFQVYCDASKLGLGCVLMQDGKVVAYASRQLRPHEKNYPTHDIELAAVVHALKIWRHYLFGTRTEEFERLNLGIVGRGFVAALEAKPTLIDQVREAQINDPDIQEIKKNMRRGKAIGFLEDEQGTVWLGERICVPDNKDLKDAVLKEAHDTLYSIHPGSTKMYQDLKERFWWASMKREIAEYVAVCDVCQRVKAEHQKPAGLLQPLKIPEWKWEEIGMDFITGLPRTSSGHDSIWVIVDRLTKVAHFIPVKTTYSGSRLAELYMARIVCLHGVPKKIVSDRGSQFTSNFWKKLQEEMGSKLNFSTAYHPQTDGQTERVNQILEDMLRACALDFGGSWDKNLPYAEFSYNNSYQASLQMAPYEALYGRKCRTPLLWDQTGERQVFGTDILREAEEKVKVIQERLRVAQSRHKSYADNRRRDLSFEEGDYVYLRVTPLRGVHRFHTKGKLAPRYVGPYKIVSRRGEVAYQLELPQSLAGVHNVFHVSQLKKCLRVPTEEANLEQIEVQEDLTYVEKPIRILETNERRTRNRVIRFCKLQWSNHSEEESTWEREDELNRGIEFVSDRFPSLKPSFPSPLAAMGLRRRLXAPLKGPPVSPLPVATFAFASRRRKSPSAPCAAVVSAVAVAREDHRRARQVVAVPSAPCAAVVSAVAVAREDHRRARQVVAVLVRPFAVARDRRSFVAVVKPKSFAASSSSPSPSVDLPPPFASPFASSRRRSPASVRRSSRLLHRAAAAVGDVTADVIGVVRHSVVSGESVFAEEEFEEFQGQQGKSHRS

SEQ ID NO: 20134 - protein, 1316 aa, Oryza sativa
  Clone ID: TF_OSC7927j.C1.p1.fg
MVNTRSNGNGPNNPNNNNGENPTLAQVLAQQTQLMNMMMQQFQNQQNQGIIMHLPKTKKKLDLLQCTDQEKVSFASHQLHGPASEWWDHFRLNRTTAEPITWLEFTAAFRKTHIPSGVVSLKKKEFRSLTQGSRSVTEYLHEFNRLARYAPEDVRNDEERQEKFLGGLNDELSYPLMVGDYPDFQKLVDKAIRQEDKYNRMEQKKRRIAQFKTQQGNNQKPRLTLGPQSMPQGGSSSVVRPQRQFFNNNAGNNIRNQAPRPVAAPAQQQPAKREQGSKPVVCFNCGDPGHYADKCPKPRRVKVVPTQNNSAVPASKARVNHVAAAEAQDAPDVILGMDWLARHKGVIDCANRKVTLNSYDGRVVTVHALSSESLRSRLNQITLEEIPIVREYPDVFPDDLPGMPPKRDIEFRIDLVPGTTPIHKRPYRMAANELAEVKRQVDDLLQKGYIRPSSSPWGAPVPLFFSKIDLRSGYHQLRIKEEDIPKTAFTTRYGLFECTVMSFGLTNAPAFFMNLMNKVFMEYLDKFVVVFIDDILIYSRTKEEHEEHLRLALEKLREHQLYAKFSKCEFWLSEVKFLGHVISAGGVAVDPSNVESVTNWKQPKTVSEIRSFLGLAGYYRRFIENFSKIAKPMTRLLQKDVKYKWSEECEQSFQELKNRLVSAPILTLPDPKKGFQVYCDASKLGLGCVLMQDGKVVAYASRQLRPHEKNYPTHDIELAAVVHALKIWRHYLFGTRTEVYTDHKSLKYIFTQPDLNMRQRRWLELIKDYDMGIHYHPGKANVVADALSRKGYCNATEGRQLPLELCKEFERLNLGIVGRGFVAALEAKPTLIDQVREAQINDPDIQEIKKNMRRGKAIGFLEDEHGTVWLGERICVPDNKDLKDAILKEAHDTLYSIHPGSTKMYQDLKERFWWASMKREIAEYVAVCDVCQRVKAEHQKPAGLLQPLKIPEWKWEEIGMDFITGLPRTSSGHDSIWVIVDRLTKVAHFIPVKTTYSGSRLAELYMARIVCLHGVPKKIVSDRGSQFTSNFWKKLQEEMGSKLNFSTAYHPQTDGQTERVNQILEDMLRACALDFGGSWDKNLPYAEFSYNNSYQASLQMAPYEALYGRKCRTPLLWDQTGERQVFGTDILREAEEKVKIIQERLRVAQSRHKSYADNRRRDLSFEEGDYVYLRVTPLRGVHRFHTKGKLAPRFVGPYKIVSRRGEVAYQLELPQSLAGVHNVFHVSQLKKCLRVPTEGANIDQIEVQEDLTYVEKPIRILETSERRTRNRVIRFCKVQWSNHSEEESTWEREDELKSAHPLLFASSSESRGRDSV

SEQ ID NO: 20135 - protein, 1079 aa, Oryza sativa
  Clone ID: TF_OSC900039j.C1.p20.fg
MEQKKRRIAQFKTQQGNNQKPRLTLGPQTMPHGGSSSVVRPQRQFFNNNAGNNNRNQAPRPVAAPTQQQPAKREQGSKPVVCFNCGDPGHYADKCPKPRRVKVVPAQSNSTVPASKARVNHVAAAEAQDAPDVILGTFLVNLVPAAVLFDSGATHSFLSMSFAGNHGMEVEDLRRPLMVSTPSNQALSLQRSPSVRIEIKGVLFLANLILLESKDLDVILGMDWLARHKGVIDCANRKVTLTSHDGRVVIVHALSSESLRSRLNQITLEEIPIVREYPDVFPDDLPGMPPKRDIEFGIDLVPGTTPIHKRPYRMAANELAEVKRQVDDLLQKGNIRPSSSPWGAPVIFGGKERSYPEDLKGATVFSKIDLRSGYHQLRIKEEDIPKTAFTTRYGLFECTVMSFGLTNAPAFFMNLMNKVFMEYLDKFVVVFIDDILIYSRTKEEHEEHLRLALEKLREHQLYAKFSKCEFWLSEVKFLGHKQPKTVSEICSFLGLAGYYRRFIENFSKIAKPMTRLLQKDVKYKWSEECEQSFQELKNRLISAPILILPDPKKGFQDGKVVAYASRQLRPHEKNYPTHDLELAAVVHALKIWRHYLFGTRTEVYTDHKSLKYIFTQPDLNMRQRRWLELIKDYDMGICVPDNKDLKDAILKEAHDTLYSIHPGSTKMYQDLKERFWWASMKREIAEYVAVCDVCQRVKAEHQKPAGLLQPLKIPEWKWEEIGMDFITGLPRTSSGHDSIWVIVDRLTKVAHFIPVKTTYSGSRLAELYMARIVCLHGVPKKIVSDRGSQFTSNFWKKLQEEMGSKLNFSTAYHPQTDGQTERVNQILEDMLRACALDFGGSWDKNLPYAEFSYNNSYQASLQMAPYEALYGRKCRTPLLWDRTGERQVFGTDILREAEEKVKIIQERLRVAQSHYKSYADNRRRDLSFEEGDYVYLRVTPLRGVHRFHTKGKLAPRFVGPYMIVSRRGEVAYQLELPQSLAGVHNVFHVSQLKKCLRVPTEEANLEQIEVQEDLTYVEKPIRILETNERRTRNRVIRFCKVQWSNHSEEESTWEREDELKSAHPHLFASSSESRGRDSV

SEQ ID NO: 20136 - protein, 813 aa, Oryza sativa
  Clone ID: TF_OSC900061j.C1.p6.gm
MVNTRSNGNGPSNNNNNNGENPTLAQVLAQQTQLMNMMMQQLQNQQNQGNNHALPQNTLAEFLRVRPPIFSSTTNPVEAGDWLHTIEKKLDLLQCTDQEKVSFASHKLHGPASEWWDHFRLNRTTAEPITWLEFTAAFRKTHIPSGVVSLKKKEFRLLTQGSRSVTEYLHEFNRLTRYAPEDVRNDEERQEKFLEGLNDELSYPLMTGDYYDFQKLVDKAIRQEDKYNRMEQKKRRIAQFKTQQGNNQKPRLTLGPQSMPQGGSSSVVRPQRQFFNNNAGNNIRNQALRPVAVSTQQQPAKKEQGSKPVVCFNCGDPGHYADKCPKPRRVKVVPAQSNSTAPASKARVNHVAAAEAQDAPDVILVKFLGHVISAGGVAVDPSNVESVTNWKQPKTVSEIRSFLGLAGYYRRFIENFSKIAKPMTRLLQKDVKYKWSEESLEAKPTLIDQVREAQINDPDIQEIKKNMRRGKAISFLEDEQGTVWLGERICVPDNKDLKDAILKEAHDTLYSIHPGSTKMYQDLKERFWWAIIVVAREDRHRARQVVAVLVCRFATVGDRRSIVAVIKPKSAAISTSSPSPSVGLPPSLWSPEGALRWIVLCKGYCHNSFPRYRGGIEAHGDMIGKRVVRQLASVTRGVQRGQCSSHGGRRVPDERIELATTMRGSEHYYRRPKWCRLRNPLRKTTHQEHIHQEYNKKNTFIKNRMERRRAPLPSPPPQTSPLPPPSSDGEEEGAAVFSTTTTTTVAGSRCRHLPGYRTTAASPPIAKPPQPPPLPPDLAEGRAPPLGHRTTAASAPAVEPPQSHRRHLLSRQI

SEQ ID NO: 20137 - protein, 1708 aa, Oryza sativa
  Clone ID: TF_OSC900076j.C1.p12.fg
MPRYKPEYLFGVDGFVQELRTMSFVIGFETAPFYAQIRHDRHEEKCRVKVTLNSNSEDIPSVMFEAGGRNYIHACQEVARIAIGELRDRYSDQLADTEYRYHPRQPQGSDRGSYLETEGIENDATTRHLVEMLWAMDESRAETVLAAQDREDRNRGKICKLEDKVDRLEKELAELKGEAPPQKARIRLTARKRALFVPRYQLAPKIRVVEKEVAPTLADPPVIIISDDEEEESKRNNSKIEWFSPVSLLVPCPCLMVNTRSNGNGPSNNNNGENPTLAQVLAQQTQLMNMMMQQLQNQGNNHASPQNKLAEFLRVRPPIFSSTTNPVEAGDWLHAIDKKLDLLQCTDQEKVSFASHQLHGPASEWWDHFRLNRTTAEPITWLEFTAAFRKTHIPSGVVSLKKKEFRSLTQGSRSVTEYLHEFNRLARYAPEDVRNDEERQEKFLEGLNDELSYPLMTGDYADFQKLVDKAIRQEDKYNRMEQKKRRIAQFKTQQGNNQRPRLTLGPQSMPQGGSSSVVRPQRQFFNNNAGNNIRNQAPRPVAAPTQQQPAKREQGSKSVVCFNCGDPGHYADKCPKPRRVKARVNHVAAAEAQDAPDVILGTFLVNSVHATVLFDSGATHSFLSMSFAGNHGMEVEDLRRPLMVSTPSNQALSLQRSPSVRIEIQGIPFLANLILLESKDLDVILGMDWLARYKGVIDCANRKVTLTSNDGRVVTVHALSSETLRSRLNQITLEEIPVVREYSDVFPDDLPGMPPKRDIEFRIDLVPGTTPIHKRPYRMAANELAEVKRQVDDLLQKGYIRPSSSPWGAPVIFVEKKDHTQRMCVDYRALNDVTIKNKYPLPRIDDLFDQLKGATVFSKIDLRSGYHQLRIKEEDIPKTAFTTRYGLFECTVMSFGLTNAPAFFVNLMNKVFMEYLDKFVVVFIDDILIYSRTKEEHEEHLCLALEKLREHQLYAKFSKCEFWLSEVKFLGHVISAGGVAIDPSNVESVTNWKQPKTVSEIRSFLGLAGYYRRFIENFSKIAKPMTRLLRKDVKYKWSEECERSFQELKNRLISAPILILPDPKKGFQVYCDASKLGLGCVLMQNGKVVAYASRQLRPHEKNYPTHDIELAVVVHALKIWRHYLFGTRTEVYTDHKSLKYIFTQPDLNMRQRRWLELIKDYDMGIHYHPGKANVVADALSRKGYCNATEGRQLPLELCKEFERLNLGIVSRGFVAALEAKPTLIDQVREAQINDPDIQEIKKNMRRGKAIGFLEDEQGTVWLGERICVPDNKDLKDAILQEAHDTLYSIHPGSTKMYQDLKERFWWASMKREIAEYVVVCDVCQRVKAEHQKPAGLLQPLKIPEWKWEEIGMDFITGLPRTSSGHDSIWVIVDRLTKVAHFIPVKTTYSRSRLAELYMARIVCLHGVPKKIVSDRGSQFTSNFWKKLQEEMGSKLNFSTAYHPQTDGQTERVNQILEDMLRACALDFGGSWDKNLPYAEFSYNNSYQASLQMAPYEALYGRKCRTPLLWDQTGERQVFGTDILREAEEKVKIIQERLRVAQSRHKSYADNRCRDLSFEEGDYVYLRVTPLRGVHRFHTKGKLAPRFVGPYKIVSRRGEVAYQLELPQSLAGVHNVFHVSQLKKCLRVPTEEANLEQIEVQEDLTYVEKPIRILETNERRTRNRVIRFCKVQWSNHSEEESTWEREDELKSAHPHLFASSSESRGRDSV

SEQ ID NO: 20138 - protein, 1825 aa, Oryza sativa
  Clone ID: TF_OSC900077j.C1.p11.gm
MADRDEEQILYDTIAEGSSQYWNEEEGNEDPNQYLNEEGNMEWDAEGNQQGHVERDVEGNQEEEASGSQPSVGQKRARGQRGAAKKLEGRHIITEVEEDGRPSAPAEAAKNYVRHSGWVVRDNMPVSTVYWRRTRARGDHESFVPDSEKEMLWTTMLETFTLPAGTEDKVKRWILKKMAEQFQSFKGDLYQKYILKGQTPNFDTFPKLRDHWDEFVAYKTSEQGQAMMERNKENAAKKKYHHHLGSGGYSVAMPKWEQMEATLIERGIEPATANWPERSKFWYYAHGGTLNPADGSLVFGDQIREVARRLTDAVEASSQSTFRPDRDRDELTLALQTPEHPGRTRGKGVIPWKIGFKEDIHTYRSRMRSKRDTEAKIADLEFRVSSYELNMQDEVARKVDERMAAHRSHDPQPTIPPAMPCAAAVSVVVIAREGHRRDRQVTAVLVRSFAAAEDRRNTVAAVDPKFAAASSSSPSPSVDLPPLFWSPMPRYKPEYLFGVEGFVQELRTMSFVIGFGTAPFYAQIPHDRHEEKCRVKVTLNSNSEDIPSVMFEAGGRNYIHACQEVARIAIGELRDRYSDQLADTEYRYHPRQPQGSDRGSYLETEGIENDATTRHLVEMLWAVDETRAETVLAAQDREDQNRGKICKLKDKVDRLEKELAALKGEASPQKARIRLTARKRALFVPRYQLAPNVRVVEKEVAPADPPVIIISDDEEEESKRNHSKIEWVATQDDENEPNEPSIDLRCSEELDNGNGPNNNNNEGNPTLAQVLSQQTQLMNMMMQQLQNQQNQGNNHAPPHNKLAEFLRVRPPIFSSTTNTVEAGDWLHAIEKKLDLLHCTDQEKVSFASHQLHGPASEWWDHFRLNRTTAEPITWLEFTAAFRKTHIPSGVVSLKKKEFRSLTQGSHSVTEYLHEFNRLARYAPEDVRNDEERQEKFLEGLNDELSYPLMTGDYSDLQKLVDKAIRQEDKYNRMEQKKRRIAQFKTQQGNNQKPRLTLEPQSMPQGGSSSVVRPQRQFFNNNAGNNIRNQAPRPVAAPAQQQPAKREQGSKPVVCFNCGDPGHYADKCPKPRRVKVVPAQSNSTVPASKARVNHVAAAEAQDAPDVILVRKYPDVFPDDLPANELAEVKRQVDDLLQKGYIRPSSSPWGAPVIFVEKKDHTQRIALAPCNLAPLSPPSLQPCAAAVSVVVIAREGHRRDRQVAAILVCSFAATEDRRNAVAAVDPKFAAASSSSPSPSVDLPPLFWSPVASGMAIPTDPSGTYHCRPIPAGYSKVEVELVEGAYEDLELDYPGGDGGTSSSLGDKRRLVHHLLRLRHLLLRILHRLLLMLHQHRLHLRLQHRLLLRILHRLLLVLLHLLPRKLLFRHLQKVKRQFKPRSPEKKIPIDPSVRNFFRGMSASAKEAIKLSDYERTLKKASSGKSKPVPQLGEQPNQEIEPLVTGKEMTIEQFITDTGLTTYQLLGVAPIEKAEVKYMYELGKPLVKPELLQSLPTQMYKFRQLYMEMSATGREMIGARIRDTDFLQGDDILWINFRGIYELYQLDALDVSIMSCWILMEIQRARRRRVFDTGFIDPRKVNVAMLDQYPQETEDNLVHLLKAQHYKTFILLPYNTEFHWVLLLFDLEACTVNDDITMDFVKGLPSVRGKSVILTIVNLLSKYVHFIPLGYPYTMISVAQAFFIEVVRLHYIPNSIVVAHDPVTRSMFWPELFHLARVKLNLSSAFHPQSGGQLEAANHVIGERLLQARDYSKLYCNDSHRDMVFSVGDSPAGARIHSVFIVVVSKSFHGAPLASTMALLAITDGLVLLVPAKAYPWSCGPRCSGTADLV

SEQ ID NO: 20139 - protein, 1454 aa, Oryza sativa
  Clone ID: TF_OSC900086j.C1.p14.fg
MSVWGGRETDLGGGQGERAGAPGLEWYIPGLEIELCSRDGCSEWLGLYNRMPRYKPEYLFGVEGFVQELRTMSFVIGFGTAPFYAQIPHDRHEEKCRVKVTLNSNSEDIPSVMFEAGGRNYIHACQEVARIAIGELRDRYSDQLADTEYRYHPRQPQGSDRGSYLETEGIENDATTRHLVEMLWAMDESRAETVLAAQDREDRNRGKICKLEDKVDRLEKELAALKGEAPPQKARIRLTARKRALFVPRYQLAPKMVNTRSNGNGPNNPNNNNNGENPTLAQVLAQQTQLMNMMMQQFQNQQNQGNNHAPPQNKLAEFLRVRPPVFSSTTNPVEASDWLHAIEKKLDLLQCTDQEKVSFASHQLHGPASEWWDHFRLNRITAEPITWLEFTAAFRKTHIPSGVVSLEKKEFSARRSFLGGLNDELSYPLMVGDYPDFQKLVDKAIRQEDKYNCMEQRKRRIAHFKAQQGSNQKPRLTLGPQPMSQGGSSSVVRPQRQFFNNNAGNNIRNQAPRPVAAPVQQQPAKREQGSKPVVCFNCGDPGHYADKCPKPRRVKVVPAQSNSAVPASKARVNHVAAAEAQDAPDVILGTFLVNSVPATVLFDSGATHSFLSMSFAGNHGMEVEDLRRPLMVSTPSNQALSLQRSPSVRIEIKGVPFLANLILLESKDLDVILGMDWLARHKDDLPGMPPKRDIEFRIDLVPGTTPIHKRPYRMAANELAEVKRQVDDLLQKGYIRPSSSPWGAPVIFVEKKDHTQRMCVDYRALNDVTIKNKYPLPRIDDLFDQLKGATVFSKIDLRSGYHQLRIKEEDIPKTAFTTRYGLFEGCVLMQDGKVVAYASRQLRPHEKNYPTHDLELAAVVHALKIWRHYLFGTRTEVYTDHKSLKYIFTQPDLNMRQRRWLELIKDYDMGIHYHPGKANVVADALSRKGYCNATKGRQLPLELCKEFERLNLGIVGRGFVAALEAKPTLIDQVREAQINDPDIQEIKKNMRRGKAIGFLEDEQGTVWLGERICVPDNKDLKDAILKEAHDTLYSIHPGSTKMYQDLKERFWWASMKREIAEYVAVCDVCQRVKAEHQKPAGLLQPLKIPEWKWEEIGMDFITGLPRTSSGHDSIWVIVDRLTKVAHFIPVKTTYSGSRLAELYMARIVCLHGVPKKIVSDRGSQFTSNFWKKLQEEMGSKLNFSTAYHPQTDGQTERVNQILEDMLRACALDFGGSWDKNLPYAEFSYNNSYQASLQMAPYEALYGRKCRTPLLWDQTGERQVFGMDILREAEEKVKIIQERLRVAQSRHKSYADNRRRDLSFEEGDYVYLRVTPFRGVHRFHTKGKLAPRFVGPYKIVSRRGEVAYQLELPQSLAGVHNVFHVSQLKKCLRVPTEEANLDQIEVQEDLTYVEKPIRILETSERRTRNRVIRFCKVQWSNHSEEESTWEREDELKSAHPHLFASSSESRGRDSV

SEQ ID NO: 20140 - protein, 1046 aa, Oryza sativa
  Clone ID: TF_OSC900094j.C1.p9.gm
MPRYKPEYLFGVEGFVQELRTMSFVIGFGTAPFYAQIPHDRHEEKCRVKVTLNSNSEDIPSVMFEAGGRNYIHACQEVARIAIGELRDRYSDQLADTEYRYHPRQPQGSDRGSYLETEGIENDATTKHLVEMLWAMDESRAEIVLAAQDREDRNRGKICKLEDKVDRLEKELAALKGEAPPQKARIRLTARKRALFVPRYQLAPKVRVVEKEVAPAQADPPVIIISDEEEESKRNHSKIEWVATQDDEDEPNEPSIDLRCLEELDTTNPVEASDWLHAIEKKLDLLQCTDQEKVSFASHQLHGLASEWWDHFRLNRITAEPITWLEFTAAFRKTHIPSGVVSLKKKEFRSLTQGSRSVTEYLHEFNRLARYAPEDVRNDEERQEKFLGGLNDELSYPLMVGDYPDFQKLVDKAIRQEDKYNRMEQKKRRIAQFKTQQGNNQKPRLTLGPQPMPHGGSSSVVRPQRQFFNNNAGNNIRNQAPRPVAAPAQQQPAKREQGSKPVVCFNCGDPGHYADKCPKPRRVKVVPVQNNSAVPASKARVNHVAAAEAQDAPDVILVREYPDVFPDDLPANELAEVKRQVDDLLQKGYIRPSSSPWGAPVIFVEKKDHTQRMCVDYRALNDVTIKNKYLLPRIDDLFDQLKGATVFSKIDLRSGYHQLRIKEEDIPKTAFTTRYGLFECTVMSFGLTNAPAFFMNLMNKVFMEYLDKFVVVFIDDILIYSRTKEEHEEHLRLALEKLREHQLYAKFSKCEFWLSEVKFHGHVISAGGVAVDPSNVESVTNWKQPKTVSEIRSFLGLAGYYRRFIENFSKIAKPMTRLLQKDVKYKWSEESLEAKPTLIDQVREAQINDPDIQEIKKNMRRGKAIGFLEDEQGTVWLGERICVPDNKDLKDAVLKEAHDTLYSIHPAPCALASPSPPPLQPCAAVVSAVAIAREDHRRARQVVAVLVRPFAVAGDHRSSFAVVDPKVPAASSSSPSPSVGLPPPFRSPCRRSPASVRRPSRLLRRAAAAVGDVTADVIGVVRREPVVDRSISAVRFGWIDLGRPFA

SEQ ID NO: 20141 - protein, 1534 aa, Oryza sativa
  Clone ID: TF_OSC900137j.C1.p1.fg
MSFVIGFGTAPFYAQIPHDRHEEKCRVKVTLNSNSEDIPSVMFEAGGRNYIHACQEGSDRGSYLETEGIENDATTRHLVEMLWAMDETRAETVLAAQDREDRNRGKICKLEDKVDRLEKELAALKGEAPPQKARIRLTARKRALFVPRYQLAPKVRVVEKEVTPALADPPVVNMVNTRSNGNGPNNNNGENPTLAQVLAQQTQLMNMMMQQLQNQQNQGNNYAPPQNKLAEFLRVRPPTFSSTTNPVEAGDWLHAIEKKLDLLQCTDQEKVSFASHQLHGPATEWWDHFRLNRTTAEPITWLEFTAAFRKTHIPSGVVSLKKKEFRSLTQGSRSITEYLHEFNRLTRYAPEDVRNDEERQEKFLEGLNDELSYPLMTGDYPDFQKLVDKAIRQEDKYNRMEQKKRRIAQFKTQQGNNQRPRLTLGPQSMPQGGSSSIVRPQRQFFNNNAGNNIRNQAPRPVAASTQQQPAKREQGSKPVVCFNCGDPGHYADKCPKPRRMKVVPTRSNSTVPASKARVNHVAAAEAQDAPDVILGTFLVNLVPATMLFDSGATHSFLSMSFAGNHGMEVKDLRRPLMVSTPSNQALSLQRSPSVRIEIQGVPFLANLILLESKDLDVIPGMDWLARHKGVIDCANRKVTLTSNDGRVVTVHALSPESLRSRLNQITLEEIPVVREYSDVFPDDLPGMPPKRDIEFRIDLVRGTTPIHKRPYRMAANELAEVKRQVDDLLQRGYIRPSSSPWGAPVIFVEKKDHTQRMCVDYRALNDVTIKNKYPLPRIDDLFDQLKGATVFSKIDLRSGYHQLRIKEEDIPKTAFTTRYGLFECTVMSFGLTNAPAFFMNLMNKVFMEYLDKFVVVFIDDILIYSRTKEEHEEHLRLALEKLREHQLYAKFSKCEFWLSEVKFLGHVISAGGVAIDPSNVESVTNWKQPKTVSEIHSFLGLAGYYRRFIENFSKIAKPMTRLLQKDVKYKWSEECEQSFQELKNHLISAPILILPDPKKGFQVYCDASKLGLGCVLMQDGKVVAYASRQLRPHEKNYPTHDLELAAVVHALKIWRHYLFGTRTEVYTDHKSLKYIFTQPDLNMRQRRWLELIKDYDMGIHYHPGKANVVADALSRKGYCNATEGRQLPLELCKEFERLNLGIVSRGFVAALEVKSTLIDHVREAQINDPDIQEIKKNMRRGKAIGFLEDEQGTRVKAEHQKPAGLLQPLKIPEWKWEEIGMDFITGLPRTSSGHDSIWVIVDRLTKVAHFIPVKTTYSGSRLAELYMARITDGQTERVNQILEDMLRACALDFGGSWDKNLPYAEFSYNNSYQASLQMAPYEALYGRKCRTPLLWDQTGERQVFGTDILREAEEKVKIIQERLRVAQYRHKSYADNRRRDLSFEEGDYVYLRVTPFRGVHRFHTKGKLAPRFVGPYKIVSRRGEVAYQLELPQSLAGVHNVFHVSQLKKCLRVPTEEANLEQIEVQEDLTYVEKPIRILEIDERRTRNRVIRFCKVQWSNHSEEESTWEREDELKSAHPHLFASSSESRGRDSV

SEQ ID NO: 20142 - protein, 571 aa, Oryza sativa
  Clone ID: TF_OSC900177j.C1.p14.gm
MMMQQLQNQQNQGNNHAPPQNKLAEFLRVRPPIFSSTTNPVEAGDWLHAIEKKLDLLQCTDQEKVSFASHQLHGPASEWWDHSRLNRITAEPITWLEFTAAFRKTHIPSGVVSLKKKEFRSLTQGSRSVTEYLHEFNRLARYALEDVRTDEERQEKFLEGLNDELSYPLMTGDYPDFQKLVDKAIRQEDKYNRMEQKKRRIAQFKTQQGNNQRPRLTLGPQSMPQGGSSSVVRPQRQFFNNNAGNNIRNQAPRPVAAPTQQQPAKREQGSKPVVCFNCGDPGHYADKCPKPRRVKAVPAQSNSTAPAPKARVNHVAATEAQVREYPDVFPDDLPERIHQTEFISMGSSSNFCGKERPYPEDLKGATVFSKIDLRSGYHQLRIKEEDIPKTAFTTSLAPPLSPPLQPCSAVAPVVAVARGGRHRGRRRVAVLVRPFAVAEDRRSIVAVVKPKVDAASSSTPSPSVDLPPPFWSLVSSPRRPLRPGALRSRRRAIVRRRACAPEPPQVVTSPLTSSSSSLVVRPWIGEEFEEFQGGDYDPGKVRCSGLCCARGIVTAPFREEEFYSEADGVED

SEQ ID NO: 20143 - protein, 1245 aa, Oryza sativa
  Clone ID: TF_OSC900195j.C1.p4.gm
MAQTCQPCTSSLASAHAVRAGALTPPSKTEREILVKDKFAHGPTCQSLFLSLFLCSSSSRVPGVWRCDEAWKLYEAEDENDPFDVIHSESVPCSTAGTSPGPRRRRAHVAGVQPQPGPVGELVLSEVRFFRSYAHHVAISDVAREMLRDMYQIPNRVHVILNSVDEAQFEPDGAGPRVPGGPHAAQGRQPGARALASCALAPPSPPSLQPCAAAVPDVAVAREDRRRGRQVVAVLVRPFAVAVDRRSTVAVVKPKSAAASSSSPSPFVPLPPSLWSPMRRYKPEYLFGVEGFIQELRTMSFVIGFGTAPFYAQIPHDRHEEKCRVKVTLNSNSEDIPSVMFEAGGRNYIHACQEVARIAIRELRDRYSDQLADTEYRYHPRQSQGSDRGSYLETEGIENDATTRHLVEMLWAMDESRAETVLAAQDREDRNRGKICKLEDKVDRLEKELATLKGEAPPQKARIRLTARKRALFVPRYQLAPKVRVVEKEVAPTLADPPVIIISDDEEEESKRNHSKIEWVATQDDEDEPNEPSIDLRCSEELETTAEPITWLEFTVAFRKTHIPSGVVSLKKKEFRSLTQGSRSVTEYLHEFNRLARYAPEDKLVDKAIRQEDKYNRMEQKKRRIAQFKTQQGNNQKPRLTLGPQSMPQGGSLSVVRPQRQFFNNNAGNNIRNQAPRPVAASTQQQPAKREHGSKPVVCFNCGDPGHYADKCPKPRRVKVVPTQSNSTVPASKARVNHVAAAEAQDAPDVILVREYPDVFPDDLPANELAEVKRQVDDLLQKGYIRPSSSPWGAPVIFVEKKDHTQRMCVDYRALNDVTIKNKYLLPRIDDLFDQLKGATVFSKIDLRSGYHQLRIKEEDIPKTAFTTRYGLFKCTVMSFGLTNAPAFFMNLMNKVFMEYLDKFVVVFIDDILIYSRTKEEHEEHLRLALEKLREHQLYAKFSKCEFWLSEVKFLGHVISAGGVAVDPSNVESVTNWKQPKTVSEIRSFLGLAALEAKPTLIDQVREAQINDPDIQEIKKNMRRGKAIGFLEDEQGTVWLGERSCVPDNKDLKDAILKEAHDTLYSIHPGSTKMYQDLKERFWWATVAVAREGRHRGRQVVAVLVRPFAVAGDRRSIVAVVNPKVSAVSSSSPSSSVVLPPPFWSPVCSPRRPLRAGVLRLRPCAAVRRRACAARAVRSAEPPPLSVTSPLKSSGSSAGAITIQEGALQWIVLCEGYCHNSFPRYRGGIEAHEEEFYNEADGVED

SEQ ID NO: 20144 - protein, 1858 aa, Oryza sativa
  Clone ID: TF_OSC900231j.C1.p16.fg
MPHPSLHHASLNHRRNPALTASLSHHCLLPLQPRIAACPVDPVVLCRPPRYRGHCPQPVHPSIFANRRRKSLPSAQAPFHTFPMSYQSSAALRSSPGIAGAPSHRHPEAPAVTLLAAGRLLPPFGLSIPSFLESPFSRKKSLKSSKASKAAPGLEWYIPGLEIELCSRGGCSEWLGLYNRMPRYKPEYLFGVEGFVQELRTMSFVIGFGTAPFYAQIPHDRHEEKCRVKVTLNSNSEDVPSVMFEAGGRNYIHACQEVARIAIGELRDRYSDQLADTEYRYHPRQPQGSDRGSYLETEGIENDVTTKHLVEMLWAMDESRAGTVLAAQDREDRNRGKICKLEDKVDRLEKELAALKGEAPPQKARIRLTARKRALFVPRYQLAPKMVNTRSNGNGPNNPNNNNNGENPTLAQVLAQQTQLMNMMMQQFQNQQNQGNNHAPPQNKLAEFLRVRPPVFSSTTNPVEASDWLHAIEKKLDLLQCTDQEKVSFASHQLHGPASEWWDHFRLNRTTAEPITWLEFTAAFRKTHIPSGVVSLKKKEFRSLSQGSRSVTEYLHEFNRLARYAPEDVRNDEERQEKFLGGLNDELSYPLMVGDYPDFQKLVDKAIRQEDKYNRMEQKKRRIAQFKTQQGNNQKPRLTLGPQPMPQGGSSSVVRPQRQFFNNNAGNNIRNQAPRPVAAPTQQQPAKREQGNKPVVCFNCGDPGHYADKCPKPRRVKVVPAQSNSTVSASKARVNHVAAAEAQDAPDVILGTFLVNSVPATVLFDSGATHSFLSMSFAGNHGMEVEDLRRPLMVSTPSNQALSLQRSPSVRIEIQGVPFLANLILLESKDLDVILGMDWLARHKGVIDCANRKVTLNSYDGRVVTVHALSSEFLRSRLNQITLEEIPIVREYPDVFPDDLPGMPPKRDIEFRIDLVPGTTPIHTRPYRMAANELAEVKRQVDDLLQKGYIRPSSSPWGAPVIFVEKKDHTQRMCVDYRALNDVTIKNEYPLPRIDDLFDQLKGATVFSKIDLRSGYHQLRIKEEDIPKTAFTTRYGLFECTVMSFGLTNAPAFFMNLMNKVFMEYLDKFVVVFIDDILIYSRTKEEHEEHLRLALEKLREHQLYAKFSKCEFWLSEVKFLGHVISAGGVAVDPSNVESVTNWKQPKTVSEIRSFLGLAGYYRRFIENFSKIAKPMTRLLQKDVKYKWSEECEQSFQELKSRLISAPILILPDPKKGFQVYCDASKFGLGCVLMQEGKVVAYASRQLRPHEKNYPTHDIELAAVVHALKIWRHYLFGTRTEVYTDHKSLKYIFTQPDLNMRQRRWLELIKDYDMGIHYHPGKANVVADALSRKGYCNATEGRQLPLELCKEFERLNLGIVGRGFVAALEAKPTLIDQVREAQINDPDIQEIKKKMRRGKAIGFLEDEHGTVWLGERICVPDNKDLKDAILKEAHDTLYSIHPGSTKMYQDLKERFWWASMKREIAEYVAVCDVCQRVKAEHQKPAGLLQPLKIPEWKWEEIGMDFITGLPRTSSGHDSIWVIVDRLTKVAHFIPVKTTYSGSRLAELYMARIVCLHGVPKKIVSDRGSQFTSNFWKKLQEEMGSKLNFSTAYHPQTDGQTERVNQILEDMLRACALDFGGSWDKNLPYAEFLYNNSYQASLQMAPYEALYGRKCRTPLLWDQTGERQVFGTDILREAEEKVKIIQERLRVAQSRHKSYADNRRRDLSFEEGDYVYLRVTPLRGVHRFHTKGKLAPRFVGPYKIVSRRGEVAYQLELPQSLAGVHNVFHVSQLKKCLRVPTEEANIEQIEVQEDLTYVEKPIRILETSERRTRNRVIRFCKVQWSNHSEEESTWEREDELKSAHPYLFASSSESRGRDSV

SEQ ID NO: 20145 - protein, 632 aa, Oryza sativa
  Clone ID: TF_OSC900259j.C1.p5.gm
MVNTRSNGNGPNNNNNNNNNNEGNPTLAQVLAQQTQLMNMMMQQLQNQQNQGNNHAPPQNKLAEFLRVRPPIFSSTTNPVEAGDWLHAIEKKLDLLQCTDQEKVSFASHQLHGPASEWWDHFRLNRTTAEPITWLEFTAAFRKTHIPSGVVSLKKKEFRSLTQGSRSVTEYLHEFNRLARYAPEDVRNDEERQEKFLEGLNDELSYPLMTGDYSDFQKLVDKAIRQEDKYNRMEQKKRRIAQFKTQQGNNQKPRLTLGPQSVPQGGSSSVVRPQRQFFNNNAGNNIRNQAPRPVAAPTQQQPAKREQGNKPVVCFNCGDPGHYADKCPKPRRVKVVPVQSSSTALALKARVNHVAAAEAQDAPDVILVREYPDVFPDDLPANELAEVKRQVDDLLQKGYIRPSSSPWGAPVIFVEKKDHTQRMCVDYRALNDVTIKNKYPLPRIDDLFDQLKGATVFSKIDLRSGHEVSSSSPAAVGLRRRLRAPLKGPRALLYPPPPLPSPLVVGNALAPCALAPSSPPSLQPCAAAVPDVAVAREGRHRGRQVVAVLVCRFATVGDRRSIVAAVDPKSFAASSSSPSPSVDLPPSLWSPEGALQWIVLCKGYCHNSFPRYRGGIEAHEEEFYSEADGVED

SEQ ID NO: 20146 - protein, 1123 aa, Oryza sativa
  Clone ID: TF_OSC900307j.C1.p3.gm
MEVLVQVGSVSNLATTCSMSSSFVVSARIIMVDAGPVSRARAPSLSLTVAVAREGRQRGRQVVAVLVRPFAAVGDHRSVIAAVDPKSFAASSSSPSPVLAPPFAGERAPPEPSQPPSRRRRGDVIADAIKSVRREPLWTRSISAVHLGSMPRYKPEYLFGVEGFVQELRTMSFAIGFGTAPFYAQIPHDRHEEKCRVKVTLNSNSEDIPSVMFEAGGRNYIHACQEVARIAIGELRDRYSDQLADTEYRYHPRQPQGSDRGSYLETEGIENDATTKHLVEMLWAMDESRAETVLAAQDREDRNRGKICKLEDKVDRLEKELAALKGEAPPQKARIRLTARKRALFVPRYQLAPKVRVVEKEVAPAQADPPEKVSFASHQLHGPASEWWDHFRLNRITAEPITWLEFTAAFRKTHIPSGVVSLKKKEFRSLTQGSRSVTEYLHEFNRLARYAPEDVRNDEERQEKFLGGLNDELSYPLMVGDYPDFQKLVDKAIRQEDKYNRMEQKKRRIAQFKTQQGNNQKPRLTLGPQSMPHGGSSSVVRPQRQFFNNNAGNNIRNQAPRPVAAPVQQQPAKREQGSKPVVCFNCGDPGHYADKCPKPRRVKVVPAQSNSAVPASKARVNHVAAAEAQDAPDVILVREYPDVFPDDLPANELAEVKRQVDDLLQKGYIRPSSSPWGAPVIFVEKKDHTQRMCVDYRALNDVTIKNKYPLPRIDDLFDQLKGATVFSKIDLRSGYHQLRIKEEDIPKTAFTTRYGLFECTVMSFGLTNAPAFFMNLMNKVFMEYLDKFVAVFIDDILIYSRTKEEHEEHLRLALEKLREHQLYAKFSKCEFWLSEVKFLGHVISAGGVAVDPSNVESVTNWKQPKTVSEIRSFLGLAGYYRRFIENFSKIAKPMTRLLQKDVKYKWSEELAQGEAREAPAGLGSASKPTGGHGDRRRHARSPAVTGSAGDGGGRARHGDASGGGGATRRWLGQRGATAGARRKAAAPGLAVRARFVARESSGKLGKREKGARGCFLWAREGGIEAGRGGIGRRSGEVKWSSWGGQTGAVSCGVSGGNGGGRGGGRVHVVGCELGCGRAPDFAATWGGSGGHGGGWSRRKGMTGISSRDSGMARKKAGADGRSD

SEQ ID NO: 20147 - protein, 1446 aa, Oryza sativa
  Clone ID: TF_OSC900312j.C1.p15.fg
MSASFWCPPFASSRRRSPASMRARAAEPPPVVTSSLTSSSSSLVIPTFPESPFSQEKNLKSSKASKATPGLEWYIPGLKIELCSRDGCSEWLGLCNRIPHDRHEEKCRVKVTLNSNSEDIPSVMFEAGGRNYIHACQEVARIAIGELRDRYSDQLADTEYRYHSRQPQGSDRGSYLETEGIENDATTRHLVEMLWAMDETRAETVLAAQDREDRNRGKICKLEDKVDRLEKELAALKGEAPPQKARICLTARKRALFVPRYQLAPKMHIPSGVVSLKKKEFRSLTQGSRSVTEYLHEFNRLARYAPEDVRTDEEHQEKFLEGLNDELSYPLMTGDYHDFQKLVDKAIRQEDKYNRMEQKKRRIAQFKTQQGNNQRPHLTLGPQSMPQGGYSSVVRPQRQFFNNNAGNNIRNQVPRPVAASTQQQPAKREQGSKPVVCFNCGDPGHYADKCPKPRCVKVVPAQSNSTVSASKARVNHVAAAEAQGAPDVILGTFLVNSVPATVLFDSGATHSFLSMSFAGNHGMEVEDLRCPLMVSTPSNQALSLQRSPSVRIEIQGVPFLANLILLESKDLDVILGMDWLARHKGVIDCANRKVTLTSNDGRVVTVHALSSESLRSILNQITLEEIPIVREYPDVFSDDLPGMPPKRDIEFRIDLVPGTTPIHKRPYRMAANELAEVKRQVDDLLQKGIDDLFDQLKGATVFSKIDLRSGYHQLRIKEEDIPKTAFTTRYGLFECTVMSFGLTNAPAFFMNLMNKVFMEYLDKFVVVFIDDILIYSRTKEEHEEHLRLALEKLREHQLYAKFSKCEFWLSEVKFLGHVISAGGVAVDPSNVESVTNWKQPKTVSEIRSFLGLAGYYRRFIENFSKIAKPMTRLLQKDVKYKWSEECEQSFQELKNRLISAPILILPDPKKGFQVYCDASKLGLGCVLMQDGKVVAYASRQLRPHEKNYPTHDLELAAVVRALKIWRHYLFGTRTEVYTDHKSLKYIFTQPDLNMRQRRWLELIKDYDMGIHYHPGKVNVVADALRRKGYCNATEGRQLPLELCKEFERLNLGIVSRGFVAALEAKPTLIDQIREAQINDPDIQEIKKNMRRGRAIGFLEDEQGTVWLGERICVPDNKDLKDAILKEAHDTLYSIHPGSTKMYQDLKERFWWASMKREIAEYVAVCDVCQRVKAEHQKPAGLLQPLKIPEWKWEEIGMDFITGLPRTSSGHDSIWVIVDRLTKVAHFIPVKTTYSGSRLAELYMARIVCLHGVPKKIVSNRGSQFTSNFWKKLQEEMGSKLNFSTAYHPQTDGQTERVNQILEDMLRACALDFGGSWDKNLPYAEFSYNNSYQASLQMAPYEALYGRKCRTPLLWDQTGERQVFGTDILREAEEKVKIIQERLRVAQSRHKSYADNRRRDLSFDERDYVYLRVTPLRGVHRFHTKGKLAPRFVGPYKIVSRRGEVAY

SEQ ID NO: 20148 - protein, 566 aa, Oryza sativa
  Clone ID: TF_OSC900321j.C1.p1.gm
SLTQGSRSVTEYLHEFNCLARYAPEDVRNDEECQEKFLEGLNDELSYPLMAGDYPDFQKLVDKAIRQEDKYNRMEQKKRRIAQFKTQPGNNQRPRLTLGPQSMPHGGSSSVVRPRRQFFNNNAGNNIRNLAPRPVAVSTQQQPAKREQGSKPVVCFNCGDPGHYADKCPKPRRVKVVPAQSNSTAPASKARINHVAAAEAQDAPDVILVREYPDVFPDDLPERIHQTEFITMGSSGYYRRFIENFSKIAKPMTRLLQKDVKYKWSEESLETKPTLIDQVREAQINDPDIQEIKKNMRRGKAIGFLEDEQGTAPRCLLYPPPPSPSPLVARRALAPCALAPPSPPSLQQCAAAVPDVAVTREGRRRGRQVVAVLVRRFVTVGNRRSIVAVVKPQSAAVPSSSPSPSVVPPFAGELAPSELSSRRAAAAGGDVIADVIVPVSHDDAGRNGRRTTAASGGANHGDTGKSEHTGWLHEKRGDEPMAPIRRRELDGGESRRRQPAAGEGGNDDEVTRGRFPAARASTRLRESDASVGLGGATPSEAGDERVLRSTGGEHMASGGNGRGGAG

SEQ ID NO: 20149 - protein, 417 aa, Oryza sativa
  Clone ID: TF_OSC900373j.C1.p13.fg
MSWQRVGALLLGAQSRLPVPGVPAVGGIGSVLLSMARMGWKLCHVFRLYTVVMFNREKGKNVSRHASSNSSFQLHPPLASRELTRVHPWSIPSMLLGSQLPLVGSQDQNQYVFDRAFATQVNELPMPEEDVPFCQDCREQGHYALNCPWVYTKEAPSFGLAGQASLNQPPRTKSSLQPSVQSREPNEENPLNPGNCFPPSLSYHVGSRTKHAKGKKSKNQKRKAPMRTEEEVRKMTITSTEWPPAGITIPRRQRGNTFRGARQLTQHLLSHGGRVSDSEGSDQVSSDYEYESPRRLGEEEMELKACTRCGEIGHIASMCLTLCPHCEEDHPPGECPTRKVTCFLCEGTNHVPKDCQLSVLLTKTAEIQRTTLRLSHQLVSSNSNLDDIIHSTNAPPAAPDSAINHSNNTFSTNHSLH

SEQ ID NO: 20150 - protein, 2038 aa, Oryza sativa
  Clone ID: TF_OSC900373j.C1.p2.fg
MGLPTLALTQASASLRGFGGESVQVLGQAQLLVAFGTGKNRREEKIMFDVVDIPYNYNAIFGCATFNKFEAISHHNYLKLKMPGPVGVIVVKGLQPSAASKGDLAIINRAVHNVEAEPHDPAKHAPKPAPHGKVIKIQIDDTDPTKLVSLGGDMGEEEVENILEVLKKNIDNFAWGPDEVGSVSTDLIMHHLAVMPDAKPRKQKLRKMSVDLQEAAKAEVQKLLKARVIQEIDHPEWLANPVLVRKSNDKYRMCVDFTNLNKAWPKDDFPLPRIDQLVDSTAGYELMSFLDAYSGYHQIHMNPADIPKTSFITPFGTFCHLRMPFGLRNAGATFARQVYKPCFAVVPVVAVARGDRHRGRHRVAVLVRPFAVAVDRRSIAVVVKPKDPAAFSSTPPPSVHLPPSFWSSIPTFPESPFSQEKNLKSSKATPGLEWYIPGLEIELYSRDGCSEWLGLYNRMPCYKPEYLFGVEGFVQELRTMSFAIGFGTTPFYAQIPHDRHEEKCRVKVTLNSNSEDIPSVMFEAGGRNYIHACQEGSDRGSYLETEGIENDATTKHLVEMLWAMDETRAETVLAAQDREDRNHEKELAALKGEAPPQKARIRLTARKRALFVPRYQLAPKVRVVEKEVTPALANPPVVNMVLTRSNGNGPNNNNNNNNGENPTLAQVLAQQVQLMNIMMQQLQNQQNQGNNHAPPQNKLAEFLHVRPPTFSSTTNPVEAGDWLHAIEKKLDLLQCTDQEKVSFASHQLHGLASEWWDHFRLNRTTTEPITWLEFTAAFRKTHIPSGVVSLKKKEFRSLTQGSRSVTEYLHEFNRLARYAPEDVRTDEERHERFLEGLNDELSYPLMTGDYHDFQKLVDKAIRQEGKYNRMEQKKRRIAQFKAQQGNSQRPRLTLGPQSMRQGGSSSVVRPQRQFFNNNAGNNIRNQAPRPVAASTQQQPAKKEQGSKPVVCFNCGDPGHYADKCPKPRRVKVVPAQSNSTVPASKARVNHVAAAEAQGAPDVILGTFLVNLVPATVLFDSGATHSFLSMSFAGNHGMEVEDLRRPLMVSTPSNQALSLQRSPSVRIEIQGVPFLANLILLESKDLDVILGMDWLARYKGVIDCANRKVTITSNDGRVVTVHALSSEPLRSRLNQITLEEIPIVREYPDVFPDDLPGMPPKRDIEFRIDLVPGTTPIHKRPYRMAANELAEVKRQVDDLLQKGYIRPSSSPWGAPVIFVEKKDHTQRMCVDYRALNDVTIKNKYPLPRIDDLFDQLKGAIVFSKIDLRSGYHQLRIKEEDIPKTAFTTRYGLFECTVMSFGLTNAPAFFINLMNKVFMEYLDKFVVVFIDDILIYSRTKEEHEEHLRLALEKLREHQLYAKFSKCEFWLSEVKFLGHVISAGGVAVDPSNVESITNWKQPKTVSEIRSFLGLAGYYRRFIENFSKIAKPMTRLLQKDVKYKWSEECKQSFQELKNRLISAPILILPDPKKGFQVYCDASQLGLGCVLMQDGKVVAYASRQLRPHEKNYPTHDLELAAVIHALKIWRHYLFGTCIEVYTDHKSLKYIFTQPDLNMRQRRWLELIKDYDMGIQYHPGKANVVADALSRKGYCNATEGRQLPLELCKEFERLNLGIVRRGFVAALEAKPTLIDQVREAQINDPDIQEIKKNMRRGKAIGFLEDEQGTVWLGERICVPDNKDLKDAILKEAHDTLYSIHPGSTKMYQDLEERFWWASMKREIAEYVAVCDVCQRVKAEHQKPAGLLQPLKIPEWKWEEIGMDFITGLPRTSSGHDSIWVTDGQTERVNQILEDMLRACALDFGGSWDRNLPYAEFSYNNSYQASLQMAPYEALYGRKCRTPLLWDQTGERQVFGTDILREAEEKVKIIQERLRVAQSRHKSYADNRRRDLSFDEGDYVYLRVTPLRGVHRFHTKGKLVPHFVGPYKIVNRRGEVAYQLELPQSLAGVHNVFHVSQLKKCLRVPTEEANLEQIEVQEDLTYVQKPIRILEIEERRTRNRVIRFYKVQWSNHSEEESTWEREDELKSAHPHLFASSSESRGRDSV

SEQ ID NO: 20151 - protein, 1687 aa, Oryza sativa
  Clone ID: TF_OSC900382j.C1.p28.gm
MVNTRSNGNGPNNPNNNNNGENPTLAQVLAQQTQLMNMMMQQFQNQQNQGNNHAPPQNKLAEFLRVRPPVFSSTTNPVEASDWLHAIEKKLDLLQCTDQEKVSFASHQLHGPASEWWDHFRLNRTTDEPITWLEFTAAFRKTHIPSGVVSLKKKEFRSLTQGSRSVTEYLHEFNRLARYAPEDVCNDEERQEKFLGGLNDELSYPLMVGDYPDFQKLVDKAIRQEDKYNRMEQKKRRIAQFKTQQGNNQKPRLTLGPQPMSQGGSSSVVRPQRQFFNNNAGNNIRNQAPRPVAAPAQQQPAKREQGSKPVVCFNCGDPGHYADKCPKPRRVKVVPTQNNSAVPASKARVNHVAAAEAQDAPDVILVREYPDVFPDDLPANELAEVKRQVDDLLQKGYIRPSSSPWGAPLKGATVFSKIDLRSGYHQLRIKEEDIPKTAFTTSFLGLAGYYRRFIENFSKIAKPMTRLLQKDVKYKWSEESLEAKPTLIDQVREAQINDPDIQEIKKNMRRGKAIGFLEDEHGTPCAAVVPAVAVAREDRRRHRQVAAVLVRPFAAVGTRRSFVAVDNPKVAAASFSSPSSSVPSPPPFWSPVCSPRCPLRAGALRWCRGAAVRRRVSAARAVFFAEPPPSSVMTNVPSPGASTLAPARDECLETLILTGRGEAVLPPSRIVSERQAGLPRRFMPESATDREIVSLGEGCPAPRYPGRSVFFLPFAMAGLVPPFSSFFMDVLEFYDLQMAHLTPNAVMTLAIFAHLCEMFIGVRPSLRLFRWFFTVQPVSPPSVVGGCYFQPRGPVLNRYIPCVLRKKWDDWKSDWFYTPLADEARLRLPSQPPTQASNWRAPVDLGDGYDAVLDRLAGLRSQGLTGAMVFGDYLRRRIAPLQRRARGAWEYTGSEDCMRTHQGVRWDRAPEDFKIVVQRVLNLSSVEASLIPQGVLPLCSDPDRASILTIMQAVGASEERAPRGHDGAGGSRRGEQSTPGGGRASGPRDGGPGSGRPADARGKRKQEGTPPPSPPRGGGAARASSRRPEGATPTSQPEGERKKKRLRKMGGTEPSRGNLISPPSEIPSRPSRHSKSGQSEAEDPATTEARRRESDRREAADRLREAGEAAQVAVRARQAEEAAREEARLRQAEAATTSEAARDEAAGVSLGPTPSGDAQDKPGPGDIPESGMSIGGPSRAASSPRRLFPTPSVAPLSAEPLLQALAVANTTVLDGLSAQVEALQAERAELDAAWARVEEGRRSVEAMVEVGRKAHRRHVSELEARRKVLGEIAKEVEEERGAALIATTVMNEAQDTLRLQYGSWEAELGKKLDAARGVLDAAAARERRAAETEVASRRREEALEARAMALEERACAVERDLADREAAVAIREVTLAVHEAACAEEESALRLREDALTERERALKEAEAAAQRLADSLSLREAAQEEQARRNLESARAERAALNQRAAELEAQARELDARARSGGAATGDSDLAARLAAAEHTIADLQGALDSSTGEVEALRLAGEIGPSMLRDAVSRLDRAGRQAGLWGGRTVKYAANQGGLAQRLSEMAGTLQRLPEELEGTINSSSRDLARGAVELVLASYQARDPDFSPWTALDEFPPGTEDGARVQVRDAADHIVHSFEGSAPRLAFALNSDEEGDDGGVGDSGDEAGDPGSSPQMARVGASAWGDPHVETGQAGSVVTEGYG

SEQ ID NO: 20152 - protein, 1655 aa, Oryza sativa
  Clone ID: TF_OSC900382j.C1.p32.gm
MVNTRSNWNGPNPPDNNNRGSLVSDRTQQEFLRVRPPVFSSTTNPVEASDWLHAIEKKLDLLQCTDQEKVSFASHQLHGPASEWWDHFRLNRTTDEPITWLEFTAAFRKTHIPSGVVSLKKKEFRSLTQGSRSVTEYLHEFNRLARYAPEDVCNDEERQEKFLGGLNDELSYPLMVGDYPDFQKLVDKAIRQEDKYNRMEQKKRRIAQFKTQQGNNQKPRLTLGPQPMSQGGSSSVVRPQRQFFNNNAGNNIRNQAPRPVAAPAQQQPAKREQGSKPVVCFNCGDPGHYADKCPKPRRVKVVPTQNNSAVPASKARVNHVAAAEAQDAPDVILVREYPDVFPDDLPANELAEVKRQVDDLLQKGYIRPSSSPWGAPLKGATVFSKIDLRSGYHQLRIKEEDIPKTAFTTSFLGLAGYYRRFIENFSKIAKPMTRLLQKDVKYKWSEESLEAKPTLIDQVREAQINDPDIQEIKKNMRRGKAIGFLEDEHGTPCAAVVPAVAVAREDRRRHRQVAAVLVRPFAAVGTRRSFVAVDNPKVAAASFSSPSSSVPSPPPFWSPVCSPRCPLRAGALRWCRGAAVRRRVSAARAVFFAEPPPSSVMTNVPSPGASTLAPARDECLETLILTGRGEAVLPPSRIVSERQAGLPRRFMPESATDREIVSLGEGCPAPRYPGRSVFFLPFAMAGLVPPFSSFFMDVLEFYDLQMAHLTPNAVMTLAIFAHLCEMFIGVRPSLRLFRWFFTVQPVSPPSVVGGCYFQPRGPVLNRYIPCVLRKKWDDWKSDWFYTPLADEARLRLPSQPPTQASNWRAPVDLGDGYDAVLDRLAGLRSQGLTGAMVFGDYLRRRIAPLQRRARGAWEYTGSEDCMRTHQGVRWDRAPEDFKIVVQRVLNLSSVEASLIPQGVLPLCSDPDRASILTIMQAVGASEERAPRGHDGAGGSRRGEQSTPGGGRASGPRDGGPGSGRPADARGKRKQEGTPPPSPPRGGGAARASSRRPEGATPTSQPEGERKKKRLRKMGGTEPSRGNLISPPSEIPSRPSRHSKSGQSEAEDPATTEARRRESDRREAADRLREAGEAAQVAVRARQAEEAAREEARLRQAEAATTSEAARDEAAGVSLGPTPSGDAQDKPGPGDIPESGMSIGGPSRAASSPRRLFPTPSVAPLSAEPLLQALAVANTTVLDGLSAQVEALQAERAELDAAWARVEEGRRSVEAMVEVGRKAHRRHVSELEARRKVLGEIAKEVEEERGAALIATTVMNEAQDTLRLQYGSWEAELGKKLDAARGVLDAAAARERRAAETEVASRRREEALEARAMALEERACAVERDLADREAAVAIREVTLAVHEAACAEEESALRLREDALTERERALKEAEAAAQRLADSLSLREAAQEEQARRNLESARAERAALNQRAAELEAQARELDARARSGGAATGDSDLAARLAAAEHTIADLQGALDSSTGEVEALRLAGEIGPSMLRDAVSRLDRAGRQAGLWGGRTVKYAANQGGLAQRLSEMAGTLQRLPEELEGTINSSSRDLARGAVELVLASYQARDPDFSPWTALDEFPPGTEDGARVQVRDAADHIVHSFEGSAPRLAFALNSDEEGDDGGVGDSGDEAGDPGSSPQMARVGASAWGDPHVETGQAGSVVTEGYG

SEQ ID NO: 20153 - protein, 1742 aa, Oryza sativa
  Clone ID: TF_OSC900394j.C1.p6.fg
MSPLTSSGSSAIPSFPESPFSQKKSLKSSKASKATPGLEWYIPGLEIELCSRGGCSEWLGLYNRMPRYKPEYLFGVEGFVQELRTMSFVIGFGTAPFYAQIPHDRHEEKCRVKVTLNSNSEDIPSVMFEAGGRNYIHACQEVARIAIGELRDRYSDQLADTEYRYHPRQPQGSDRGSYLETEGIENDATTKHLVEMLWAMDESRAETVLAAQDREDRNRGKICKLEDKVDRLEKELAALKGEAPPQKARIRLTARKRALFVPRYQLAPKMVNTRSNGNGPNNPNNNNNGENPTLAQVLAQQTQLMNMMMQQFQNQQNQGNNHAPPQNKLAEFLRVRPPVFSSTTNPVEASDWLHAIEKKLDLLQCTDQEKVSFASHQLHGPASEWWDHFRLNRTTAEPITWLEFTAAFRKTHIPSGVVSLKKKEFRSLTQGSRSVTEYLHEFNRLARYAPEDVRNDEERQEKFLGGLNDELSYPLMVGDYPDFQKLVDKAIRQEDKYNRMEQKKRRIAQFKTQQGNNQKPRLTLGPQPMPQGGSSSVVRPQRHFFNNNAGNNIRNQAPRPVAAPAQQQPAKREQGSKPVVCFNCGDPGHYADKCPKPRRVKVVPAQNNSAVPASKARVNHVAAAEAQDAPDVILGTFLVNSVPATVLFDSGATHSFLSMSFAGNHGMEVEDLRRPLMVSTPSNQALSLQRSPSVRIEIQGVPFLANLILLESKDLDVILGMDWLARHKGVIDCANKKVTLTSYDGRVVTVHALSSESLRSRLNQITLEEIPIVREYPDVFPDDLPGMPPKRDIEFTIDLVPGTTPIHKRPYRMAANELAEVKRQVDDLLQKGYIRPSSSPWGAPVIFVEKKDHTQRMCVDYRALNDVTIKNKYPLPRIDDLFDQLKGATVFSMIDLRSGYHQLRIKEEDIPKTAFTTRYGLFECTVMSFGLTNAPAFFMNLMNKVFMEYLDKFVVVFIDDILIYSRTKEEHEEHLRLALEKLREHQLYAKFSKCEFWLSEVKFLGHVISAGGVAVDPSNVESVTNWKQPKTVSEIRSFLGLAGYYRRFIENFSKIAKPMTRLLQKDVKYKWSEECEQSFQELKSRLISAPILILPDPKKGFQVYCDASKLGLGCVLMQDGKVVAYASRQLRPHEKNYPTHDIELAAVVHALKIWRHYLFGTRTEVYTDHKSLKYIFTQPDLNMRQRRWLELIKDYDMGIHYHPGKANVVADALSRKGYCNATEGRQLPLELCKEFERLNLGIVGRGFVAALEAKPTLIDQVREAQINDPDIQEIKKNMRRGKAIGFLEDEQGTVWLGERICVPDNKDLKDAVLKEAHDTLYSIHPGSTKMYQDLKERFWWASMKREIAEYVAVCDVCQRVKAEHQKPAGLLQPLKIPEWKWEEIGMDFITGLPRTSSGHDSIWVIVDRLTKVAHFIPVKTTYSGSRLAELYMARIVCLHGVPKKIVSDRGSQFTSNFWKKLQEEMGSKLNFSTAYHPQTDGQTERVNQILEDMLRACALDFGGSWDKNLPYAEFSYNNSYQASLQMAPYEALYGRKCRTPLLWDQTGERQVFGTDILREAEEKVKVIQERLRVAQSRHKSYADNRRRDLSFEEGDYVYLRVTPLRGVHRFHTKGKLAPRYVGPYKIVSRRGEVAYQLELPQSLAGVHNVFHVSQLKKCLRVPTEEANLEQIEVQEDLTYVEKPIRILETNERRTRNRVIRFCKLQWSNHSEEESTWEREDELKSAHPHLFASSSESRGRDSV

SEQ ID NO: 20154 - protein, 1600 aa, Oryza sativa
  Clone ID: TF_OSC900403j.C1.p10.fg
MSFVISLTLLTIVNDAIIGNNLISSWFGMMPRYKPEYLFGVEGFVQELRTMSFVIGFETAPFYAQIPHDRHEEKCRVKVTLNSNSEDIPSVMFEAGGRNYNHACQEVARIAIGELRDRYSDQLADTEYRYHPRQPQGSDRGSYLETEGIENDATTRHLVEMLWAMDETRAETVLAAQDREDRNCGKICKLEDKVDRLEKELAALKGEAPPQKARIRLTARKRALFVPRYQLAPKVRVVEKEVTPALADPPVVNMVNTRSNGNGPNNNNNNNNGENPTLAQVLAQQTQLMNMMMQQLQNQQNQGNNHAPPQNKLAEFLRVRPPTFSSTTNPVEAGDWLHAIEKKLDLLQCTDQEKVSFASHQLHGPASEWWDHFRLNRTTAEPITWLEFTAAFRKTHIPSGVVSLKKKEFRSLTQGSRSVTKYLHEFNRLARYAPEDVRNDEERQEKFLEGLNDELSYPLMTGDYPDFQKLVDKAIRQEDKYNRMKQKKRRIAQFKTQQGNNQRPRLTLGPQSMPQGGSSSVVRPQRQFFNNNAGNNIRNQAPRPVAASTQQQPAKREQGSKPVVCFNCGDPGHYADKCPKLRRVKVVPTQRNSTVPASKARVNHVAAAEAQDAPDVILGTFLVNLVPATVLFDSGATHSFLSMSFAGNHGMEVKDLRRPLMVSTPSNQALSLQCSPSVRIEIQGVPFLANLILLESKDLDVILGMDWLARHKGVIDCANRKVTLTSNDGRVVTVHALSPESLRSRLNQITLEEIPVVREYSEVFPDDLPGMPPKRDIEFRIDLVPGTTPIHKRPYRMAANELAEVKRQVDDLLQRGYIRPSSSPWGAPVIFVEKKDHTQRMCVDYRALNDVTIKNKYPLLRIDDLFDQLKGATVFSKIDLRSGYHQLRIKEEDIPKIAFTTRYGLFECTVMSFGLTNAPAFFMNLMNKVFMEYLDKFVVVFIDDILIYSRTKEEHEEHLRLALEKLREHQLYAKFSKCEFWLSEVKFLGHVISAGGVAVDSSNVESVTNWKQPKTVSEIRSFLGLAGYYRRFIENFSKIAKPMTRLLQKDVKYKWSEECEQSFQELKNRLISAPILILPDPKKGFQVYCDASKLGLGCVLMQDGKVVAYASRQLRPHKKNYPTHDLELAAVVHALKIWRHYLFGTRTEVYTDHKSLKYIFTQPDLNMRQRRWLELIKDYDMGIHYHPGKANVVADALSRKGYCNATEGRQLPLELCKEFERLNLGIVSRGFVAALEVKPTLIDQVREAQINDPDIQEIKKNMRRGKAIGFLEDEQGTVWLGERICVPDNKDLKDAILKEAHDTLYSIHPGSTKMYQDLKERFWWASMKREIAEYVATDGQTERVNQILEDMLRACALDFGGSWDKNLPYAEFSYNNSYQASLQMAPYEALYGRKCRTPLLWDQTGERQVFGTNILREAEEKVKIIQERLRVAQSRHKSYADNRHRDLSFEEGDYVYFRVTPFRGVHRFHTKGKLAPRFVGPYKIVSRRGEVAYQLELPQYLAGVHNVFHVSQLKKCLRVPTEEANLEQIEVQEDLTYVEKPIRILEIDERRTRNRVIRFCKVQWSNHSEEESTWEREDELKSAHPHLFASSSESRGRDSV

SEQ ID NO: 20155 - protein, 1634 aa, Oryza sativa
  Clone ID: TF_OSC900406j.C1.p9.fg
MPRYKLEYLFGVEGFVQELRTMSFAIGFGTAPFYAQIPHDRHEEKCRVKVTLNSNSEEIPSVMFEAGGRNYIHACQEVARIAIGELRDRYSDQLADTEYRYHPRQPQGSDRGSYLETEGIENDATTRHLVEMLWAMDEGRAETVLAAQDREDRNRGKICKLEDKVDRLEKELAALKGEAPPQKARIRLTARKRALFVPRYQLAPKMVNTRSNGNGPNNPNNNNNGENPTLAQVLAQQTQLMNMMMQQFQNQQNQGNNYAPPQNKLAEFLRVRPPIFSSTTNPVEAGDWLHAIEKKLDLLQCTDQEKVSFASHQLHGSASEWWDHFRLNRTTAEPITWLEFTAAFRKTHIPSGVVSLKKKEFRSLTQGSRSVTEYLHEFNRLARYAPEDVRNDEERQEKFLGGLNDELSYPLMEDKYNCMEQRKRRIAHFKAQQGSNQKPRLTLGPQSMPQGGSSSVVRPQRQFFNNNAGNNIRNQAPRPVAAPTQQQPAKREQGSKPVVCFNCGDPGHYADKCPKPRRVKVVPAQNNSAVPASKARVNHVAAAEAQDAPDVILGTFPVNSVPATVLFDSGATHSFLSMSFAGNNGMEVEDLRRPLMVSTPSDQALSLQRSPSVRIEIKGVPFLANLILLESKDLDVILGMDWLARHKGVIDCANRKVTLTSNDGRVVTVHALSSESLRSRLNQITLEEIPIVREYSDVFPDDLPGMPPKRDIEFRIDLVPGTTPIHKRPYRMAANELAEVKRQVDDLQQKGYIRPSSSPWGAPVIFVEKKDHTQRMCVDYRALNDVTIKNKYPLPRIDDLFDQLKGATVFSKIDLRSGYHQLRIKEEDIPKTAFTTRYGLFECTVMSFGLTNAPAFFMNLMNKVFMEYLDKFVVVFIDDILIYSRTKEEHEEHLCLALEKLREHQLYAKFSKCEFWLSEVKFLGHVISAGGVAVDPSNVESVTNWKQPKTVSEIRSFLGLAGYYRRFIENFSKIAKPMTRLLQKDVKYKWSEECEQSFQELKSRLISAPILILPDPKKGFQVYCDASKLGLGCVLMQDGKVVAYASRQLRPHEKNYPTHDIELAAVVHALKIWRHYLFGTRTEMYTDHKSLKYIFTQPDLNMRQRRWLELIKDYDMGIHYHPGKANVVADALSRKGYCNATEGRQLPLELCKEFERLNLGIVNRGFVAALEAKPTLIDQVREAQINDPDIQEIKKNMRRGKAIGFLEDEQGTVWLGERICVPDNKDLKDAILKEAHDTLYSMHPGSTKMYQDLKERFWWASMKREIAEYVPVCDVCQRVKAEHQKPAGLLQPLKIPEWKWEEIGMDFITGLPRTSSGHDSIWVIVDRLTKVAHFIPVKTTYSGSRLAELYMARIVCLHGVPKKIVSDRGSQFTSNFWKKLQEEMGSKLNFSTAYHPQTDGQTERVNQILEDMLRACALDFGGSWDKNLPYAEFSYNNSYQASLQMAPYEALYGRKCRTPLLWDQTGERQVFGTDILREAEEKVKIIQERLRVAQSRHKSYADNRRRDLSFEEGDYVYLRVTPFRGVHRFRTKGKLAPRFVGPYKIVSRRGEVAYQLELPQSLAGVHNVFHVSQLKKCLRVPTEEANLEQIGVQEDLTYVEKPIRILETSERRTRNRVIRFYKVQWSNHSEEEST

SEQ ID NO: 20156 - protein, 635 aa, Oryza sativa
  Clone ID: TF_OSC900410j.C1.p5.gm
MPRYKPEYLFGVEGFVQELRTMSFVIGFGTAPFYAQIAHDRHEEKCRVKVTLNSNSEDIPSVMFEAGGRNYIHACQEVARIAIGELRDRYSDQLADTEYRYHPRQPQGSDRGSYLETEGIENDVTTKHLVEMLWAMDESRAETVLAAQDREDWNRGKICKLEDKVDRLEKELAALKGEAPPQKARIRLTARKRALFVPRYQLAPKVRVVEKEVAPAQADPPVIIISSDEEEESKRNNSKIEWVATQVDKDEPSIDLRCLEELETTAEPITWLEFTAAFRKTHIPSGVVSLKKKEFRSLTQGSRSVTEYLHEFNRLARYAPEDVRNDEERQEKFLGGLNDELSYPLMVGDYPDFQKLVDKAIRQEDKYNHMEQKKRRIAHFKAQQGNNQKPRLTLGPQSMPQGGSSSVVRPQRQFFNNNAGNNIRNQAPRPVAAPAQQQPAKREQGSKPVVCFNCGDPGHYADKCPKPRRVKVVPAQNNSAVPASKARVNHVAAAEAQDAPDVIFLVNSVPATVLFDSANELAEVKRQVDDLLQKGYIRPSSSPWGAPPSPSLGKTTVVLAKSSPSSFAPSPSPEITGAASPSSTRRFPPLPPCRRRRPLVFRRPLGHRWYTSDQSKTIRIAVPAVMGGSNNVFRD

SEQ ID NO: 20157 - protein, 953 aa, Oryza sativa
  Clone ID: TF_OSC9341j.C1.p1.fg
FASHQLHGPASEWWDHFRLNRTTAEPITWLEFTAAFRKTHIPSGVVSLKKKEFRSLSQGSRSVTEYLHEFNRLARYAPEDVRNDEERQEKFLGGLNDELSYPLMVGDYPDFQKLVDKAIRQEDKYNRMEQKKRRIAQFKTQQGNNQKPRLTLGPQPMPQGGSSSVVRPQRQFFNNNAGNNIRNLAPRPVAVPAQQQPAKREQGNKPVVCFNCGDPGHYADKCPKPRRVKVVPAQNNSAVPTSKARVNHVAAAEAQDAPDVILGMFLVNSVPATVLFDSGATHSFLSMSFAGNHGMEVEDLRCPLMVSTPSNQALSLQRSPSVRIEIQGVPFLANLILLESKDLDVILGMDWLARHKGVIDCANRKVTLNSYDGRVVTVHALSSESLRSRLNQITLEEIPIVREYPDVFPDDLPGMPPKRDIEFRIDLVPGTTPIHKRPYRMAANELAEVKRQVDDLLQKGYIRPSSSPWGAPVIFVEKKDHTQRMCVDYRALNDVTIKNKYPLPRIDDLFDQLKGATVFSKIDLRSGYHQLRIKEEDIPKTAFTTRYGLFECTVMSFGLTNAPAFFMNLMNKVFMEYLDKFVVVFIDDILIYSRTKEEHEEHLRLALEKLREHQLYAKFSKCEFWLSEVKFLGHIISAGGVAVDPSNVESVTNWKQPKTVSEIRSFLGLAGYYRRFIENFSKIAKPMTRLLQKDVKYKWSEECEQSFQELKSRLISAPILILPDPKKGFQVYCDASKLGLGCVLMQDGKVVAYASRQLRPHEKNYPTHDIELAAVVHALKIWRHYLFGTRTEVYTDHKSLKYIFTQSDLNMRQRRWLELIKDYDMGIHYHPGKANVVADALSRKGYCNATEGRQLPLELCKEFERLNLGIVGRGFVAALEAKPTLIDQVREAQINDPDIQEIKKNMRRGKAIGFLEDEHGTVWLGERICVPDNKDLKDAILKEAHDTLYSIHP

SEQ ID NO: 20158 - protein, 1061 aa, Oryza sativa
  Clone ID: TF_OSC26384j.C1.p3.fg
MGKNQGLEQVMGKLVDMLAKKLSEAPTTSNAVVPHTETMQKIELMQNDIKLEGVKNYLSWSKRALLILKTKGLEEYVTREIKEPESTSNVEWKTWSTTNSSVVAWLLTSLIPAIATTVETISSASEMWKTLTNLYSGEGNVMLMVEAQEKISAMRQGERSVAEYVAELKHLWSDLDHYDPLGRVIEFLKGLNSEFEGRRDAMFHQTTLPTLDEAIAAMAQEELKKKVLPSVTPSSPSATYVVAQSKETRECFNCGEMGHLMRDCRAPRKPSYGRGRFGDRGGARGGRSYAGRGNRGRGYEYRGDHRANVVTLEEGSSGPTNVDVANLVHSTSALIQIGYLTRVHLDMSRISLDRENCLIQERQIGKKLGIGVRRDGLWYLDQKETSEDVCLALMASTSEEEAKFIRTDNGGEYMNNEFSSFLSSEGILHQTSCPDTPPQNGVAERKNRHLLETARSLMYTMNVPKFLWSEAVMTATYLINRTPSRILGMKTPCEMIFGKNKFGVPPKVFGCTCFVRDHRPSIGKLDPRAVKCIFVGYSSCQKGYKCWSPLERRTFVSMDVTFREYVPFYGEKTDLSSLFIDLDDSTSGYDGQQMEGEILGPKGDEQSKKEKLVIGSIPCPIGGPVAQEQEWRKPHEEENLQVYTRRARCPVIQQVEEDNQVEEDVSHEQGSLESGGEDEEVREKGSDMPIAVRKGVRSNAGKKVVNCKWVYTIKQNPDGKVERYKARLVVKGYSQTYGIDYDETFAPVAKMSTLDVKNAFLHGDLQEEGCHTTILAVYVDDMIITWDDSIEIARLKENLSKEFEVKDLGMLSCRPASTPIEQNLKLCAESGDPVNKERYQRLVGRLIYLCHTRPDITYAVSVVSRYMHDPRSGHMDAVYRILRYLKGSPGKGLWFKRSGHLSLEGYCDADWASSLDDRRSTSGYCVFVGGNLVSWRSKKQPVVSRSTAEAEYRAMSVGLSEMLWLRNLLCELKLLKNTCMKLWCDNKSAINIANNPVQHDRTKHIEIDRFFIKEKLDEGMLKLDFVISGEQIADCLTKALGVAECLSMCNKMGMIDIYRPS

SEQ ID NO: 20159 - protein, 1563 aa, Oryza sativa
  Clone ID: TF_OSC400682j.C1.p3.fg
MEKGIIVSILALARGPSTHVYVNNDSNTEGVKLPEKNSQTTWHQSHAPGGRRRRTLAEGASAEVGVLGGGVGRQGEFALLQQLVECCLIKMGENQGLEQVMGKLVDMLAKKFSEVPTTSNAVIPHTETMQKIELMQNDIKLEGVKNYLSWSRRALLILKTKGLEGYVTGEVKEPESASAEWRTWSTTNSLVVAWLLTSLIPAIATTVETISSASEMWKTLTNLYSGEGNVMLMVEAQEKISVLRQGERSIAEYVAELKHLWSDLDHYDPLGLEHPDCIAKMRKWIERRRVIEFLKGLNPEFEGRKDAMFHQTTLPTLDEAIAAMAQDELKRKVLPKATPPSSSPTYAMLQGKETRECFNCGEMGHLMRDCRAPRKPSYGRGRSGDRGGARGGRGYAGRANRGRGYEYRGDHRANVVTLEEGCSGPTNVDVANLVHSISGNSNQAFMSINSSHSNWILDSGASRHVTGMCGEFASYKPYPFTRKETIETADGTSCPVKGEGTVQCTPSITLSSVLYVPSFPVNLISISSLVDHMDCRVSLDRENCLIQERQTGKKLGTGVRRDGLWYLDRKETSEDVCLALMASTSKEEAKVLLLHCRLGHISFETMSKMFPAELSRVNKHKLVCDACEYGKHTRTSYVSRGLRSMLPFMLIHSDVWTSPMVSMSGMKYFVTFIDCYSRMTWLYLMRHKDEVFKCFQNFYAYIKNHFNARVQFIRTDNGGEYINNEFSSFLSSEGILHQTSCPDTPPQNGVAERKNRHLLETARSLMYAMNVPKFLWSEAVMTATYLINRTPSRILGMQTPCEMIFGKNEFVVPPKVFGCTCFVRDHRPSVGKLDPWAVKCIFIGYPSGQKGYKCWSPSERRTFVSMDVTFRESVPFYGEKTDLSSLFVDLDNSTSGHDGQQMEGEILGPKGDEQSKKEKFVVGSIPCPMGGPVAQEQEWRKPHEEENLQVYTRRTRCPVIQQVEEDNQVEKDVSHEQGSLESRGEEEEVREESDLPIAVRKSVRSNAGKPPLRYGFEDQDEGDEENNISNFVSYDSLSSTYKAFVASLDSMEIPKDWREAKQDPRWHQAMLDELEALEKNKTWDLVPFPEGKKVVNCKWVYTVKQNPNGKVERYKARLVAKGYSQTYGIDYDETFAPVAKMSTVRTLISCAANFDWPLHQLDVKNAFLHGDLQEEVYMDIPPGFATSQTEGKVLRLKKSLYGLKQSPRAWFDRFRRAMCAMDYKQCNGDHTVFYHHSGDHITILAVYVDDMIITGNDCLEITRLKQNLSKEFEVKDLGQLKYFLGIEIARSPRGIVLSQRKYALDLLSDTGMLGCRPASTPIDQNHKLCAQSGNPVNKERYQRLVGRLIYLCHTRPDITYAVSMVSRYMHDPRSGHMDAVYRILRYLKGSPGKGLWFKKNGHLEVEGYCDADWASCPDDRRSTSGYCVFVGGNLVSWRSKKQPVVSRSTAEAEYRAMSVSLSELLWLRNLLSELKLSVDTPMKLWCDNKSAINIANNPVQHDRTKHVELDRFFIKEKLDEGVLELEFVTSSGQVADCLTKGLGVKECNRSCDKMGMIDIYHPS

SEQ ID NO: 20160 - protein, 412 aa, Oryza sativa
  Clone ID: TF_OSC400773j.C1.p32.fg
MAHGELKKKVLPSVTPSSPNPTYVVAQSKKIRECFNCGEMGHLMRDCRAPHKPSYGRGRYGDKGGARGGRGHAGRGNRGRGYEYRGDHKANVVTLEEGSSRPTNVDVANLVHSTSHNSNQAFMSINRSLSNWILDSGVSRHVTAALALLEIIDLLLENLILELSNASLYAIHLARRGISVGVHQNDEPFGHDSQQMEGEILGPKGHKLSKKEKFVVGSIPCPMSSPIAQEQEWSKPYEEENLQVYTSITRSPIIQQVEEDNQVVEDVSHDDSILRSYNFSVLSVLPIYSKLIKAGLRIWLYSGDADGRVPVIGSRYCVEALGLHIKRDWQPWYLNRQVAGRFVEYDGMTMVTIRGAGHLVPLNKPEEGLTLIDTFLLGLKLLVTFVGKASQVSSNYIDKIVLNIQRINKGKF

SEQ ID NO: 20161 - protein, 1061 aa, Oryza sativa
  Clone ID: TF_OSC403824j.C1.p5.fg
MGKNQGLEQVMGKLVDMLAKKLSEAPTTSNAVVPHTETMQKIELMQNDIKLEGVKNYLSWSKRALLILKTKGLEEYVTREIKEPESTSNVEWKTWSTTNSSVVAWLLTSLIPAIATTVETISSASEMWKTLTNLYSGEGNVMLMVEAQEKISAMRQGERSVAEYVAELKHLWSDLDHYDPLGRVIEFLKGLNSEFEGRRDAMFHQTTLPTLDEAIAAMAQEELKKKVLPSVTPSSPSATYVVAQSKETRECFNCGEMGHLMRDCRAPRKPSYGRGRFGDRGGARGGRGYAGRGNRGRGYEYRGDHRANVVTLEEGSSGPTNVDVANLVHSTSALIQIGYLTRVHLDMSRISLDRENCLIQERQIGKKLGIGVRRDGLWYLDQKETSEDVCLALMASTSEEEAKFIRTDNGGEYMNNEFSSFLSSEGILHQTSCPDTPPQNGVAERKNRHLLETARSLMYTMNVPKFLWSEAVMTATYLINRTPSRILGMKTPCEMIFGKNKFGVPPKVFGCTCFVRDHRPSIGKLDPRAVKCIFVGYSSCQKGYKCWSPLERRTFVSMDVTFREYVPFYGEKTDLSSLFIDLDDSTSGYDGQQMEGEILGPKGDEQSKKEKLVIGSIPCPIGGPVAQEQEWRKPHEEENLQVYTRRARCPVIQQVEEDNQVEEDVSHEQGSLESGGEDEEVREKGSDMPIAVRKGVRSNAGKKVVNCKWVYTIKQNPDGKVERYKARLVVKGYSQTYGIDYDETFAPVAKMSTLDVKNAFLHGDLQEEGCHTTILAVYVDDMIITWDDSIEIARLKENLSKEFEVKDLGMLSCRPASTPIEQNLKLCAESGDPVNKERYQRLVGRLIYLCHTRPDITYAVSVVSRYMHDPRSGHMDAVYRILRYLKGSPGKGLWFKRSGHLSLEGYCDADWASSLDDRRSTSGYCVFVGGNLVSWRSKKQPVVSRSTAEAEYRAMSVGLSEMLWLRNLLCELKLLKNTCMKLWCDNKSAINIANNPVQHDRTKHIEIDRFFIKEKLDEGMLKLDFVISGEQIADCLTKALGVAECLSMCNKMGMIDIYRPS

SEQ ID NO: 20162 - protein, 1453 aa, Oryza sativa
  Clone ID: TF_OSC422802j.C1.p10.fg
MGENQGLEQVMGKLVDMLAKKFSEAPTTSNAVIPHTETMQKIDLMQNDIKLEGVKNYLSWSRRALLILKTKGLEGYVTGEVKEPESASAEWRTWSTTNSLVVAWLLTSLIPAIATTVETISSASEMWKTLTNLYSGEGNVMLMVEAREKISALRQGERSIAEYVAELKHLWSDLDHYDPLGLEHPDCIAKMRKWIERRRVIEFLKGLNPEFEGRKDAMFHQTTLPTLDEAIAAMAQDELKRKVLPKATPPSSSPTYAMLQGKETRECFNCGEMGHLMRDCRAPRKPSYGRGRSGDRGGARGGRGYAGRANRGRGYEYRGDHRANVVTLEEGCSGPTNVDVANLVHSISGNSNQAFMSINSSHSNWILDSGASRHVTGMCGEFASYKPYPFTRKETIETADGTSCPVKGEGTVQCTPSITLSSVLYIPSFPVNLISISSLVDHMDCRVSLDRENCLIQERQTGKKLGTGIRRDGLWYLDRKETSEDVCLALMASTSKEEAKVLLLHCRLGHISFETMSKMFPAELSRVDKHKLVCDACEYGKHTRTSYVSRGLRSMLPFMLIHSDVWTSPMVSMSGMKYFVTFIDCYSRMTWLYLMRHKDEVFKCFQNFYAYIKNHFNARVQFIKTDNGGEYINNEFSSFLSSEGILHQTSYPDTPPQNGVAERKNRHLLETARSLMYAMNVPKFLWSEAVMTATYLINRTPSRILGMQTPCEMIFGKNEFVVPPKVFGCTCFVRDHRPSVGKLDPRAVKCIFIGYPSGQKGYKCWSPSERRTFVSMDVTFRESVPFYGEKTDLSSLFVDLDNSTSGHDGQQMEGEILGPKGDEQSKKEKFVVGSIPYPMGGPVAQEQEWRKPHEEENLQVYTRRTRCPVIQQVEEDNQVEKDVSHEQGSLESGGEEEEVREESDLPIAVRKSVRSNAGKPPLRYGFEDQDEGDEENNISNFVSYDSLSSTYKAFVASLDSMEIPKDWREAKQDPRWHQAMLDELEALEKNKTWDLVPFPEGKKVVNCKWVYTVKQNPNGKVERYKARLVAKGYSQTYGIDYDETFAPVAKMSTVRTLISCAANFDWPLHQLDVKNAFLHGDLQEEVYMDIPPGFATSQTEGKVLRLKKSLYGLKQSPRAWFDRFRRAMCAMDYKQCNGDHTVFYHHSGDHITILAVYVDDMIITGNDCLEITRLKQNLSKEFEVKDLGQLKYFLGIEIARSPRGIVLSQRKYALDLLSDTESGNPVNKERYQRLVGRLIYLCHTRPDITYAVSMVSRYMHDPRSGHMDAVYRILRYLKGSPGKGLWFKKNGHLEVEGYCDADWASCPDDRRSTSGYCVFVGGNLVSWRSKKQPVVSRSTAEAEYRAMSVSLSELLWLRNLLSELKLSVDTPMKLWCDNKSAINIANNPVQHDRTKHVELDRFFIKEKLDEGVLELEFVTSSGQVADCLTKGLGVKECNRSCDKMGMIDIYHPS

SEQ ID NO: 20163 - protein, 746 aa, Oryza sativa
  Clone ID: TF_OSC401006j.C1.p31.fg
MGPQIERVVDVSVSPPNDKELSSEEEEKCIHLNAQATNVLFSVLSEDVFKTIMPLKDAHLIWTTLKERYDKSKCDDVLFLEEPFEECSTSSPNCEEPQVTTFDDPDNHPTSTLSTHDYIEGNELVSKVDDRPILPLDSNNTDNEIVILHCVVDSCISPSPKYMCEDDMDKCSTSYSTCGTNLLKGEVNEPQWTSEESTSPRCSSSISKDHAFFMGKDGDFEFDHLSKKDITIVIKLMEIIKKQQACLIKKNEEIMSLTKEHKKLKDFRSSLIMRYKKLESEFACATNSIVCVASLEKQNQELKSQLEEITIKYVDLQERHDELLCSHDNLVDSHAMLEVAHEAIITTVKSYEPHVQVDLITCTNTCCSKENLSPSTTCDLDCVGKGEKQMYYGLVCIAQPSQDNREGMVNKLEKGSTVVCTKIHQRDIKSINAHTKGRNQKMIKSSITCFKYKKVGHHVRDCPWKKGNKLSKKDIPRIKCFKCTEAGHFASRSPCTLDEQCKTSSERQTGNKQTEKQYRSKSRLCYNCWAKGHIGKNCPKGNIPKPSLSFDYNLLRNAKNDICATRVICSPHTSPQAIWVPKSLVTNLYGPNVVGDQNVLKFYCGTKGFGKTARFAIKLIYHHAIEPGGSRWIPRRLQEDSLVTRRIKAEGSKLTRTCILKGYPSVQESRVRPQEVHDDQGGLLDQPQSTQVNLPQLTMKNMKNMLPKEDGVNAKPDRVMALQEEHKHYQDVDCDQGVKHVHDEKA

SEQ ID NO: 20164 - protein, 377 aa, Oryza sativa
  Clone ID: TF_OSC27738j.C1.p1.fg
MADNEKGNKVRSQDIGTSSSRVNEAPDTSRVTLVQHLINQNRLLIEILQQHQTPMLNLNQIQPQVQLEAVQALTPQVSMPPASRRTHDDVPPVDPKEASNICFTCDEQVHYARERPQQKRKTPMRTEDEVRKMIITSTEWPPPGMTRRQRRNTFRGAPQLTEHLLANGGRVSDSEDSDQVSSDDEDEMERKACSRCGEIGHVASSCATICVHCEEDHPPDRCPTSRITCFFCEGTDHVPKDCQFSFLLTKKMANQPASSNGEKHQGNTNPRQDYSFSLTPVPGQRNRNEKRKCRVREDICCFNCQGMGHFADKCPKPRNIAAGTSVHATPCNQKLAPQRIVIHASPKQSYSPRCNSSNSNECTTTRCQCSISAPATS

SEQ ID NO: 20165 - protein, 375 aa, Oryza sativa
  Clone ID: TF_OSC15261j.C1.p1.fg
MADNEKGNKVRSQDIGTSSSRVNEAPDTSCVTLVQHLINQNRLLIEILQQHQTPILNLSQIQPQVQLEAVQALTPQVSMPPASRRTHGDVPHVDPKEASNICFMCDEQGHYARERPQQKRKTPMRTEDEVRKMIITSTEWPPPGMTRRQRRNTFRGAPQLTEHLLASGGRVSDSEDSDQVSSDDEDEMERKACSRCGEVGHVASSCATTCVHCEEDHPPDRCPTSRITCFFCEGTDHVPKDCQFSFLLTKKMANQPASSNGEKHQGNTNPRQDYRFSLTPVPGQRNRNEKRKCRVREDICCFNCQGMGHFADKCPKPRNIAAGTSVHATPCNQKLAPQQIVIHASRSSPIARVATALTPASALLSRPGKLPFPER

SEQ ID NO: 20166 - protein, 538 aa, Oryza sativa
  Clone ID: TF_OSC900373j.C1.p11.np
MADNEKGNKVRSQDIGTSSSRVNEAPDTSCVTLVQHLINQNRLLIEILQQHQTPILNLSQIQPQVQLEAVQALTPQVSMPPASRRTHGDVPHVDPKEASNICFMCDEQGHYARERPQQKRKTPMRTEDEVRKMIITSTEWPPPGMTRRQRRNTFRGAPQLTEHLLASGGRVSDSEDSDQVSSDDEEMERKACSRCGEVGHVASSCATTCVHCEEDHPPDRCPTSRITCFFCEGTDHVPKDCQFSFLLTKKMANQPASSNGEKHQGNTNPRQDYRFSLTPVPGQRNRNEKRKCRVREDICCFNCQGMGHFADKCPKPRNIAAGTSVHATPCNQKLAPQQIVIHASRSSPIARVATALTPASALPQGVNAHFQPQPSVDKTEASIGIVPLDVPAQQPRNQVPDGEPEHKKVLSVTTVVPVKEADMPIAKWSLEQMQYQRVKSSTRYQMLHGVKSTSTGYQVDSEDMNHEKFGNGSIIELPQPSLSQPKGAPWSKSGEEKIPSATGGQAKQFRVVKFCWKFVKTQRKKSDKKRRPPNLSSC

SEQ ID NO: 20167 - protein, 394 aa, Oryza sativa
  Clone ID: TF_OSC6672j.C1.p1.fg
MLNLNQIQPQVQLEAVQALTPQVSMPPASRRTHDDVPPVDPKEASNICFTCDEQVHYARERPQQKRKTPMGTEDEVRKMIITSTEWPPPGMTRRQRRNTFRGAPQLTEHLLANGGRVSDSADSDQVSSDDEDEMERKACSRCGEIGHVASSCATICVHCEEGHPPDRLSIQFSADEEDGQPTRQFQRREASRQHQSSPRLQFQPNSSVRTEESNEKRKCRVREDICCFNCQGMGHFADKCPKPRNIAAGMSVHATPCNQKLAPQRIVIHASRSSPIARVATAPIPMNALPQGVNAQFQPQPPADKTEVSICVVPLEVPIQQLRNQVQDEEPECKKVIVCYNCSEEGHYSKNCPQPRQNRPPHFRQFTGSNHANHQVVSGANAVPVKPSASQKQP

SEQ ID NO: 20168 - protein, 1016 aa, Oryza sativa
  Clone ID: TF_OSC415629j.C1.p16.fg
MEPQLTPGAVQAIAEHPDGTGTIQPVLQVVDVRPVTTKNAPPTPKPAERFRMMLSDGVNTQQSMLATALNPLVKDATLRPGTVVQLTDFMCNTIQGKRSNSHSSLYVNMGDSEKVLRKMRFYLCHVSSNEILSLWGSIVSSCPMSTNIQPANMFQLATNLLARIIIVVKLDVLQNDCIVIGNPKHYEPKSLTKEQDPNLQASVAQTNNGTYSGGASMLGPSVAPRAEQAASNSSYGGPYNSAQGMLGSSIGRTVEPGPANVSAVGSYGAISAQNTTNANMMQPTSQLNIMNANTMQPTSQLNTMNANTMQPTSQLSSLNPNQNQRFAAPASGGVFGPPGNAYGQPSRPSYQQPPPVYMNRGPASRNDSATRIIPITALNPYQPKWTIKARVTAKSDIRHWSNARSSGTVFSFDLLDAQGGEIRAQCWKESADKFFGQIEVGRVYLISRGSLKPAQKKYNTLNHDYEITLDIGLSTVEVCSDDDNSIPRLQYNFRQISELENMANETIVDLLGVVTSVSPSATIMRKIGTETRKRSIQLKDLSGRSIEVTLWGNFCDAEGQQLQLQCDSGSNPIIAFKGARVGDFNGKSVSTIGSTQLIINPDFPEVERLRQWYMTEGKTAPCISLSREMLNMGRTDARKTIAQIKDENLGRLEKPDWITVKAAISHVTTESFCYPACPKLLPVGRQCNKKAINNGDGMWHCDRCDESFQNPEYRYMLRFQIQDHTGSTYASAFDEAGEQIFGRKAGELFSIRNVDQDDAQFAEIIEGVRWHLYLFKLKVKEETYNDEQSLKCTAVKVEKLDPSKESNVLLGAIDNLLLDPKGQSDLAPNAGFTDPVGGHGAPTSSNAYAMNTGGVNQFGQQASISAGMSTPLAATRNLQTCSICGANGHSAQICHVGADMDMQETSAGGSSMGNYNSIAGNGSSECYKCKQPGHYARDCPGQSTGGLECFKCKQPGHFSRDCPVQSTGGSECFKCKQPGHFARDCPGQSTGAQHQTYGNNVAASRGYNRQSFVGGY

SEQ ID NO: 20169 - protein, 1756 aa, Oryza sativa
  Clone ID: TF_OSC900135j.C1.p1.fg
MSDLGGKNGENGNEDGASSKGTPSPKGATIPFDYSKLTIPPHNFVSVPSGRAPQFDGTHYAAWKHKMKLHLISLHPSIWKVVCTSVDVPHDDMELTSEQEQLIHRNAQASNAILSALSPEEFNKVDGLEEAKEIWDTLQLAHEGSPAVREAKIELLEGRLGRFVMDDKETPQEMYDRMMILVNKIKGLGSEDMTNHFVVKRLLCAFGPRNPTLVSMIRERKDFKRLTPSDILGRIVSHEMQEEEAREVRQMVKNAAMIKNQEVALKAKQEEESSCEESEDEEMAFIVKRFKHFLRKSGYGKGRKDDDKGKRQSKRACFNCGEYGHFIANCPKSNEAKAKGGKKKPERAHVAEAHMAEVWYSGDEEDPEVKPKPEPKDKVEGEGGVATVAFKSSSSSKERLFNNLSDDDDDSYHYSCFMAQGRKVMTQKPSHTSLDVDSSDEESDNELDDVLKSFSKPAMQHLAKLMRALDSKEQSLERQEELLILEKKRNLTLEESLAKECAKNEQLANELNLANGSLASLTDVNETLQDKFANLDKSHKYLEVQFDILWNSTYKPNVVSNSSNPSTSNGCARCYNVDLNSYATNVDAMQALKKENERLGTLVKYGCMKTYHSKDALYKTITAHPNKDGHGLGLSGGSPVSKRVMVNGKECLMFVREGKAPQASEVTCPFTSQTPESSRKNDRKFLPCKTGSSRHFVRKFRASDKPKGLTGSSGYNARKFQPEGLYYDSYVISKNSEGKVVAYFNGNYNDEYRTCVWVPKALAYSSGGSRWVVDSGCTNHMTGERSMFTSLDEEGGSRANIVFGDDGKGKVMGLGEYILGLSNVSFEKDRVCSACQAGKQVGSPHPIKNIMTTTRPLELLHMDLFGPVAYVSIGGNKYGFVIVDDFSRFTWVYFLHDKSKAQDVFKRFVKKAQNLYVLTIKRVRTDNGGEFKNTQVEEFLDEEGIKHEFSAPYDPPQNGIVERKNRTLIEAARAMLDEYKISDVFWVEAVSTACHAINRLYLHKILKKTSYELLSGKKPNVSYFHVFGSKCFILSKRPRSSKFSPKVDEGFLLGYESNAHAYRVFNKTSGIVEVTRDVTFDESNGSQGEQVVVHVVGDVDPSQAIGTKAIGDIRPVETQDDQEDRDQPPSLTSNSLTSAVSAEPEVLGPIDQNLRTSPGPEVPGSTIRNLRTSGSEDVPTAQVDGINAAGTLEHTDQAQVPPMHHPRIHDSVQRDHPVDNILGDIRKEVTTRSRVASFCQHFSFVSSLEPTRVEDALGDPDWVMAIQEELNNFTRNQVWTLVERPKQNVIGTNWIFRNKQDKHGVVVRNKARLVSQGFTQVEGLDFGETFALVARLESIRILLAYAAHHDFRLFQMDVKSAFLNGPILELVYVEQPLGFEDPKLPNHVYKLHKALYGLKQAPRVWYECLRDFLLKNGFEIGKADTTLFTKKFKSDLFICQIYVDDIIFGSTNASFCEEFSSIMTKRFEMSMMGELTFFLGLQVKQAQEGTFISQTKYVKDILKKFGMEDAKPIKTPMPTNGHLDLDDNGKCVDQKVYRSMVGSLLYLCASRPDIMLSVCMCARFQAEPKECHLIAVKRILKYLVQTPNLGLWYPKGCELLGYSDSDYAGCKVDRKSTAGTCQFLGRSLVSWSSKKQNSIALSTAEAKYVAAGSCCAQLLWMKQTLKDFGYNFTKIPLLCDNESAIKIANNPIQHSRTKHIDIRHHFLRDHETKGDTCLTHVRTKTQLANIFTKPLDEKRFCELWSELNILDSRNIR

SEQ ID NO: 20170 - protein, 1320 aa, Oryza sativa
  Clone ID: TF_OSC400798j.C1.p18.fg
MAGFADALRPDKFTGVHFKRWQIRVTLWLTAMKCFWVSTGKPEGVLTAEQQKQFEEATTLFVGCILSVLGDRLVEVYMHMTDAKELWDALNTKFGATDASNDLYIMEQFHDYKMADNRSVVEQAHEIQTMAKELELLKCVLPDKFVAGCIIAKLPPSWRSFGTALKHKRQEYSVEGLIASLDVEEKAREKDAASKGDGGQSSANVVHKAQNKSKGKYKAQQTTNFKKQKKNNNNPNQDERTCFVCGQIGHLARKCPQRKGMKAPAGQTSKSANVTIGNTGDGSGYGNLPTVFSVNQSTNWWVDTGANVHVCADISLFSSYQVARGSTVLMGNGSHASVHGVGTVDLKFTSGKIVQLKNVQHVPSIDRNLVSGSRLTRDGFKLVFESNKVVVSKHGYFIGKGYECGGLFRFSLSDFCNKSVNHICGSVDDEANVWHSRLCHINFGLMSRLSSMCLIPKFSIVKGSKCHSCVQSKQPRKPHKAAEERNLAPLELLHSDLCEMNGVLTKGGKRYFMTFIDDATRFCYVYLLKTKDEALDYFKIYKAEVENQLDRKIKRLRSDRGGEFFSNEFDLFCEEHGIIHERTPPYSPESNGIAERKNRTLTDLVNAMLDTAGLPKAWWGEALLTSNHVLNRVPNRNKDKTPYEIWIGRKPSLSYLRIWGCLAKVNVPITKKRKLGPKTVDCVFLGYAHHSIAYRFLIVKSEVLDMHVGTIIESRDATFFESFFPMKDTHSGSNQPSEIIPSSITPPEQTEHTHELVSEEDVSEAPRRSKRQRTAKSFGDDFTVYLVDDTPKSISEAYASPDADYWKEAVRSEMDSIIANGTWEVTERPYGCKPVGCKWVFKKKLRPDGTIEKYKARLVAKGYTQKEGEDFFDTYSPVARLTTIRVLLSLAASHGLLVHQMDVKTAFLNGELDEEIYMDQPDGFVVEGQEGKVCKLLKSLYGLKQAPKQWHEKFDKTLISAGFAVNEADKCVYYRHGGGEGVILCLYVDDILIFGTNLEVINEVKSFLSKNFDMKDLGVADVILNIKLIRGENEITLLQSHYVEKILNRFGYIDSKPSPTPYDPSLLLRKNKRIARNQLEYSQIIGSLMYLASATRPDISFAVSKLSRFTSNPGDDHWRALERVMRYLKGTVELGLHYTGYPAVLEGYSDSNWISDVDEIKATSGYVFTLGGGAVSWRSCKQTILTRSTMEAELTALDTATVEAEWLRDLLMDLPVVEKPVPAILMNCDNQTTCEKTIEVCQEIKKLRSYNVGLHPNSEKPGRSLHEGTITKCDRQCIEGDGFETHSILERTHLCELDCWSQSMKILGESSRKLTKDLGV

SEQ ID NO: 20171 - protein, 295 aa, Oryza sativa
  Clone ID: TF_OSC27732j.C1.p1.np
RVFPCLYNSKRLRSVKVLSLVSNLSLPFVFPLSLSKPLQMADNEKGNKVRSQDIGTSSSRVNEAPDTSCAAVVQHLINQNKLLIEILQQHRMPILNPSQMQPQVQLEAVQAFTPQVSAPPTSQKAPHAIPHVDPKEASIICFMCDEQGHYARNCPQQKRKAPMRTEDEVRKMIITSTEWPTPGMTRRQRRNTFRGAPQLTEHLLANGGRVSDSEDSDQVSSDDEGAKSPQGFNQNKIELKACSRCGEIGHVASSCASACVHGEEGHPPDRCPTSRITCFFCEGTDHVPKDCQFSF

SEQ ID NO: 20172 - protein, 444 aa, Oryza sativa
  Clone ID: TF_OSC474j.C1.p1.fg
VHGDKAPVDGKGEAATLAKRADVSGGQECGVVRVEDVQRVETPAAEITNAMKDTKIVKNKDQERGGSEREEEETVAMAGTGSREEALLNPRNQALRPQSQGRPGFEAERGGGGPPKIKCFKCGREGHHQATCPNPPLCYSCHNTGHISAHCPMNLMKRGVKLCGFGIPGHGFYSLQVEISDAEVARAPVRGILTVILGEGSVVKIVTELKHLFVGLNWEWKVKQLNDKEFLINFPFDEVRSKISTCKCFDFETSLIKASVVETGMTEEAVDELVAVWVKIFGIPKIAKTVNWLLHSIAAIVELVGEFETMDGASLRRDGPVRVRVACKDPRELHFSVHVYINKVGYMTKWEPEGYPPYENRQMPPDDDGGDDKDDKNDEELQEDMNLDDEFKNQNSPRGRQLRDADSNQGNRFGAYSAPLHTKGNHMGHRGVVSRSWYLRKVPY

SEQ ID NO: 20173 - protein, 622 aa, Oryza sativa
  Clone ID: TF_OSC411214j.C1.p1.fg
MSWQRVGALLLGAQSCLPVPEVPAVGGIGSVLLFMARMGWELCHVFRPYTVVNKPNIHHNSKRLRSVKVLSLVSNLSLPFAFPLSLSKPLQQMADNEKDNKVRSQDIGTSSPRVNEAPDTSCVTLVQHLINQNRLLIEILQQHQTPILNLSQIQPQVQLEAVQALTPQVSMPPASRRTHGDVPHVDSKEASIICFRCDEQGHYARECPQQKRKTPMRTEDEVRKMIITSTEWPPLGMTKRQRRNTFRGAPQLTEHLLANGGRVSDSEDSDQVSSDDEDEMERKACSRCGEIGHVASSCATTCVHCEEDHPPDRCPTSRITCFFCEGTDHVPKDCQFSFLLTKKMANQPASSNGEKHQGNTNPRQDYSFSLTPVPGQRNQNEKRKCRVREDICCFNCQGMGHFADKCPKPRNIAAGTSVHATPCNQKLAPQRIVIHVSRSSPIARVATAPTPASALPQGVNAQFQPQPSVDKTEASIGIVPLDAPAQQPRNQVQDEEPEREKVIVCYNALTLLCTDGLSKELSSMEEVVSLPDLLQAKRRAINLRRAIPSRRPLFASNSTQKEASPVNNSNMQSYHIITEPIKDDAVTRTMPAISLQNQNEQPRLWFSVRYLSLCSRKFAAIM

SEQ ID NO: 20174 - protein, 860 aa, Oryza sativa
  Clone ID: TF_OSC400055j.C1.p6.gm
MADNEKGNKVRSQDIGTSSSRVNEAPDTSCVTLVQHLINQNRLLIEILQQHQTPILNLSQIQPQVQLEAVQALTPQVSMPPASRRTHGDVPHVDSKEASIICFMCDEQGHYARECPQQKRKTPMRTEDEVRKMIITSTEWPPPGMTKRQRRNTFRGAPQLTEHLLANGGRVSDSEDSDQVSSDDEDEKSPQGFNQNKMEHKACSRCGEIGTDHVPKDCQFSFLLTKKMANQPASSNGEKHQGNTNPRQDYSFSLTPVPGQRNQNEKRKCRVREDICCFNCQGMGHFADKCPKPRNIAASTSVHATPCNQKLAPQRIVIHASRSSPIARVAIAQTPASALPQGVNAQFQPQPPVDKIEANIGIVPLDVPAQQPRNQNWNHPAGATNVQVPTVQQQCKLSEFLKTEPPTFAIAVDPMEASDWLRIVEKKLGLIQCTDQERVVFATHQLVALASEWWDSYEASRPEGHTITWDEFSSVFKRSHVPAGMITLRKREFRYLKQEDLTVTEYLHEFHRLAHYAPEDVENDEDQQEKFLQGLKDEIAVQLLLEEYEDFEKLVDKAIQLESEHNRMKNCKRRIVSIPVFPCGNQRQRTEPLQITGSSIAHQEFPPQEDGPNADNNISNTNDDDDTTNNHASCPISDHSNRACNVNIIHQDVDDSINDGTQNDNPSSCDSEKDSDGDSNYGTTDANVSKDFQPPIPTPSQNDRPQTDSSAKKTLICYNCKELGHYSRDCLQPRQSRPPHYRQFTRSRHPNRIVVTGANAVPVRPRATTVSLAFDEPLEGSLKGSRLKYHIVTRSIHNSWSEEYLVDKVQKVIDRRYQQSDHRGAGAPPPIGCAGVAAFGRALRLPCGARPSAARALGCG

SEQ ID NO: 20175 - protein, 1601 aa, Oryza sativa
  Clone ID: TF_OSC100891j.C1.p11.fg
MSDARSRRSVASSTRRQQDAELAAAEERRRATAQTAAAAARAARLAAAELAAARAEAEAEAAEDAARAAEVEVETLRSSINGSIAGDITADRELEELARGRARERAERWAAAHLHGGGGGPRDRAPADGNPDGRGRAGGSPEPARGPRRRHGSLSPDRRHGHHGVQTVVRDFGPGGGWPTLTKTNYIEWAAVMRVRLQVRHMWEAVRYGDVDYDEDRRALDALIAAVPPEMQFSLSQKRTAKEAWDAIAAARIGSDRARKSTLQALRKEWENLAFKPGEDVDDFALRLNTLLQKMVQYGDDTYDEERAVEKLFRCVPEKYRQIARSIESLLDLSTMSIEEALGRLKVVDGDEPRPLSGPITIGGKLHLTREQWEASQGDRRKGESSSPTGGHKPRKARGGVQLRWARRRAEGGARRGAQGVATGNHKPARDDTCRNCGKLGHWAKDCRQPRRGQAHVARVEEEEPALLLAHASIELPPAAPAAAAFLHLDEPKVLVSLCDGSSNDKADGWYLDTGATHHMTGRREFFTEFDSSVRGTVKFGDASGVEIKGVGSVTFTAKSGEHRLLTGVYYIPALRNSIISVGQLDENGSRVLVEDGLMRIWDRRRRLLAKVTRGTNRLYILSAQVAHPVCLAARRDDEAWQWHERFGHLHFEALKQLSAKEMVRGMPCLDHVEQLCDVCVVTKQRRLPFPQQTSFRAKERLGLVHGDLCGPVTPATPGGRRYFLLLVDDLSRYMWVMVLGSKGEAADAIRHAQAAAEAECGRKLRVLRTDNGGEFTAAEFASYCADEGIQRHYTAPYSPQQNGVVERRNQTVVGMARALLKQRGMPAIFWGEAVVTAAYILNRSPTKALDGRTPYEAWHGRKPAVSHLRVFGCLAFAKELGHIGKLDDRSTPGVFIGYAEGSKAYRILDPETQRVRITRDVVFDEGRGWVWDKAVDDGSTPTYDDFTIEYVHFEGAGGVGSSSSPSVSTPVPEPPPTPTPTHPRATTSTTTSSSSTPPQPVSPHAPAPTATPPGTSTPTPARVERSPVEFVTPLSHDGERIDAYHDGEQLRYRTMEDLLGDQPVPGLVPRNLEAQLHLACDDGEPRSFAEAEKHAAWRAAMQSEMDAVQENRTWELADLPRGHRAITLKWVFKLKRDEAGAIVKHKARLVARGFVQQEGIDYDDAFAPVARMESVRLLLALAAQEGWGVHHMDVKSAFLNGDLKEEVYVHQPPGFVIPGKEGKVLRLHKALYGLRQAPRAWNAKLDSTLKGMGFEQSPHEAAIYRRGNGGNALLVGVYVDDLVITGTKDAEVAAFKEEMKATFQMSDLGPLSFYLGIEVHQDNSGITLRQTAYAKRVVELAGLTDCNPALTPMEERLKLSRDSTAEEVDATQYRRLVGSLRYLTHTRPDLAFSVGYVSRFMQRPTTEHQQAVKRIIRYVAGTLDHGLYYPRCPGKAHFVGYSDSDHAGDIDTSKSTSGILFFLDECLVSWQSIKQQVVALSSCEAEYMAASAASTQALWLARLLSDLLGRDTGAVELRVDSKSALALAKNPVFHERSKHIRVRYHFIRSYLEEGSIKASYINTKDQLADLLTKPLGRIKFLELCSRIGMAQLSHKTAHKT

SEQ ID NO: 20176 - protein, 1357 aa, Oryza sativa
  Clone ID: TF_OSC100891j.C1.p14.gm
MRVRLQVRHMWEAVRYGDVDYDEDRRALDALIAAVPPEMQFSLSQKRTAKEAWDAIAAARIGSDRARKSTLQALRKEWENLAFKPGEDVDDFALRLNTLLQKMVQYGDDTYDEERAVEKLFRCVPEKYRQIARSIESLLDLSTMSIEEALGRLKVVDGDEPRPLSGPITIGGKLHLTREQWEASQGDRRKGESSSPTGGHKPRKARGGVQLRWARRRAEGGARRGAQGVATGNHKPARDDTCRNCGKLGHWAKDCRQPRRGQAHVARVEEEEPALLLAHASIELPPAAPAAAAFLHLDEPKVLVSLCDGSSNDKADGWYLDTGATHHMTGRREFFTEFDSSVRGTVKFGDASGVEIKGVGSVTFTAKSGEHRLLTGVYYIPALRNSIISVGQLDENGSRVLVEDGLMRIWDRRRRLLAKVTRGTNRLYILSAQVAHPVCLAARRDDEAWQWHERFGHLHFEALKQLSAKEMVRGMPCLDHVEQLCDVCVVTKQRRLPFPQQTSFRAKERLGLVHGDLCGPVTPATPGGRRYFLLLVDDLSRYMWVMVLGSKGEAADAIRHAQAAAEAECGRKLRVLRTDNGGEFTAAEFASYCADEGIQRHYTAPYSPQQNGVVERRNQTVVGMARALLKQRGMPAIFWGEAVVTAAYILNRSPTKALDGRTPYEAWHGRKPAVSHLRVFGCLAFAKELGHIGKLDDRSTPGVFIGYAEGSKAYRILDPETQRVRITRDVVFDEGRGQLFFTERVYPSPRASTDSNTNTPSGHDFDYDELFVDTTPAARVERSPVEFVTPLSHDGERIDAYHDGEQLRYRTMEDLLGDQPVPGLVPRNLEAQLHLACDDGEPRSFAEAEKHAAWRAAMQSEMDAVQENRTWELADLPRGHRAITLKWVFKLKRDEAGAIVKHKARLVARGFVQQEGIDYDDAFAPVARMESVRLLLALAAQEGWGVHHMDVKSAFLNGDLKEEVYVHQPPGFVIPGKEGKVLRLHKALYGLRQAPRAWNAKLDSTLKGMGFEQSPHEAAIYRRGNGGNALLVGVYVDDLVITGTKDAEVAAFKEEMKATFQMSDLGPLSFYLGIEVHQDNSGITLRQTAYAKRVVELAGLTDCNPALTPMEERLKLSRDSTAEEVDATQYRRLVGSLRYLTHTRPDLAFSVGYVSRFMQRPTTEHQQAVKRIIRYVAGTLDHGLYYPRCPGKAHFVGYSDSDHAGDIDTSKSTSGILFFLDECLVSWQSIKQQVVALSSCEAEYMAASAASTQALWLARLLSDLLGRDTGAVELRVDSKSALALAKNPVFHERSKHIRVRYHFIRSYLEEGSIKASYINTKDQLADLLTKPLGRIKFLELCSRIGMAQLSHKTAHKT

SEQ ID NO: 20177 - protein, 225 aa, Oryza sativa
  Clone ID: TF_OSC1462j.C1.p1.fg
SPTGGRKPRKARGGVQLRWARRRAEGGARRGAQGVATGNHKPARDDTCRNCGKLGHWAKDCRQPRRGQAHVARVEEEEPALLLAHASIELPPAAPAAAAFLHLDEPKVLVSLCDGSSNDKADGWYLDTGATHHMTGRREFFTEFDSSVRGTVKFGDASGVEIKGVGSVTFTAKSGEHRLLTGVYYIPALRNSIISVGQLDENGSRVLVEDGLMTIRDRRRRLLAK

SEQ ID NO: 20178 - protein, 237 aa, Oryza sativa
  Clone ID: TF_OSC1462j.C1.p1.gp
SPTGGRKPRKARGGVQLRWARRRAEGGARRGAQGVATGNHKPARDDTCRNCGKLGHWAKDCRQPRRGQAHVARVEEEEPALLLAHASIELPPAAPAAAAFLHLDEPKVLVSLCDGSSNDKADGWYLDTGATHHMTGRREFFTEFDSSVRGTVKFGDASGVEIKGVGSVTFTAKSGEHRLLTGVYYIPALRNSIISVGQLDENGSRVLVEDGLMTIRDRRRRLLAKVTRGTNRLYILS
